United States Patent Application Publication US 2004/0214272 A1 - sequence listing, part 12

SEQ ID NO: 47197 - DNA, 2678 bp, Zea mays
  Clone ID: MRT4577_14304C.1
atacctagaggtcccacaacatgtacctggcgcagatctagccgaaccctagcgcagggagcagatctgtaccaaccctaatcctaaggttcctcacacttgcgggccgagtaatttctcgtcttgtttcggctagggagcggggtggcttctccggccaaggctttcacagttttgtgtttgttgaatgtgtttgcaatggagattgaagaacacacagattcactttcaatagaggaacccatcacaaggctcccaccagatattattgaggggatacttctcaggcttccggtaaactctctaatgaggctgcgtcaagtctgcaagcaatggtggaacatggtcagcgtgccccgctttatcaaagaacatgcctatcatgcacccaagcacctcctcctttacttgcctaagttgaatatatctgcatcgctccatccaaagactgccaaaccatgtcttgcaacaatcattaatgaaaagtggtctccattgacatgggcctcatcgcatatggaccctgatgatcacctctttgcatcatgcaacggtttgctttgcttctacaagacatacacactaaagatatctaaccctgcaacaggtcaatgcctgcatctcttgaaacctgacggcatattgttgtacgacttccactatctatacagctttggatttcacccgattactggagaatacaagctcgtgcactttctccgtgagcctcagcgctacaaatcaggacagcctttccatttcgacaccattcaagtgtacacccttggtgaagacaaatggagagctatcagagctcctataccatgctgcatggtgcatcttggagtagtaaatgtggatggagtgatgtattggctaacagaagataaaggaacaagctgtggcatggcagttgtatcgtttgatctcagggaagaaatgtttgccttgattcatcttccagcattggaggtgaaagagacagcctcttgtgccaccatcaaagttgcttactatatgactgagatagatgacaaagtgtgcgtagtgactatgccataccaaagccatgcaccgaggtggcgccgaaacaacgcagagctttcaggcaggactgacatttgggctcttgaaagtgacaagtggttcctgaaatatagcatccagtcaccatctctatctcggtatgttcctcagccatgcttcatccacagggagaagatcatactgcaggacagtgaaagtaatgtgtggtaccatgatttgcgaggcaagaacgtgcagattgagcatgcagatggggcgaagcttttgcaccttggtgactacagattctatgagacacagtcctatttctacaaggagacacttgctcccttgagcatttatgccagagcagccattgttcgtgcaccgcctgagcctcttgctcgttcagttgctttacattagtttctgagaggctcttgcactctgaaggtttggcagcaagtactgacgaatattttaatatggagagtgggtaatggggacggcacacgtatggaatgatccctggttttggagagagtggactagccatccatgccaaggggtgtaaatcctatgaaccaagtgaatcattgagatgattgacacatgcataggcaattggaacgaggcactaaagatgtgaatgaatcttagtaagcccagttcatatggagatggatgatgtctcagtcttgcactatggagtcttttcatgatcaaatcagcctatatttagtccgggaggagttggccactatggaaagcataggaatagatgtgtattcgacagtgagcaactagaggtccatgaagttccccaggaggttgtagacaagggtagtgtttgggtgagggctgatactgtagctttggggcagctaacacatcagtagacagtagtctcaggactcaggaggttaggctgctcaatcttcacaatgggtgcgaatgtaacaaaaaaactaatctgagccatgtatctggatcgttctatcttttaatatagtgtttttaaatatagtgatgtgcagctctcttgcatattcgagaaaaaaatcaagaggagtttgaaaagaaaaacaagtatggagctgtttcatcttcacggggcctttgatcgataaggattcaggagtgctggaagaagatttggagcaagagctgtcgctgtccggcgtctggcggtctgggggagaccagtgattttcctacgcacgcctgccaaaagtgggatggagttgaacgcaaaatgtgttgtttgtcattgggtagatggaggaggacacctcgtttatacgcgcggaggaggtgtagtgcgactgtgcgagttgaatttgtaagaaactcagccgcatgcttgcttggagatacttgagatggaacggaaaactcaggtctcaacagctgtagagaaggtgaggggagggaagcaaacaacctagcttacattgtgatgaaacaaggcagatgagttctggacctctctctctctctctctctctctctctctcaaaaatggtttgccagtatagtctgtgacttaggaagattgtcatgcctgaatcccgatatagaatttctggtgtaattttcacagtaatattgttcacacatgtcgatggttcagctgttttcggtgctactgc

SEQ ID NO: 47198 - DNA, 344 bp, Zea mays
  Clone ID: MRT4577_143050C.1
tcccgggccgacccacgcgtcagggaatgcgtgagggaggcactcagtatcgggattaccaatggtggcaatgtcgatagcgagctctccaaccggtggagagcacagacgatgaattagcttgatgtcttgagcaggacgctgacgttgctcctcaagtatggtacagtcgtctgagcattgatgcttagatgttgatggttttggtgatgtacctcccatcatttgcccctttgttgtgtatagtacctaggtgattgtgcgatgctttgtaatgtcttcctcagctggtcccttatccgtcctactatatttgcctatgtataccccgggtttgatagttt

SEQ ID NO: 47199 - DNA, 494 bp, Zea mays
  Clone ID: MRT4577_143051C.1
ctttgggctgatttatgtgcttggatgtatgtattcagtgctgctattgacttacagcttgacacgcgctctaagcgccgcgcgggtgtgtctctgttgttcattttcgcttcgtagcgccgtgcagcacacggcctcatgattcatatgcatcgtcgtcatcatcgtgcgtcaatcccaactcgacggtagcttatagtcagtcagtatactattcttcgcaagcaacgcgtccactcacacgcgtattgattggaattggaggtgcgtgcatgtcgactcgttatgaagttcatcagcagccaaacgcaatgcaattcgtaggtaaccaagtagggtgtcgtcacacacagtgcaaccaaccgcgtgcacgggcacggcggcctgaccactggacgcgcaactttcgcatgcggttgggtttgcgttaaatgcatggcgattcgcgtaggtctcgcgcgctgacgacgccgcatctcgacaacgacacaact

SEQ ID NO: 47200 - DNA, 537 bp, Zea mays
  Clone ID: MRT4577_143052C.1
ttttttttttttttttttttttttttttttttttttttttttttttttttttttttttttttttttttttttttttttttttttaaaaacgcagaaaaaaacacaaatcccggcctataaatattaaacccggcccgagacggacatgaccgggggcccgttacagaagaacatgaaccccaggggcgaccatgggtcgataagggggggggcagttgacaggatcttatttaaaccccgcttttatatttaaacgactcgggggggcccttttgactttggggcgccatcgcctgaccggttaaattgcagctgcaaaaggagcacccccagctggggccccagttgcaggggttgaaatcccagccccccccctcgggggccgccttaaaacccccggccctggccttgggggtcggcccggcaaggaccctggtcttgatgctgctggcggggggggtctccacgttgggggacatgcagttgcatgagctgccccaggagcaattggagccacaggcgcacttgccggtggtg

SEQ ID NO: 47201 - DNA, 245 bp, Zea mays
  Clone ID: MRT4577_143053C.1
ctgtgcggcgctcgagccggccgggtcagtatcgggtttatcatccttcagcgcaagctgcctcctcctcgtcgtccggtcgcgagaagggatggcggctcgtgattaggctatcggacgctggcagaccgcagaagacacgttccgtctaggagctccaatggcgaaatccaggtcacccgccgcgaggattgccaggctcctcaaggcgggtaagtactccgagcacgtctgcggagccggcc

SEQ ID NO: 47202 - DNA, 265 bp, Zea mays
  Clone ID: MRT4577_143054C.1
aaacatcgggggccaattaatttttggtttcaggagacgcaattggttcaaccaaaattctttttgacacacgttcattagcacaaaaactggcgccaaacattcagagagagattgcaaactgaaaaacttttttttttttttttttacacacacaccacacaataccttttttttggagccagctcggcctttcttattatttttcaaccacccccacaagctggataaaaaaaaattattttcatgggcggcgaacgatgtg

SEQ ID NO: 47203 - DNA, 357 bp, Zea mays
  unsure (1)..(357): unsure at all n locations
  Clone ID: MRT4577_143056C.1
cccgggaggcacaggcccggaanccccgggacagacccacaccgcccggataaacgcccggaccccaacaacaggacgcgggccacacacaaagggaagacgcacccggccacccaggcccaggaccccaccaaaaagcatgcgcggcaaagcgggcaccagcacaagggcaaccacccgaagcagtagacgagcacacacaaaccggcgagaccacagccagggaaagcccacagcacacacgccgaggaaccacagcacaccccagcgggaggcaaccacgaacacccaaagaagcggacataacacgcaacacgcaccacagcgaaccaaggggaaccccagggacgccgggcc

SEQ ID NO: 47204 - DNA, 884 bp, Zea mays
  Clone ID: MRT4577_143057C.1
gtaaatctgaagttcattattaatgaaataattttgatgtcgtgccctgtcaatttacttgtacaatgcagcgattgaaatttgaacatgaagaggggtggagatattgcttcactttttcgaaaacatgaagcaaagaagcttgctacctccccgacatatccttcttcaactccggcagtaaatcaagggcaacctagtaatgaacaggaggaagaaggagtgatcgaagaaaatcataatcatatgccttcttcttcaccaccaccagcatcgcaatcatcagcaccaccggtttatgatatcaatcgtcttccacatgatccaggtgaaagacaacccatctcaaattatcatgttaatgatcatgatgcaattcgaagagcatatgttctgaaaggtcctttgcaaccatatggacatgaatttccaaaaagaaaaattggagatagagaccgcaactttaattttgtgtggttccataattttccttgggttgaatatagtatcaagaatgatgcagtcttttgttttgtgtgctatttattcaaaaataagaaaagtaagggcaagggcacagatgcatttactgtgggtggatggagaaattggaatataggaagcaaatcacttttgaaacatgcgggttctatggcacacaaggcagctcaagagaaatacattggctatatgaatcctaatgcatcaattgataaccaaattgagaagtggagtgatgaggaccttcgtttgtataagataaaacttacttattcaattagatatttccaatatcttttgcatccagggttggcattccgtggacatgatgaaagcaaagagtctagcaacaggggcaatttcattgagcttttgaaatttct

SEQ ID NO: 47205 - DNA, 276 bp, Zea mays
  Clone ID: MRT4577_143058C.1
ttttcgacggaatatcaggtggctggtatggcccccatgccacgaactgccgtgggtcgtgatgatgcgagcgctgtggaggccgcctctgacctggagtactaggacgcgctctgcctgtgcctggtggatttgtctgcagccattccttgatgccgtcgctaccaaatgcaagttcttcttttgtgaacactgcgctgtgaaacaccacttcaacaactacctgctctacgtggtgcgcacacactcgctgggcttcttcatcgacacacacga

SEQ ID NO: 47206 - DNA, 696 bp, Zea mays
  Clone ID: MRT4577_143059C.1
ctcctatgggcgattgggttcctcgaggccggccgggactctttgtctggacttctcggaattctttacccatgctcggatggcgccgccgcagccaacactttgctccgcgccgtggccgccctcgttcccgccttctctctcggaaggaacccttagtaacacatggggtgttacactggtggcctgggatgatgccatggaacgatgtgggactagggcgcaacttggagcttgcgatccccaagccgtcaaacgtctcaacttacatgcaattcaaggtggtctataaacaaggcaaagcaaatttggtggcagatgcactctctagagtgggatatcttatggctaagtaggtggttagtgaagtgcaacctctatggatccaagagattgtaaactcttatgtaacagattcagaagcacatgctttttggttagactttgtgtccacaatcctaatgaccaaggattttggctgcacaagggcattatcaagaagcataagctgatttgggtgggagaaaactctgctctaggaaccaagataattgttgcactacatgatagtgtgcttgggtacactcaggagtctaggctacatatcatcgagttaaaaaattatgtacttggagaggactgcatgaatttattatattattgatattgcaaaaaaaaaaaaaaaaaggggcggcc

SEQ ID NO: 47207 - DNA, 523 bp, Zea mays
  Clone ID: MRT4577_14305C.1
ggccgcttttttttttttttttttccggggtgattctcgttcatatttttttaaaatcttaggaaacacatggcgtattgaggggaccaacatgccgttctgcgggcaccatttccaaaagcagctaacacctactataaaagatggcaccgccaacgaggggttgctgacccaacagggcggggggaatcaaagaaaacggtgtggatgggaaaaaaccaaggtgttggacaaaggcaacgaccaaagggtcagccaccgctggtggattaactaactggagtcggtgacagtacggacgcagcaaagttagccacagtcggttggtggaatggaagcaggtgtcagcatagaggcagcagagttggcacaagttagctcagcaagagctgttgcaatctcttgcaggaactgtcgatgcagagaggtaggggcataaaccacagcgagaggactagatgaaataacatgtttctgttacagatagctggcagagaccaccatggctagtggactggccgct

SEQ ID NO: 47208 - DNA, 809 bp, Zea mays
  unsure (1)..(809): unsure at all n locations
  Clone ID: MRT4577_143060C.1
ctaccgccgcgcgagactgagcctcgcctaggccccgaatggcgacccagcttctgtccaccgtcgcgcaccgcgataccctcccggagggctacacgcggcccgagaacgaccggccgcagctcgccgatgttgtgactgacagcaacatccccctcatcgacctcgcctcgccggacaagcatcgcgtcatcgctgagatagaccaggcttgccgcacctacggcttcttccagatcataaaccatgggatatcagaggagctgctggagaaggtgatggctgtggggcttgagtttttccggctcccgccggaagagaaggccaagctctattctgatgagccatccaaaaagataaggctttctacaagcttcaacgtccgcaaggagacagtgcacaactggcgggactatctgcgccttcattgccacccgttggaggagttcgtgcccgactggccgtccaatcctgaaacgttcaaggagatcatcagcacctactgctgcgaagtccggctgctcggcctccgactcctgggcgcgatctccctgggcctgggcctcgaggaggactacatcgagaatgtgctgggcgagcaggagcagcacatggccgtcaactactacccgcggtgccccgagccggacctcacctacggcctgcccaagcacacggaccccaacgccctcaccattctcctcatggacccccacgtctccggnctgcaggtgctcaaggacggcgcccagtggatcgccgtcgaccccgggccaacgccctcgtcgtcaacctaggcgaccagttac

SEQ ID NO: 47209 - DNA, 500 bp, Zea mays
  Clone ID: MRT4577_143061C.1
cacaccagccttggtttggttctatcactagctatccagcggacacgaagagggcgacagcgcgccggctgtgggttgccgccatggcggtggcgctgctggcggagatgggcgaccgcggcggcgcctaggaagcccgtggacgtgcccctccacaagaacaacacgcccagcggggcgcagcgaccacatacactacatcgacggtggacgggaggagcagctggacctgaacaagtgcaccggcacgggctgccagacgcggggcgcctacctcttcggacacttcagcacgcacatgaacctcgacggcggcgactccgcgggcacccgtcacggacttctacctgtcggcgcataacgtcgagcacgacgagaacgacttcctgttccttgggcaaaccggacgggacagtcctacatgctgcagaccaacgtgttcaccagacagccaggggcgaacagcaagcaagcggatcctacctcctggttgggacccc

SEQ ID NO: 47210 - DNA, 309 bp, Zea mays
  Clone ID: MRT4577_143062C.1
cgtcgccctattttttgaatgggaactgtaagacacgctgttcgtacataaacgggcaacgatacatcatgagtggcagaactaggaattcacaagttaacaggctccttgccttaagaacatgaacagctctgaactgaagcaactcactactacactgatttcccataccagataaaggaaccatacaggaacacaggatcacatatgggaagagctcaggagctgtgcgctaccatacaggttctataggaggggagtgaagagtgacgcatacatgcatcacctacatcatggtggcaaacagat

SEQ ID NO: 47211 - DNA, 663 bp, Zea mays
  Clone ID: MRT4577_143063C.1
agaaccactaaaattagtgttatggttcagaagatatagttttctaaagttttagttgattaaatgataatgatatcttttatgttataaattatgtgagaaacatattacaaataaataactaattcaatatctagtataggttataacttgattagatatcataatttggtcatattataattatagataggttaactttgattagcaagcttaatatactaaacatagattaaacaatgtctaattataaaaatatgggttatgacaaaactgttattgcatagacaatgttattacgaagccatcacaactggaacgggttaaatcagagctaaaacagagaagttatgttttgtctaaaattcctagattaatctttttacacttttaaagattatcaacttatttccctaatttatttattttatttatctgaaaaatggacggcggacactatttctatgaaatccatggtttactctgtgaataccaggacctagttgtaatgattttataaagggataggattgcgagttcgttttcccagaaacgaagggtttcttagaaaaatggcaaggccgacagtggccgccagatgtgagatctacggctcgtttactctacacggtgatgcattacggtccttggatcaaggatccg

SEQ ID NO: 47212 - DNA, 538 bp, Zea mays
  Clone ID: MRT4577_143064C.1
ggtgcctgcttgatcgaggacattgaacgccaatccatccgccgaggtgggacgagcgacgaaagcgttgatgaccctcctgagaacgaggatgatattgttgacacctctccatctacaggatcagcctccattttgaccagaaatcatgtgtgccctacatcaaaaaatacctcaagaatctcactgctgtggtggagacagataaagcggatgagttcaaagagggtgtccagcatgcaaccaagtttctccttagaaagctgaaagacctccaattcttctgtaggtgagcccctgaaggatgatgcgtctgtgtgattcgcctattacaaagatggtgccactagatccgacattcctctatttctctcatgtgcttaaggagatcatgtgctaggcgtgagacgatattaattacccatgttgagtactatctatgtactattattatatccaaaactatagctgccctgtctgaattgacctcaaaaggttttgtttgaagaaaaattgtccccagattgtaatgcttgct

SEQ ID NO: 47213 - DNA, 761 bp, Zea mays
  Clone ID: MRT4577_143065C.1
agcaaggaggataatcaaattccaaggaatggtaatgcatcaattgtttattcatacaactcctatcacctaatgcagtagataagtgataaaagtttttaaaatagcaagaaggtggcaaatgcaccgaggcttgccttggataccactaggttagtgttgttagatgatactcgcttggcgagcatctcccattctggtgctagcttgatgcatccacaagattaatccaccaataccatcttatggttcgctctgatccatgttcttcggctcgcataatcatctagcgtaccggagtttgtgacgtcgcgcagggcccctgcgcagatctgatgagcggcgtcacgggacgagcaggaagacgatgacgtgggcgcatcgagcagggagaaaaccaggatgcaaacgacgacgcgtgtggaccttcaccagcgacagcagggtcagagcgcgtcgatgcagagatgaggatatggccgaggtcggcgctgtgtgaggtcgatgatggaaggagcagggacggccagcttgacatggccatgtgcaacggtggccacggcgagctggagcggtgctgagcggctgggaaggcacgctagggggccgttacggctcgaaggagatcgagctgggagggctgggcgagctccacgtcggcgccatggagaacgagcagagcggcgacaagagagagctaggatagggagtcgagagggtgaggggcgagctgtaggagggagcagccgagcagggaaagc

SEQ ID NO: 47214 - DNA, 923 bp, Zea mays
  Clone ID: MRT4577_143066C.1
ggctgacaacagtcatgtcctatttataactgtgatggaaggagacattaaagtttaagttgacctagttacaaattgaattaggcaacaagcttaaggtctgacaatgcctgaacaatattgatttttaggcgattatggaaaaatagtgtcttggaatactacctcatggacgagaaccggatcaaagaaaataactcgtgaggcaatttcagcttttgctgtgtcacccaacggtgctcttcttgcaattggaacaatagaaggaagcaatttcagcgttgcgtgtcgcccatgctctccttgcaattgctagcatcatcgtagtcgactcaaaagacatgcggacacttgtaacagttaaaaaggctcatcttggtgttgtgactacactgtccttctctcaggattcaagaacattgctgtcaacttcctttgactctactgcaagggtgacgtacgttggttccccgaagagtaatggaacaagtatatggcccatcctactagttatcattcttgcagttttagtgtactactgtatgcagcacaaagaagacattctggcgatgttgccgcgttgagatagatttctgttgagccccaccgctcccctgactgatctactctactggacatattagtagtgttgcttcagagattggacaagttttggacttaggtcaacttcattattttctcaaggatacaacaatacagcaaaaggtgttgagccctttcatgtttgtagtagaaagggtcatgtactcaggttgtccaagttttgtaagttgatgatggccgcaagtgatagtcatctgtgtttatgtttaatcatgccgcacttgtgagttgcaaggagatcgtcccaagagtccaatacagtgagttgcaaggagaaaaaaaaaaaaaaaaaagcggcc

SEQ ID NO: 47215 - DNA, 468 bp, Zea mays
  Clone ID: MRT4577_143067C.1
attcctaaatagagagacatatacgatcatgaaggacgctaagaccgacgcgtccgcagccatggtgatcatactgctggccctggagatcatgaaaaatacaccgaccaccatgcccaaccgctagcctggttatactcaagctcctatgtctccctctaccacgatcttcaacgtgacgatcatgaccaacttccatgcgtcgtacattctcaagacgtgcttcatgactccctgcattcactcctgcttgctcctgcacctttagtgatcagcctctgctacgaaatatataacaactgttgcttgatttgaggccattccacaaatgcacaaatcatacatgcatgtcccggactgaaaggtactggcctgctgttcagcgatactgttaaagtcatgaatgtttatgatgatgcaaagaggctttacttatatccgctttaactacgcgctccacttgaacca

SEQ ID NO: 47216 - DNA, 1239 bp, Zea mays
  Clone ID: MRT4577_143068C.1
gctgcaggtagccccgtattcctacaagcgtcaaataaatgcgttcgtgagctacaagtgaaataatcatcgcgacatacatacctaccaattcatttatcaaactagtcagtaaaaatagcaaaacagctcactgctccaatatctgtctcgaatccgcgggatcggtaatgattttccgatccaggcaatttgtcgagcgcttggggaatatcgtgctgctagcttcgtcttcacccgattcttgggatttcttgatgacgcacggaacgacgacgaccttcgattgaagtcttcgaccgagcatttgataagcgatgcacatgaacctcgcttatttttgcctaacatccgggattcggggtttgacaaggttaagcagggaagaacgaggtttgacaggctcgacggcacgtgaagctatcaccaatgagtagcagacgcgggcgagcagagtaggctagacgccgggcgtcacgggcgagctgaaaaaggattcggcgcgggagctcgatgcgtgtagggaaacttcacgacgcgaagtcacagcaaaggatgacggaacgcgcacgacacaggaaaaactccggcccatgtgcgtggcgagcgcgaaccgatggagtagcatcggccatccatggagaagcaccgggtgtcgaactaaggagcgcgcgatgaaatccgagctgggcgagcgcatggcagggagctcggagataatcgcggtgcgagcaggaaccggccacgcgagcatagggacacggctgcgtgcggcgtgtgcgcagggaaaaacgacgagttgggactgaggaaacgacactagagtactacggcacacgaccatgggagataggtgcgcgcgcacggagcagaagtaggaaccaggagcacgcgaaatccaggacagcttggctgggcgcgcggccaacaggagagctcgagggagctcgactgcgcggcgaccagggagcgattcactggacgagcaaggagccgaggcagggagggagacgcgctggagaagacggtagggcgccgagctagggaaaagaaggccgcggcacgcaagaagcagcacgcgcagagggcgagctgcacgacggggtcgagctcggctgcgtcaccagaggagggacgtcgagggagggagaggccacggtgccggggctaggggcgagcaccaaggagccacgagagagcgccggcagagggaaagttgcgcgcgacagaggaagaatg

SEQ ID NO: 47217 - DNA, 607 bp, Zea mays
  Clone ID: MRT4577_143069C.1
tggactcgaggccgttttttttttttttttttttttgttttttttttttttttttttttttttttttttgtttttttttttttttttttttaacaaaccaatgcacaaataatacgtttaaccccggagcaccctttggacgaaaatggtccaccccctttttattaaatggccaaggcaggggggggggggaacacaggggatgctgagggggagcccccccccggcgacacccggcttggaaagggcttgggcagttggccgggaccatcccggccccgaagcggttcttttggtccaggttgttggggcaccggactatgaaccccccgatttccttaatcctgccgccaaactttacgaacgccgacttttccaggggcttcgccagccacgaggggtccgcgaacgcccccatggactcctcgtggggcaaaggccactaaaggatgtccagcgtctgtacacccttgatggcctggatttggtggggaagatttaccaccagaggcttttccggttgctgtaggaaattttttttttccttgacgggaccccccttctcccccgagatctccttccggaagggcggcccgcacttggggaa

SEQ ID NO: 47218 - DNA, 341 bp, Zea mays
  Clone ID: MRT4577_14306C.1
acgccgggccgacgtgcggcctgcggagcgggcttgcccactcacagacgggcactgcctgcgcagctgggctcctgtcggaagacgccccgcgccatccggcagcttcctccaaggacgggccagcaccgacaaagcaccacatgtggtggatctaactctctccacactgcgcgaggcggcagtcgcgctggcgaggcatgaatcacatggcgggcgacccgcggtaggtctagggggccatcctcaccccctccatgtacgtcgtgctgggcgacacgaccaggcacgaccacatgactcccgtacaccgttgggacggccctgggggcgacggtgcg

SEQ ID NO: 47219 - DNA, 448 bp, Zea mays
  Clone ID: MRT4577_143070C.1
tatttttttttttttttttttgttttttttttttttttttttttttttacccggaggggcaaaaaaacaaaaaatttacggcaaaaaattggcggggggacccccaagggattaacaaaacagagggcttatattgggaggggggggaacaacccctatgcggccaatgtttatcccaaaaagaaaaaaagccttgagagaaaactgggcaccaagtccagggggctgggggttggtgcccccaggtgcccaaaaattaatggggaaaccggggggggccgccgggggtccacccccggaaattaaagcacgagacctgggggggggacacattttcctaaaagggggtataataaagaagggggaaaaaaggggaaaaaattttcctgggggaaattgtaattcgtaaacaatacacccaaaaacaaaacccgaaaaaaaaagaaaa

SEQ ID NO: 47220 - DNA, 393 bp, Zea mays
  Clone ID: MRT4577_143071C.1
ggccaacgaggggttaaacaacttcttgttataatcgcgcaaacagcgaatgtggggtgtaacattctctgttgtgaacaacccaaccatgcacacacaaagcggtctaaaacgactcgagcatgactaatagtaacccacatacaacatgaacttgaccgacaaaagatctcgctgatttaacaagcacgccgctagaaaatcatggacaccaatgaaaactctacaagaactggtgcctcgatgcaccaagcgttataacaaagcatcagtacctgatgacataacgaactacatccacacaacacacatgcaagctgccttcctggccaccaaactagaagcagcaaatactcatgcacaccaaagtactgaacttttaacaaccacaga

SEQ ID NO: 47221 - DNA, 257 bp, Zea mays
  Clone ID: MRT4577_143072C.1
ccggaccggagggccggggtagacccacgcgtacgctaaggcgctcgtttatattatattatacaacgatctcaagaatgctctcgtagaatgatacttgtggaggacatggaggataggtgctaacctatgtggcacatacatggacaatatggggatgatggttctgaggatgacgggtacgattatcttcatctaagacggggcgtacatgagcgaacaaaaaccttccctctacgaaaggcagcagataggga

SEQ ID NO: 47222 - DNA, 410 bp, Zea mays
  Clone ID: MRT4577_143073C.1
acctagccttccgaccacacaagactctccagcaacatcaatggcgaaactatctacctgtagcaacgaaagaaatgaggcacgacgtgttctaatatattcagatatgtcacatgacacagagggtgatgaccagcgcaaaagtgaactcaacaatgaagagttatcgtcgccaccgaatagaataaaacatgaccacactagcaaaggaataccaggtcttgcagaccccaaaaagaaaagctcctagatcgtcatcaacttcatgaaggtatttgcttattgcgcatctatcaagagcaccatcacttttggaccatgaagacttccttatagatatgaaccctatcaagagcaccatcactattggaccataaatactttcctctaaatataaacctactattaga

SEQ ID NO: 47223 - DNA, 2032 bp, Zea mays
  Clone ID: MRT4577_143074C.1
tcgagggcgctggccgggatttgcgccaaaaaacgcaggcatagatcagtggataccactccatcatcctgcttggccccggccggctggtagatcgtcgttccggagtcgtcgactggaataacgaactggcgcagcaggaggccaataatggccaccatgaagctgggttccaagccggagattttcgtcctccaagacctcacatggagatgcacgaccgagctcgagagtgatgtagttgtcgaagtcggagagatgtccttttacctccacaagttcccgctgctgagccggagcggcgtgctgcagcggatgatcagcgagtaccaggctccggcggatggcggcggcatgtgcacgctgcagctggacgacatccccggaggcgccaaggccttcgagctggcggccaagttctgctacgacgtcaagatcgagctcaacgcgctcaacgtggtgtgcctccgctgcgccgccgagtacctgcgcatgacggacgactacgccgagggcaacctcatcacgcaggccgagtgcttcctcgtcgacgtgctcgccaactggaaggactccatcaaggcgctcgagacctgcgagggcgtgctccccactgccgaggacctgcacctcgtctcgcgctgcatcacggcgctggcctccaaggcctgcggctccgacgctgccgcgccagtggtcaggaacgccagcgtcgacaggggcggcggccgggatggactggtggtacgaggacgtgtccttcctcagcctgcccatgttcaagcgcctcatccaggcgatggaggccaagggcatgcgcgacgagagcatcgccggcgccatcatgttctacgccgggcggttcctcccggggctgaagcgcaacaccagcttcagcaacgcgctggccagctacggcgccgacggcagcggcggcgccggcggtggcatgagcagccgcaacatcaccccgcgcgccgccagcgtgtccgctccgtcggagggcgaccagaggtacttcctggaggagatcgtggcgctgctgccgaccaagaagggcgtggcctccaccaagttcctgctgggaatgctgcgcacggcgatgctcctccacgccagcccactgtgccgggagaatctggagcggcggatcggcgcgcagctggaggacgcgtcgctggacgacctgctcgtgcccaacctcggctaccacgtcgagacgctctatgacatcgactgcgtgcagcggatcctggactacttcatgtcgtccacggacgggatcgggaccgggtacacgtcgccgcgccccgtcgacgacggcatctaccgcgccatcgatatatacctcaagtcgcacccgtggctgtcagaatcggagagggagcagctgtgccggctgctgaactgccagaagctgtcgctggaggcgtgcacgcacgcggcgcagaacgagcggctgccgcttcgggtggtggtgcaggtgctcttcttcgagcagctccgcctgcgaacgtccatagccgggtggttcttcgtgtcagacaacgcggcagggggcgacggcgcgcgcccacacgccggcggcgccatcgtccccaagggcaccgcggccatcgcaggctgcccgcaagcagacgccgacagtgacgtagagggcgacgcacccgatgggaaggagaccatcaccgacgtgaaagcgcgggtgtcggacctggagaaggagtgcaagagcatgaagcaggagatccggcggctcgggaagccccggcggtcctggagcctcctcacaaggaagtgcggttttggggccaaggtgcaacaagcgcagactgccatgagcggcaaatagattattttcccacttcatttgtttattaggcaggagcctcgattgcattccctaaggagtcttatcatctatttgctacagtaacagttcctaatctagccctagctcctagtgttatgcaataattacgtgcggatggtttgcacgggatgataataaacgtaacttcagcttcagcac

SEQ ID NO: 47224 - DNA, 2035 bp, Zea mays
  Clone ID: MRT4577_143075C.1
ttgggtacctcgaggccggccgggaaatttccactttcaccttgatctcattatcttcccaggagatgcacgaccgagctcgagagtgatgtagttgtcgaagtcggagagatggccttttacctccacaaggttagtgccgcattgttctcgagtgctgatctcggcttgctccgaatctgaagtgaaccgccgcgcctctcttgggtacgcgcgcagttcccgctgctgagccggagcggcgtgctgcagcggatgatcagcgagtaccaggctccggcggatggcggcggcatgtgtacgctgcagctggacgacatccccggaggcgccaaggccttcgagctggcggccaagttctgctacgacgtcaagatcgagctcaacgcgctcaacgtggtgtgcctccgctgcgccgccgagtacctgcgcatgacggacgactacgccgagggcaacctcatcacgcaggccgagtgcttcctcgtcgacgtgctcgccaactggaaggactccatcaaggcgctcgagacctgcgagggcgtgctccccactgccgaggacctgcacctcgtctcgcgctgcatcacggcgctggcctccaaggcctgcggctccgacgctgccgcgccagtggtcaggaacgccagcgtcgacaaggacgcgctctggaacggcatccggtcgggcgaacgacggtcctccgccgccgcggcggcggcggcggccgggatggactggtggtacgaggacgtgtccttcctcagcctgcccatgttcaagcgcctcatccaggcgatggaggccaagggcatgcgcgacgagagcatcgccggcgccatcatgtccaaacgccgggcggttccctcccggggctgaagcgcaacacagcttcagcaacgcgctggccagctacggcgccgacggcagcggcggcgccggcggtggcatgagcagccgcaacatcaccccgcgcgccgccagcgtgtccgctccgtcggagggcgaccagaggtacttcctggaggagatcgtggcgctgctgccgaccaagaagggcgtggcctccaccaagttcctgctgggaatgctgcgcacggcgatgctcctccacgccagcccactgtgccgggagaatctggagcggcggatcggcgcgcagctggaggacgcgtcgctggacgacctgctcgtgcccaacctcggctaccacgtcgagacgctctatgacatcgactgcgtgcagcggatcctggactacttcatgtcgtccacggacgggatcgggaccgggtacacgtcgccggcgctggcagaggagggtggcggcagcctcgggataccccaaggcgcgacgccgtcgtcgtcgctgtcgccgatcaccatggtggccaagctcatggacggtttcctcgcggaggtggcgccggacaccaacctgaagctgcccaagttccaggcgctcgcggccgtggtgcccgactacgcgcgccccgtcgacgacggcatctaccgcgccatcgatatatacctcaagtcgcacccgtggctgtcagaatcggagagggagcagctgtgccggctgctgaactgccagaagctgtcgctggaggcgtgcacgcacgcggcgcagaacgagcggctgccgcttcgggtggtggtgcaggtgctcttcttcgagcagctccgcctgcgaacgtccatagccgggtggttcttcgtgtcagacaacgcggcagggggcgacggcgcgcgcccacacgccggcggcgccatcgtccccaagggcaccgcggccatcgcaggctgcccgcaagcagacgccgacagtgacgtagagggcgacgcacccgatgggaaggagaccatcaccgacgtgaaagcgcgggtgtcggacctggagaaggagtgcaagagcatgaagcaggagatccggcggctcgggaagccccggcggtcctggagcctcctcacaaggaagtgcggttttggggccaaggtgcaacaagcgcagactgccatgagcggcaaatag

SEQ ID NO: 47225 - DNA, 1835 bp, Zea mays
  Clone ID: MRT4577_143076C.1
attgggaccctcgaggccggccgggattatccgtgcaaccagccaatgagccaaccacccattccaccaccctgcaattccagtccgatttggacattgtcttcgtctccttcatcccctgcccacctgttctgctctgccgccgccgccgctgccgctcccgctgccgcaggaaccctagaccacgctgagcaacccccggcctacacggcgtagctttgcaggaaatggaatacggcgccgtcctcgccgccgcgccgctcgtcgcacggccgaactggctcctcctctcgccgccgccactggcgccgtctattcagattcagaatcgtctttattcgatctcgtcattcccactaaaggctggacctgtaagggcatgcagagctttagcaagcaactacacgcaaacatctgaaacagttgatttggactgggagaacctgggttttgggattgtgcaaactgattatatgtatattgctaagtgcgggacagacgggaatttttctgagggtgaaatggtgccttttggacctatagcgctgagtccatcttctggagtcctaaattatggacagggattgtttgagggcctaaaggcgtataagaaaactgatggatccatcctattatttcgcccagaggaaaatgctgagaggatgcggacaggtgctgagaggatgtgcatgcctgcaccctctgtcgagcagtttattgatgcagtaaaacaaaccgttcttgcaaataagagatggattcctcctactggtaaaggttctctgtatattaggcccttacttatgggaagtggggctgttcttggtcttgcacctgctcctgagtatacattcattatatttgtctctcctgttggaaactactttaaggaaggtttagcaccaataaatttgatagttgaagacaagttccatcgtgctactcctggtggtactgggggtgtgaagaccataggaaattatgcttcggtgttgatggcacagaaaattgcaaaggaaaagggttattctgatgtcctctacttggacgctgttcacaagaagtaccttgaagaagtttcttcatgcaatgtttttgttgtcaaggacaatgttatttctaccccagcaataaaaggaacaatattacctggtatcacaaggaaaagtataattgacgttgctttgagtaaaggcttccaggttgaggagcggcttgtttcagtggatgaactgcttgatgctgatgaggtattctgcacaggaactgctgttgtggtgtctcctgttgggagcattacatatcaagggaaaagagtggaatacggccaccaaggtgttggcgttgtgtcccagcagctgtacacttcactgacgagtcttcagatgggtcaaaccgaggattggatgggctggactgtgcaactgaattagttggccgtggttcgtggatcattcccaacagatgatgggttcgcaagatccaaatctggaggatcacaaccatgtgtacctcttcggttacagttttgtagtgtcttatgcgatggcgtcctgctgtatatttcttagacggtatttaaaccataaaacagtattcgtctgtacgactgtacccttcagttctgtagcatctgccggagacgagtactagttttgttattttctttcttttacaaaccaagaacagttctatagttttattgtagacactggaccatcatatgatctcaatgggtagctttttcctttttatatttaaaaataaacagaattttaattttataaaaaaaaaaaaccctgtagcgagggataattagctctctgtgcgcttaa

SEQ ID NO: 47226 - DNA, 500 bp, Zea mays
  Clone ID: MRT4577_143077C.1
ggggaccagcccgcacaaagggtttatggaaggaaaaacctttaacaagagaacagaggaacccggcccggggatttggaaattgaacagccaaataaactaagcaacgggctcgactcgactaaaacatacgaggaataacacttcgcctcgactcgactcgggttcgcatgaaaaattacacttcgccatttaactggggggaacaatcccaattggttgaaaaaaaaagacaaaccaatgcaatgcatttttattgggggggggggcctcgacaccaaaaaacacccccctttttttggccacgcatggatcaaaccttgatgctgaagctgaggaggaacttgttaaatccaaccttccaaccgccggcgccttttctggcaggggttggataaaaagccttgaatcaccggtgcccttcctgccggggctaaaggttgcccgaaaaaatcggaccccccgggggtggggggggcaccctgagccgaaaccttttg

SEQ ID NO: 47227 - DNA, 367 bp, Zea mays
  Clone ID: MRT4577_143078C.1
gccgggcggcctttttttttttttttttccagtcatgctactttagggccacccaaatttatggcccttgcatggcttatttggggggtaagtggttgaaccatcaaaaaaaaaaccagcctcttagccgggaaagggccctccacttccccctgcttactgccaaaaggcttaaccattggctttaaacccaaaaagggacctggatggtccagaatccaccagccaaaacccggctttataagccaacctcctggcgaattttttgggccttggcattgacttcttaatggcctccaaccttgtgaaaggactgttcaggaaggtattcttactggccttccaaacaccttggaaccttttaaaa

SEQ ID NO: 47228 - DNA, 749 bp, Zea mays
  unsure (1)..(749): unsure at all n locations
  Clone ID: MRT4577_143079C.1
aattcggcacgaggccaccctgcaattccagtccgttctgcacaaggtcttcgtctccttcatcccctgcccacctgttctgctctgccgccgccgccgctgccgctcccgctgccgcaggaaccctagaccacgctgagcaacccccggcctacacggcgtagctttgcaggaaatggaatacggcgccgtcctcgccgccgcgccgctcgtcgcacggccgaactggctcctcctctcgccgccgccactggcgccgtctattcaggtcgtgctgtactgttgttagctttgtgtttgcctgtttggtgcgggacacgtttctggtgtggaagcgtggaatctggtgaggtaattgaccgggaatgggaggaggggactggggaatctcggtacgaggggaatccgaggtgttaaatcatcgaagtggtgagtacttttacgcccacgcgtttaatattctaagctgcaatgcttttttttgctcgtgcagattcagaatcgtctttattcgatctcgtcattcccactaaaggctggacctgtaagggcatgcagagctttagcaagcaactacacgtatgacatttccattatagttatagcatgcctggttggcatttacctgtcattgatactttcttgcaccgaattgccacgggtgtatccatgtnctcgatctagttacgatcttctgatgtcatggcacttactgcttagcaggcaacatctgaacagttgatttgact

SEQ ID NO: 47229 - DNA, 409 bp, Zea mays
  Clone ID: MRT4577_14307C.1
ccacaccgcgaggcgcagacacaggcgttttcgtactcgcctatctccgcgactcaaagcttcttccatttcctaccggcgccgctgcagctccaccccattccgtggacaccatgagggagtgcatctggatccacatgggccaagccgatatccaggtcgaaaacgcgtgctgggagctctactgcctcaagcatggcattcaggctgagggtaaaatgcccggtgacacaaccattgggggtggtgatgatgctttaaacaccttcttgagtgaacactgggctgggaagcacgtccttcaggctgttttgggtgaccttggaccaactgatatgggtgaggggaggactggcacctacccagagctgttacaccctggagatcttatccggggagcgggtggtag

SEQ ID NO: 47230 - DNA, 911 bp, Zea mays
  Clone ID: MRT4577_143080C.1
cggacgcgtgggttttttttttttcgagaggaaaaaaaaagtcatttcataaagattcgtaatctgtgcttgtttacaacaaggcactgcgtgacaacagcatagtagcatagcagacaagaaaggcttggcgccgacaaagacatttgcgccatttctagatctaaatgacttcctgagcttcaattctttggatgatccattactactccatccataccattagtaaaaaaaacgagagaaaaaaagaagatcaccagcgctccacaggattgcaggaaccagcttattgcattgaagacactggcgtacgcatactctccttgcaggcagtttgcgtcatgaactcatcctgcgcagccacttgagcgagttctcgagctcagaatacgccgtcacctcggcgaaactcttggtctggatcgcataatcaaacacctcatacgcgtccgcgacgctgcccgatcggcacagcgccctgacgaaggaggcgtacgctggcgactccagcttcgtcccagccgccgccatggacttgtacacctcgacggccttgtccagcttcttgttcttgcagaggcccatgagcagcgtgctgtaggtgcgctcgttgggctggcaccccttgccctgcatctcctcgagcagcttcagcgccccgagcgcgtcgcccttgacgcacatcccgttcatgagcgaggtgtaggtgacgacgtcggggaggtggccctccgcggccatggcgtccaggaaagccctggccttggcgaccatcccggcgcgcgcgagcccgaagatgagcgtgttgtaggtgacgaggtcggggtccacgccgtcgctcctcatctgccggaacaccctgaggacggccccggggtcgtccgccgcgacgttcgccttcatcagcgagt

SEQ ID NO: 47231 - DNA, 587 bp, Zea mays
  Clone ID: MRT4577_143081C.1
tccaccgcggtggcggccgcccttttttttttttttttttttttttttttttttttgaagggtacagtcgtacagacgaatactgttttatggtttaaataccgtctaagaaattacagcaggacgccatcgcataagacactacaaaactgtaaccgaagaggtacacatggttgtgatcctccagatttggatcttgcgaacccatcatctgttgggaatgatccacgaaccacggccaactaattcagttgcacagtccagcccatccaatcctcggtttgacccatctgaagactcgtcagtgaagtgtacagctgctgggacacaacgccaacaccttggtggccgtattccactcttttcccttgatatgtaatgctcccaacaggagacaccacaacagcagttcctgtgcagaatacctcatcagcatcaagcagttcatccactgaaacaagccgctcctcaacctggaagcctttactcaaagcaacgtcaattatacttttccttgtgataccaggtaatattgttccttttattgctggggtagaaataacattgtccttgacaacaaaaacatt

SEQ ID NO: 47232 - DNA, 421 bp, Zea mays
  unsure (1)..(421): unsure at all n locations
  Clone ID: MRT4577_143082C.1
gggacgcgtgggcgaggataatcnngaaagacttttcaaaatttcttgccaagagagcgaaaagggggaggctggggacaaggacgcatagcgcccccccatatgccatcaacatgaagagaccattgaacataatataaagtaaataagactagttaaaagaataaaaaaaaaaaaatataaataaaaaaaataaaaaaaaaaaaaaaaaaaaaaaaaaaaaaaaaaaaaaaaaaaaaaaaaaaaaaaaaggggggggccgtcttaaaaaacccaagcttactcccccgggcagggaccgacaaagccttctattaggggccccaaaataaattgggggggccgccggttgacacctccaggacgggaaaaacccgggcgttccccnccaaaaanccctgggggaaaatccccctttccc

SEQ ID NO: 47233 - DNA, 586 bp, Zea mays
  unsure (1)..(586): unsure at all n locations
  Clone ID: MRT4577_143083C.1
ctttggttctccctacgcgcgcgcaatcatccttttcctccggcgagcggcgacacactcctctgcgctcaaggcccagctgcacgcacgcgacacgctttataggtatgccgacatcatggtgacctttctctctctctgtctgtcttcttccttggaacagaaccctttttgtcgccgccgtcgcggggatgggtgtcagggtgtgggatacatgacggatgcggacgcggcagatcgatgagtgtcggggcacagctggagcggcggtcgtagatcatggagcaggaggaggaacggggccagccgcctgacgaggagctcgtgtcccggagccagggctccagcacggagccatcgggcggggcgctcagggctggcgacaagccgacaaggacagcgccgcgcccaagtcgcgtcgcgcctcaccgaacagagcgaccttccggtaggtcacgccggcccacggcggatgatgcttcttggatcggtgcgtggngggggagccgacggtgntgccggncctgattagggcgnaggtggttgcggtgcatgaagagaaagacctgattaaggagaaagttgc

SEQ ID NO: 47234 - DNA, 298 bp, Zea mays
  Clone ID: MRT4577_143084C.1
cactaccttcttctccatcggctcctgggaccccgtgaaccattttaagatttaggatcccccacctatcaaagaccagcccatgaaccacaagatggacaagtggaaaaaacacaatgaaaccacgctctattaatcaatcccctcgaagcccacgaacaaccacccaaagagaatacgcatcagcagaagcagagtcagcataacgactatccagaggagaataaaaatctaaaccctacataataacataaccaccgccggatgcatcataaacaacgcccagaccctaaagcta

SEQ ID NO: 47235 - DNA, 290 bp, Zea mays
  Clone ID: MRT4577_143085C.1
gcagctgagcgtggatgacggtggccataagtgacgaatatttgtactttgctctaggttggctggggtgagtacaaaccgattattaacacctgtgcattgatggagcacttgcttgtaaactggttggggcagcagtaagcctgatcacagaatgtccttggctgttttcattcacatattgaggggcctacaaaacagcctggagaagccagggatattttgttatctatattaacaatgaaaacactatcaacgccagagagacatatgaaacggtgtgatgctga

SEQ ID NO: 47236 - DNA, 1840 bp, Zea mays
  Clone ID: MRT4577_143086C.1
ccaagcctgcccgaccgtccgccgcgctcatatctcctttcgtctactccgtccagtcccaactctccaccggcggcaggaggcgccggcgctagcccgtggcgagatgagcggcgggagcgtaagcgccgtgttttatgcggacaagtaccacccgatccaggccggcagcatcgacggcacggacgtcgcgccccacgataacgccgtcctccgcgccctcatctgctctcaggccggcctctacgaccctttcggcgaccccaaggcctccggcgacccccaccgcacggttttcgtcggccgcctctcgcgccagaccgacgacgacacgcttcggaaggcgatgagcaggtacgggagggtgaagagcatgcggttggtgcgtgacattgttacaggtgcttctcgtggttatgcatttgttgagtatgaaactgacagagagatgcatcgtgcctatgaggatgcacaccattcagttattgaaggcagtgaagtgattgttgattactacaggcaacagcttatgcctgggtggataccaaggcggctaggaggggggcttggtggaatgaaagaatctggacagcttcgctttggaggccgagagaggccatttcgtgctcccttgcgacctattccttatgatgaactgaagaagcttgggatcccaccgccacctgaagggcgatatatgacacgttatcaggttccaccaccaccaaggcggaagagcagcaatattgacattgaagattcacctcctgggagaagatccaaggacagagccggggttagtacctacagaaggcaaagaagttctaatgacgatgatgaaacccttctcaagaggaaaagcagccgagacgggctagaagaatcacaaagtcggaggagcgcaagatcatccattaccaaggaggacaacaggtacagcagtcagaggaagtccaaggaacatgacaaaggtcatcgcaagcacagacgaagccaagatccgggcgaagtatctcctccagcagaggaagacggtagctatgaaaggcagagaactttagaagaacctgatcgcagccctgatcggtaccatcaccactggcatcacagggatgatacatatgagagcagacacttgcgccacagggatcatcgcaagcgtagacgaagccaagaaccgggcgaagtatctccaccagaggaagactgtagccatgaaagggagagaacttcagacgaacctggtcgcagccctgatcggtaccatcaccactggcatcaaagggatggtacatatgagagcagacactcacgccacagggatcatcgcaagcgcagacgaagccaagagccaggcgtatctccactagaggaagacagtagctatgaaagggaaagaacttcagacgaacttggtcgcagccctgattggtaccatcaccatcggcatcacagggaggatacatatgagagcagacactctcaccacagggatcgccgacgccatggtgaccggcatcgcaccaagagaagcgagagtcgagattacagggactaggcaactctcactcgcaccacagggatccccgacgccatggtgaccggcatcacaccaagagaagtgagggtcgagattacactctccagtttcctagactacaatgtttcattatgtaaacttgattgtttttcgtactccttgatctagtaaggtttactgttgccctgtagtctctttcatgagaatgtattcctgtaccgaattttatatgtttggttttgttgttgacacaccttaaaaaaaaaaaaaaaaaaaaaaaactcgagagtcttctagagc

SEQ ID NO: 47237 - DNA, 536 bp, Zea mays
  Clone ID: MRT4577_143087C.1
ggtggaatgaaagaactggacagcttcgctttggaggccgagagaggccatttcgtgctcccttgtatgatcacatgatgcccatctagtgtatccagtattttgcctagataattcatgataattgatgataatgtgctttggagttaaaagtttttgtcatatctttttgtacaaaacaggcgacctattccttatgatgaactgaagaagcttgggatcccaccgccacctgaagggcgatatatgacacgttatcaggttccaccaccaccaaggcggaagagcagcaatattgacattgaagattcacctcctgggagaagatccaaggacagagccggggttagtacctacagaaggcaaagaagttctaatgacgatgatgaaacccttctcaagaggaaaagcagccgagacgggctagaagaatcacaaagtcggaggagcgcaagatcatccattaccaaggaggacaacaggtacagcagtcagaggaagtccaaggaacatgacaaaggtcatcgcaagcacag

SEQ ID NO: 47238 - DNA, 559 bp, Zea mays
  Clone ID: MRT4577_143088C.1
attctctcctgtcatctagtctaggagtaaataaatagagataaaggtgtgtcaacaacaaaaccaaacatataaaattcggtacaggaatacattctcatgaaagagactacagggcaacagtaaaccttactagatcaaggagtacgaaaaacaatcaagtttacataatgaaacattgtagtctaggaaactggagagtgtaatctcgaccctcacttctcttggtgtgatgccggtcaccatggcgtcggggatccctgtggtgcgagtgagagttgcctagtccctgtaatctcgactctcgcttctcttggtgcgatgccggtcaccatggcgtcggcgatccctgtggtgagagtgtctgctctcatatgtatcctccctgtgatgccgatggtgatggtaccaatcagggctgcgaccaagttcgtctgaagttctttccctttcatagctactgtcttcctctagtggagatacgcctggctcttggcttcgtctgcgcttgcgatgatccctgtggcgtggagtgtctgctctcatatgtaccatccct

SEQ ID NO: 47239 - DNA, 206 bp, Zea mays
  Clone ID: MRT4577_143089C.1
cggtgacgacgaccgggcgagcggaggactcttgctactggaccaggtgcctgacgcttggccgggctctcatccggccacgagcatacacggcctcgcaaagccacctccgagctgtacccgagaggcacgatacccatgtgccttaccagagacgcttgacgagatggcctccaacggaaccctctgaccagagctcgatatcc

SEQ ID NO: 47240 - DNA, 332 bp, Zea mays
  Clone ID: MRT4577_14308C.1
aggagcatgtgtctatacttggggtacgctgttcataatttggtatatatgcgattctgttattgggtactatttgtcatacataccataattaaaatggcagtgatgggctttcaaaagaaaggacttaccatgccgaccctatacatggacgccgaccatgagaaggtaacctgatgaactgataaccaaataggcgaccgttataggagctccaaggatagggtccctacattcatagctgatgattggcccacaagggcttgtaaatccatttcaatgcctgtggctgtcaaggagcttgactgtaaaaaacattcttgaaccgaact

SEQ ID NO: 47241 - DNA, 708 bp, Zea mays
  unsure (1)..(708): unsure at all n locations
  Clone ID: MRT4577_143090C.1
ccggccggggtcgatttgaaaaagagaagccgagtcggcgcctcgccgtcggcactagaagtagaaggcagccaccgccgtcacgcccgaggacagtgacgacccccctccaccttcttccctctccagtccccacgcagtcttcttctttgtatcgccgcttcccatagttactaactatcctcctccatcacgcttcctcagattaagcgaggcgagcagcgaccgcaaggaactgcaggtgtgtgctgccggacagatccactggatctggcgcgtcgacgaccgacgtcgggagaacagccgctgatgccaaaggaaagcaacaacggaagggtgcacgaagaagaaattaaaagcctatgttgtcttcttcgtgagactcaccgctaatgcagttttttggtgctgcctaaaggaatggaaagcctgtgttgtacgctgacgctgcccatggtgccagactccttttgctcaggaaggctcgatatgatgtacgacttactgatctactactattacaatatttgcttttttttgttctcagctgagctatgtgaatcatgtgtgctaccaacagagtttagttcctactcccgaaaaaatctaaaaaaaagctctgctctgttctgtgtcatctcctttttatctgttcaattcaggaaaccgtttttgtttggttgaaaaaaaaaaaanaaaaggccccta

SEQ ID NO: 47242 - DNA, 225 bp, Zea mays
  Clone ID: MRT4577_143091C.1
cccactcgtcctgtacatcttacaaaaacaggtcatcataactaacggcgtgactgttacttttcattttgactaccacaacactcataacttacacattttccactcaaacactataactataacaaaaatcttaattgaagtttgctgtgaaagccactacaccattcctggaaaaaacattaaaaacatacatttaaataaccgtattcccaacaaccttat

SEQ ID NO: 47243 - DNA, 230 bp, Zea mays
  Clone ID: MRT4577_143092C.1
tccacgccttcgccaaaaccttccaactaatgctaacctctaggccatccctacggcagggggcccactcgattaactcaaaccctaaaagaacttgcccacggccatgcactccattcttctctgaactgaactcacctctcaaaccatgctccccttcattcactaccacacctactcgattggacataatacctaccacttcgacatcaatattaccaaccctcata

SEQ ID NO: 47244 - DNA, 424 bp, Zea mays
  Clone ID: MRT4577_143093C.1
cgaataatgagttgacatgccatcgcgtgtgactcattattaacaataaaacaagtttcctcttattatctttttataaaaaaaaaaaaaaaaaaaaaaaaaaaaaaaaaaaaaaaaaaaaaaaaaataaaaaaaaaaaaaaaaggaaaggggagaaaaaaaacaaaaaaaaaaaaaaaaaaaactttgcacatgcccggtgggccactttaatgggggaaaaccaacccccgggggcccgcatcttggggaaccaattggctccccaaactaggggaatttttggccaaacgggtttccttggtgaaatttttttcctgtcacacttccccaaacctatactttcccccggccaaaaatgtaaagcccggggtgcctaaggagggatctacctaaaataacttgcggggggcccactgcccac

SEQ ID NO: 47245 - DNA, 330 bp, Zea mays
  Clone ID: MRT4577_143094C.1
catgaatcggggtacaaacttaaagggggcgcatcctaaaagaaaaacaaattctttggcacattgtgatttaccttaatagatcctttacctaacttgggggggggggaccaaccagccttgtggggtttttctttatgaggccgaaatcaaactccgggccaaacaggtcccttctggtgggggggcccttattgatcatctttggcctttcaagagaaagaccccattccgttacaataacaaattatggcaatccatgggaaggaacatttctggcctgtacatgcctttattacacaacccccgccctttttttgaaaacattat

SEQ ID NO: 47246 - DNA, 420 bp, Zea mays
  Clone ID: MRT4577_143095C.1
ttcttcttttttttggcaggcacaagcaaccaggcgggcctgttttatctgtgcttgcattacatataataaaaacacagacatagggcttcgacatttagacacacatgactaggggatatatgggagcggaacacacaatttggactcttgcagaacacggggtttgtgccaggcatcacatctatatctattgccggcgcctcaaagaaccatatccaggatggccatgcccgctggaaattcttcagaggcttgggagcaaacccagcctgcagggtcggaacttgggccgatgcgagacggggaaaaaatgataccctgcgcctatgtgataggtctggacaggggaaccagcaactggacaaggacgaattgaggcttcctgggtaaaggcaggctagttggtgaccaaatgcg

SEQ ID NO: 47247 - DNA, 1966 bp, Zea mays
  Clone ID: MRT4577_143096C.1
gtcgagtcaaagcagagagtgggagcaacaaggtgagttccattccatcccatccatcagccatgtcgcagctggcgcctctgcccaaggtggtgatgggttcgctggcgttcggcgtgttctggatgctggcggtgttcccctcggtgccgttcctgccgatcgggcgcacggcgggggcgctgctgggcgcggtgctgatgatcgtgttccacgtgatcagcgccgacgacgcgtacgcctccatcgacctcccgatcctgggcctgctgttcgccaccatggtggtgggcggctacctcaagggcgccggcatgttcaagcacctgggcaagctgctggcgtggcggagccagggcgggcgcgaccttctgtgccgcgtctgcgtcgtcaccgcgctcgccagcgcgctcttcaccaacgacacctgctgcgtcgtgctcaccgagttcgtgctggagctggccgccgagcgcaacctccccgccaagccattcctgctggcgctcgccaccagcgccaacatcggctccagcgccacgcccatcggcaacccgcagaacctggtcatcgccttcaacagcaagatcaccttcctcagcttcttcttcggcatcctgcccgccatgctggccgggatgggcgtcaacacggtcatgctgctctgcatgtactggaacgacctcgagggcgccgccgcatgcggcagccccggtgatgagaaggagatggaggccatcgaggaagggcggtcgccggcctcggtgctctcgctcaagagtagccccgccgccgccgccgcccagcacgtcgccctgcgccagcgccagaacggccgcggccacgacgcggacgatgacgaccccgactccatgatgtcagagaacatcccgacaaagcaccggtggttcatgcagtgctcggagcaccggcgtaagctgttcctcaagagcttcgcgtacgtcgtcaccgttggcatgctcgtggcatacatgctcggcctcaacatgtcgtggaccgccattaccaccgccatcccacgcgtccgcgttgacttccgcgacgccgagccgtgcctcgacaaggtgtcctactcgctactggtcttcttctcggggatgttcgtgacggtgagtgggttcaacaagacggggctgccaggggccatctggaacttcatggcgccctacgcaaagatcaaccacgtcagcggcgtcaccgtgctctccctcatcatcctgctcctctccaatctcgcgtccaacgtgccaactgtgctgctgatgggggacgaggtggcggcctctgcggcgacgatctctgcgtcggcggtgacgcggtcgtggctgctgctggcgtgggtgagtacggtggcgggcaacctgtcgctcctggggtcggcggcgaacctgatcgtgtgcgagcaggcgcgccgcgcgccgcgcaacgcgcacgacctcagcttctggagccacgtcgtgttcggcgtcccttccacgctcgtcgtcaccgccatcggcataccgctcatcggcaagatcgccttctagcctgctgccagtgtatgctgctaatagtgtactgattaatcagctagcagctagcgtcgttccgatgtatccacatgcatgcatggacgaggattcagcaactacaaacgtcgtcgtcgcgtggcatggcgactggtgctggtgtggtcgacggggcaagctaggcaagcaattaagcgcccctactacacactcgtgatttgcatgtttttttaagtctcagctatatctatatttatatctatatttgctgtatagctttgtcatatgctcaatctgggacgacgacgactgtgccgtaaggtcgatcgttaacagggattgcattgcgttaattgtcagatgttaagaaatgtgcaactaatgcgacaattaattaagcagcggatgctgaacgaagaacagttggccttgtt

SEQ ID NO: 47248 - DNA, 743 bp, Zea mays
  Clone ID: MRT4577_143097C.1
ggccgcttttttttttttttttttattaccaaattttacaggttacaaaaattttacattattttatcggagtgattacaaaagtataagtttgaaatatatgctagctcaagtgatcatcctcaataagaagataaagacggggtatacttatataagaaggccgagcccaccggcacttaacaccatcacaacagcacaaggttagaacctgagtaacactaggttagtgtttgttaggcgaccacttggcgagtatcctttggcttggcactcattcagattatccatcttccggttcatccatcagtgcggagtagtccgtgcttagggtcaacttggcttgtcttccgcatcgcgcgattatttatcgtacctcatgagatgcatgatgcacatgtatgagcacgagtataatatatataatctacactaaaaaggatgaaacacttaaaaccaaacattaagcaccatggatatcacaacagggcatcgactacatccattgacataataacactagaatatctatttttattcctagctttttattaactctttaaactgtgtatcttaattacttgatttacctatttatctaaatcgaacatcacaatatgcgtatactaaattaataacaatcatcgcgactaataattctattaatctatttatagatctagttgacagaaaaacgaatcaacttaccctgactaattcgacgcgatagtcgcaagcacgac

SEQ ID NO: 47249 - DNA, 380 bp, Zea mays
  Clone ID: MRT4577_143098C.1
acgtaaccaccgacagagctcgcaccatgactaggaccaccactaccagcacgctgctggcagcggctctgctctgcctcgcgctggcgatggtacccggggccacagacaataaggcggaacagccacatgaagggcgacaacactgcgcgcctgcgcggctcgagctggccggcccagtcgtccgtgccgctggcggacgctgcaacagatgacagaacgttcagccacgcggcatggccgcccgtgtggcgcagcaaggaggacgaccacgtggacaagctgcccgggcagccgactggcgtggacttggagcagtacgcctgctacgtgacgtgtagacgccgaggccgagcgcgcgctgttctactacctgaccg

SEQ ID NO: 47250 - DNA, 401 bp, Zea mays
  Clone ID: MRT4577_143099C.1
ggggataattaaacccacccaaaacattgattgacaatgattaaaatagcccagtttgatacatttttttatcaggtggcatcatcatcatatacctaatttacaggttgacattacataccatggttatgggacacacacacaggacagggcattttcattaccactagaccagggatgggaaggacgatactaaaaaattttttaattaaagacccaaacccaggactgttttgacaaaatgcgggaccaccatgccagttgccacacagtacgacaattaggtcaattaggccccccaaacggggatcccctgcattatgcacttgaactcgttgaaatccacccggcccttttttttggggtcgacgttgaaaattattttccggacgttggccatt

SEQ ID NO: 47251 - DNA, 271 bp, Zea mays
  Clone ID: MRT4577_14309C.1
ggaatgtaaagtgttgtattgataatagatggggttacaatatatagagacacaggaaaccctaaccctaatgggccggcagcccaacaatggtgccgacccacacacactcacacacacatagtctaacagcagggagttcggttcgcctgacccacctaacaaaaaatgaggaatacaccatagcccaagataacatccatagttaacctcaatctgagcaaagtgctctgtataacatgttaactcttaaacatgtcagatgtgcgac

SEQ ID NO: 47252 - DNA, 180 bp, Zea mays
  Clone ID: MRT4577_1430C.1
cgacccacgcgtacggacaacctcacacctcactgtttatagctttttgtctctccttccccactcggggaaatgggacctgaacatacagtccgcgcaaactgctatgccctctctgtctattcgcgtccacttcttgtggcctatgctttgtaccggcgcatccgtgctcgatgcgac

SEQ ID NO: 47253 - DNA, 182 bp, Zea mays
  Clone ID: MRT4577_143100C.1
ggccccgggaataaacatttatttagccattcccaattttttggcaaggggaagagttgccccaaatttccagagacagggtacattgttccctaattcaaacgattctacaattcaagcctttttttaaaggggacccctattaaaatcacaggcctttacttgttattttggccccgtgg

SEQ ID NO: 47254 - DNA, 280 bp, Zea mays
  Clone ID: MRT4577_143101C.1
aaacggggggagccaccgggtttttgtttaatacaacaaccgccgagtaaactgaccgctgcttctttttttttacattacccccactggttgagtaacgcaagggacccacccggcctttcttggtttgccctaccatcaccagccccgaaccgaaccctaaccaagcagttaattaaaacataacaccagcttttaacaccaaaaaatctcacaggttgctccaccgccataacggggggccccattggaccgcgaagctaaaccacaaaacccctct

SEQ ID NO: 47255 - DNA, 364 bp, Zea mays
  Clone ID: MRT4577_143102C.1
gctaggccgacactggctctagctagtcgctctactagagggccattatagagctgactgcaatccgccgctgagaagggacgatcggctgcgaccacactggtcgtgagctacagtctgtctgtcggcggtcgtacactgtctgatgctggcatgccccgttcatggctatcactgataccagtacacagaaatctcctgtggcgatcaccgctgcaaggtagtggacggctgacgcggactagacctgacgctagaccgctcgtccggctgctgaagacagtccacgagcgtgtacctggccggccagatcgacatgcagaacaagctgttgccacccaactccgaggcacgatcaccacct

SEQ ID NO: 47256 - DNA, 235 bp, Zea mays
  Clone ID: MRT4577_143103C.1
ttcttcacttttacgcccacacttaccctgggatcggggacttctgacggggctccgagaccatcatacatgccatccaaactcgaaccgtcacagactgtagaggtcttccgtcctactgaccagctgacaggtcagaacatcctcttcaatgtcccccaagatccctccgccttgtcttttctcaaaaatgatcttaaagaacattatcaagtacacatgcatggactgaaca

SEQ ID NO: 47257 - DNA, 234 bp, Zea mays
  Clone ID: MRT4577_143104C.1
cccacgcgtacgagcattcgtccgtccacgcgtgctttggctttgtgacccacacagaggaatggagaagagagggtcgaactcttggcggcctatgagggtgccgtgatcgctctgccacaccaaggacgactctcaggtcttgttggccaaggccaaagatcacggcaagctgggggtcagggacctggattgccccctggtgctgtgcttgccacatgatggcccctgtgt

SEQ ID NO: 47258 - DNA, 270 bp, Zea mays
  Clone ID: MRT4577_143105C.1
cctgttccagcccgacaactggcgcctgttggccgagttcgtcaagcgcatgacggagccgttcacacgggaggcgtgccgagatcatgtagagcggcaggccctaggcgtagaacactccacccagcccttattgcacgaagtcggcgtcaatctctccaactgaccggaccggcctgatttccacgtccactgagttcgatcgctacacggggtggcacgctactgatgactacctgtatggcgagtgagtatacttactcatacata

SEQ ID NO: 47259 - DNA, 621 bp, Zea mays
  Clone ID: MRT4577_143106C.1
gtttcgcccctcagttggttcgctcgttctagaccgcgagcggcggcccttttttttttttttttaatagtgcaaaaacgtttatttgtcgaattctccaagacgctgagctgagccaacagaacggaacagatgggccgcgacggcaagtgcgactgggctgggctggttgaatcgcttcagtccctttaggtcgtcctgcaaccgtaagcccaaacctttactcgttccttcaggggatttctgaaagcccaagtccaaacctttattcgtcggcaactagtacgtacgtacacatcttaacaaagcgacgtgtacaaggacactttggcaagtacacaaccaagtatactagcaagtacttactgtactgtactgtgtacacacacacaacgccaatggccaacgcccaagcgcggcgctcggcagccggcacatgcggctactggatgtaggactggccggtgatgtcgaggtcgcggtcgccggtggacggcggcggcgggtggctgggcctcgcgccagcgcgctgctcctcgggcccgtcggcgctctgcgtggcgctcgcgcgcggccgcacggggcccctccggcggccgcccttcttctaggacgggtaca

SEQ ID NO: 47260 - DNA, 251 bp, Zea mays
  unsure (1)..(251): unsure at all n locations
  Clone ID: MRT4577_143107C.1
cntcggcaacccgctcgnctgcntcggacccccacgagatcntctncactcgcccctacnccaacctgctctcctcctagatcacaagcaactccnatgggaaccncgccatcngcaacntgccgaggaantggaacgttttcgtnatcngcgngcangacctgtacnagcacccgcacatcnnnnacctcgnctagatgccggccntcganggnnggcaagttggncgtcangttctggnggggggngna

SEQ ID NO: 47261 - DNA, 1056 bp, Zea mays
  Clone ID: MRT4577_143108C.1
cattgggtacctcgaggccggccgggcttcctcttccttttcctctgcatccatcatcctcagctcctaccatgagtacacggatacacccttcgtcttcggacgctgccggccgtgcccatcgtcgtcgtcgggctgctgctgctgaacgggaacgccggccgccggcggtgtacacggtgtggaagaggtccagcatgggcttccagggcaccgacggcttctgcgtctacgacgacgccggcaggctcgcgttccgcgtcgacaactactcccgccgccgcaagctctgcgccggcgacctgctgctcatggacggccatggcacgcctctcctctccctcaggccacagcttctcagtctgcacgaccgttggaactgctacacagcaacggaagacgccgtggtcgacaagaaggcgcctcccgcgtcgtcggcgcagcagcaggtgttcacgatgagcaggtgctcagctctgcgtagcagcagcgacaacgcggaggtgcacatgtcagcctcaagaccgggctccgctgctgccgcgtcgtcctcgtcctcctctctcagtctcagctgcaacaagcacaacccgcaggccgccgctcccggctaccgggtggagggctccttctcgaggcggagctgcaagatccggcgcggcagcgatggcagggaggcggcgcggataacgaggaagagcgccggcgtggcgtccaggccggtggccacgctcggggacgacgacgtgttcagcctcgtggtccggccgggcgtcgacgtggccaccgtcatggccatcgtcgtcgtcatggacaggatctgtcgcaggccgtacacgcccatggtgtgcccttcgcagtgcgagtagtaatgagaaacgtgtataagtgttctgattttgacattgcatttgctaattgctagcacctctcctagctagtggtgtgggggaatgaggatacgggatacctgaagacaactactacttttgtcagtgctgcatctcctgatcagcagcatctaataagaaaaggacagacagaattagcaatact

SEQ ID NO: 47262 - DNA, 502 bp, Zea mays
  Clone ID: MRT4577_143109C.1
ccgggaccttgtagcttccaattgccagctccccacccccgacatatcaacaatgattgcgcaatccatcagggcctcgcgccaggcgctcgtccgcgtcgcccggcaacaacctgcctacgtcgctcgccgcaccttcatcacccccaccgccgtccgatcagccgacctggtgcaggacatgtaccttcgcgagcttaagaactacaaggtcccgcaagtcaaggcctctgacgccgagggccaggtcaagaagttcgccatccccaaggcccccgcatctcccgaggagacggacattgcgagcgagctcaaggcatacgagacacagactgttgaggttgagggcgcttcatccgaggacggcgaggtcctgccccaggaggactggtttgaggaggagaatgagagcatcaccaccgccggtgctacccactagacgcagaagactgctgggttgaaggactagatgtatcaaaatactagcgactgtgtcaatacc

SEQ ID NO: 47263 - DNA, 162 bp, Zea mays
  Clone ID: MRT4577_14310C.1
ctcacatgtgggaaggattgttatataagacaaccaaatgatgacatgagacaataaatgctataggaattatggagggataattagctatttattttcttggttagggaagagctattattagttgtagaagtaattaataacttctacattttttattgt

SEQ ID NO: 47264 - DNA, 549 bp, Zea mays
  unsure (1)..(549): unsure at all n locations
  Clone ID: MRT4577_143110C.1
cccacgcgtcncgaaaaaaaaaaaaaaggggggggggggaaaaaaaaaaaaaaaaaaaaaaaaaaaaaaaaaaaaaaaaaaaaaaaaagggggggccgttttggggggtccttgtttgggggcgcggccttcggggggccagccttcttttttggggcctcctattttcttctttttgggcgggggggggcaccgttcttgtctgggaaacccttgttggtaccccactttattggcgttgcccccctttcccttttcgcatggtggccctattcccataaggggcccggcccgttgggcctttcccaacaggggccccccctgattggccattgggactcgccttttaacggagctttaatgggggcgcctctgttggttcccctctttggccccggttctttgtggcggcccttagggcccgctcctttcggttggtccccttcctttctggccctttttgccggttttccccgtgattttctaattggggggctccttttggggtggcgttttaggggttccggttcttgggcccaaatatttggt

SEQ ID NO: 47265 - DNA, 829 bp, Zea mays
  unsure (1)..(829): unsure at all n locations
  Clone ID: MRT4577_143111C.1
ctcttccgcccgcggcggctcaaacttaaaccctagagccgctcccctcctcgcctccgaagcgctcgccacccgattcgccagtccccaatccccccagggaggagcttccgcgaaggtccgctgctgcggtcatggctcgcgtctacgtggggaatctggatccgcgcgccactgcacgcgagatcgaggacgagttccgcgtgtttggggttctcaagagtgtgtgggttgctagaaagccgccaggatttgctttcattgacttcgatgagaccagggacgcaaaggatgcaattcgtgaattggatggcaagaatgggtggagagttgagctgtcaacaaaatctggtagtggccgtggccgagaacgtgaacgctctggaggttctgatatgaagtgctatgagtgtggtgaaagtggccactttgcacgagaatgtcgcctacggattggttctgggggcctgggtagcggaagacgccgcagccgaagcccgaggcaccgcagccgtagctgtagcccaagataccgcaggagcccaagctatggcagaaggagctacagtccacgggatcggtctcccaggaagcgaagttacagcaggtctccaccgcctgcccgtgcgcgaagcaccagcaggtctccaccgcctgcccgtgggcgaagcatcagcaggtcaccgccgcctgccccgtgcgcgaagcatcagcaggtcaccgccgnctgcccgtgcgcnaaacatcagcaggtcaccaccgcctcctcgcgcagaaagcatcagtaagtcacaccgccagcccgtgacgggaagctatagcaggtccc

SEQ ID NO: 47266 - DNA, 288 bp, Zea mays
  Clone ID: MRT4577_143112C.1
ggttgttttcttgttaaattgatttttttttttttttgttttgtacaagaaccattgaatcatgactgggccacattacagacatggtgctggcaattggacggtgacaagaacacgaaatggttaccagtttacttttctagcccttcaacaatagcgcattgttttaacatggactttttgttgagagtaaccatttcacctatcgttgcttaccacgtcggcttctacacacactattaactatgcttggcaacattgataagctggagttggtacatcccgcgc

SEQ ID NO: 47267 - DNA, 225 bp, Zea mays
  Clone ID: MRT4577_143113C.1
cccacgcgtccggtggaactcttgcaccgactggggttcttgttgcagggaccaagtacatggtgagccaaggtgaacctgcaaccggcatccgaggaaagaaagccactggagggattactatcaagaaaactggcctgtccttgattatccggatctatgatgagccaatgactccatggtctatgcaatatggcggcggagaggcttggcgattaccctgat

SEQ ID NO: 47268 - DNA, 592 bp, Zea mays
  Clone ID: MRT4577_143114C.1
ttaaatattaaccatcgttatgtacttgtataacctttaggtaacatatattagttatgtatattcatggatgtaaaaactgaataacaaaaacatattatataattataagttattatctcttataaaatatacactatattaagaaatttttgtggaaatagttaatacaatttatatttcacacacaataggtaggtaaatataatgtacaaaagcatttttatcaaaatgtttacttaattttcaacataaatatcacaacaatggtacctaacagtactatttacaaataaattaaaatgatttcaaaataataaataatagtatcactctaaaaataaaaaatttataaataaaaaaaattgtattcacaattatttaggaccctgaaacgtgtttaaacctaattaaaaataaaataataataattataaaagacgaaatagaattttacaagatgaagtattttgtcgtaacaatacattaaaaatattgtacttaaaataaaagttaaagttgcaaattgtcgcaaataaattaaaataataaataaatatgatgtctgaaactgtaccaagttgctgaggac

SEQ ID NO: 47269 - DNA, 263 bp, Zea mays
  Clone ID: MRT4577_143115C.1
tggtaaagcacggggattagtgaaggactcgattgaagccgccgggtataaaagccgcgaggctagcaaaggcgacctcgcgaggtcaaactacctgggccgccaccgccacagccccgccccgcgcccgcctcccgagctgagcgagcgactcagcgagcgcgcaacagaaccagccgccgcggcgcgccatggcgccgttccagatgcgcttcgggctgcagatctctcccgcgcgctccgacgacgacgaggacgacgac

SEQ ID NO: 47270 - DNA, 246 bp, Zea mays
  Clone ID: MRT4577_143116C.1
aacaacaaacatccatttttatacctacataaataagggttttttgaaggcacacccccccgcctaaaaaaaatggggggggggatcggtttttacagggcccaaaaacaaatttaagcttggcaaatcctattaaaattattttttcccccccggaaaaaagttatttgcaacatgcattattaggtttttttccaagcacccaccgagcaccgtgtttagaactcggggggaaaatttttattt

SEQ ID NO: 47271 - DNA, 363 bp, Zea mays
  Clone ID: MRT4577_143117C.1
tgagatggcacacgtgctgagggtggccaatgtgagcatactgaaaggagtgctggagcatcgttccgacaagttttgtgctccctttgtcatcgagggttcggatggtttcaaccagatgcagattctgtgcccactgatgcatctcctgcgcaggagatgaagtttgtgtgtcgttgaaatgttaccgagactcttcttactctctgtttgctttggcataaatgtacacgcaaaataatggatggatgcattgtttttgagatcccagcgagactggaatgttgctatatatatatatccatattcaatcgtgaacagcaaaacaattcaatcgtgattcagcttcatgcctttagcacc

SEQ ID NO: 47272 - DNA, 1060 bp, Zea mays
  unsure (1)..(1060): unsure at all n locations
  Clone ID: MRT4577_143118C.1
gtttaaccttcacaatattctttcattgtattaatgaacctatgaataattcctattggttgcagtgaatttgatattgcaggtcttattttatatgttggcaatacttatttatgtaacaacaagaaaaagcagtggctttttttaacagatggatctaaatttgtctctggacaagggtgtgaagagcaagattgtcttctagctgttagcttttcgtccgcaaccactgatgaagactctacattatttagttacactctctctggaaatacagtatgttttattttgattttgtatgttgagtttctgtttcttgttttgaaacctctagatggaacaccagtctgggaaatctactgctagacatttgaagaccatttgaaagttattacattgttccgctttaagttaaaccctttcaaaacaagtgtggcttcagcttattgctaattttcttgctcaggttggttttagtaatctggtcaaacgacagaaagacgagacgaggcaagtatgggtagctgaggcaacagagagctcaagctacactctttccaacgagattcctagaaaatctcacctaaaagaagctgcagttttggctgagagatgggcttctagatcttatcataaaattcaagagctaaaagaaagggttttatgtatagttggcaacgctggtgtctgaattataataaacggtaccacttgctgtttttggaaatggtgcaagattttgcttggggggttgtcttagctacaccattatttctcactgatgttggttggttctggttggagcctttttaacgcaatatgaatggcccttgcaaaaaacttcaagagcagcaagatccttgcacaaacttcaaaaatcaacttgaagatgtacacatttgaagacacgaggcttcagggctgttttctaagtctgtgtataaagcctttttcagagggtcgattaactttgagccgtggaaaagttatggagatcttgggcgccgcctaaatgcaaaacttttctctggctagccattangaacaaatgttgaactgc

SEQ ID NO: 47273 - DNA, 365 bp, Zea mays
  Clone ID: MRT4577_143119C.1
aaaacccgaaacccccccttttttttttttcagggggggggggcaaattttacggggttaaaccccccggcctgtaaaaataaggtttttgcaaaaaaaaaacacccccccaggcgttggaaaggcaaagggctttgaaaaatgacccttgcaagggccaaatccccaagcccatagggaaaccttaccgacttttccgcccggggccaaaaacacattggtttggggaggatggcgggcccccaaacctaaaaaactgggggctaattttttttgaagggaaaccccgccgggggggacttgatccaatggccctcaaaaaaaggttggggcctgcaatttgggggggggggtggcaccccccg

SEQ ID NO: 47274 - DNA, 1029 bp, Zea mays
  Clone ID: MRT4577_14311C.1
tttccgggaggagacccatctgaaagtaagcacttgatggccctgttcaaagttgcagctaaggaaattgctgcggatgtgaggattgcattaccgggagctatacagtcgctgtttgagtgcttgttgtacacatttctcttcctgtggactccagcattgagttcaaatgcagggtaccaaagtgagatgttgcagatattgtcaaggatcaccccttctatgtttgcaatatggctcagttcaaattcatatgatgcacattattctcatatgaatttaatggcatgcatgactctggtctgtctcagttgcttcggtaacatgctaattcccgcgatgcaatctgtcagctatatggtgctcgcactctacatattcgggtaccatacacatctccaggttgttgtccctgttctcatagttcgtgtcgctgctttgtacaaggtaactggagattgcttgctgttcagttatacctggataatccaacagaaaaatcacctgatctgtcttgatgcacttcgtggtagctacttacttagtttcaaggaggtggttctgatttgggtttggggcatctggatatctattttctttgcacaagttgacttgttcagttggtgttctgaaaattcagacttgagtagattaatagctctcaattgtcctgctgacagtgacaacgcaatggtgctaatgatgtaccatggtgcacccagtacgtatcttccttatggtgcaatcgtcatggtgcagcctttattagcccaagtagctaatggacaacgctatatacctatgaaggtggctggggttaacgaatggcgactgattcagtatcagtgtccatttacatgttcacctgatcaggccaatattatttccgatcgcgcagttcttcaaaagcactttttggcaacaactattcagtgttgtatgtgattgcgacagtattgctaaaaaatgttgaatttatcattccatggtagggagaccatatggaaaagtgttgtatgtgattgagct

SEQ ID NO: 47275 - DNA, 270 bp, Zea mays
  Clone ID: MRT4577_143120C.1
tctttgtttttttttttaaaaaaattttttgggttttttttttttaatcaaaacggcagaggttccattacttctcaaaatagcttttgcctggggcttctttcattggggggaaacatttcaacataagcagcataaccagggggggggcccaatatctccacttattagggcagtacaacacaaacgatacccccccacaaagatggggattgaaccaaaaaaaatataacccatatgaaagcatgattaagcacatcaatccaccat

SEQ ID NO: 47276 - DNA, 770 bp, Zea mays
  unsure (1)..(770): unsure at all n locations
  Clone ID: MRT4577_143121C.1
cggccgggccagggtgctccgcctcatagtattccaccttcgtctctctctgtgaccacctccacccctcctcatcctcttcttcttcctccccttctcccccgatctgcggcggggttgattcgatttcgatccccttctccatccgtcgcccacctccccgcccaggcagccaacgcaatccgctccccgaggcgcctccctgaccctgactcccctgcccccacaacgtgcgtgctcactcgcggtcgggcgggcggggtcggcacgctcaccgtcaccacactttattaattcctcttccgcgtccgcgcttcaaaaacctcctccggctcgtcccccctctaaccagtccccagccccgcggcggccgcattgcccgccgccgcaccgtgtccggctaggactaggactaggaccccctgtttgggctcttgcgtttcgattcctgggtcggctgcaaggagtggggagatagtttggccgacggaggggggccaaaatgtgggcggagagggtggtcggcgagcgccggatgcggcagatccagcgcttcgcgcggaacgccaagctcaccgtcgtctgcctcctcctcaccgtagttgtgctccgcggcaccgtcggcgccggccgcttcggcacgccgcagcaggacctcatcgagctccgccagcacttcgtctcccacccgcnaccggcgctcgcggagcaccacgacgccaggtccagggcctccaccaccaccacgtcgtcgtcgtcgtcgtcctcgt

SEQ ID NO: 47277 - DNA, 458 bp, Zea mays
  Clone ID: MRT4577_143122C.1
ctcacagaggtggatgctgttgtgtcatcctccacactggtggatgatcccatggaggttggcatgcaaaccaaagaggttagtgctgctgcggatgatctcatagaggtgggtgctgccctggtaccatctgcacaggatcacacagcagtggctgcttgcctggttaatgatgactgcaatataattatcactggtggtgtgcataggtccgatgaccaaactgttcaggagtttgggggtgactcccttgacgctgatgaggttgctcccttggtaaatgatgtacaagatgacagtgcaaggatggatatggatgttgcagcccatggtgatgtgcatgctcaggatcgggaaagctcacagttggatgtggctacagctctgttaaatgaggtgggaacagagcttgtggaagctggtgaccatgctgtacaggaatgcacaaatatggatat

SEQ ID NO: 47278 - DNA, 880 bp, Zea mays
  Clone ID: MRT4577_143123C.1
cattgggtacctcgaggccggccgggatcagcccctgcaccagcatcagcatcagcgccgccgccgccgccgctgccctcctcgcgctcttcacagtcctcccgcccttcccgcgcctggtctcccctcgcgttcccgatgtcatcttccaccgcactcgcgtggcgacgcaccctccgcaacgccctccttcgcggctttccgcggcgcggcgcggcgcccgagcggtacgccagcacggcctccgcgtccggcgcggcggcggatgctgcagctgcagccgcgccgaagaaggtgccaccgtcaccccgcaagggaaggcttttaactggggccatgatagcgttggccattggtggaggtgcttatgtgagtactacagatgaaggaaagttttgcggatggttattcaagtcaacagaacttgtgaacccactctttgcactgttggatgcagagtttgctcatagtttagctgttaaagcggctgcccatggatttgttccaagagaaaagagacctgatccatcagttcttggggttgaggtttggggaaggaagttttcaaacccaatcggtcttgctgctggctttgataaaaatgctgaggcagttgaaggtctcttaggcctgggatttggctttgtggaagttggctctgtgacacctcttcctcaagagggaaatcccaagcctcgaattttcagattaaaggagcatggtgctgtaatcaaccgatgcggattcaacagtgaaggaattgtagttgttgctaagcgtcttggggcacaacatggcaagaggaagatggaagaaacttcaagctccacgctttcctcaaccagcgacataaagcaaggaggaaaagcaggacctggaa

SEQ ID NO: 47279 - DNA, 326 bp, Zea mays
  Clone ID: MRT4577_143124C.1
cggacgcgtgggaaaaaaaaaaaaaattaaaaaaaaaaaaaaaaaaaaaaaaaaaaaagaaaaaacaaaaaatttaaaaaataactaactaaaaaaaacatgcatcctccttcttaatttttcttttttccttcctcattcttactacctcttagtttttatataacgttccttactttaaattccctggccttactttactaacttggcttctggtaaatccttctttttcccccttttattctccttgcaacgcatccacctttcttcatttcaattatttgcccagattccttaaccattcgcactttccatcatttgcccaa

SEQ ID NO: 47280 - DNA, 288 bp, Zea mays
  Clone ID: MRT4577_143125C.1
cccacgcgtccgctcccctgttctctcgcccgaacacggcgaccgtcgctccaaaacacgaccttcacgtgctcgccttcgtcctcctcgtcaccgccgtcaaggacgcgtacgaggactggcgacgccaccgctccgaccgcgccgagaacggccgcctcgccgcggtcctcttcccgggcgcccccgggggcgcccagttcgtcccgacagagtggaagcacgtccgagtcggcgacgtcgtgcgcgtcttgtccgactagtctctccctgcggacatggtcctcc

SEQ ID NO: 47281 - DNA, 593 bp, Zea mays
  unsure (1)..(593): unsure at all n locations
  Clone ID: MRT4577_143126C.1
gacgcctgcaggttccggtccggaattcccgggtcgacccacgcgtccggacggaagccaaagctgtagtaaaggagaatggatcatgtcagattatcaccatagcataacaaaggctgctctctgtgctagtagcagtgctcagcagcatgcactgttgagcttttctgacgctgtgtcagaatggcactagttcagtttatatccctctcataatatggcagttcattaaaatacaaagcagtaaaatgtcatttgctgtacgattattaactataaatctggctatttcttcatccagtaacctaaatatgatatatactttatattgggtatgagagatctgtgtttgggttttatagattttagcttttgacacgtttgcctctttaaatttaattttcataaatccccttattagaaagttcttttacatataggccccaaaattgtgattattaaaaatatagttaattgtgattagcctccagtgaaaataggttgaaagcctgttttgatccagtgttttctcccaaagaactctacgttaaacatacaccagttttcttttatgacctgnagttaggagtgag

SEQ ID NO: 47282 - DNA, 216 bp, Zea mays
  Clone ID: MRT4577_143127C.1
attcggctcgagctcaggttgaacctgaactgtttgccccccgagaacaagcacaatgggggggggattgtgcacacgaggacgagcattcctcacaagccgtacgatgagatcgaccgtaacactgtagagaccacctgtaggtcacaccacgctcggacatggcaccaagggaccaccctcaacgcggggaggaagtacgatcgcgctgtgcac

SEQ ID NO: 47283 - DNA, 395 bp, Zea mays
  Clone ID: MRT4577_143128C.1
aaggaacaccaatctggagttttattccaacaggaaattgaacacatgggtcgctacatagggggatccatccaggccataaataaaaatccatacacacctggaaactaaactagcataaaaaagtttggacacacgccgccaaaccattattcaccaacaacgtcgatgtcccgggggaggggggggggccccaaaaacgcgggggggccttggacaccatggggcttcgacccctgggccagggggtgcaccaccatcccagggaccccgccgccgcctttgccctggcgttggcggacgtacccgacggcccaagggagcgccgaaacccccgcgaccccgagggggcccgacgcgaggagccccgacgcgaagagccccggggccagcgc

SEQ ID NO: 47284 - DNA, 415 bp, Zea mays
  Clone ID: MRT4577_143129C.1
caagggaaccccccaagggtttataataaagggttttaaagccaaaaaaacaacccaaacctggggtttggaagggatttttaacccaacggggtaaattaacggccccacagaaaaacaattaacaactgggccaaaaaaagccctggggaaaataaaaaaacccccccccattttttaaaaaaaaagccctgaccctaaaacccatttaaagcctttccccttttgggaagtcgttgccggaaatttccccaccaggaaaaggggtaatccccaaaaccaggggaggggtggaaagctaataaaaaaaccctttaacgttgaaaaaaaaaacactttcgcaaaaaacactttccctccaaactgggaaaccctgggaaaacgaggcctccacaaaagggtctttttggaaaaa

SEQ ID NO: 47285 - DNA, 329 bp, Zea mays
  Clone ID: MRT4577_14312C.1
gtgacctgtccagaggaaggggccttggggtgtgagctacccggtgggtagtctcacgtggccttgggcatctggttgcaggggaagaggcacttgctctcctctccccatgctcgttgcaacctgttctggcgaaaggctgcgccatccacagcggcgctcaagccatgaccagggggatcttggtttcttcctctccctgcctcaacacatagcctgttcccagggttctagctttgtctccctgttgctactgccagggctctggtctggcccacatcatcttctcccgactctgtccacagcgtcctcgctgtctcaccgtctcc

SEQ ID NO: 47286 - DNA, 917 bp, Zea mays
  Clone ID: MRT4577_143130C.1
ctggccgggtttggggcccatcgatttggcggccctttgcctgtgcacacttcgctcctgcccttctcgggcctgatcttactgccacttggatgcatgataatttattgctttctatgtgaactctggaaatagactaatttcattcatgctgctattagttccaaggacttaattatgtgtagatatgtttggtggctcatgtctcatattcgaataatctatgtacggtgtagatgcggttatgattccttcttgcttctttatcaaatgttttcttgcaggtggaagtgtggctacaaacatttggtccaggtcaaaggaccccaatccataggcattcttgtgaagaggttttcatcgtcctcaaggggaaaggcacgctcttactcgggtcgagctcgctgaagtacccaggacagccgcaggaagttcctgtctttcagaataccacatttttgatccctgtaaatgatccacatcaggtctggaattctaatgagcacgaagatttgcaagttcttgtgatcatatcacgcccaccgggcaagatgtgagcatatcttactttaacattgtgtttcattcaactacatatgctaactgatccatgaatacatagtacttcagagttcagagtaacctgtgatggagagtatcgaagcaaatgtaaaatgccgatcttatctaagaaaatacatgcaaatataagaatatcggtgtaattaacgttgaactttgttgcaagattgctaaatatgctatatacctgatgaagtatgtattcaaaaattggcattctcaacatctgatacgatctataccactttgatttattgatctaagtatctaaccttctttagtaattgtccaccaatatttctaaataaaatatgatagtattattcacatgtgtt

SEQ ID NO: 47287 - DNA, 894 bp, Zea mays
  Clone ID: MRT4577_143131C.1
ctaattaatgcttggcagaaaatatttcccgaactgtttttaccttttagttccatgccctctactttaaaaagtcatattcgttatccagtggatatgtttagtacccaatcggagcgattgttgacctatcacatggaagatattgatgtattttataaccgggaagaccaatggcgtattccccaggaaacctatgccgatgagcaacaacccattgccccgtattacctaattatgaaattggcagggattgatgccaaagaagaggaatttgttctttcccaagtttatactcctaatgcccgcaataacctgattgccctactctttgcccgctgtgatgaacaaaattatggcaaattgttgctctacaccttacccaaggaacgactggtttatggcccagagcaaattgaagctttggtgaaccaagatccagtaatttccgaacggattagtctttggaaccgccggggctcccgggccattcagggtaatttgctggtaattcccattgaagaatccttactttatgtggaaccaatttatctggaagctgagaaaaatagtttgcccaccctcgctcgggttgtggtggtttatggtaatcaaattgccatggcagaaagcttaaatgaagccatagaggcaatttttgatcgccgaaatggagactagcggtcagaagttggggggaattaataaaagtattgcggtgcattacccccatgcgaacaaactcagcgttttccaaaccgggaatcaagcggaaaacccgtccctgttctccccagcgtaaattggtctgaaaacccaccatattccacaattgtcctgccttatcttcctggcgcaattgcaccactgcatagggctttttctccttgttag

SEQ ID NO: 47288 - DNA, 276 bp, Zea mays
  Clone ID: MRT4577_143132C.1
cgcttcctcccgttagactagggtaggctacggtgtcgaccagctcgcggaaatggtggccttcaggttccatcagtaccaggtggcggggcgcgcgctgccgacgcccggcgacgcgcaccccaagatctaccgcatgaggctctggcgaccaacgaagtccgcgccacgagcaagttctggtacttcctgaggtagctgaagaagggtaagcagagcaacggtcaggtcctggccatcaacgagatcttcgagcgtaacccgacgacgctcaag

SEQ ID NO: 47289 - DNA, 1371 bp, Zea mays
  Clone ID: MRT4577_143133C.1
cgccggcgccgcggcagctgctcggcggccagtcacaggatctgttcgttcctcatgcgacccagctagctaaaactggcatgcatggacatgctacgctgctgcgtcaatccatctcaccagcagtgctagctagctagatctggcctgattcgccgatcgagcggtcgccggtcagagactcagagttcatgagacggagtgcttcagctcaaagactgctagtggtagctaggtagctgcgtgcactgcatgcgcggcgccttggacttgaagaaaccgagcgctccgatagtccgatccggaaacgatgagtgccgggccggaggacacccagcagctgatcaacagtgccgccgctagccccaaccgcagcgcaccgtccgccgcgcccagcgatatggagaggggcagcggaaccgccgcgtcctcgtcgcgcgctccgacgacgtcccactcccaccagagggccacccacagggtggtggaggaggaggaggaggagcctagtagcagccgtggcgccggcagcctctgctccgggtacctgtcgcttccggctctgctgctcgtcggcgtcaccgcgtcgctggtgatcctcccgctcgtcctgcccccgctgccgccgccgccgtcgttgctgatgctggtccccgtggcaatgctgctcctgctgctcgtgctggcgttcatgcccacgtcgtccaccccgccgagactgcagtgctagctagctagatctggcctgattcgccgatcgagcggtggtgagacggagtgcttcagctcaaagactgctagtggtaggctggtagctagctgtgtgcctgtctgcagtgtgcactgccactgcatgcgcggcgccttggactctcggcgccgccactcgctcgccagggggcgtcggctgtgccgagcgctccggcggctccgcttcgctcatcaggttcttgagccccggaaacgatgagcacgacccggccggaggacacccagcaactgatcaacagtgccgccgctagccccaaccgcagcgcaccgtccgccgcgcccagcgatatggagaggggcagcggaaccgccgcgtcctcgtcgcgcgcttcgacgacgtctcactcccaccagagggccacccacagggtggtggaggaggaggaggaggaggagcctagtagcagccgtggcggcggcagcctctgctccgggtacctgtcgctcccggctctgctgctcgtcggcgtcaccgcgtcgctggtgatcctcccgctcgtcctgcccccgctgccgccgccgccgtcgatgctgatgctggtccccgtggcaatgctgctcctgctgctcgtgctggcgttcatgcccacgtcgtccaca

SEQ ID NO: 47290 - DNA, 279 bp, Zea mays
  Clone ID: MRT4577_143134C.1
cgcatacgttcgtacagaccatcttattcaccgaggcactttcccggcggggagggatttttatgataatggaaaacctaatgctgctcagcatcctcactgatcctttcaaatccatgtacaatgtttaaaagatatgcaaacatcttttctataaaaggacgtaaaccaaattcatcatcaatatcctgaaaaacatactatgtcatgaatacattaactaaatcaaatccttttatttccacataactcataaaatcatcgcgcaactttcttaaa

SEQ ID NO: 47291 - DNA, 127 bp, Zea mays
  Clone ID: MRT4577_143135C.1
attgaagaggcgaagtggtcgccgaatgttcgcatgaagtcggcgtagcactggatgggggtgcgtcccttgagcactggcatcgcgtctcatcccatggagacgtactcgtagttccatcggtcaa

SEQ ID NO: 47292 - DNA, 2624 bp, Zea mays
  Clone ID: MRT4577_143136C.1
gcggcgctcgagccggccgggtccgaacgcgcggatcccctcccacactttccatctctcccactgcacgtgcacgtgcacgtgaaacccagacgccaccgatggcaaggctcgctatatgcgccctgctggccgccgccgtcgttgtctccgcggcggtggcgaccatggagtccgaagcggaggagcctgtgtccacgtacattgtgcatgtcgcgccggcgcacgcgccgcgggcgacccgcccccgcgcgctctccggtgcgtaccgctccttcctgcgcgagcacctccccgcgcgcgtggcgcgcccggcgccgaggctgctctactcgtacgcgcacgcctttaattcgttcgcggcgcggctgacgggggcccaggccgcgcacctcgcctcgcggcgctccgccgtgctcgcggtcgtgcccgacgcgacgcagcagctgcacaccacgctgacgccgtcgttcctgcgcctctcggactcgtcggggctgctccaggcgtccggcggcgccacggacgtcgtggtcggcgtcatcgacaccggcgtgtaccccaaggaccgcgcgtccttcgccgcggacccgtcgctgccgccgccgcccagcacattccgcggccgctgcgtctcgacgccggcgttcaacgcctccgcgtactgcaacaacaagctcgtcggcgccaagttctttggcctggggtacgaggccgcgcacggcgggggcgcggtggacgagacggactccaggtccccgctcgataccaacggccacggcacgcacacctcgtccacggcagcgggctccgccgtgccgaacgccgccttcttcgactacgccaaaggcacagccatcggcatggctccgcgcgcccgcatcgctgcctacaaggcgtgctgggcgagggggtgcacgtcctcggacatcctcatggcgttcgacgaggccatcaaggacggggtcaacgtcctctccgtctcgctcggcgccgtcggccaggcgcccccgttctacagcgacagcacggccgtgggagcgttcagcgccgtccgcaggggcatcgtcgtctctgcctccgcgggcaactccggccccggcgagttcaccgccgtcaacgtcgcgccatggatcctgacggtgggcgcgtcaaccgtcaaccgccggttctcagcgaacgtcgttctcggcagtggcgacaccttcgccggcacttccctctatgccggcacgccgctcggtccaagcaagatcccgctagtctacggaggtgacgtgggctcaagcgtctgtgaagctggcaaactgatcgccagcaaggtcgccggcaagatcgtggtgtgcgaccctggcgttaacggtcgagctgctaaaggtgaagccgtaaagcttgccggaggagctggagcgatcctcgtcagcgcaaaggcgttcggcgagcagcccatcaccaccccacactccacccagcgacggccgtgacgttcgccgttgccgagcacgcgaagaggtacatcagaaccagcgcgtcccccgttgcgaccatcgtgtttctcggcaccgtcgtcggcgggacgccgtcttccccgagaatggcatccttttccagccgcggcccaaacctcctcgcaccggagatcctgaagccggacgtgaccgcccccggggtggacatcctggccgcgtggaccggcgagaactcgccctcggagctcgacagcgacacgaggcgagtgaagttcaacatcatatccggcacgtccatgtcgtgccctcacgtgagcggcatcgccgcgatgctccggcaggcgcgcccgggctggagccccgccgcgatcaagtccgcgctgatgaccaccgcgttcaacgtcgacagcgccggggacgtcatcagggacatgtccaccggcggggcgtccacgccgttcgtgcgcggggccggccacgtggaccccaaccgcgccctcaacccaggcctggtgtacgacgccggcactgacgactacgtctccttcctctgcgcgctcggctacacggccaggcagatcgccgtcctgacgcgtgacggctcggtgaccgactgttcgacgcgcccgggctctgtgggcgacctcaactacccggccttctcggtggtgttcggctccggcgacgacgaggtcacgcagcgccgcgtcgtacgaaacgtcgggagcaacgccagggccacgtacacggccagcgtcgccagcccggccggcgtgcgcgtcacggtggagcctccgacgctggagttcagcgcggcgcagcagacgcaggagtacgcggtcaccttcgcgccggagcagggaagcgtggccgagaagtacacgttcgggtccatcgtgtggagcgacggtgagcacaaggtcacgagccccattgccatcgcctggtcggcgagccaagcagcggcgatgtgatccgatccggtccacgtcgagctaccatgtgtgcgctctgtgtgcttcctgttgcagaataagttgcgttatttcgacaccgatccatcctaccaacaagttgtagcataatttactgtaaacaaaaactgtaccgtattttattacgtggactttcgtttctcaacggctttcgatcgtc

SEQ ID NO: 47293 - DNA, 916 bp, Zea mays
  unsure (1)..(916): unsure at all n locations
  Clone ID: MRT4577_143137C.1
cggcgnccgccatgtattcggccaccactggggcggctcgtacgagatcgccgatgcgncgncggaggatgaccacagccgcaacatggacctggaccgccgcgcgctgcccgncgcgncaaccccaccagctgcccnccaccccncccagctggctgctagccccgccgaaggcccccacccccccccccacccccccctcccctgtgtcgacccccaccccaccaccccctgaggacctcgaggagcgtcacccccgcttacccccccctccgccaccccatcaacatcgcacaagtccatcccccccacccccacccccccccccagggccgcccccccaccccccagccaccccgccgcccgcctccaccccccccgcctccccctctctccccacccccccccacaacccccacccaacccccccccaacgacacacccgccccccaccccacccccccgcccacccccaccccccccccccacccacctccccaccccccccgcccgctcccagccgtggcccccctccccccccgacctaccaaaccccccacctccccaccccacccccccccctccccccccccccccacctccctctcccccccccaccccctcccccctcctcccctcccccccccccccttccccccccccccccgctactcccccccccctccccccacccccccccccccacacccccacccccgcaccacccccgacaacccccccccccaccaccccccccccccccccctaaccccacaccccccccccccaccccccctacccaccacccactccacccctcccccaatcccccccacccaccccaccccccccccgcaccacccccgcccccaacccctccactaacactcacccccacccacccccgccccccccc

SEQ ID NO: 47294 - DNA, 159 bp, Zea mays
  Clone ID: MRT4577_143138C.1
aaaatttccccaaggagagcggacaagatgaggcgtcagatgatactcgccggcactctgtttgctctcgccatcctcgcggctctcggggaaggagcggggtcctgggcgcgctgcggcaactgcggggctggctgcaggaagcagccgccgcagcgc

SEQ ID NO: 47295 - DNA, 420 bp, Zea mays
  Clone ID: MRT4577_143139C.1
ggctgkgcatggagcgccaacgccgccaccgtcaccatcaccaacaactgcggggtcaccgtgtgcccgcggccaccccggkggcggggcacgcagctgaacccgggcgggacgtggaccgtcaacggccggccggcaccagctccggccgcgtgtggggccgcaccggctgctccttcaacggcaacagcgggagcggccagacgggcgactgcggcggcgcgctggccgcacgctgtctgggcagccgmcygacgctggccgagttcaccatcggcggcagccaggyactcacgacatycggtcatcgaggcacaacctcgccaggcctctccgcagcaccgcgtgcggcggggcacggactcggagcccsacgcgtaccccccccaacgacggagacccagccgggcgcacgcacac

SEQ ID NO: 47296 - DNA, 264 bp, Zea mays
  Clone ID: MRT4577_14313C.1
ggagagccaggcccaaaaggtttcccaggactaccaggccaacccggacctccaggcctccctgtacctgggcaggctggtgcccctggcttccctggtgaaagaggagaaaaaggtgaccgaggatttcctggtacatctctgccaggaccaagtggaagagatgggctcccgggtcctcctggttcccctgggctccctaggcagcctggctacacaaatggaattgtggaatgtcagcccggatctccaggtgaccagggt

SEQ ID NO: 47297 - DNA, 723 bp, Zea mays
  Clone ID: MRT4577_143140C.1
gccggccgggcctgcggaaaaaaaaaaaaaaaaaaaaaaaaaaaataaaaaaaaaaaaaaaaaaaaaaaaaaaaaaaaaaaaaaaaaaaaaataccccctttttcgctgggggttcccccccctgaaaaaaatatatagctttaaaataaacccgggggtttatttattatatatgtatttttaaccgccaaatgaaaagaaaaaaaaggggccccaattccctgggggggggagggaaaaagaaaaaaagcccctaagggaaaaaaaaaaaaaaaaaaaggggcccccggggggggggcctttataaaaatagggtttccccgggtttgcaaaatttatatttgggttttttcaaccccccccccctaggggggggccccaaaaccaatttccccttatgggttttcattttccgcgctctaaaaacccggttttttaacaaagtggagtgtggaaaaaccccggtccttcccccatttaacacccttagaagaaacccccctttcccgaatggggttaaaaaaaaaaaaagccccccccatcgcccttttcaaatgagtgggggagctttagggaaaattgaaatttcaaattttttaatatttggaaaaatttcgccccaaatttgtggaaatccgccttattttttacccaaaaagggcaaatctcgaaatcccctttaaaataaaaaaaataccgcgaaaataggttttttttttttt

SEQ ID NO: 47298 - DNA, 561 bp, Zea mays
  Clone ID: MRT4577_143141C.1
ctagcggtcagtgtcggctactgtgacaatatccacaggcacacgcctgtgctgaacgcatgccctgagctcagacgggtctgcctgcacgtaagctggtgtcatacacagaagagcccgattcgcagccaaagcttgggtgtccacgacagaacgataccccataccacgtgatcagaactgccgcaaagcatgctgcggcacaaggacaggcaactgagcctacacttatcactcacgtataacgacgcgtataggatgcgcatacggtggatttagaagagattatactaccgttgcatttactacgctaccaggatccctacttatcccctgtactacatatacaaaccgctgcctgatctatcaggccccaagctacttgtcgagctcaccctacacttggagcacttacaatgaccctacaatacctagggtaccataaagggaactcatacccttgtctttctggtaatgtaggagtaactgcgggagatacccacaagacatgagagcgctctgaacgacttgagctttagtttgtgaagaaaccagatgatg

SEQ ID NO: 47299 - DNA, 1533 bp, Zea mays
  Clone ID: MRT4577_143142C.1
gagagaacctttcacggccctgctagagagagtttaacaatcaaaatagaaatcagaaactcgaatcaggccggggagagttcatcttcttctccaagctgatttctgcttgttagctactcacgtcaacagaaaatctcgcgttcacctcctctccagtctctccgcctcccgcttacttctctgactctgtcctctttggtttctttcctgtcggcgacggctggggtgctgcgccgctctcaccttcaccgccgacgagcattcacaagtagtggtctcttactggtggcggcgtagaggtgacgaaaaagacgaaaaagccttgacaatgagcagcataggcacaggttatgatctgtctgtcaccaccttctctcccgatggccgcgtcttccaggtcgagtatgccacgaaggctgtcgacaacagcgggaccgttgttgggatcaagtgcaaagatggcattgttctgggtgtcgagaagctggtaacctcaaagatgatgctggagggatcaaaccgtaggatccattcagtgcacaggcactcgggcttggctgttgctggtttggcagcagatggcaggcaaattgtttcaaggaccaaatcagaagctgccagttatgaaaaggtctatggagaacccatttctgtgaaggaattggcagatcgtgtggcaagttatgttcatctttgcacgctgtactggtggctaagaccttttggttgtggtgttattcttggaggttatgatagggatggaccacagctttacatgatagagccctcaggagtttcctataaatacttcggtgctgcattggggaagggaaggcaggctgcaaagactgagatagaaaagttgaaactttcagagcttacctgccgagaaggcattgttgaagttgcaaagataatttatggagtgcacgacgaagccaaggacaaagcttttgagttggagttgagctggatctgtgaggaatcgaagcgccagcatcagaaggtcccaaatgacctgttggagcatgccaaagctgctgctcagacagctcttgaggagatggatgctgactaagaaacaagatgatatgcccaaacttcatgttttggcgctgttgaaatctctgatccctttggggtgacagactggatatggcaaatttgtcggattttattttgatgtcatgtaaaactcaattgatgtaagtttggatctgaattgattgatgtcatagctgtggctatttacattcaccgcagttgcgtcctttagaacttgctgttgttagactttataggaccttgcacacgaaccattgctactagacggcgattgttttgcgtgtcggacctctttctgtttttgtaggctatgtgaaagaggacggcagccataaggttgttgcgctctcgattagggtgcgaaaggagagccggatcggaccgaatcacataaatctcaatacttatttgtttatatttaaaactttcttactgctcgcttgcaattctcactcttagatcagt

SEQ ID NO: 47300 - DNA, 1469 bp, Zea mays
  unsure (1)..(1469): unsure at all n locations
  Clone ID: MRT4577_143143C.1
ttgggtacctcgaggccggccgggtggcattgggtgcgtcgagtccgtcggcgcccgtcacaccctgttcgcgcggggctctcttcgtcgtgcggcaactgcgcgaccgccgacgcccgacggcaggtgccccaggtcttcgtcgaccccttcgcaaggcctcggttccatccttcgccggaggcgaccgcccgtcaacaggacttgatctactactcactagcggtgtagaggcgaagagaagaacttgaccatgagcagcataggcacaggttacgatttgtctgtcacgactttctccccagatggtcgtgtcttccaggtcgagtatgccaccaaggccgtcgacaacagcgggactgttgttgggatcaagtgcaaagatggcattgtcctgggtgtcgagaagctggtaacctcaaagatgatgctggaaggatcaaaccgaaggatccattcggtgcaccgtcactctggcttggttgttgctggtttagcagcagatggcaggcaaattgtttcaaggaccaaatcagaagctgccagttatgaaaaggtttatggagaacccatttctgtgaaggaattggctgatcgtgtggcaagttatgttcatctttgcacgctgtactggtggctcaggccttttggttgcggtgttattctaggaggttatgatagggatgggccacagctctacatgatagaaccctcaggagtttcctacaaatacttcggtgctgcattggggaaggggagacaggctgcaaagactgagatagaaaagttgaaactttcggagcttacctgccgggaaggcattgttgaagttgcaaagataatttatggagtgcatgacgaagcgaaggacaaagcttttgagttggagttgagctggatctgtgatgaatcgaaccgtcagcatcagaaggttccaaatgaactgttggagcaggccaaagctgctgctcaggcagctcttgaggagatggatgctgactaagaaacaggacgatttgcccagacttggtgtttttggtgctgttgaaatctccgatccctttggggtgacccactggacatggccaatttgtcacaatttattattttgacccatgtcatgtcaaactcctttagttgaagtctggtatctagattgacttgtatcagagctgtggtttacgcagactggattctggagtactggactgtgtgtgtttttcggaattgtgcatctgacttttagctgttcgttgactttaaaaaaaaaaaaaaaaaaaaaaaaaaaaaaaaaaaaaaaaaaaaaaaaaaaaaaaaaaaaaaaaaaaaaaaccaaaaaaacaaaacacaaaaaagcaaaccaaataaaaaattctataacntcacccaaaattcaattcaacttaccaaaaattttaaatacgcccccctttaaaaaaccatgttttttacccaccttaatcgccttg

SEQ ID NO: 47301 - DNA, 1404 bp, Zea mays
  Clone ID: MRT4577_143144C.1
ccgggctgtacgtcgccgccgagaagggccacgcggaggtcgtgcgcgagatcctaaggtctgtggcgtgcagacggccggcatcaaggccagcaatagtttcgacgcgttccacatcgccgccaagcagggccaccttgaagttctgaaggagatgctgcaggctcttcctgctcttgctatgacaacaaattctgtaaacgctacggccctggacaccgccgcgattcagggccatgttgacatcgtcaatctcctgctggaaaccgatgctagcctcgccaggatcacgaggaacaacgggaaaacggttttacactcagcagcaagaatgggccacgtggaagttgtaagatcgttgctgaataaggatcccaggattggtttgaggacagacaagaaggggcaaactgcgctgcatatggcttcgaaagcgcagaatgctgagatcgtggtcgagttgttgaagccagatgtctcggtcatccatatcgaagacaacaaggggaacaggcccttgcatgttgctactcggaaggggaatatcattatagtgcagactctgttatcagttgaggggatcgatgtcaatgcagttaacaggtctggagagactgcatttgccattgccgagaaaatggacagtgtagaactcgtgaacatcctgaaagaggctggtggagaagccgcaaagcagcacaagtacatcctccgaattcggcgaagcagctgaaggaaacagtcagcgatatcagacacgacgtccagtcccagttcaagcaaacacgtcagaccaagatgcaagtcaaccagatcaagaagaggctggagaagctccacatcggcgggctgaacaacgccatcaactccaacaccgtcgtcgcggtgctcatcgccacggtcgccttcgccgccatattcacggtcccgggaaacttcgtggaggagctgagccaggcgcctccgggcatgtccctggggcaggcgtacgtggcgagcaacccggcgttcatcgtcttcctggtcttcgacgcgctggccctcttcatctcgctcgcggtggtcgtggtgcagacctcgctgatcgtggtggagcggggggcgaagaagcggatggtgttcgtgatgaacaagctcatgtggctggcgtgcctcttcatctcggtggccttcatcgcgctgacctacgtggtggtggggcgcgacgactggtggctggcctggtgcaccatgggcatcggcgccgcgatcatgctcaccaccctcggctccatgtgctactgcatcgtcgcgcacaggcagtgctttgtttcgccagaggctgctccatggcatgcggcaccacatcagtcttcttcaaccaaagggactggaggccctcccggccggcctcgaggtacccaa

SEQ ID NO: 47302 - DNA, 265 bp, Zea mays
  Clone ID: MRT4577_143145C.1
gcactgccgccactcaccagcaaattcccaagccgccccttcccccatctctttcgcgccccatttgatcgattcctgatggcgcccaaggccgagaagaagcccgcggagaagaagccggcggaggagaaggccgagaagaagccaagggcggagaagcgcgtgccgagcaaggagggcgccgagaagagggaaaagaggaggccgagaagcaccttcgggacgtacaagttctacttcttcaaggtgctcaatcagttccacc

SEQ ID NO: 47303 - DNA, 833 bp, Zea mays
  Clone ID: MRT4577_143146C.1
aaatgccagatccagcccctggcggaacccgctcccccacccatctccccctacctctcccgattagggtttccgccgccgcgccgcccgtcccgcccgtctcgcccgccggcctgtcctcctccctcccctgcgaagcgccggtcgccgccgccgccgcatgtacgggcaccgcggggcaatgatgggaagcgggggggtttcggatgggtacgagggatcaaagaggccacgaatgatggaatcgaatccatacttcgcagtgaacgcagggagcccgttggacgtctcaaagcgggccaggatgatggagccaggccccccatattttgcaggcatgggaagcagcgctggcggcagcggcagcggcttctaccctacctatggcggcaacatggctggtgctgcaggggttaacagtggcatccaaaactttccagcggtccgtctgcgagggctcccttttgactgcgaggatgttgacatcagcaagttttttgctgggctggacatagtggactgcctcctggtccacaagaatgggcgcttctctggcgaggcctttgttgtcttcccttcatcaatgcaagcggagtttgcgctgcaccgcaacaggcagaacatgggcaggaggtacgtggaggttttcagatgcaagaagcaggattactacagcgcaatagccgccgaggtgaaccagggcggtgctctgcttgagccggagcaccggcactcgtcgcctcctctgcggtccaggaggctgtctgaagacagagcagcatggagtacactgaggtgctgaagctgcgcgggctcccctactccgccacaat

SEQ ID NO: 47304 - DNA, 272 bp, Zea mays
  Clone ID: MRT4577_143147C.1
cacagctttgaggctgtgcgagaagcagaccggaggaggaggggaatcggagaagatggttgttctcgtggtagcgacggcgtccgacccggcgtccatcggccccgccgccgcgttcctggctatgcctggctggtcccccggcccgcccatcccggaggggatggagagctttacaaatgggaatgttaggttattgaagcatgaacgcagcattgttgcagaggatgatcttgaccgtcggtggcaggaagccactggagaggctgttt

SEQ ID NO: 47305 - DNA, 467 bp, Zea mays
  Clone ID: MRT4577_143148C.1
gccgcccgggcaggtaagctttttttttttttttttttttttttttttattgttttttttttttttttttttttttttttttttttttttttttttttttttttttaaaaattggggaaaggaacatcaaaataagggggggccccatacaaaaggggggggggggtaacttggggttacaacgggggggcaatctaaaaggggggcccccccatggggggttgtcggaagggggccgctgggattggcaaaaaagaaggacaagggggcacaaaagccggcggtgtaaaaggggtggggggttcgcccacaactgatggtgaaaggggaggaaaagggggtgtgttaaaaaggaaaacggctgtgggaggctagctaccaaaagggtgggggtaatcgcgggcgcctataacaacggcggcacaagggggcccatgggcaacaagggaaaaaagacccagggggga

SEQ ID NO: 47306 - DNA, 444 bp, Zea mays
  Clone ID: MRT4577_143149C.1
gccgacaaaactcactcagcattgcatgatatacccaactcgcagacagattatacacttggtggggagggaaacaaaacaaaaaaaaactaaaaacaacggggggatcggaacagcctgctgacaggccaactaacacctatggggatgcattcctcgccactaattcgactgcagttctgcaaactctcatgcccatgcaaaatggggtgaagctaggctgcacggtttaatttcgtcgtttcaggcagctaatctcagtagtagctgggaaaaaaatccttgagctggacgacaaaaaagtcgtcgtcatggccgcgggcagtgccgcggcggcttttgcatccctcctcgaggcagttttcgtccaccttgcaaaagcagccgaggtcgctgcaactgatccctaggatgacgtggccgggcgcgccctctttcccgggg

SEQ ID NO: 47307 - DNA, 274 bp, Zea mays
  Clone ID: MRT4577_14314C.1
caagagggatacgagcaaggagctcatcgactccagagtggagaactcgacaccatgaaggtgctgatcggtgcccttgctctcctggcgctcgctgcgagcgccgcctacagtacaagcggcggctgtggctgcctattacaccaccgtttcatctaccgcctgcgttctatatgcacgctccctactatctgccggcgcagcagtatgcagccccatggcaataccccactcgaccaccggaggtaaacccgtgccagcagttcggatcctg

SEQ ID NO: 47308 - DNA, 380 bp, Zea mays
  unsure (1)..(380): unsure at all n locations
  Clone ID: MRT4577_143150C.1
aagggccccttgggaggtgaaccttttttttttaatgggattcacaaaatctaaaacatattgggataagcgggtaaacctttcaaaatactccattacacttttttttttcccttggtttaaatctaaaaactcatnncatttgatttccattagggcttttggaatataacgtgtccggaatacttcccgggattctgccccagaaaatttatgcccctcttggtttagagcaagggattttttccaccaggcttcagcttgtccctcaaggtgttgtgctgcgcactgagttttctgaacatcatcacaatggatgaggcccaatttctgttcaatggtgcgaagccaatattttgcctccaacggatctttcgctt

SEQ ID NO: 47309 - DNA, 580 bp, Zea mays
  Clone ID: MRT4577_143151C.1
ccgatagttagatttgacgaacatgaaatatagaggagactacatgagcataataatacattcccttggctattcaatgttagcgttgcaccttacaacccgcctagaaactatgtccacgatccaccttctagtacacactaatatggtatacaaagcatatgtacattctctcgccaagcagcgcaaaagtaaaaaaacagaaacaattacagggaacttacataggtaaaatcttgctcagagtgcccattagacaccttgcctccgttatatatacaaaaaaatatatatatctcaactcctacagaaaactatagtcttgaacgtcggaagtacctgatgggattgaatggaccaagttgacgggcagaagcaaatgttggccgtccattcggggacactgtcggcttgatgtcccatccttcaacatttctcggaacacaaacatcaaacaggatttggccaaggactcctttaggctccatgcagggtggatgggacatgtgggacccgggttcctgagactcatcgtgatccttcgaacttggcaagaagaagtgatcgctaggactgttag

SEQ ID NO: 47310 - DNA, 879 bp, Zea mays
  Clone ID: MRT4577_143152C.1
ctcgagccggccgggatcgaaagagaaaataaaaatccgcgacgaaccaaacgccgaaaccagccactcaccccgtccctgtctcctgcacccgtcacctccatctccaccagaaatccagaatcaaacaagtgaaagcgcaaacccttgctccgattcccctctcctcggcctcctcgacggaagtagtagagcaggggccgcgggcggagcccatgtggcccggctgcggtggccggttttactgggcgccggaatcggcgccgctggtgcaggccaggggcgtcgcggtcctgttcgcgtgggtgtggagcgacgaggcgcagctgcggccgttcgttgagctgtactcctcgctcgggtggcgctgcctcgtctgccaccccgatctcgtcgcactatatctctctgagaaagcaatatcgctggcaactggtgttataaatgagctggttaaggaactgaaaataaaaattgtgccaattggtcttgcttccttttctggcggctcaaggggatgcatgtataaggttattcagttactagatggaatatgtgaaggagatgcaatcatgaaggactatcggttagtgaggaactgtatctgcgggcaaatttatgactctagccctgtagattttgtcagtgatgtggacgcccagtttgtccaaaagcctgctgatggaaattcatctcagccaactatattgcattcatggatggcaaaggctctagcttctgtcatggatactctcttcccaagcaggattgaagctcagcgtgcagagtactggcacacactatactcggcagcaggattgggccctggtcttctattttgctcagaagctgataaccttgctcatgctatattatctg

SEQ ID NO: 47311 - DNA, 1843 bp, Zea mays
  unsure (1)..(1843): unsure at all n locations
  Clone ID: MRT4577_143153C.1
cattgggtacctcgaggccggccggatcgaaagagaaataaaaatccgcgacgaaccaaacgccgaagccagccactcaccccgtccctgtctcctgcacccgtcacctccatctccaccagaccaccagaaatccagaatcaaacaagtgaaagcgcaaacccttgctccgattcccctctcctcggcctcctcgacggaagtagcagagcaggggccgcggagcccatgtggcccggctgcggtggccggttttactgggcgccggaatcggcgccgccggggcaggccaggggcgtcgcggtcctgttcgcgtgggtgtggagcgacgagacgcagttgcggccgttcgttgagctgtactcctcgctcgggtggcgctgcctcgtctgccaccccgatctcgtcgcactatatctctctgagaaagcaatatcgctggcaactggtgttataaatgagctggttaaggaactgaaaataaaaattgtgccaattgttcttgcttccttttctggcggctcaaagggatgcatgtataaggttattcagttactagatggaatatgtgaaggagatgcaatcatgaaggactatcggttagtgaggaactgtatctgcgggcaaatttatgactctagccctgtagattttgtcagtgatgtgggcgcccagtttgtccaaaagcctgctgatggaaattcatctcagccaactatattgcattcatggatggcaaaggctctagcttctgtcatggatactctcttcccaagcaggattgaagctcagcgtgcagagtactggcacacactgtactcggcagcaggattgggcccagttcttctattttgctcagaagctgataaccttgctccatgctatattatctgtggttttgcacggcgtttgattgaactaggcacagaggttaaacttatgaaatggaacagctcccaacatgtcggtcattacaattcacatgaaactgaatacaggacagctgtagatgatatgttgaagaaggctctccttaccttctgccaccgaagccaactatatgactcaaatatggctggtgaccgggagtacaagatagcgcactcggtctgcagtctacacaatgctgcagccaattcaaacgagagtttaagaggggttcctaacagtcctagcgatcacttcttcttgccaagttcgaaggatcacgatgagtctcaggaacccgggtcccacatgtcccatccaccctgcatggagcctaaaggagtccttggccaaatcctgtttgatgtttgtgttccgagaaatgttgaaggatgggacatcaagccgacagtgtccccgaatggacggccaacatttgcttctgcccgtcaacttggtccattcaatcccatcaggtacttccgacgttcaagactatagttttctgtaggagttgagattattattttttgtatatataacggaggcaaggtgtctaatgggcactctgagcaagattttacctatgtaagctccctgtaattgtttctgttttttacttttgcgctgcttggcgagagaatgtacatatgctttgtataccatattagggcttgttcggttagctctcaatccacatggattgagtgagattggatgagtttgaatcccaaacaagtcaaacttcttctcaattttttccaatctcatccaatccatatgtattgggaataaccgaacaagcccttagtgtgtactagaaggtggatcgtggacatagtttctaggcgggttgtaaggtgcacgctaacattgaatagccaagggaatgcattattatgctcctgtangtctc

SEQ ID NO: 47312 - DNA, 789 bp, Zea mays
  Clone ID: MRT4577_143154C.1
taatgatcttgtcatgaccataaataaaataacaacataattggaacatagatataatgaaatattaacccaaaaccatataaagcagtagcagaactacccaagtgattcaggggtaaacaaggtattcaggataaacaaactagggtaacctattgggtcccatcaaaattaaacctatgcagatcattatgattaattagaacatgagtgggtaaaaagaagtgatcaagggcacaacttgcctggcacttgagattccagttaccagggtgattcttcggatcctcgtgacctcacacgaattacgccatagggagactcggccacgccgtggtgtggttccgtggagaagagttgccgccgccggccggtagtcgatgacacggacacaccagagcccctgacctcgccggtgtccgtcgggggcggtggccacaggcggatgtgggatgacgcgaagggatccgcgagcgcgccgacgagccagatcccgtggtaactgacatcgacaccgcggaccccgaccatggcggcattgggttccttggtgctagcctcggacgcggtgacccactctctgttctctctctttgctctcctttcttcgtcgatggcgcgagcaccaaaggtggaggcgcccagaaaatttcctccccccgggccacggacacaacccgcgagcacgactctccctctctccatctctcagtttgatctctccgctgcttgctcggaggcctcacgagtcttgacgatggccgagggagtcacaacccgtgtatattt

SEQ ID NO: 47313 - DNA, 814 bp, Zea mays
  Clone ID: MRT4577_143155C.1
agagtttctgctttgttcagacttcagagcccttcctcttgtgtccgtgcaaattggtgatacttgaacagggatctcctccatattagtgagcaggatgtataatcctcccagtgggcaggacatgtcctactacgatcatgtgcagaagcgccatgaggagaagggctgcctatatgcatggtatggtactcgctaacctttctgttgtttctgttcttctcgattacacccatctctgttatacatgtgtgtgtggttttgttaacatagtttccaccatgatacccgtgatgaaaactaagaacactttgaactctgaaacttgtcttcattcatttctttgggaaacaaaagaaggaggaatcttgtattgagacttgatgttaaaagcttatccggagttcagtttcagaatattggttggtttagttggatagaaagaagtgtggagaataattcacaagtatactcctggccacacgggttcgaaacagcctctccgcgttgtttgcagagaaagccttactttggtttctgtgtcacaagatcagcctaacatgaacgagaataccttggaaagaccaaactaggaagtcatatgcaacatacaccttcatagaaaccaattatttggaggtctcgtcttctactttgaaattgagttaggaataccggcctaggtatattagtaaatattactcagcagcaacttttgaaaagcggtttgagttttcaaaagagaaaaccatgtacagtttgaggtttccagaaaaaattgagtaacatgaactgggaagaatccctccatatg

SEQ ID NO: 47314 - DNA, 663 bp, Zea mays
  Clone ID: MRT4577_143156C.1
aattcggcacgaggcaaaccccacccagtcgctgtctccagccccaaatcctcgagctccctccgtcagtggcgcgatggggttcgtggatccggcggcgccgctgctggcgacgtgcggcggcgacacggttaagcttttcgacgtcacggtggagaccggcgacccctgcgtcctcgcctacacccccgcgcccgcgcaccccgtcaacgccgtcaagtggaaccacaccaatcttattgtagcaagtgctggcgatgataaaaagatctcattgtggcataagaagggtcaaaatgtaggacaactaccaacatcaactgtcgaccgtggtgatgacatagaggagtgcatttattctatcagctttagcaacaaaggttctcgatatctctgttcctgtggaagtggccatattgttaggatatgggatttgcagcgtaagagatgtatcaaatggctaagcggtcacactgacacaattactggcgtaatgtataactgcaaagatgaacatttggcatcgatcagcatgaagggggacctgattcttcataatcttgcttctggagcacgtgtttctgaacttagcgatccaaacggacaggttctgagagtgcttgattattcacgaaatagtaggcatttattggtgacagctgg

SEQ ID NO: 47315 - DNA, 452 bp, Zea mays
  Clone ID: MRT4577_143157C.1
gtccggattccgggctagatgtggcgaccccggtcgcttacttgcacctgccggtgctggcttccaacccatttgctctgccaaaggtggctgcataccaacagcatcaacaattgcaacagtttatgccagagctcagactactagccatggtgaaccttgccgactacctacaacagcgacaactgctgtcatctagccctctcgtcgtggctaatgcacatacttacctgcgacatcaattgctgcagcagatagcaccagctctgactcagctagctgcggcaaacgctgctgcctactatgcacagctgcttacattcaaccaactgactgtttcgaactctgctgcgtacgtacaacagcgactacaggtacttaatccagtatcagtgcctaacccattgttcactgccttactacagctacaacaattgctaccatacagtcag

SEQ ID NO: 47316 - DNA, 313 bp, Zea mays
  Clone ID: MRT4577_143158C.1
ctttttttttttttttttttttttttttttttttttttttttttttttttttagttttgtttttgttttttttttttttttatttttgcaaaagaaaggttgggaaaggctaaataaaaacggccccaagtgttatgagaaggttttaatgggcacaggttgggggtcaaaaaaccggaggggaaggggccttaaaaagatttgcccttttaacgttaaaaaagctgttccaaaattaaacaggggggggaaccttgccctttgttgggaaccccttaagagaaggtgtggctttaacttggccatccccatt

SEQ ID NO: 47317 - DNA, 379 bp, Zea mays
  Clone ID: MRT4577_143159C.1
ggccgggccagaaaaccgcagggaaagctccagggaaactcacagagagcatggcaatctagtatcgagagagccgcttaaagaggctgaagatgatagctccgggagaggacgagcgctgaagctgagaccaagcattctctaagaatgccaagagaaggatgagagccacgtagaagttcatggcatgattaccattcaagattggtcttggtaatgtctcaccgacaacaagagagaaagatggactttattgtgccatgaaagatgcggtgaacagtcacaaaccaaccaccaccaatgaaggcatcattgcatggaccaagtgcaagcgaaagaccccatataggggcatccgcctacgcccttggagaaaatg

SEQ ID NO: 47318 - DNA, 1116 bp, Zea mays
  Clone ID: MRT4577_14315C.1
cattgggtacctcgaggccggccgggccgacatagaaaaaggggagaactagaaggaaccgctgtgtcacacacacacacaccacacggcggccggagcggcggagccaccataaattggtgctctctccgtccgaagtgctctctgaaattccccccaaatatcccagccactgccgtcgtgcagtcaaagtgtcaaaccatgccggcagtagcgttcgcgtcggctcctgccatattcgcctccgcctccgcgcgtccctgccgcagcgcggctccgggcatcctttcctccgactccgggcggccccgccgcggcgcgcgtggcgccgtccagtgtgaggtcgcctcctcctcggcaccgtcggcggctggaccccaggccgcccggtgggcccagaggaccgtggtcatcccgccacagcgccgcgggtgccacctcatcaccaacaagatcgtaaatgagatagggaatgacctggccgacttcaagtgtggcatggcgcatctgttcttgcagcacacaagtgcgtcgttgactattaatgagaactacgactctgatgtccaggttgacactgaaacatttcttagtcgcattgttccagagggtccatctgctccatggaggcacaccatagaaggacctgatgacatgccagcacatatcaaatcatcaatgtttggttgttccctgatgattcctatcaccaatggacgtctcaacatgggaacttggcagggtatttggctctgtgaacatcgagattatgctactcctcgacagattgtgatcacgctgaatgggatctagcctaaggtgatctatgttaagagctggaaatgcaatgcagcgacttcgacatgtttaaatcagatgcactgaaactgaaactgtctttggcccagttgtgataggcgttccagtggagaatgttatttgtaatatgatgctagcatgaggggaacaaaatctcttaacgagcttcttctcatgttgagcttgtttagttatctttggtggtttaaagaaatggtttataagttgttagtgtcgtttggttcacgaaatgtaacgtaaatggtaatgataatgattcacactctgattaacact

SEQ ID NO: 47319 - DNA, 317 bp, Zea mays
  Clone ID: MRT4577_143160C.1
aaagaaagaaataattgaaaaaaaaaaaaaaaaaaaaaataaaaaaataaaaaaaaaaaaaaaaaaaaaaaaaaagggttaaaaaaaaagagagaaaggagaaaaaaaaaaaaataataaaaaaagggggggggcgtttttaaaggatcaaactttacgtacgcgtgtttggaacataatagtttttttatagggcaactaaattaaaattaattggccgggttttaaaaaggttggaattggaaaaaccttgggtttaccaaatttaatcgctttgaaaaaaatccctttttgacaagttggttaaaaaagaaaaa

SEQ ID NO: 47320 - DNA, 1636 bp, Zea mays
  Clone ID: MRT4577_143161C.1
ccgggcaggaagagcatgtgcgatctccaaacaaataaactaataagctatgaccgtgagccgtcgtcgtcggagaagaagaagaaaggctagtgttgtgctgctgtcgcatcagccgcccgccgagcctcagatccaccaccagcaccgatgccggtcctctgcacccaccacgttcagctccgcctctggtggcgccgtctcggccgacgcagcgccacattcgccctcgcgctcctcgccgtcgccctcgtgctcacgctctcccgctacgccgcaggccctgcgccctccccgcccccgtcctcgtcctacgggcatcgcctcccggccctcgtcgacatcaccctcgtctacggcgccatcgacaagggcgcagtgtgcttggatggtacgccgcctgcctaccacttccttcctggatttggggacggatcccacaactggctcctccacttggagggcggaagctggtgccgcaatttcgaatcatgtgctcgccgtaagaaaacaaatctcggttcctctgcccacatggatactcgtgctgaattcgtcggcatcctaagtgacgatcaatctcaaaatccagatttttacaactggaacaaagtgaaaataagatactgtgatggtgcatcattctctggaaatgtccaagaagaagtcaagaatgatacaggtttcttcttcagaggccagcgtatctgggaagcagtcatggccgaacttctgtctaaggggctagccagagcgaaacaggcttttttgactggatgctcggctggtggcctttctacatacattcattgtgatgatttccgggcacttctaccaaacacacctactgtcaagtgcctcgcggatggtggattctttcttgatgtagaagacatttctggaagaaggtatatgcggggcttttataacgatgttgctcggctgcaggatgtgcgtaaaatattccctcattgcagctcagatatggaaccggggcagtgcttcttcccacaagaagttgcaaaaagcatcaccaccccgatgtttatactcaatccagcatatgatgtttggcaggtagagcatgtgttgtctccagaaggttctgaccgtgaaaatctatggcaaaattgcaggatggatattagcaggtgtagctcaaaacagcttgaagttcttcaaggtttcaggaaagcgctgcttgatgctataaatgaattcaagaagagaagggactggggtatgttcattgactcctgctttatacactgtcagtcaatgaaagctttggcttggcattcgccatcagctgctagagtgaacaacaagacggccgcagaagcggtgggagattggttctttgagcggagggaggtgaaggaaatagattgtgaatatccctgcaacccgacatgctacaatgtggttctcgatcagccctacaaggaagattaactgacttgcagtgttagttgtggtagatttaattcgtaattgactctccatgagttgatatttgtcgagctaaatgtgatcattagcagagttcggactgagacttgtacttgaggcctattaaaatacgaggagaacaatacttacaaagagaattctatacaatgagcgttgatatgac

SEQ ID NO: 47321 - DNA, 162 bp, Zea mays
  unsure (1)..(162): unsure at all n locations
  Clone ID: MRT4577_143162C.1
gacgcccaangcnattatcatctctccttgctagaggagcattcngagagtaagatgcatcaatagttacactagctccgagagatgataatcgccattggcgtcggctctacatgtgctgtataacagaggcaagttggttcttctacatttcaggggggg

SEQ ID NO: 47322 - DNA, 405 bp, Zea mays
  Clone ID: MRT4577_143163C.1
cccccaggaccgggggcccagggaagggttttggggggggaccggggcaaaaggtcaatacccaaaatttccctggaaaaaacccgggggaaaaacaaaaggttaatcccctctgggggggccaaaaaggcccaaaaacccccaccaaaaagaaaaagggggccacttggaaacaccaaaaaaaaggggggccccccccaacaaaacccttttgcccccccaaagggcttaaaccggattttttttaaaagggttatttgggcccaaaagttgtggggggggagggaaaagcctaaaaaccgggaggggggttcccggaaacccatgggaaaaatttggttttgccccttcccaaagggaagaaaacccgttaaaaaacccacgggggaagaagcccaccggggg

SEQ ID NO: 47323 - DNA, 553 bp, Zea mays
  Clone ID: MRT4577_143164C.1
atgatattccaacaaatgggacctaaagcgacatggcctgtgagtcatgaattttgtaaatgccatttttttttctttatttgatttttttcagaaatgagttttctgtttccattttaatttttcttgggtgaaatgtacttagttttctatgaatgaacaaaggtgtgagaaggtaccttgtaagagtccatttatctgcctggtttgttgaatatctctagaagttatgttcctcaatcagaggtatccagagaatccattcatcccaagcattctgatttttatgtctgacatagtgtatcataaactatttttacactgttaattcattctttttatcaaaacaatgccagtttctaggaaggctttatgccatttgttactacctaattgtgtacttaaaccaagactggcaatgaaattttctcttaatcattcttgtgttaaatgcagggtattacatgtatgtacttaatgaataagtgaatttggaaacaaatttctgagcacaaaatataggcatgtcaggtataaatagaggttctttttg

SEQ ID NO: 47324 - DNA, 617 bp, Zea mays
  Clone ID: MRT4577_143165C.1
ttgccttctcagtctcccatccctgaaaatctcacagaaccctacgcctcgctccccaccaccccgccgtgccacctcctgtaccatctgcgtcaagatgagtcatgaccctgaggagaagtgcgctcacaggatcgacaaggattacatgcacgtgtacagttgacctgacggataggatgctaaggacgatatggatccagatggggtcttcacattctctgacagtgctgccacgaacttggatgaattgagactatgatactgaatgacaaatgaaccgcctgaggctaatgaaataagtgtgcagtgcaggtccatattctgtatcgcacaaatagctgaagccagatgctcggaagaaactcgttcgagatgatccacagcgcacctctctttgtgaaagttgattgggcacaaatgctgtgatgaagatgatgatgccgctgatatcaacatgtatgggatggacttctcgaatttctgtgacatgagtgctatgagcggcatgggtgtcatgtgtgatatgcatgacacgggtggacttgccgttatgactggaatgcctggacgtggaggtatgtagcgcatgttgagtggctgatttcgaagatgag

SEQ ID NO: 47325 - DNA, 307 bp, Zea mays
  Clone ID: MRT4577_143166C.1
gaggctactgatgcgagggtgagcacggactgggagactgggagggaaagaggctttgactctgtgaactactccgacagtgatgctgccaaggaagctatctctgcaatgaatggccaggtaattgatggtcagcagatacatatcaacatggctaatgagagagctgctgagaacctgcgtgatgatggctatagcgagcagtattatagaggtagtaactacgaatgtaacggcggctacagaggcggtggctatggtggctgcaggcaaagatatgatgcgtgcagggggcaggatcctatta

SEQ ID NO: 47326 - DNA, 201 bp, Zea mays
  Clone ID: MRT4577_143167C.1
cacgacccctcttcggattcccagtacctctcttggccggacgcttggcgcggcccacagtgcgtaaaaatgcgccaggcgagagcatggataacatcatcagcctgatccttatcaccattgaacacttcaccatgtgccagcttaggattgtccttgactttacagcgccccacgcacagagagccctgagtaccactg

SEQ ID NO: 47327 - DNA, 290 bp, Zea mays
  Clone ID: MRT4577_143168C.1
attatttattacttctggtaatatgatatatatatagctacttattaggcgacatttccaatcgtctagcgtacgtgtcgtgtcgtctgtgctgtgcctaaccaagtttcatcttttatattgtgccgccccgtcgatcttgcatgtgcaggttcaacatcgtgggacaggtacgtacgtcgtacgccggcctgatcaatcttgcttcacagattcatgcgtgcatagctgactagctagctgcaacacatatagtatacactgcgtattttcatccagctgaaattaaa

SEQ ID NO: 47328 - DNA, 522 bp, Zea mays
  unsure (1)..(522): unsure at all n locations
  Clone ID: MRT4577_143169C.1
acacaacgggnccaaaccaccgngaccaaccaaaccaacaancaacatgtctgacctcggacgcaagggactcggtgaccaggttcaggagaaggttactcctgactcccagaagtccactctcgaccaggccaaggagggcgttactggtgcctacgaccgcgctgccggcgctgtccagcctgagcaggataagtccgccacccagaagcttggtgactccacccgctccggcaaggacgaggcctcaggccagggccaggggatcctcgcctccgcccaggagactctcggcaatgctgcccagtccgtccaggacaccctcggcggcaagaaatagacggcttctcttcgacacgattgacgactgagaccttcttattcccgcttttcaccttcggctcttcactatgaatatcctataagaacatcggtggaggaagtcagtgtatcactataccctaggacttatcaatgaaatgagcgattgaacacgctaaaaaaaaaaaaaacaaaacggcc

SEQ ID NO: 47329 - DNA, 295 bp, Zea mays
  Clone ID: MRT4577_14316C.1
agggaacacgttttcgcattccatcagaggttacagttcccggtgagctcagcccaaacgtttcacaattatttaaaacctaaaaacgttcctaaatttttggaggggaaaaaatggaagattctttcgagaccggggggaaactccagcatttaaattttaattaagggggggggggacaaagtccaacacaacattgtttggttgttgacaaaggggcacctttttctgatctccccctgggcgccggggagcacgcccaccctgcccatgttgagcatggacccccccaaat

SEQ ID NO: 47330 - DNA, 249 bp, Zea mays
  Clone ID: MRT4577_143170C.1
attcggctcgaggcgagcagcactagtcattgtcgcgggcgaggagcagaccagcacccagcagccctcgacggggggcggcagctgcaacaaacaccaacaaacgccttatacccactatctataacacatacaaaatcccaaaacagaactgcattctgaaacaataccagagtccaaaaaactactaccaacaaaacaaaaccagttgaacaaaaagccaaacgaacaacaaaaaaagcaccacca

SEQ ID NO: 47331 - DNA, 284 bp, Zea mays
  Clone ID: MRT4577_143171C.1
tcccgcgtctacccacacgtcctagtgttcatcgtgccctaagtttctctccttcaccgcggagctcaagtactgctcgttttattacaaattctgtcggcacaccatttctatcatcaccaactatttaatattcatcaactctcatcaaattctatcaacatttttcttaatctttttatcttatctttttttcattttttatttatttattttttatcttaatattttatttttttattatattttatatatcattcttaattatttattcttttttattt

SEQ ID NO: 47332 - DNA, 480 bp, Zea mays
  Clone ID: MRT4577_143172C.1
ctgttcgtccgccttttcggattcctccccttcccggcctcgtctgctcttcttctctccctggccccagagacggcgagcgggacacaataagggaggcctacttgcttcgcctcctcatcctcgtcggcggtctcaccgacggccaacggggcgcagccagggactcctcctactcgtgctgtactgccgtttactgttatcttttcttttcttttttgggtgcggcgaatcggacagctaaacagaaatctctggattggaaacaaatctaggcttcctgaattctgtttcatgcaaaggatagtggggcagggcaagtcgagtcatgggagttgctgggttgtgcagagcgctgaatagcagtttgggcgtgcaatggtttctccggaagttctcctccgaatctgacaggctgtactacaccggaggcctgcccaatcctggcaccaattgctttctccgtgacttcctggcagc

SEQ ID NO: 47333 - DNA, 404 bp, Zea mays
  Clone ID: MRT4577_143173C.1
aaagaccattacccgatgccgttcgttgaccaaatgcccttcgttgaccaaatgcttgagcgcctggccaagcattcttacttctacttcctagacagctactccaggtttctgtaaattcctatccgaccagaggatcaggagaagaccaccttcccatgtctaaatggaacgttttcccattgaaggactccttcgggctctgcaatgcaccagtgatcttccagcgatgtatgatgacaatcttctctgattttattgaaggtatcattgaagtcttcatggacgacttcagtgtctgtggaccctccttcgacgactgtctagaaaatctgtcaaaagttctccagtgatgcgaagaaatgaacctcgtcctcaactgggaaaagtgtcattttatggta

SEQ ID NO: 47334 - DNA, 251 bp, Zea mays
  Clone ID: MRT4577_143174C.1
aaccaaagtaagtgtgtcatggaaatcttgcatatgtatgaaaggatcgcgatacggggctgagtggctcgataaaagagcaatgacctggcaagctagtgacttcgctagtgcagcgactctcaagggtccagggtgaacaacaccaggaagaaactctagtgcatggtcaaatgtctgcattgtagatgcgccattaacgagaaagggattggcaacaggacagcgtagcagtggatttcctacaaggg

SEQ ID NO: 47335 - DNA, 168 bp, Zea mays
  Clone ID: MRT4577_143175C.1
cgccggtgctcctcttctcaatgaaacgagggttgctgcctcggttcggtctgagctcccatagactgacgcttccccccctgaagagaacatgcgccctttgttggaacgaaccatggaacgcacctctataatcgagcaacctccacagcggcagcggagcctgat

SEQ ID NO: 47336 - DNA, 279 bp, Zea mays
  unsure (1)..(279): unsure at all n locations
  Clone ID: MRT4577_143176C.1
tgacctccaagaattcaggtcttattttttattacagtatggggttgttctaataagctactggcatatgatggtaatacttgataaattcgtatggatgagggaaacctaagtcagctgttggtatgtgcatctgtgattaaatctgatgggttttgaatcagaaaaattatgacaaccatcttataaattttaggaaatagatatattattgtacttaaaactanattttctgaacagctcatcaaacttggaccttgacctanactcatttcaatt

SEQ ID NO: 47337 - DNA, 128 bp, Zea mays
  Clone ID: MRT4577_143177C.1
gtacatgtgcacgcagtgtccttcgatacgtattcctggtacggacaacgggcgtatgggtagactcccacgcgcattcaaggagagcaggacgagagatctgtatggaggatcgagggcttggtact

SEQ ID NO: 47338 - DNA, 122 bp, Zea mays
  Clone ID: MRT4577_143178C.1
attcgaagtatgaagatgactcaccgggtgatcgcaaccggtcaggaagcaaagcgattggagcactgctctaaactcatgctgatgcacttgccaataatgattcagcctatcatggtgat

SEQ ID NO: 47339 - DNA, 1266 bp, Zea mays
  Clone ID: MRT4577_143179C.1
ttgggaccctcgaggccggccgggagttcagtacagcacatcttcctcgcagcgccggcgctccatcttccgctccctcccccaccttcgatcggcacgcaggctcggcgtcgtcgtcagcggttcctcctcccgcctctcgccagtagcctcgcgccctcgccgactggcgaccctgccttgaaggggctggcaagatgatcggcgtagggaaggcgaagcagtacgccaacgtccttgacaagcccctcagccgtggcaggcaggaggtcagtttgagtgcatttgcattcttgttctctgagttggttcagtacaaccagactcaagttgacaacattactgagctggaacggaggctggaggatgctggttatgctgttggtgcaagggtgcttgaactactctgtcacagggagaagggaaatagacgagagacacgacttctgggcattttatcattcatccacagtactgtttggaaagtgttgtttggaaaggtggctgactcacttgaaaagggaacagaacacgaggatgaatacatgatcagtgaaagggagcttcttgttaaccgtttcatttctgtgccaaaagacatgggagcattcaactgtggagcttttgttgcgggcattgtaaagggtgtattagataatgccggctttcctgccgtagttactgcacattttgtgccaattgaaggccagcaaaggccaagaacgacaatcctgataaagtttgctgaagaggtattacacagagaagcaagactgggctgagtttttatgtatgtacacaaaactttgactagcctatttgtaaggtgagatcgcaggtgcttcatcagtcttattgaaatccgaccgaaactgctgtattaatgcttttccttgcattcaccttgtattaaaggaatccttcatcttttgatttttcgtattttgtagcctggtagcttttattttctttttatttgtagtttttgaaactgttacattgttactacctttatttttctttataagggatacacacatcaaggttcaaacttcaaaatcgttggtggtcttgtggcatcttgaggcaagtagttgtgtgcgtgggtcctgctggcactttttgctggctgtgttttcatgcgcaggaggatgcagacctgcagttctgtgcgcagtggaagtttggtggtcttgtgttctaatttttttgtattgtactttggtctatttttttggactgttttcttctcttaataatttaatg

SEQ ID NO: 47340 - DNA, 865 bp, Zea mays
  unsure (1)..(865): unsure at all n locations
  Clone ID: MRT4577_14317C.1
ttgggaccctcgaggccggccgggctgaattcccccaatatcccagccactgccgtcgtgcagtcaaagtgtcaaaccatgccggcagtagcgttcgcgtcggctccggccatattcgcctccgcctccgtgcgtccctgccgcagcgcggctccgggcatcctttcctccgactccgggcggccccgccgcggcgcgcgtggcgccgtccggtgtgaggtcgcctcctcctcggcaccgtcggcggctggaccccaggccgcccggtgggcccagaggaccgtggtcatcccgccacagcgccgcgggtgccacctcatcaccaacaagattgtaaatgagatagggaatgacctggccgacttcaagtgtggcatggcgcatctgttcttgcagcacacaagtgcgtcgttgactattaatgagaactacgactctgatgtccaggttgacactgaaacatttcttagtcgcattgttccagagggtccatctgctccatggaggcacaccatagaaggacctgatgacatgccagcacatatcaaatcatcaatgtttggttgttccctgatgattcctatcaccaatggacgtctcaacatgggaacctggcaggcacgaaaatatctaacttggcttgtaccatattgtagacacttaatcacctcccgtgccaacgtttaagtttctatttttgaggtgactaggctctataaacatcgagattatgctactcctcgacagattgtgatcacgctcagtgggatctagcctaaggtgatctatgntaagagctggaaatgcaatgcagcgactccgacatgtttaaatcagatgcactgaaacagaaactggctttggc

SEQ ID NO: 47341 - DNA, 1463 bp, Zea mays
  unsure (1)..(1463): unsure at all n locations
  Clone ID: MRT4577_143180C.1
ggaccctgccggccggccggggaacttttatttagtgacccatatagaagcccattagttcagcacagcacatcttcctcgcagcgccggcgctccatcttccgctccctcccccaccttcgatcggcacgcaggctcggcgtcgtcgtcagcggttcctcctcccgcctctcgccagtagcctcgcgccctcgccgactggcgaccctgccttgaaggggctggcaagatgatcggcgtagggaaggcgaagcagtacgccaacgtccttgacaagcccctcagccgtggcaggcaggaggtcagtttgagtgcatttgcattcttgttctctgagttggttcagtacaaccagactcaagttgacaacattactgagctggaacggaggctggaggatgctggttatgctgttggtgcaagggtgcttgaactactctgtcacagggagaagggaaatagacgagagacacgacttctgggcattttatcattcatccacagtactgtttggaaagtgttgtttggaaaggtggctgactcacttgaaaagggaacagaacacgaggatgaatacatgatcagtgaaaaggagcttcttgttaaccgtttcatttctgtgccaaaagacatgggagcattcaactgtggagcttttgttgcgggcattgtaaagggtgtattagataatgccggctttcctgccgtagttactgcacattttgtgccaattgaaggccagcaaaggccaagaacgacaatcctgataaagtttgctgaagaggtattacacagagaagcaagactgggctgagtttttatgtatgtacacaaaacctttgactagcctatttgtaaggtgaatcgttactggagtttggtgatttcttgtatttgagtagttcggtgatttcttgtatttgagttatgtaatagcagtgtgactgagaataaaagttatgtaggtgagatcgcaggtgcttcatcagtcttattgaaatccgaccgaaactgctgtattaatgcttttccttgcattcaccttgtattaaaggaatccttcatcttttgatttttaaaaaaaaaaaaaaaaaaaaaaaattttgtagccttgtagctttttattttctttttagtttttgaagctgttacattgttactacctctatttttctttataagggatacacacatcaaggttcaaacttcaaaatcgttggtggtcttgtggcatcttgaggcattggaccttggtgctgcctttgtttgtccttgaagactgtcgaagctctgggcgcacgaaatctgcatccgcggtcactgagatgtccccggtactctgcgttgttaccactgcttaagggcgaatggccgctcactggcggcctgttctagtggttccgagctccggtccangcttgccgtcttcctggccnttggtgcttcctgtgtgcctgtgttat

SEQ ID NO: 47342 - DNA, 274 bp, Zea mays
  Clone ID: MRT4577_143181C.1
cggacgcgtgggcggacgcgtgggcggacgcgtgggcggacgcgtggggggagcaggcggtttatcttaagccagcgtattgttaacacttgtcacgagggcgaaattttgtacaatttgaaaattcaagagcctgaattgtggggcagttatgattgtagaatctatcagagacttagagctaaattggctagaggtatgactcctagctcatattagtttcatccctatgttgcttaaagattagcaataatgcctaaatgaatttaatggt

SEQ ID NO: 47343 - DNA, 1048 bp, Zea mays
  Clone ID: MRT4577_143182C.1
attgggtccctcgaggccggccggggtgtacctactcgcacctcctcctccgtcagttctgatctgcttctccagtctccacacaacacaacagagcagaaggcagcacgggcgctgatggcgatgggggaggcgctgcgggcggctgccgctgacgcggtggtgacattcctgtgggtgctgtgcgtctccacgctgggggcctcgacgacggcggtgacgtcctacctgaggctgcagggcgtccacttcgcgctcctggtcaccgtctccctcctctccgtcctcctcttcgtcttcaatatcctttgcgacgcactcggcggcgctagcttcaaccccaccggcgtcgccgccttctacgccgccggagtcaccagcccctctctcttctccatcgcgctccgattaccggcacaggctgccggcgctgtgggcggtgctcttgccatctcggagctgatgccggcgcagtacaggcacatgcttggggggccctcgctcaaggtggatccccacacaggcgccggcgccgaattagtgcttacttttgtcatcaccctggccgtgctcttgatcatagtcaaggggccccgcaaccccatcatcaagacatggatgatctccatctgcactctgtgcctcgtcctctctggtgcagcatacaccggcccttccatgaacccagccaatgcatttggctgggcatatgttaacaaccgccataatacgtgggagcagttctatgtgtactggatatgtcccttcattggtgccattcttgctgcgtggatcttcagggctatgttcctaacaccgccacctaagcccaaggccaagaaagcatgatgaacatcatttggtcatggatgctggatttgataagtcaacatgaattgctagaataagaggaacgccaataagttcctggttcccagcatgttgaattaaattgattaatgtgatactctattactcgtaccatttatcataaggttctttatgcgaatatgaaatatctacctgtgtatatacacatgtactttcc

SEQ ID NO: 47344 - DNA, 395 bp, Zea mays
  Clone ID: MRT4577_143183C.1
gattaaagcacacggaggcctcagcctaaattggcacacctccgagaggggcggattcaagttcacagaggcctgcttgagagcacacccaaaaaaattcgcacactcaaccccacacacatgagcacctcacagcccggggggggcatcttccatttatcggctcatatggattgccttcggcataaaattaatcccgtggacaaacaagggctgcgagccggggataatatacaacgaaagcgaaggcttcatgccgctgatggcgactctgcccacttattcactacctctatcaaattgtcgaatcctgttcggtgtgagaagctgacaaaagattccacttactggcgtgtgccattccaataggtaaagagagagggcaaaacccccgc

SEQ ID NO: 47345 - DNA, 447 bp, Zea mays
  Clone ID: MRT4577_143185C.1
tcgtctacattcacgtgcaactgtcagaagcaggtttttacaccggatggaggctaacacacactcttctcttaatcccgtgttcgcctacctatccttcgtcagtgtctcgatcctccttgttgtcttcttccttttattagcctaatcttccttcatacgacataactcattatatatatacataatccattttccgtaaagcatctatttaattgattgattgtctcatattcaattattatattctcttatacatttatttaacgtattttaaatttctctttattacaataatcttatttttaattacaccaatttcctttacatttctattttataattattcttatatttctcttattctatattctttttttctttctattattatatttcctattatataattatatattcttattcttttttatatttttattttat

SEQ ID NO: 47346 - DNA, 378 bp, Zea mays
  Clone ID: MRT4577_143186C.1
gtgaacttgccttggcgtttggagaactgttgaggagcttatggaccactgacggaaaaccagttccacctcattatttcaaggaaaaaattgcatgttttgctcctcagtttggtggctttaatcagcatgattcacaggaacttcttgcttttttactggatggtctccatgaagatcttaaccaggttaaatgtaaaccgtatgaagaagcaaaggatgcaagtggccgtcctgacgaagaagtagcagatgagtactggagcaaccatttagctcgaaatgactctgttatagttgatacatgccatggacagtacaaatctacattaacttgtcctacttgcagtaaaacatctgtcacctttgacccattta

SEQ ID NO: 47347 - DNA, 583 bp, Zea mays
  unsure (1)..(583): unsure at all n locations
  Clone ID: MRT4577_143187C.1
ncaatggctaccaacatttagccctccttgcgcttcttgccctttttgtgagcgcaacaaatgcgtacattattccacaatgctcactcgctcctagccgccatcatcccacagttcctcccaccagttacttcaatgcgcttcgcacacctagctgcgccagccaatccgcaacaacaagcgcttgcgacgagcgtcttacaacaacctatagcccaattgcaacaacaatccttgcctcatataacaatccaagccatcactacgtcacacctgccacgcctcctaccagcaacttgcccacctacctatggtgaaccctgccgcctacttgcaagactagctgtttgcatccaccccacttgctctggcgaacgtagttgcctaccatcatcaacaacagctacaacagtctctgccaacgctcagtcaactagccatggtgaaccctgccgactacgtacaacaacatcaactgctttcatctagcccgctcgctgtgggcaatgtacctacatacctgcaacaacaattgttgcaacaggatcgtaccacctttgactcaactagctgtggcaaaccc

SEQ ID NO: 47348 - DNA, 781 bp, Zea mays
  unsure (1)..(781): unsure at all n locations
  Clone ID: MRT4577_143188C.1
gctttggtacatgacccagcccgatcggatattactgttaaggaggggcgaaaagtagagcagcagagcggagtgacccagcccgatcctctgccgcttccgtcggcgccgccggctggagttggcatgggtgaggcgctcgggatcctcctgtatatactaatggtaggttttttgttgttgtggtggtattcggccttgtgctggtctggcgtgatgccgatggagtgttggccgccgtcgctcgcgcgcagcgttcggtggctgtcgacctcgtcttctgcttcgtctccttggtggaggcaaaagggaggcggcggatccgacgctagctcccccaataagcgcgtggctgcctcagttcgagccgctctggtgttctcccgtcttgcttctagccgtcatggtggcggcaagggaagaggtgggatggcgcggcggggctcgagtctctggtgggtgttctcgctggatctgagcttccagcgagattgtccggccctgatctgctggagggcctccagcgtgccgcctgctgctgcttccatcgcggtgatggagncgctggaggtggtcacaagggaagcttggatgtcgctgatggagttcgtgagctcactcgngcggtgggatttggagaaactgtggcgcccttgctggtcggctgcccggttgattccgacaagccgccgtatccttcagggtcgaagggcgaccatttgcattcctcccggccatgnaggncnaagggggaggcaggactgcttttcacggtggagtc

SEQ ID NO: 47349 - DNA, 321 bp, Zea mays
  unsure (1)..(321): unsure at all n locations
  Clone ID: MRT4577_143189C.1
ctgnctgattcatcgccaccaatggccacgtgccggggggcttatctcccgaccgtggcggcggtcgaggaagcccccctggtggagaccccgcctccggccgtcgagcccgaggagactgcccccgtcgaggccgaggccaaggctgctgctcctgctgatcccgaggagcttcccgcggccgaacagcatgcagacgccgaggcggaggccgctgctcctgctggcgccgaggagcccgaggcggccgaaccggccgctgtggcggagggtgctgctcctgctgggacccaggagacccctgcggtcgagcaggaggca

SEQ ID NO: 47350 - DNA, 259 bp, Zea mays
  unsure (1)..(259): unsure at all n locations
  Clone ID: MRT4577_14318C.1
caaaaaacggagacagaacaaaacgcaaagcaaccaaagagggcaccgccaangaagggngggggggagaacgnacgagggcaagacaagcaagggggnagaagggcagcaaggggggcagnnngaagagggngcccagcggaggcgcagcgggcaggnagaacggcaacaacggggagcgggncaagaaggcaacagggcacacaacagcnagcaggcgcgaaggnaggagcngangccgaagnaaaaaagcagcaga

SEQ ID NO: 47351 - DNA, 264 bp, Zea mays
  Clone ID: MRT4577_143190C.1
ccacatgttgtctcaactgacggtataagcggtgagcacttgatcagatgtgtcgacgaccgtgttttgcgaatgaagataccattgcctatactagcttcatatgcgagcactatatagacacacgagagttcgactaggcccacagttgtcatcgaagtaggcggatagactccattaattctgtgtgaacaaacggagtgcgccaactacctgatcggtgtggtcacaatggcgaccgccgcggacccacttctgtggacg

SEQ ID NO: 47352 - DNA, 863 bp, Zea mays
  unsure (1)..(863): unsure at all n locations
  Clone ID: MRT4577_143191C.1
cattgggacctcgaggcggcgggattgcttccggctagatactagcggggggcagtggcagcagcacagagcacacgtacaccactgtccacttcaacttgccttctcctgccactattatatcttcgtagtcaaagaggtgtcgtccatggggacggcttcaacaagcccagacaccatggaggcggcaaggctccccagtctctccatcaccgtcgagaagaacccgccggaggcgcgcttgcttcaactcggcgtcaagtcctggcccaagtatatattaatccaaagctttctgcttcctttctcactcaccggcctttaattacgtggcatgttcgttcgttctgtacctaagtttttgcctctcatctctgatctatcgatcctcttggccatgcatgcgcgcgtcgcgtgtgtgcatatattatatgcgaagatggggatgtccgccggggaggttcccgctcaagttcgacgcggcgctgacgtgctacctagtgaagggcagggtgagggccgccgtgaagggctcccgcgagtgcgtcgacaagcactacaacttcgacccctcctaaaaccatatattagctagccccactcctcgggtggaccacacgaacgcaccttctttcttgcgttctgatctgtctcttcttctttttgactgctgaaagcctcgaccgaattcctgttgccgacgtggattgtaaacctctgcgacgaccgtggtttatctagcgaggattcgtatggtaggcattagttttccctttcaggactcgatcgtaagctgtgttgtgacttgtgangttactgaagtgatggtagctagtaaattaatatactatacgacaaatata

SEQ ID NO: 47353 - DNA, 907 bp, Zea mays
  Clone ID: MRT4577_143192C.1
actcctatgggcgatttggtagctcgggtccggccgggattttgccggccggctagcatactagcggggggcagcggcagcagcacagagcacacgtacaccactgtccacttcaacttgccttctcctgccactattatatcttcgtagtcaaagaggtgtcgtccatggggacggcttcaacaagcccagacaccatggaggcggcaaggctccccagtctctccatcaccgtcgagaagaacccgccggaggcgcgcttgcttcaactcggcgtcaagtcctggcccaaatggggatgtccgccggggaggttcccgctcaagttcgacgcggcgctgacgtgctacctagtgaagggcagggtgagggccgccgtgaagggctcccgcgagtgcgtggagttcggcgccggcgacctcgtcgtcttccccaagggcctcagctgcacctgggacgtcgtcgtcggcgtcgacaagcactacaacttcgacccctcctaaaaccatatattagctagccccactcctcgggtggaccacacgaacgcaccttctttcttgtgttctgatttgtctcttcttctttttgtctgctgaaagcctcgaccgaattcctgtgccgacgtggtttgtaaacctctgcgacgaccgtggtttatctagcgaggattcgtatggtaggcattagttttccctttcaggactcgatcgtaagctgtgttgtgacttgtgagttaactgaagtgatggtagctagtaaattaatatactatacgacaaatataatgtaatgtaatatattaacagtacagttacataacgataatatatatgagatcgagcggcatgcagtaatgcaatggccggtgatgttatttcatgaaaaaaaaaaaaaaaaagcggcc

SEQ ID NO: 47354 - DNA, 816 bp, Zea mays
  Clone ID: MRT4577_143193C.1
attgggaccctcgaggccggccgggatttttgccggccggctagcatactagcgcggggcagcggcagcacagagcacacgtacaccactgtccacttcaacttgccttctcctgccactactatatcttcgtagtcaaagaggtgtcgtccatggggacggcttcaacaagcccagacaccatggaggcggcaaggctccccggtctctccatcaccgtcgagaagaacccgccggaggcgcgcttgcttcaactcggcgtcaagtcctggcccaaatggggatgtccgccggggaggttcccgctcaagttcgacgcggcgctgacgtgctacctagtgaagggcagggtgagggccgccgtgaagggctcccgcgagtgcgtggagttcggcgccggcgacctcgtcgtcttccccaagggcctcagctgcacctgggacgtcgtcgtcggcgtcgacaagcactacaacttcgacccctcctaaaaccatatattagctagcccgtactcctcgggtggaccacacgaacgcaccttctttcttgtgttctgatttgtctcttcttctttttgtctgaaagcctcgaccgaattcctgtgcgacgaccatggtttattagctagcgaggatttgtatggtaggcattagttttccctttcaggactcgatcgtaagctgtgtttgtgagttaactgaagtgatggtagctagtaaattaatatactatacgacaaatgtaatgtaatatattaacagtacatggtgatgttatttcatgaaaaaaagaagaggtagatggttcgtgttcttg

SEQ ID NO: 47355 - DNA, 621 bp, Zea mays
  Clone ID: MRT4577_143194C.1
ccggccggctagcatactagcggggggcagcggcagcacaaagcacacgtacaccactgtccacttcaacttgccttctcctgccactactatatcttcgtagtcaaagaggtgtcgtccatggggacggcttcaacaagctcagacaccatggaggcggcaaggctccccggtctctccatcaccgtcgagaagaacccgccggaggcgcgcttgcttcaactcggcgtcaagtcctggcccaaggatccctatattatatgcgaagatggggatgtccgccggggaggttcccgctcaagttcgacgcggcgctgacgtgctacctagtgaagggcagggtgagggccgccgtgaagggctcccgcgagtgcgtggagttcggcgccggcgacctcgtcgtcttccccaagggcctcagctgcacctgggacgtcgtcgtcggcgtcgacaagcactacaacttcgacccctcctaaaaccatatatcagctagccccactcctcgatccggtggaccacacaagcgcaccttctttctgagaattttgcaaacatgacaccgtctacggagggcttcaaacttttggcaccaaaaaaaaaaaaaaaaaatttgcggcc

SEQ ID NO: 47356 - DNA, 898 bp, Zea mays
  unsure (1)..(898): unsure at all n locations
  Clone ID: MRT4577_143195C.1
ccggccgggatttgccggtcggctagcatactagcggggggcagcggcagcagcacagagcacacgtacaccactgtccacttcaacttgccttctcctgccactattatatcttcgtagtcaaagaggtgtcgtccatggggacggcttcaacaagcccagacaccatggaggcggcaaggctccccagtctctccatcaccgtcgagaagaacccgccggaggcgcgcttgcttcaactcggcgtcaagtcctggcccaagtatatatatattaatccaaagctttctgcttcccttctcactcaccggcctttaattacgtggcatgttcgttcgttctgtacctaagttttttgcctctgatctctgatctatcgatcctcttggccatgcatgcgcgcgtcgcgtgtgtgcatatattatatgcgaagatggggatgtccgccggggaggttcccgctcaagttcgacgcggcgctgacgtgctacctagtgaagggcagggtgagggccgccgtgaagggctcccgcgagtgcgtggagttcggcgccggcgacctcgtcgtcttccccaagggcctcagctgcacctgggacgtcgtcgtcggcgtcgacaagcactacaacttcgacccctcctaaaaccatatattagctagccccactcctcgggtggaccacacgaacgcaccttctttcttgtgttctgatttgtctcttcttctctttgcctgaaagcctcgaccgaattcctgtgcgacgaccatgcatggtttcgctagcgaggatttgtatggtaggcattagttttccctttcangactcgatcgtaagctgtattgtgagttaactgaagtgatggtagctagtaattaatatactatatatacgacaaa

SEQ ID NO: 47357 - DNA, 162 bp, Zea mays
  Clone ID: MRT4577_143196C.1
atggggattagttgtctacgagatgaaattcgaataaggattaaggtgtggtaccgttctctggaggagatggttgctggagtgacttggccgtccaccttgccacggggttggactgtcgagtgggaccctgcctcggctgaggaggagcatgaggagtga

SEQ ID NO: 47358 - DNA, 224 bp, Zea mays
  Clone ID: MRT4577_143197C.1
ggattactaaatcaattcttcacgttattaattctccttacacaataatcattttaaacttgagtttcacgtgacacgaccactttatacgtatgtacacaacctattaattgattaagtcgatggattgaataggttgtgtacctggcaagcgccccgcgagttccacttcttcactcaaacttctaaaattgcagcggtgatcgaaggcgcggacgcgtggg

SEQ ID NO: 47359 - DNA, 300 bp, Zea mays
  Clone ID: MRT4577_143198C.1
ctgactcttgaggcggagcgtgggcggactcgtgtacagacacgtgttctctggcggatccgaccgccatgaccatatctacgtatgcgtgaactcgattcagcatgtctactactactacggattaatggacctatacgcgcacgtcgttcgtgtgtctgtttgtcacggacatagaggagacggaaatcctgcctggctttatgatgggcttatctggacttatgcggcctttatttatttccatgtgcacactatgtacaaagcttgtttcttctgatacactcacctctttgtgtt

SEQ ID NO: 47360 - DNA, 210 bp, Zea mays
  Clone ID: MRT4577_143199C.1
tcaaccaagccgtccggcacttcaaggacttctaggccggcatcatagacaacacccgggcgccggcctttgcaatggactactggcccctccccgccgaagccaagttaaatgacttgttaaccgtaatagcgcgccgacaaggcgcaccaccttgacgtcaagcattcggggtcggacatcctttaccagggaatgaacttaaaggac

SEQ ID NO: 47361 - DNA, 263 bp, Zea mays
  Clone ID: MRT4577_14319C.1
cttacgagagcaggcgccactgcggttacacagtgaaaagccagtgtgtcggatatcagcgatatgctcccccagggactccatgtaccagtctgtgtgtttgatatcacaggcgaggacatgaatgtgtgcattgccccggaggcataaggcaggacgctatcctggacatccctgctcacacccgcggctgaacgtcccttctagcattgtgcacattgcatcctggacgggacgtttttcatatgcaacgtgctgctctc

SEQ ID NO: 47362 - DNA, 345 bp, Zea mays
  Clone ID: MRT4577_1431C.1
ccgcaacacactaagcgatgcacattacgatctacctttcaacagtggctaccacgatattatccctccttgcgcttcttgcgctttttgcgagctcaacaaatgcgttcattatttcacaatactcaattgctacaagttccatcattacacaattcctaccaccagttacttaatgggcttcaaacacccatctgtgcaagcctataggctacaacaagcatttgccgtgtgcgtcttacacacaaccaatttaccagttgcatcaacattgcttgtcacatgtaacaattcaaaccatctctacgcatcagcaacaacaatttctaccagcactgagccacc

SEQ ID NO: 47363 - DNA, 232 bp, Zea mays
  Clone ID: MRT4577_143200C.1
cttttcatgtatgagtatgatagctacttgcccatcacttgcaaggccaaatatgcatatttccccagcatttgtctctttccaatggccttggcacagagtcacttaacaatttagttcaaatcgtggtggttcccagcctgtattttctaattgattatttttagtttcgatctaaaatccaattcttgcatttggcaaaaaatttctaactattttgttggtatgattt

SEQ ID NO: 47364 - DNA, 946 bp, Zea mays
  Clone ID: MRT4577_143201C.1
ccggccgggcgcacacaaagagggaattgagtctgtcagccgcggttgaccctgcccgagtggccgttcgtgcgtgccgtgagggagagagggaggtgctcgcgccgccgccgtcgcaggcggcaattcctgtcgttcgggtcccagggtggggtcgcgaatggccatcaacctgcgtggactacgtgcgcgcgagccctcgatccgagaacctttggagctcgcaaacagggagcacccgacctcggcgccgtgggccattcattgccaccgttgacctgcgcattcgctggcgatgtcacctcggtgggagttccagatggggcggcaaactatgtgggaaatgtgtgggaccgttgccgaacgaaggagtgcgtgctggcgggggaatttctcgccgtcgcgcagcgacgccatgaacccgccgtgccgcatggacagcttcacccagcctctcagccatcgataatgccccttggatcgattcgatacctcctctgcattatttagcacctagttacgcttcgaatcaagtctgggtgcgccgcataatcgatcttcggtgtgagcaccgccgtcccgagcgctcgccccgccgtgctcggcggtcgagcgtggaagaaatccccctggtcgtccgattggctttgggcggcttggatgtgatcggtggcacccctccccctttttagttgtttgagatctcggtcgttcatctaaaactcaagggctcccgacgggtctaggtgtgggagagtttgaaccgctgatctgtgatccaacgggtcagagagcgtacctcttcgctctttaaatccttgtcgtcgatctttgatcctaggacctcggctttgtaccggattattgtgaacgagatcttttctgggccgtgcgattgtcatccaacggatctgataagaggatacccctttgtcctgaaaaaatt

SEQ ID NO: 47365 - DNA, 261 bp, Zea mays
  Clone ID: MRT4577_143202C.1
acatggaacaacacaccattcttatgggcagacgcaaactttaccttcacgaataaaaactgaaaaacaaaattttagggggtcaaatacgtaaattaacgggaaccagtaaatcctatggcaaaacgagtggtacataccttggctataccaaaaccctgcaccataggggtaaataattaagacaaaatcctgggtttctggggcaacgccacgggcagttagggtccaagaattggggaaggcaatggaacaagggca

SEQ ID NO: 47366 - DNA, 527 bp, Zea mays
  Clone ID: MRT4577_143203C.1
gggcaacaaaaattttatcaccctatacaaaggggcccagctttaaacagctcaggcggaaacaacctaatcatcctatttccgaccccatcggaaacaaaacacagggggcccttttaaaactacggggaaaacggatttcacccaccccccaaaaagtttccggggacaaggaaaaaaattgattccaaacgggcaaccatttacaactccaaggaagttccacttaggcgggaaaaccaaaaaagaagcttcccatcggggggatcccaaagggggggatgggggggaaacccatgggggggaggcccattccgcccatgggggggggggggccccccctgccaggcattgggggggggggcaaagcgagaggaaacaactgcccaaacatgttctggtgaaccacaagggctttcccccccttcttttgggccctttcttcctttggggaccaaaactgggccttcactaaaacatccaccctgctaggggattcacaaatgaaccgcaacagggccgggaag

SEQ ID NO: 47367 - DNA, 351 bp, Zea mays
  Clone ID: MRT4577_143204C.1
atctttttctctgggagtatgacgttaacaagaaaggacaaattattaggagcattgatcaagacattgtttgcctgcgggcagccaatgccacacataacgccagggcatttaggactatagagcatgctcatagcgaataaaaagacccaacaccaccagacatgcgcctctatttgggcactaaccagggctatgggaacataatgctggttaaggaacgggtggtgaagatgaatagctcctacatctacgcctttgcatctagtgccaatcgccacaggtgccacagtggatgacgcgggtgtgcacgcatttttttcaaccctgttaaggggaggttcgcgtatt

SEQ ID NO: 47368 - DNA, 502 bp, Zea mays
  Clone ID: MRT4577_143205C.1
cggacgcgtgggcggacgcgtgggcttaagcagcagggcgccgccgccgccaggcgaccagcctacagccagcacgggcgtgcggccctcggtcggcatgggcgcgcggcggccatgacggctcgaacgcggtagccacggccccgacgtctcccgtcccggcgcgtcaccccgtggtgcggcggcccccggcctcaacggctcggaggcgcgactccctgcgacgcgcggcctcttggccccggcggctcgggcgtgggtgcccacggcgcgcggccccccggccccggcggcacgggcgcgactgcctgcgacgcgcggcccccccggccccggcggctcgggcgagggcccccgacgcgcactggtgaggcgcggcagcctccggcgcttgggcacggtggccggccaggcgggccacagccagcgcgggcgcgcagccccgcggccttagagccggccccgcttttacacgggcacgacggcgtttgcccccgggccc

SEQ ID NO: 47369 - DNA, 599 bp, Zea mays
  Clone ID: MRT4577_143206C.1
tcgaggaaaacatgatatgtataaatctgaatagaagatcatacggcctcataccttgatctggctcggctatgctatgatactgaagagaagtttacccagagccaggctgacttgagccaaacctctgctttcttggacagtgctcgcgccttaaactcttctcggaatgctcagcttgacttctgagaagatggcttatgaggaggaaaagcgagtgctcgttgcttctcgtgacaatctggacaggctatattgtgacgccagcacttgattgaccaatctggaaaggagtcaccgcttcaccatgtcggacttggaccatcaccgtgatgaactgagggcgtctgtaaggcccaaaattagtagaaaaataataattataaaataaataaacaaatatagttgttatagtgctttggaaattagggaatgagaaaaggacatttgtaataaagtcaaccattgttagagtcaaacatgagaaggagaataaaatagtaatatttaaaataatatggttgatattcatatttggatttcaattgagacatttggaaaaatctgatatttaaaacaagagtataagttcgaatttg

SEQ ID NO: 47370 - DNA, 541 bp, Zea mays
  Clone ID: MRT4577_143207C.1
ggcgctcatagctgagccgtatgacccgcaggcattcctggtgatggaagatgcctgtttcgttctgtggttcacggtgcctacattaggtcaaggaagcccatacctaatgaggatcatcaaagaaggctagctgatgagttgagaacaaaggtttgttgagggggacttcgacacgtacgtatctcagattaggaagccacaagtctggggaggcgagccagagctgttgatggcttcacatgttcttcagatgccaatcaccgtctacatgcatgataaagccgctggtggtctaatagcgatcgcgaaatacggccaagagcatgggacggaagctcccgtccaagttctttaccatggttatggccattatgatgcgctgcatataccaggagagggtggtccgaggtcaaggctgtaacattagtagctctgaatctaaatggcagcgacatccgctttggtggcaaagagcagatggttccttccacgcgcctggaagtcggaggtggaccgacattcgctgatgagctctcac

SEQ ID NO: 47371 - DNA, 650 bp, Zea mays
  unsure (1)..(650): unsure at all n locations
  Clone ID: MRT4577_143208C.1
ggatcatcaaagaaggctagctgatgagttgagaacaaaggtcgcagatgaatttatcaagaggcgggcagagactgaatggtttgttgagggggacttcgaacacgtacgtatntcagattaggaagccacaagtttggggaggcgagccagagctgttgatggcttcacatgttcttcagatgccaatcaccgtctacatgcatgataaagccgctggtggtctaatagcgatcgcgaaatacggccaagagcatgggacggaagctcccgtccaagttctttaccatggttatggccattatgatgcgctgcagataccaggagagggtggtccgaggtcaaggctgtaacattagtagctctgaatctaaatggcagcgacatccgctttggtggcaaagagcagatggtccttcgacgcgcctggaggtcggaggtggaccgacatccgctgatgagctctcacgatcttcagactcctgattccttccagagcttattcttctgtatatctccgcgtggctctgtttctcctagccaacaaacaagccgtgacagaagaacgacgatgagaatatgagatcatgctcggtcgtcctcgatcgctcaaacaaacaagcaggagaaaaaaaaaaccctccatgccc

SEQ ID NO: 47372 - DNA, 1355 bp, Zea mays
  Clone ID: MRT4577_143209C.1
gggtacctcgaggccggccgcgacggcccttattttatcccaggagaggtcgctgcgggcgagggatcgctcacccacccttggccgccgtttacggtttagccgcgtgctctctctgtctccctccctccctctcggggacaattcggctaccgctgccgccctacgccaggttcccagctcttcgccaggcccttctccggcgacgagcacccaccaggccaccagttgacacttaatactacctgaatctaatgcttatcaatatgcctaatatttgctggcggagctttactttgtgcaacacatattctccatctaatcaactacaaggaggttgtactcaaagaatggatttatggattacttcttgctcacaagcagcgagacatcatgcaaggataggttcagttgattttcctgttaagaagaacgtgaagtcatctcaactgcaaaacacgacatgttttgttggtttagtgcggcagttgcagtgcagacggtcagcaaaaagccatatcctgaatgtaaagtctgatacagtatcccaccaaaaggtttctggtgtaagctggagtttggaaaatacgccacgaagaataggctgtgtagtctctggactaggttttgcagcgtatgggctggcgagtgctgagggtcctgttaacaacaacatagatagcactgaatctgccatgtcatcaacaaatttatctcatgggaaagaagttcacacagactattctgttactggcattcctggtgatggaagatgcctgtttcgttctgtggttcacggtgcctacattaggtcaaggaagcccatacctaatgaggatcatcaaagaaggctagctgatgagttgagaacaaaggtcgcagatgaatttatcaagaggcgggcagagactgaatggtttgttgagggggacttcgacacgtacgtatctcagattaggaagccacatgtctggggaggcgagccagagctgttgatggcttcacatgttcttcagatgccaatcaccgtctacatgcacgataaagccgctggtggtctaatagcgatcgcggaatacggccaagagcacgggacggaagctcccgtccaagttctttaccatggctatggccattatgatgcgctgcagataccaggagagggtggtccgaggtcaagactgtaacgttagtggctctgaatctaaatggcaagttccggttcgatactttcttcctttgtacatgtacgtgcatgcatacatcgatcagagttttgggggggttaaaaagcaggtcgtagtttgccagtggaagaactggacgtgccttcaaacaattagaagacaatccta

SEQ ID NO: 47373 - DNA, 150 bp, Zea mays
  Clone ID: MRT4577_14320C.1
atggcttctacaagtgatcaacggagcaatcaagggaatgaagataattctagcataggtgaaggtcatccaataacttcccctaacccagagaaagttggaaaaatgctgattataattctcatgccagcgaaagggcctctagcgtaa

SEQ ID NO: 47374 - DNA, 456 bp, Zea mays
  Clone ID: MRT4577_143210C.1
cccgacatagcaccaaaccctcctcccccatcccctccgcctctccgtttcctctccgcccgccgctcgccggcgccgcccgagatccgtccccgagctcccctcccttgtcgagctgccggccggcgatggagaccagcacccctcgcagggcaccagcagcagacgctgctgcgacgtcctcctacgtctccatgtccccttccccctcccacaccccgcgctcctccaccaaggccaaacgaacgctcaacaacggcgcagccatcgtcgcctcctccccttccccttccccttcccttgccaaggggggcggcggcggcggcggagttaacatccaggtcctcctcagatgcaggcctttaagcaaggaggagctgagcataaatactcctgtggtcatcacttgcaacgagcagaggcgagaggcttccgctgcccagaacattgcaaaca

SEQ ID NO: 47375 - DNA, 405 bp, Zea mays
  Clone ID: MRT4577_143211C.1
gataaaaaagataaaaaaaaaaaagaaaacaaaaaataaaaaaagaaaagaacaaaaaggggggtggttctacaacgaatcgtgaatacagagcgcggggtccctccctttaagcttggtcctcatgcggctgatttcaattagccggccaatccgatcaccttcctattccggttaaatcccagaacgatctgagctgactactatgttctggtgcctattttcatgcagataaaggaccagatcgtagcccaaggcctgcccatctgactaaaagtaatgaactctatgtgtgaaatgatagccgacctgtgaattctcctattctctatattagacgcttgctgcctgctttgtatccataccacttgctagccttctagccctacttcttgcactgttttt

SEQ ID NO: 47376 - DNA, 393 bp, Zea mays
  Clone ID: MRT4577_143212C.1
agcaagaaccgacaccaaatttttggagcggaggagaacgaaacgagcgcccggcacggcgacggcgactagagcccagccaccggctcggctcacacaagacccccgcagcagctcaaagaacaaagaccgcgacaaccgagacgggggcgaggaatgcccacgcgacgggcgggtgaacgacctagacgacagcaataacgaggcggcgcagggcgccaacgactaactctacgaggaactatacgccccttggagcggccaatgcaagagacttgcgcccgaagaagaagaagccgcaccggggaagccagggccgagagagcccaacgaagaagccaaagaaaaagctgaaaaaaacagaaaaccaggaaaaaaaaacggaacggaagg

SEQ ID NO: 47377 - DNA, 134 bp, Zea mays
  unsure (1)..(134): unsure at all n locations
  Clone ID: MRT4577_143213C.1
tctgctccgcatccgtccagccccgcgtggtagttggctattttttttntccatggcatggttttnnnnnaggattggcaaaaacaaaatagtgtcatgtggccaccacgccgcangattgagtggtactgcta

SEQ ID NO: 47378 - DNA, 584 bp, Zea mays
  Clone ID: MRT4577_143215C.1
gtcgacccagcgtttgtgcaggcggcaccgagttcaggaggagatggactgctctcgcgcgtgcaccacacgaacctcgtaggcactcctccggttctggtcacagcaggggatgcacagctcggctactactgatgttagggggcacgctgcacgacagcctcgccggcaagcaccgcctacatgtcgactggaacaagcggctcccggtggcgcttgccgccgcgcgcgggctgaactacctccacaagctcgccgacccggcaatcatccaccgggacttcaaggccatcaacatcctcatggacgagcacctcacggatcaaggtcgacggacttccgcctctccaagctagtgttccacagcgacaggggccacgtacgcacgcaagtgaaaggaacactgcactatctggaccctgagtactacatgttccaacaggtgaccgggaagagcgacgactacagcttctgcgtggtcatgctggcactgatcgtatacaagcacccgatcgagaagggcaagtacaccgtccgctaggcgaacagggtgcccgactcctacgactccgagttctgcggtc

SEQ ID NO: 47379 - DNA, 272 bp, Zea mays
  Clone ID: MRT4577_143216C.1
ctcaaacccaagccgcctccagcaagtatcagagctcaggaatcagcgccatggcgagtgagacggagaccatcgcatttcaggctgagatcaaccagctgctctcactcatcatcaacaccatctacaccaacaaggagatcatcctccgcgagcatatcgccaactcttccgatgcgctggacaagatcaggttcgagagtatcactgacaagagcaagctcgatgcgcacctgagcttttcatccaccttgtcccagacaaggccacga

SEQ ID NO: 47380 - DNA, 407 bp, Zea mays
  Clone ID: MRT4577_143217C.1
tttttttttttttttttttttttttaatcttctcagtctccttcaattctatacaaccgaaaacacaaaggaggggaaggtgaacagctactaaaattctattgacgggggacgacagacggcactgggaattcacatctggaaatgaaaaaaaaaaaacttgtgtagccatcagtcgtcctgaacgcaaaagattgttggtttgacgggctccgggatctcgacggacccctccagcatcttggacactttccccatagacggccgaatctcggcgcggtcctgcaggcaccacatggccgttttcaccatgcgctccacgggggggacgctggcggggtcgtcgaaggaggcggcgatgcgggggtccaggatgtcgtcgatgcggcgctccgtcgacgcggccg

SEQ ID NO: 47381 - DNA, 461 bp, Zea mays
  Clone ID: MRT4577_143218C.1
ggcgattgggttcctcgaggccggccgggagggtggcggtgtgtgccgccgggggcctccacggttgtggttagaaacgagtcgatgatggggcctcggggcatgtccgagatgtcgcgaagccatgtggcgtgtgggcgatgtggtggctgtgcgcgggagccctagttcaggctgaattcctcaccggaatcatgttggccgtagatcagcttcgattggaaacagcgttgtcgacaccacggatccaaggtcaagaacatgtaccacaggatgaggcgcatggaggatgctgcgatgtgttcatgagagatctagaccgtcgtctcccagtcaactttgggttgctggatcgttgtctccttacgatgtaattatttatttattttatacagaactcctattatataataaagttgtgacattcatttcaagaaaaaaaaaaaaaaaaatttgcggcc

SEQ ID NO: 47382 - DNA, 503 bp, Zea mays
  unsure (1)..(503): unsure at all n locations
  Clone ID: MRT4577_143219C.1
aagctttttcttttttttttatagcccttcttgtttccttcttgcttttttattttgttttctttccttttggcccctcgccccgccaacggtcatcattccctcttgccggngcctcctggtgggggggggggggccgcgcaccgtcctggcgcggcacctgcggcatcttgtgctggctnaccttgctgcctactctcagcggctgcagtttcttccattgcgccaactcgctgccttgaactctgcttcttntttgccgcagcggccccttccgttcagccagctacctgttgcctacccccagccctttcttcctttcaaccttctggcggctttgcgctctcctgcttatttgcagcggcgtcagcttctatcattcagcccgcttgctggtgtgagccctgctaccttcttgacgcatccccctgttgttgctcgttctacctgctcgctgcgcctttcgctggctccctcttacatctgccgcgnttgctgccctt

SEQ ID NO: 47383 - DNA, 397 bp, Zea mays
  Clone ID: MRT4577_14321C.1
gagggggaatcattatcattaccatttacgttacatttcgggaaccaaacgacactaacaacttataaaccatttctttaaaccaccaaagataactaaacaagctcaacatggagaagaagctcgttaagagattttgttcccctcatgctagcatcatattacaaataacattctccactggaacgcctatcacaactgggccaaagacagtttcagtttcagggcatctgatttaaacatgtcgaagtcgctgcattgcatttccagctcttaacatagatcaccttaggctagatcccattcagcgtgatcacaatctgtcgaggagtagcataatctcgatgttcacagagccaaataccctgcaaaattagcatgcttaacattaggtccc

SEQ ID NO: 47384 - DNA, 2630 bp, Zea mays
  Clone ID: MRT4577_143220C.1
ttgggaccctcgaggccggccgggcggcgctatctgcggccccgaggccgtctaggttcaagaccggcgccctgctcctgagacggaaacaaccctcagttatttctctttttacatgttggtttgtctcttccttgctatctgcaccaattatgacgggccggccggggagtatttcgtgtgcaccgaatattgggatttgggaggacaggcgcccgcactccgcctccgcttccctccgcctcgactctcgaccgcatctgagcactccgccggaggtccgcctccgcaggcaccgccacgccatgtcgaagcccgcggatcagcagccgtcggacatgcaggtcgactcctccgtcgccgaggagaagccggccatcagattctccatcaacgtgcttgagctcatgagggaggcgcagatgcagcatggtctccgccagagcgactacacgcggtaccggagatactgctctgcacgactcagaaggctgtacaagtctctcaagtttttgcatggccgaggtaaatacaacagaaggaatataaccgagtcaacagtcacggatgtgaggtttctccatgtagtgttttatatggccgagcgagcatggagtcatgccatggagaagaaaactgctggtacaaacgcaaaacaacgcatctacatgttgggtcgatttcggaaagcagttaaatgggcatcacttttttcacaattatgttctgtaaaaggagattccaggacatctctagaagctgaggcatatgcttcatatatgaagggtgctttgttttttgagcaagacaagaatatagatgccgcaatgataaatttcaagaatacgagggctatatatgaggagcttgggaagtatggcagtatagaaaatcaacttttatgccgtcagcgcatcgacgaagtggagcctatgattgatttctgttcacataaactaggtggatcatatttacaagcacatgaactcctggatactgctaatgatcttctcaaggcgaagatggaggctgtattgtctgagacaagatcacagcaggcagcttccatgactgagtttaactggcttggtcgcacttttcctattacaaatgcaaagacccgtgtctctattttgaaagcccagcagcttgagagagacttgagtgctgcagccacagaatcagttgctgctgacaaaaagcttgctatatttgataaaatattttctgcataccatgatgctcggagctgcatccgcaatgacctggcttctgctggcaatgctgaggatataaaagatgacctgaatggtcttgacaaggctgttagtgctgttctaggattgagaactatagaacgtaaccagttacttgttagcattggtaaaagtaaattcacaaagcatcgagatgaaaaaaatgagcgaatcacaaagccagaagaacttgttcggctatatgatctgcttattcagaatgtaacggacttgacagatttagttagctctggaagaaacaaaaatgaagaagaaaactcttttattcatgagtatgagctgaaaggcttggctttccgagctgagagatgtttctttttggctaagtcatatagttcagcaggcaaaagagctgaagcatatgcattattctgccatgcccatactctcactggttctgcactgcaacagcattcaaacagtcatgacaaggctttaatacaagatctggagtttctatctaacaactgtagatcaaatagctgcatagaacatgcaacaggcattatggaggaggagattgttcctttaaaactttctaaaggagtctcaactatgtcacttgctgataataaaacaaaggagaacaagtatctccttgatatgctagagagctatgaatcagcgattggtgagccgaacaccaaagctccatgtcgcattgctcaattcccacctcctttccaagcagttccatgcaatcctattgtgcttgatatggcttacaactcagttgagttcccaaaccttgagaaccgtatgaaaaaagaaaagaagggtcttctgagcaggttctggggttgaaagatggcatatgcctaggattttggtacattgtcccatcatttgatatgctttgtgcatgaacggtgtaaaactagaatgtcctgataatacctctctgatgggtgaaagatcttcagtatcccgcccaaggatttttgagattctttatcagaaggttaatttagccgttgcaaagtacatctagctcggtgactgatcagcataaccttttgctgttactaaattttgagcaatgactgatttcttggattatcgatatttaagttgataaaaaaaaaaaaaaaaaaaaaaaaaaaaaaaaaaaaagttgtgtcacgggctgtccactcgatcctgcgcgacccctccaccaaatctgggggtctagtccgataattaggcccctttccgccttatcgggtgctgggatctaaaatttgatttgggacggagggtttccttaccgaattgctgtactgcgatccaattctacacatttggacctgaatcccgcaggaaatttcgaaattttgcttcaaacttcaaaaaaaaaaaaaaaaagcggcc

SEQ ID NO: 47385 - DNA, 362 bp, Zea mays
  unsure (1)..(362): unsure at all n locations
  Clone ID: MRT4577_143221C.1
tccagccgccctctcgnctccgtgaaagncctggaggncgacatggtcacggacgcccccggcatcgccttgccgcccgccttcgccgcgccgatccgcccggacgtggcccgcttcacccacaagctgctgtcctgcaacaagcgccagccttacgcagtctcccgccgcgctggccaccacacgccggccgagtcctgccccaccgcccgcgctgtgtcccgaattccccgcgcccccggcggcgccacccaccgcgccggcccgggagcattcggcaacctgcgccgagccgcacgcatgcccccgcccaccaagatctagcccgccagtgccaccgccgcgccaacgacaacctcccg

SEQ ID NO: 47386 - DNA, 649 bp, Zea mays
  unsure (1)..(649): unsure at all n locations
  Clone ID: MRT4577_143222C.1
ttttaaaccaatcagnnnnnattactgctaacttatatgttttgcgactgttgttgcaatctacacaatcgcgaacaagatgctaagaggacgaatgtgacattgcacattactacaaggacaatatgttcctcatgtttcaccaaagctgaagccaacaaatgttcccatcacgcacacataaatagacgtcagaagagaactcctgagcaactggctacatccagacatccacgaacgaggccaacttgcagaagccaacatgaagctgaacctattctggggccggaatcaattgttctccttttcagcatccgggactgtaacctttagtgctgcacttgtgcccacttcccttgcaatgctggtgaggttcccttctataaaagctgnnnnnncccatcagcagaaccgttggcagcttcggcagtatcattatcaccttatcttcgacctttgannnnnnnnnnnnnnnnnnnnnnnnnnnnnnnnnnnnnnnnnnnnnncgnnnnnnnnnnnnnnnnnnnnnnnnnnnnnnnnnnnnnnnnnnnnnnnnnnnnnnnnnnnnnnnnnnnnnnnnaggcttctnnnnnnnnnnnnnnnnnnnnnnnnnnnnnnnnnnnnnnnnnnnnnnnnnncacttctattt

SEQ ID NO: 47387 - DNA, 1104 bp, Zea mays
  Clone ID: MRT4577_143223C.1
cttccgtcgcgtcttccgtcccatgcaacacttggttgcttgcctccctggccgcatcacttctgaacctccccaagcaaatgtgccatctctcagctgtcgtgctcatcggagccagcctccaccaccgtccacagctctctggtgctcgcccatggcgcccgccctgccccaggtccgaagctggtcgtcgtgtatgctcggtctcacgggcgccatcgttccgcgcaccggcctcggcaaactccaagaacctgggccgcctgggcccagcacgttatcctcgtcaccagctcgctcgcgtgcccagcttcctgttttccctcttcctcccgcgctcggacatcgccagtgaaggcccgcgcgcgccgtcgtttgaatcctggttttctccctactcgctgcgctcccagtccacagctcgttggcttccctgtgcgcggttgcggatgccgtcgcccgatccttgtgccttggcccgatccttgtgccttgccgagctcatcaccgccgcgagactctgcatcgctgtgctcagccacgcctccctagtcgtcttgcacatactcatctccaaacaggaccacgctgccgactattgaccccgtcgttgcctcgcagcgctcgaacactatcgttgtcactcgacaacgtgtttgcccgtcaccacgttaccttcagcaacacggctctactggactccgtgcgctcgtcgacacctggttatcgatctccgccacgccgtgcccccgctcttcagcatcgtcgtcaccctttttctgttatgtcgcaggcgttcgtggattggtaagctgatttataaattttgctagttggtttaatgaatggattagctagatagattagtcacaatgatgttgtgattatattaagtgttgttgaagcgtatcgtctcatgcagtaatgtgattgtgaagtggttgcgtcgtgtgaagcttagtgttaagaaaaaagttttacaatgagtattttgatagatgaatatgtcatgtgttgctaggacaagtaaattagtaacacaaagaatcattctgtcgtttagtgttgtcagcagtgatttttgataaatcttgattgcatagt

SEQ ID NO: 47388 - DNA, 782 bp, Zea mays
  unsure (1)..(782): unsure at all n locations
  Clone ID: MRT4577_143225C.1
cgggnaaaaaaaaaggatgcaacacttggttgcttgcctccctggccgcatcacttctgaacctccccaagcaaatgtgccatctctcagctgtcgtgctcatcggagccagcctccaccaccgtccacagctctctggtgctcgcccatggcgcccgccctgccccaggtccgaagctggtcgtcgtgtatgctcggtctcacgggcgccatcgttccgcgcaccggcctcggcaaactccaagaacctgggccgcctgggcccagcacgttatcctcgtcaccagctcgctcgcgtgcccagcttcctgttttccctcttcctcccgcgctcggacatcgccagtgaaggcccgcgcgcgccgtcgtttgaatcctggttttctccctactcgctgcgctcacgtcgtcgtcttcctgctcgttccgcgacgtcgctcccagtccacagctcgttggcttccctgtgcgcggttgcggatgccgtcgcccgatccttgtgccttggcccgatccttgtgccttgccgagctcatcaccgccgcgagactctgcatcgctgtgctcagccacgcctccctagtcgtcttgcacatactcatctccaaacaggaccacgctgccgactattgaccccgtcgttgcctcgcagcgctcgaacactatcgttgtcactcgacaacgtgtttgcccgtcaccacgttaccttcagcaacacggctctactggactccgtgcgctcgtcgacacctggttatcgatcttcgncacgccgtgccccc

SEQ ID NO: 47389 - DNA, 217 bp, Zea mays
  Clone ID: MRT4577_143226C.1
aacccttcggccaattatttcggttgttgaaattcgattgggtcctcctttccgcttggtccgtggcgaaggccttcggttggttcccaagttcaaccaggcaaataaaatccttccaaccccgaccaggaaggaaggtagaagaagggcctaaagttgacccttaattgccgccgcggtttcatggtagttgaacccaaaggccccgtttttaatc

SEQ ID NO: 47390 - DNA, 573 bp, Zea mays
  Clone ID: MRT4577_143227C.1
ctggcgagctctgcactatgctgaactccgagctccagtgccttcgttgttggttcgagaggccacacacacacacgtacagctagctgcactgaaccaatggcacgccgaccagggccacatcccgatgacgctcccgcgacaggctgaccagctgtgcgccgtctcccccgtcgggaggcgggaccacgagaccgataatccggtaggggagaccgaggacgtcgtgcgtaaagagccggaccacggtggaggccgagactgagactgaaaccaaggaagcctaggccggtgctgagccgaccgaggcatagcctaaggaagcatgctcgaaggccgccgcgccggcagcagaaacggaggtgaaggaagaagagacggaggccgacgcgccagcagcagagacggaggctgctgctgccccggtcgaggctgctgagccgaagatagccgtcgagaccaaagaggtggcggtcgtggaggctaacgaggaggaggaggaggcagcgcctgctgttgctgccactcctgaggccgcagcaaccgaaggaagaagcggcggaccctgctacc

SEQ ID NO: 47391 - DNA, 488 bp, Zea mays
  Clone ID: MRT4577_143228C.1
ggaaaaaaaaaaggcttttatggaaattttattctttcttttaaaaaggaacacaagttcccccctgccggggggcgagggacccccacaaaattcaggacccggatttaaagggattattcgccccattccagcccaatgggctgtgggccccaaccccccaaaattttggccccggaagggagggaggcccccatttttccccccgggggcaaaaaaacaaccatgtcccccctaaggaccttttggaccccggggaggtaaaaaggcccggccccccacagggccataagaaaaaccttttcctcccgggcccgtttgcactccagcccctccttgatccccggggaaattgggggcgtgggttccggccccggaaaaaccccctccgcccgggcaaattgcaaggcactttgaaacctttcactcggttgtatagcaacggtttccataaaccccagttggaacccgggcaaaatcaaaggggc

SEQ ID NO: 47392 - DNA, 527 bp, Zea mays
  Clone ID: MRT4577_143229C.1
cccccttctcgagtttttttttttttttttttttttttttttttttttttttttttttttttttttttttgtttttttttttttttttttttttttttcggggggaaaagccccacaaaagaagttgtttgagatccctcacggccaggcccccttgttatttccgggccaccagcccaagagttaaataagggtttgggcccacgcgcgacgggacagattatggggggtaccaaaaacaaggcaatgcgcccaggttttttttggctaacaaaaactaggggggttggagggcactcgactaacaacataagtaaccccggggggggggggtgggaaatcgcatagccctcataggtccacaggggggggggggcccgaccctttaaccctttggaaaggcttgaaaggagccccacctgtgaaaggacagcttccacaggggattgtttttcccaaaccacaagtggcacaagctgacccagggttattgaggagatgcgcagtgagctttagctccccaacct

SEQ ID NO: 47393 - DNA, 3446 bp, Zea mays
  Clone ID: MRT4577_14322C.1
atttcggcacgaggggaagaagaaaagcctccgattccttccctcctctcctcgccgaaattcggcacgagggacagctcagggctgcgggctccggcgccggttcacatggtcgggggatgctgcgaggactgaagactttggatgggtgttgcgtgtgctcatcccaccgagcgagagggagagacgagtcagaaaggcccgcccgtgaagctccatcccgttcttgcccagtgttcatcaggtgcagcttgcgcggatccccctcatgaactgagcaatcgatagaagaaacaaaaagggccatttccgctacagaaaataaatcatcaggaatgggaaaacgaggccacaggcggtctgcatcacaagacgacgacaatgtgggctgtgtgtggggcctcatgcgcatgctttacttccgccgagaccccaaacttttgctggatgcgaagcagttgagtgggaggcatgcgttccgggaggtcagcgggagggggcattcagcaaagaggccaaatgattttgacgggatagaagaagatggtaacatagaagatcgcactttgcagaaaccgacagtaaaaaaccttatggaggatgaattggaaaaattaatgctgctgaagaatttccaatgatgaggttcagagaagaaagccgacctggaattgatgtctctcttggtaggagttcagagcatacaaataaatcaatagatagatcatatcaccaggcaggaatctctacaccttcaattccaccaatggattctggggttttgaattatgctgaagaatatgatcttgaatctgtcctgatgaatttcctaggtgaaatatatagttgtcacgatgaatgcccacacagtgattgcaagaataagaatgaattgtgtccttcactgaagtccctaatccataaaaaggtcaatgaattgaataatcttcctcgcaatattggctgcgcgcaatctcaagagggtaatgatgctaagctatctgaccagaataatctttctaacaccatggcagcccgatccaaacaattcaaggatgcattggaaataaacattcgcaacgatgagtccagtccagcagaacaaaggagagacgatatacatatagttgacagtatccaaaagcatgaaaacagtaaggtggctgccggatcagaagcttctgaagtggatggagatgccaattttgggctagaagaagcagaaacaccagaaccaagagcatctgccaaattaatctcagacgagactcctaatcaaagcgattggaagaaagagagatcaaatagaagtatcatgcttttgagaaccatcccagaaaagtcttggacgaaaattctgattctacagccaagactataaagtgcatgtaatcagaaagcagctactgcaagaactttacatcaacagccatgtacatcgcatgctcctgaatgtggtggaattgataactcaaagttttcaattaaggaagttaagacaagattcagatttgtgaatagtgagagtagaagagaaagcaatttagcacctgcagaggaccttcaaggatacccacggaagttcaaagattcttttgttgcaattaataaagattttagacatttcccagaaaggctctaacaaaacaagtctggatcagacatcaagaatgcaatcaaacctttcatcagcagtaagcaaaatgggagcataagcggaaacagtggtcatatagtagcaccaaaaggtccggctgtattttatgaagaggccaggaggcatttatcagagatgctaaaagataatgactgttccataaactatccagaagttcaaatctcaaaatccttggaaggcatactttctcttcctcatggcaatgtgtcaaccactgggagtagcctgaggggaaaggattaccttgacccctcacctggagaaacagatgtttacgatgcatgtgaggttcagagagaagaatgcacacaagagagaagccaatcacaagaggattttggaagcattgctcactgtacttgtgcaacagttgatgatcaggtgacagttcgagaaggatattacacgaatgaagcacaagaaggaccaagacatgctcatgatgagccagacactctgtatattgaaggacttgataaattcatttgccgcgaaaacattcgcaacgaagagtccagtccagcagaacaaagcagagacgatatatgtcaagagatactagaagaaataaatcagggaaaagagcatgttaaaatgtccctagcttctgttgagggcatagatgaaaagttggggcagcaagagccagaaacaccggaaccaagagcatcagccaaattaatctcagacggttctcctaatcaaagcgatgaaaagcaagagaggcccagtccagtatctgttcttgagtcatccttcgaagatattggcagtccagactgcataaacaagaaagagtgtgagctgcatggtctccaaaggaccctgtattttccagataatgaaccagacgttaatgtcctttgggaggacaagaatgtcaggttggactacataaagctggtgctagaactctcagaactgtgcgcagaacaaaatctagaggtatggtacctagaagacgagttgatcagcccctgcttgtttgaagaactacagagccagggtgatcagacggatgatcgaatgcttctgtttgactgtatctgtgaagctctaacagagatccaagagagatattttagactctcctcttggctaacttttctaaaacacgacatacggacacctccgacaggagagaacctaatcacagaagttgataggtacgttaacgggtatattatccagtacagtcttccaagtactctagagcagacaattaaaagggatctggaagttcagacgtggatgaacattagatcgaaaaccgaagggattattatggagatgtgggagtttgtattggatgagttgatagatgagactgtctttgatttgtggatttgaagttctgattagatctcgtccatggtgccttgtggcgagtatagtgagtaggatacgtgagttttcgtgctgacaataaccagttgtatgcggcagaataacatgatgggctactactagtcaagtgtgtaactacagtggaaatggttctcgtggatgaaaacaaaagtttaggttcagcaaatctccagaattgtgcagtttgtgtggatgaagttggttggggacggtctgtcaccagaactctcagccatgcctctcaacagcgaattgtacagcagatttgagagtttgtctgtgcatgtgtgatgcgtacacttttcagcgtgatcagatcacgcttatcgtataggtttgttttgtgtgtaaatgtgcaaaaaagtaatcatacatgttaatcaaatggcatgttttgagt

SEQ ID NO: 47394 - DNA, 542 bp, Zea mays
  Clone ID: MRT4577_143230C.1
catttgttagaaaactagaagagctatatgccaggcttctagagaattttaagatcatgtaggtttgctctgtatgagtgaaaacaagtaattctacatacggtatatccaaagtgtatgtctgcgaaaaatataaactgatcatgctagaagcctagaacatatgggtatgcgtggttcaatatttttaccagcttttctgagaatctggttgtggaaataatctaaatatcgtggggattacatgcggaggaagataaagcggtgcaaagggagcagtggaacaacgcagagtacgcggggtttcttcactttctaaatcctaaatcctgtggatgttttcatcttcctccgcatataagcctcatgatatccagattctccgcataaccatattcttcgggaatccagattctcaggaaaacttgttcgaaaaaatgaaccaaatgtggcctctgtcttatccatattctcgaggaatctagataaaaaaaaaaaaaaaaaaaaaaaaaaaaaaagtactctgcgttgttaccactgct

SEQ ID NO: 47395 - DNA, 2282 bp, Zea mays
  unsure (1)..(2282): unsure at all n locations
  Clone ID: MRT4577_143231C.1
agaaataggtgctcattgggaacctcgaggccggccgggaaccttctcctcgcccaccttcatctccaaatacatcccatgaactcgcataaatttcttctggcggtgctgctgcttttgcttctcaactatgcatcctatgctgccacatcgaaggaagatgatgacttcctcaaatcttgcccatcgcatcgatgccacaagcatggaccagagatccggttcccctttcggcttccaagccaccctccatcctgtggcgcacctgggatgcaattatcatgctctgggcatgacaccatccttgatcatccagttcttggctcctgcagagtgacagcaatatattacaggcatcgtgtcatgaatgtcatcccgccagaggactcatcatcacactgccaacttcagaagcttgttaaaagaaatcaatcaactgatgtgtacacacctgtagtgaatcctgtctcagtacttgtaggatgctcaagagaagcaacaaatcaagatggtattgtcggcccaagctcttgtctaagcctcattaacaatgcaagccagctctggtacctggtggatccttctacagatatgtctactcttcccatgggctgcgaggttgttgcaaagggaatcccagtaccctacacttacgacaaaaatggtccaaactataacacattctccggaaggtcactcttcaacgaaaaggcaaatagaacaatcaattttggtgaaacatcattcaattggaacctcaacaacatcaccggctcttgtcaaaggtgtgaacaggaagggaaacattgtggattcagttcaaacaggcgacaagcattctgcctgcatcacggttcacatgtcatcctcattgcagctacaacatcagtagccacattcgttgttctggtagtcactgcactctatctttcactgaagaaaagatataatgaagcaatacatctcaaagtagaaatgtttctcaaaacatatggcacatcaaaacccacaaggtacactttctccgaagttaagaagatagcaaggcggttcaaggaaaaagtaggccaaggtggattcggaactgtttacaaagggcagctaccaaatggtgttccagtggcggtcaaaatgctagagaactctacaggagagggagaagacttcatcaatgaagtagcaaccattggacaaatacatcatgcaaatatcgtccgcctcctaggtttttgctctgaaggaacaagacgtgcgcttatttatgaattcatgcctaacgagtcattggggagatatatattcttgccgcaagagctcctagtaccagaaaaaatgctagatatcgctacaggcattgctagaggaatggagtacctacatcaaggatgtaaccagcgcatcctccactttgacatcaagcctcacaacattctgctggactacagcttcaacccaaaaatttcagattttggtcttgctaagttgtgtgccagggaccaaagcattgttaccttgaccgcagcaagaggcacaatgggggtacatcgcaccagagatatattctccaaatttcggtggggtatcatacaagtcagatgtttacagtttcggcatgctggtgttagagatggtgagtggaaggaggaattcagacccaggtatcgagaaccaaaatggggtgtatctaccagagtgggtctatgagagagtagtcactgggcaggacctcacacttagtaagaaaatagctgatcaggagaaagaaacagtgaggcagctggccattgttgcactctggtgcattcagtggaaccccaaaaacaggccatcaatgacaaaagtggttaacatgttgacaggaaggttacagaatttaccaataccacctaagccatatgcctagcctgaaagacatcctatgccataaaacatggaggatatacaccatgttttaggaagcatgaaaagcagttatgcttactttcatgtgtgagcttagtaatgcttagcaatagattacacagtatttggatcattccactgtatcagacacatgaactgtgactcttttaattttcaatgtgtggtaacttaattagagacgtatcacattggatttgatttccagtgttgttcaattattgtgattttccggaaaatgaaaggtgttctactcttttctctttttttgtgtttgtgcgtgtgtggaacaaggtgttctacttttcctattcgtggtgcacaagagttatatanccaaaaaaaaaaaaaaaaaagcggcc

SEQ ID NO: 47396 - DNA, 312 bp, Zea mays
  Clone ID: MRT4577_143232C.1
ccggaaaacccgggacgacccacgcggccatatacaccaacgcccacacgcaccaagaggggggccaaaaaaacaacgggggggaccacaaaaacagcaaccccgggaacacgacgcacgcggagcaacccaccaccaaccgcgacacctacagcaacccaaaggcgcaagagaacctgcacccgctgccccaccccgaaaggggcgagggaaaacacccgacggccaaggggcaagggggggtcagccaccccagaacgaaggaccccaacgacagcgccaaggcccaagcactcaaccaccaccaagacc

SEQ ID NO: 47397 - DNA, 236 bp, Zea mays
  Clone ID: MRT4577_143233C.1
atattatattttttttttttttttttttttgggaacgggagatgtagttcacctgacggtacaacaccctaggaccttagacaacgctacctgccacggaatgcgcatccgcaagcggcggcagggtagctacacaaagaagaaagaacaccggcacacacgcacacacatatggatccaccaatacactgaaaaggcccccacgcgaaccacggcggcacaaaactggtgacata

SEQ ID NO: 47398 - DNA, 390 bp, Zea mays
  Clone ID: MRT4577_143234C.1
gactataaattggttgtctccattaaatttccataataagaattgcatcttttgaagaagctgcgacccatttattccaggactttttcgttagatacaagtgttaacaaagtcttaaacacctaggattcacgtaagaagtggggccacgtaaatgctacaatttattaaaaaaaacttacatttttggatttttattcaaacaaatattattgcagcttattattaagtcctaacataaaccttgcgtgcaataataatgattgtgaaactgtatattttttataattactggtgcgtgtaagtaatttacaagctacaatgtttttgcttttttaacgactagtaaacttagttgaaactgtcgttttatgtacacattattgtttt

SEQ ID NO: 47399 - DNA, 470 bp, Zea mays
  Clone ID: MRT4577_143235C.1
acaaagacaaagccaaggggggaacgccccgggggttaggggccgggcaaattcgctaaaggaaacagaccaccccgaacttttgttgggcacaaccgggggggggcccaagggcaaaaaaatttggggggaaagacaggggggcccgggggaaaaatggggggcggggccaggggcccagggcccacaggggccattgggggagcaaaacttggaagcttacccccccgggtccttatttaccaaggggtcgggggggccaaacaaataaccggccaactgggggggggggccgaagggttaatttaccttttccttttcccaggcgaaccccctcccggggggggcttcccacctgacccgggtggttttgaccgggaaaaaggggcctttttcccgggggggccggccccattggttttaagggaaaggggcactgggattcctttttttttggcgctttgcagggc

SEQ ID NO: 47400 - DNA, 414 bp, Zea mays
  Clone ID: MRT4577_143236C.1
cattgggacccctcgagccggccggggcctcttatccctctttcttcgcctgctgactctttcgtcgtccgttcctcgtcctcaacggcattcgaggatagtttttccgccgggggcggcctagaaatcagacaccacctgcaccgcgacgagtccatgactgtggaccaagagacgagcctccgactgcactcggtcgagcatctgctcctgcacttcatcacctccctgctttccatctccgctcgcctcgtccagtatctcgctaacctcaacatgcacttcgaccgacctgttcagcctttctgcatctttccatcctcatcgttagtgttctctcctcctcttcatatgcctcattttcttccccgtggcctgctagctccagacttgttgtactcctcctctacctct

SEQ ID NO: 47401 - DNA, 290 bp, Zea mays
  Clone ID: MRT4577_143237C.1
attcgaagcaatataacatgattttaatatttgtgattgacttgttagatccattagtcattaagactatatcgtctgcatattgtatatgagcaatacctttctcatttaaggatcctaagacacccacaattaagtgaggacattggtacaaacttgtccacccttgactgtttgcatcacccactttcaggctggtgtcttaaatttaagtagctaatctgttactgcctgttatgcatttctaatatacatcatttttattgagctgcttccctaattatgtactt

SEQ ID NO: 47402 - DNA, 240 bp, Zea mays
  Clone ID: MRT4577_143238C.1
tcaatttacatgagacatccattataagccagcccctaccccatttttattgtttttttttctttttcactactactactagtatttctctttttttctagcttgtttttcacctttactttcttttgacaaagaggcggaaaaagaaccaacttccttgaaggccaaagtaagtatagtagtaattatcaataatggcgggcataacacatgattgttgctgtggttcattgggtttat

SEQ ID NO: 47403 - DNA, 544 bp, Zea mays
  unsure (1)..(544): unsure at all n locations
  Clone ID: MRT4577_143239C.1
aattcggcacgaggctcctccccgcagccctcgaccctcgtcagcctctccagttcacctcgccgtctccgtcatgccccgcgagggtttggggaattttggagcggaggaggaggcgagggatggtggacaggaaggtttggttacggaaatggatgtggaggaatcctcgccgtcttcgtcgccgatgtcgtctccggccgggtcgtcagattccatagacctcaacttcctgccgtttctcaagagggagcccaaatcggagccgtcgtcaccagagctcgggcccctgccgctgcctgtctccctcacccagacgccgccgcagcagcatgcagcggcggcggctccagcaactgaggcctcggtgcctccgcctccggcgactcctgacctctcgtccgcgtcgatgatgaccccgctgcagtcgctgccgcctaacccagacgaggactcgctccttcgggagtactaccgccttgcgagactatatctctcgtctgcggngtccggggcgatcgtcccgacaccggcaccggaggcg

SEQ ID NO: 47404 - DNA, 1237 bp, Zea mays
  Clone ID: MRT4577_14323C.1
cttctgttgagggcatagatgaaaagttggggcagcaagagccagaaacaccggaaccaagagcatcagccaaattaatctcagacggttctcctaatcaaagcgatgaaaagcaagagaggcccagtccagtatctgttcttgagtcatccttcgaagatattggcagtccagactgcataaacaagaaagagtgtgagctgcatggtctccaaaggaccctgtattttccagataatgaaccagacgttaatgtcctttgggaggacaagaatgtcaggttggactacataaagctggtgctagaactctcagaactgtgcgcagaacaaaatctagaggtatggtacctagaagacgagttgatcagcccctgcttgtttgaagaactacagagccagggtgatcagacggatgatcgaatgcttctgtttgactgtatctgtgaagctctaacagagatccaagagagatattttagactctcctcttggctaacttttctaaaacacgacatacggacacctccgacaggagagaacctaatcacagaagttgataggtacgttaacgggtatattatccagtacagtcttccaagtactctagagcagacaattaaaagggatctggaagttcagacgtggatgaacattagatcgaaaaccgaagggattattatggagatgtgggagtttgtattggatgagttgatagatgagactgtctccgatttgtggatttgaagttctgattaggcttcgtccatggtgcctctgtggcgagcatagtgagtaggatacaggagttctttcgtgctgaaaaataaccagttctatgcggcagaatagcatgggctaccgctagccaagtgtgtaactgcagtggagatcgttctcgtgtagtcgtgtggaggagaacagaagtctaggttcagcagatctccagagctgtgaagtttgcgtggatgaagttgggcacggtttgtctcacagccatgcctctgcacggcgaagtgtacagcagtctgaagcgcattgcgattttcctctttgcccgttgagatttgggagcttgtgtgtgcatgtgtgatgcgtgcacttttcagcgtgatcagatcgcgcttgtttttttataggtttgttttgtgtgtaaatgtgaaaaaaagagagaaagcaaacatacatgattaatcaaatgacatgttttatgtatgatttgttgaccggcgcaaggc

SEQ ID NO: 47405 - DNA, 280 bp, Zea mays
  Clone ID: MRT4577_143240C.1
tcgagcggccgcccgggcaggtacaagcttttttttttttttttttttaaatctaaaaatgtaaacaactaatacatgggtggccatttacaccattcaaaaaactcaaatacaggaattccaattacaaaaacaacattaattgagggcaccccctatgatatggtgggggaggggggatttattttttagagaaagcaagatggacaatggggacaaccagaaataataagtaacattttcagattttaaaaacctaagacgaaaacactctaacgtg

SEQ ID NO: 47406 - DNA, 270 bp, Zea mays
  Clone ID: MRT4577_143241C.1
tttgtcgtcgaagtatgctcgcgtacgttgtgttagagttcggctcgagcatttgtccacatgaagttgtaatacactctgctacggggaattctaatccgagttagtacggtgagatcgtgtgtagcagctgtaacggctcgcagattctttcgctggtgctccagctcattagacatgatgccgcttggtagatatttaagaaggacgagctcgtctacgagcacacgaagctctgactgaagattgcggcagatcaggctatctgca

SEQ ID NO: 47407 - DNA, 278 bp, Zea mays
  Clone ID: MRT4577_143242C.1
cccttcagcgtgctgttaaattgattagattgatttcatcactgcggtggatggtgtggtagattgattagattgatttcatcactgcggtggatgcagtcaatctaatcaatctaccacccccttcagcgtgcgtgttaaaaaaaaaaagaaaaaagggcggcccccgataattgcactcatcaaccggggatttaattccggacggtaattttaaggcgaacaaggtttccccaaaggtagcagtcttagacattggggaaatcctggccctagct

SEQ ID NO: 47408 - DNA, 341 bp, Zea mays
  Clone ID: MRT4577_143243C.1
gctactatgctgagcaccgccggctgcaaggctctacgtggctctaccagggcgtccagcctaactttgggaggcgccttgacaggagcttccggggaggcgaaaatgctttgaatacccttttcccaaagactggtagttggtaacgctcatggcacagtgctgcttcagtacaccaaggacccatagcgatcgatgaaccatggactggctccatgacgctgcctttgcaccccttgcaggtgatctcccgaaggtggatacatgcacaccgttcagcatatggacagcgtgccttgcatggtgatgctacactacctaccaaggtcgtatggcatagc

SEQ ID NO: 47409 - DNA, 741 bp, Zea mays
  Clone ID: MRT4577_143244C.1
ttcctcctcccgctcccacccgctccacctcccgccgctcaaaaccctaaccctagatcgcgagggccggctgacatggccagcaagttcgggctcgccggcggaattccggagcggcgggtgcggccgatctgggacgccgtcgactcgcgacagtacaagtccgcgctcaagctctgcaccgcgctcctcgccaagcaccctacctcaccctacgccctcgctctcaaggctcttactttggaaaggatgggaaagcctgatgaagcactgagtgtctgtttggaagccaaggagctattgtactcaaataacattttccattttgacgatctcacccttagcacactacagatagtgtttcaaaggcttgagagattggaccttgcaacttcatgctatgagtatgcttgtacaaaataccctaataacttggaattaatgatgggactctttaattgctatgtcagagagtactcatatgtgaagcaacaacagacagcgcttagaatgtacaaaactgtaggagaagaaaggtttttgctttgggcagtctgcagtattcaactgcaggcatattttagcagcggaggtgagaaattgttagcatttgctgaagcattgcttaaaaagcacataagttcacatagtttacatgagccagaagcactttctctctatgtttcaattctggaacaacaggcaaagtatgatgctgctttggaagttctatctggagac

SEQ ID NO: 47410 - DNA, 370 bp, Zea mays
  Clone ID: MRT4577_143245C.1
ttcttctcctgcttcgtctcttcactcgtgtggaagctatgatttagcccgcggcgcccatcctactttccttctcgtcatcgttctcatcttccccagccgccgccccgcctcagatggatccgtcgccggcgtggccgtcccggcggatccgccaggagatcttaaccttcttcgagtccaaggcacataccaggtggccgccgagtcccgtggtccccgtcaacaaccacacactgctgctcgccaacgctggaatgaaccagttcaagccggtcttactcggtacaatggcgccggactcgccgttagaacgtctgcaccgtgcctgtaacacccaaaagtgcaattcgtccggcgggaagcacaa

SEQ ID NO: 47411 - DNA, 238 bp, Zea mays
  unsure (1)..(238): unsure at all n locations
  Clone ID: MRT4577_143246C.1
aagataatagnactcttaattagaaaagtncnnanaanccaatcatcctaaaattaatcaaaaaataaataatctgtgtacccaaccaccggatcaaaagtatataatgtgctcctatcatacttagtcaacggggcattcttggcaaaacacatcagaaggtccgggttgacaaaaaaatatccaccgtattcgatgagatctgcataaccacatccacaggcaatggcgtcattgc

SEQ ID NO: 47412 - DNA, 376 bp, Zea mays
  Clone ID: MRT4577_143247C.1
ctaacctaaaccagaaccgaagccacagcctaagcctgagcctagcctgatccaaaaccagagcctaaacctgaacctaaaccagaactcgaaccaaaaccagagcctaagcccgagccaaaaccatagccagaacctaagcctgagcccaaaccaaagcctgaccctgaacacattccaccatcagatcttaactgaggaagtggctgttaacaagaattgaaccggttaaataaaatgccatggtgccgggtgcttttgcaggtgctgctacttgtctggtgtatgctatcttttctttgtcattttttgtatgttatgctattatatgaggcttagtgcagtctagcttgttacgtgtataaaaaataaaaat

SEQ ID NO: 47413 - DNA, 439 bp, Zea mays
  Clone ID: MRT4577_143248C.1
ggacaaaaccttgcccaaaaaactttagggccggggggcttgtttttaaaaaacaatattccttaaaacccttttccgggaaaaaattttttttacaacaggcaaaagggttttttgatccccacccctggaaaacaaaaaaggggggggaaaccacaacctttttttatcccccaaggaaacccgggtaaaacatccaaaaaacaggggagcaaatctgccttgtaacattacaaagttaacaaaaaacaacccccaaacccactgatgggacccctattgccacccctgcttgcttgtgggataaaaggcatcaaaaaaaacaacagtggggctaccggtgacccaattttttaagggggtgaaacaacttttgttttacccactggcgaacatagggcagaaaggcctaaatcgagtgatcataaccccgccccct

SEQ ID NO: 47414 - DNA, 428 bp, Zea mays
  Clone ID: MRT4577_143249C.1
caccccaaaaaattaaatttttttttatgggccccccccaaaattatacagggaaaggcgggcgcccccctgtaaaaaaaaaactttaaattgggggggaacaccttcggggacccatttttttttaggggggaaaacaaaccccaacccggaaggggggggaaatggttttttcccccttccccgcaaaggggggaaaggggggcacaaaaactgaaaaaaaaagggctgttttggccccccggaggggaaaatttacccaaaagttctaaacttggggggggactactcccctgaggggccaaaaactttttacgccccatccccccggaggttggagaagttttccccccccaatttaaggaaaacccggggacgaatttccgcccccgggaatgccccccccaacaaaaaacccccgtggcggc

SEQ ID NO: 47415 - DNA, 584 bp, Zea mays
  Clone ID: MRT4577_14324C.1
ccggccggatgtccgccctcttcacccctgcacctgatgccggtccgcttcttccgcagatctcccgaccggtgttgccctgcatcctagcacagatcccgccaccaaccgatacgacgccctccagaatgccacgaacgctggcgatcgtgtggggaaccctgactacttgcgtctactgctcgcgctcgcggggccctactgctagaggaataccctctcatcgatgaggcggagcactcacgcaccccagcgcatctctgaacaggtgggaccccacgctcgtcaacccctgcacctgttttcacagcgcctgcaacagctacaaccgctgaacccggctaaatcttggcaatttgaacttgtgtggacatccggggtctgaggttgctaaactgtaacatcttaacgatctgcaactttataaaaataacattcaaggaacaatcccttctgagcttgcaaacttgaagaatctagtaagctgctacttgaacaataacaacatttcttcgacaataactcctgcccttgcaaagatgaaatccccttgtattcttgcgactcaatggcaatcatttgac

SEQ ID NO: 47416 - DNA, 313 bp, Zea mays
  unsure (1)..(313): unsure at all n locations
  Clone ID: MRT4577_143250C.1
ggcatccaacacccacagcccancagaaagaaagaggaagtacatgatcagcccgagnannaagccgcgaccccaccccagccaaagctacaacagaggcaactctgatccgaagctccctacactagctctgacacaactcctaacaaaaccagacaggctccccccaccgcaaaacacccggcacaaacaagttccaccgtgtacagcacgcttataccatacctaaccgcccgtccatataacgcggagccagagccagcccagccgttctgcggcaacatccacaacctgatacaacaagccaacaaca

SEQ ID NO: 47417 - DNA, 214 bp, Zea mays
  Clone ID: MRT4577_143251C.1
caaacctctggtcgcggtggtatagggtgtgaccgtcggttcagtaatgacagagctaataatatattatcaggcggaatgcggtatgcggatagggctacaagagtgggggttgtgtgattgacgagtacctgaatcgcctggcctatcggccataacccaaaatcctaggtacggcacaccggtagaatcaccaggtagtgagagcagggct

SEQ ID NO: 47418 - DNA, 1415 bp, Zea mays
  unsure (1)..(1415): unsure at all n locations
  Clone ID: MRT4577_143252C.1
aatcaagtagccttcacaaatggttttcaattagaatgcagaacattaaggtacgacaccggtgacggtcctaccactcacttttgaaacctagaaccatgcacgaatggtaacgggcagaacttctcacagactcggaagtcggaagtgcaacagacaatttgaggcgtacagaagcacaatccaacagatggcaacatgtcatgttcaagcagtagccacatgttcagacagtattcgtcagttcgagtagactagttgaggctgaatctgcacttcagtagttagacatcctacaggagttcatgcagcacatgctacgttttttatatacacatcataacacgtttccgcagcacatccaaaacactgaagggccagtttgcagattccgcgctcctcgatcaacaagacagctgcttccgatttattgtcggtctagttccattggagattcacttagcagcttttatgtttgcgagggcggtaagaacctcggtgactgaaccttcgatagctgacctattagccttgagagatggcactagtgcataaacctcttcaacggtctcaggcccaatgtttgctatcatgcatatctctccatcactgaccccacattttttaagaggttcaatggcttgtttcacagagcttgcagtggtgaaatgatttccatcttttgaatactgaaaagctttgtcaaaagactcaggaattttgatcttggggtcctctgatagtatggccatgtgctcgtgaatttcttgcaatagttcagctgcttcacaattcattagcattctagaatttggagggatatcaagctctagctttagttctgcatcagacttggtaggcactgcatgtgatgaagaaccctttccacctttgtcactactgtatgcttttcctttgcttgcctcacctttagaaaaggctgaagcctttccaccagtttttaggctcgcagatgaagccttcccgtttgactttgagtgaacaggagttagctcttctacaaaaccttcagagtcagagtcagaatctgaaagcacaactactcttggcttcgcaaaagaaaccttatgccttccattcggtacttggtccattggaaaaacttgtcaagactcctaccacaaagatgtgcgtaagttctgcttatggaagcctggtgggtgctcgtcgccggcgaagagaccaatgtaaacctccgcaacttagggtggcggcggcccaccagtcgccggagagcgagacgcagacagaagtcacagaagtgacagaacccacgcggaggaaatgcgaatgtttttttttttttttttttttttttttttttttttttttttttttttttttttttttttttttttntacgaaatgatctgattttttgacacgtatattta

SEQ ID NO: 47419 - DNA, 392 bp, Zea mays
  Clone ID: MRT4577_143253C.1
acgcagaggaaaaccagcaggctgcactatgagtcagtctacgaaactgattcaactctcgacggcatgatccatgctaacaagcggtccgtcctcctagacaagatcaacgaccggtaactacccgacgatccatgagtataagcgctcatatgcatactactattactttgactcatactatgacaagaagctcaataagtgtaatatgaataagctttcaggaagataacatgctattgctatatgtcctttgaggacgcaaatccggctaccttgtgctgctgatgatctaactgacatcattgtagcatcttgttagtggttaccttgatctggttactgttctaaggcatcgtctaccaacttcttacctttctttgtcacgcact

SEQ ID NO: 47420 - DNA, 298 bp, Zea mays
  Clone ID: MRT4577_143254C.1
aaaaccgaaccagaatcccgttttacttaaaaggggggccaggataatttgggccaccaaaaaaggggtttaacggggatcccccgggacgacgacgataaatggggcggggacggggccagccagccactggagaaaacacacgagactgacacaaaccgtttagtccacctccttgatctgggggccggggccaccgttttcagggggggggtcctggtccatgccgggggagcctcccatgtgggcacccgggcccggagccattttggcgatgagggggttgcaaaggctctcc

SEQ ID NO: 47421 - DNA, 815 bp, Zea mays
  unsure (1)..(815): unsure at all n locations
  Clone ID: MRT4577_143255C.1
ccggccgggacgatgtgcgcgcccagctcgcccgcgtcttccccagtcgtccacgctaaccctagtggaggagcctcagcgccccctcatccaactcccctcccctttcctctctccatcccctcttcctcttccctcattaccctcggcgtggcgaacttttgccatggctgaggctcggttgagccggcccggccgcccatctccaccttcttcttggtcgtgggcatggcccagccgcgctagcgtgcccgcccagcgcgccctagcgccctcggtcggccttcgtgcctcgtcgcgtccaagccaggcccggcgtcgcggcacctcgcgccgagcaccttcgtcggtactcaggcgagcccattcttccacttttccttccccgtggcgtcctctctctccctctacgaactcgctccggtcagcgcccgcagctgcgccggtggctgcacagcgagccgcgcctcgacccacgtctgnctcttcgcaggccccctgcaggagcgctctcaccntagggcgtggtcgagcacagcccctgcggtgcggccagcagcagcggtaggccaaggcnaaccgcgggggaaccccccccctccccgggttccggggagcgggcatgccccgccccgaccggtggacttcgctcgccgtgagccaccccaccctttctcttttcttctccttgctgctcgtccatggaaagaattgtcgggcgccgctaccctgctccaccagccgcatcaccgtcctggacatggctgccggncgacgacgcggncccttccgctggccagcaactgccttgcttg

SEQ ID NO: 47422 - DNA, 359 bp, Zea mays
  unsure (1)..(359): unsure at all n locations
  Clone ID: MRT4577_143256C.1
ttcttgtgcaggacctgancgtggccgggaaaactttcaactgtttggccaccaacaaaaaacatctatacaggaaccaataccctaatgagcccatataccccaacgtcatggagacaactacaataaccaggttctgtgtgcacaaccacaccatacactccacaaacgtaaaacaggctccagacaatgctactatgccggaaccgcctgaacaagccctgttccacatggactgctgccaccactagcaccagcactttaatcatcccgtgacaagcactatgataccgatccagcaggctgccgcccctacctaatggcccaaaccaacagggcttgcgcacgtctgcattacc

SEQ ID NO: 47423 - DNA, 176 bp, Zea mays
  Clone ID: MRT4577_143257C.1
cgccttggttttttttttttttttttttgatgggcaggtgggcagccgctggacggccgcttacaggacacggggatagggcagcgcgcggttagaccctgtttttttccgagaccctaggcggaggggggggggggagagcggccatgcaccacagcccagccggagcggggcga

SEQ ID NO: 47424 - DNA, 342 bp, Zea mays
  Clone ID: MRT4577_143258C.1
tcgttttgttggagagctctaattgatatttaaatacccagactaagatttagtcggtaaaaaccaaacaccgaatatggattagaggattggaatattgttcacaagacaaaataaacaaaaaaattgtctgtgcctccctccctcatcaagttgctgctcaagtgctcatactatacgcttccgctcgctgctgagaggacatggctcgaggccgttctcgttgctcgcggtgcacggtacgcggtcggtggccgttactccgtcgccggcggcgttttggttcctttgtctgccgtcgttcctgtcgttctcctcttacgcctcgccgttctttcacct

SEQ ID NO: 47425 - DNA, 425 bp, Zea mays
  Clone ID: MRT4577_143259C.1
aaaaaaaaatggggcaccccaaaaaacagcccgaaacacccccccggggaaagaaaaagtggggggggggggttcccctttccccgccccattttagggggccccgggggggaccttaaaggcaaaaatttcaaaataaaaacaagggtcccccccaaaccaacccgtttttctattgttttttaaaaagacccgggaccctttgataaaaaccgggaaacccttggaaccgaaaccccggggggtttgtttaaaaagcccgcaaaagggttcccatcccacaggggggcgcccctcccggatccccaagtaaaagggaagggggcggttttttggggtttgtttggggccctttcccccaacctcctgatttttgaaacaagggggcaaaagaagtcctgggccttgttcccttcacccaaaaa

SEQ ID NO: 47426 - DNA, 205 bp, Zea mays
  Clone ID: MRT4577_14325C.1
aagccaaactgaacagcgtcacacaagcgcggttcattgcctgcgtgtatgtacctcctcatctaaagggcaggctatgtttggcttttttattaaccccaagcccaggtcagatcacatactttacagctgaatctatatctcatgtggatgatgcaggggatgcttttcgcgttgctcattatgtttatcgcatggttgatct

SEQ ID NO: 47427 - DNA, 1641 bp, Zea mays
  Clone ID: MRT4577_143260C.1
atgtcgtcgggagacttccactaccacgacgagctggcggcgctgttcgcgcagcggccggcgccggcgggagagatgacgatggcgctgcagcaacaggcgccggcggcgtcgtggttcgcggactacctgcacgcgggcgcccccggcatggggatggacatggactacgacctgctgtgccgcgcgctggacctgccggtgccgggggacgaggacggcgtcgtcaagcgcgagctgctgctggtggcggacacgggcgggggaggcggaggcttcgcggcgccgctcacgcccaacacgacgtcgtccatgtcctcctcgtccagcgaggcggcgggcgccgccgccggaggaggaggcggtgggagctttggcgctgcggaggaggaatcgcagtcgctggggaggtgcaagaaggaggacgacggggatggggaggagagcaaggacaaggaggcgatgaagggggaggaggacgacgcggacacgggcaagaaagggtcagcggcggggaagggcaagggcaagggcgagaagcggcagcggcagccgcggatcgcgttcatgaccaagagcgaggtcgaccacctcgaggacggctaccggtggcgcaagtacggccagaaggccgtcaagaacagcccataccccaggagctactaccggtgcacgacgcagaggtgccccgtgaagaagcgggtggagcggtcgcaccaggacccggcggtggtgatcaccacgtacgaaggcaagcacacgcaccccatcccgtccacgctccgtggcagcagcacccacctcctcgccgcgcagctgcaccaccaccaccaccacaacatcgtcggcgccttcccgccgccgccgccacccccgcagacgatgtgcttgccgttcgtcgggcggacaggcgacggcggcggcgtcatcgacatgctgggtctctgcctgcctccgcgcaaccacgccgccgtgccgccggcggcgacaggcctcgcgccgtccccctgctccatgagcggtccggtgggcacggtggcaggcgcgacgcagacgacggcgcccccaccaccaccgtcaccacgaccactacctcgtcgcctcctcctcctccctcgctccagacgatgcagcactttatggcgcaggacgacttcgggcttctacaggacatgctgccgtcgtcatcgtcgtcgttgtccttcgtcgtccacagcaacggcagcaacgtccagctgccctgaattcgatcagctaatagtcgtcgtcaccagtcaccaccaccacaagcgatcgagctaatgaggaaggaagctagcagagataagagatgatagtacttagtttggtccttgttaatgctctcctttcgtttttttttcaccgaaaatctactcccccctagctagatggatcgtatcgatcggttcttggttttcttttcgatcccgctgtgccgcgaccgcgagacacacgtacgccgctgcagtgcagatcgagtcttgtggcgccgggtctcgtaccgttcccttacgatgatctagctagctagcccttgcagtagcaggtagtacgtactagcggctcttgctgtacatgtacctagctaatcaacccccagctcatgcgcgcgtttgcacc

SEQ ID NO: 47428 - DNA, 842 bp, Zea mays
  unsure (1)..(842): unsure at all n locations
  Clone ID: MRT4577_143261C.1
gattccgcgcacttgccgcggacccggctagctggtggacgtacgcacgggaggagctgatgagatcgacgccgacgccgacgccggctctcttgcttgttgcaggtcagcggcggggaagggcaagggcaagggcgagaagcggcagcggcagccgcggatcgcgttcatgaccaagagcgaggtcgaccacctcgaggacggctaccggtggcgcaagtacggccagaaggccgtcaagaacagcccataccccaggtacgtggtacatgcacagcacgtatatacagctatacctactggctactgcacgtatatacagcacctctcttctancttactccatgacgcacgctacggtagacattgctgcatgagctaatggtgatggcgtgcaggagctactaccggtgcacgacgcagaggtgccccgtgaagaagcgggtggagcggtcgcaccaggacccggcggtggtgatcaccacgtacgaaggcaagcacacgcaccccatcccgtccacgctccgtggcagcagcacccacctcctcgccgcgcagctgcaccaccaccaccaccacaacatcgtcggcggcgtcatcgacatgctgggtctctgcctgcctccgcgcaaccacgccgccgtgccgccggcggcgacaggcctcgcgccgtccccctgctgcatgagcggtccggtgggcacggtggcaggcgcgacgacgacgacggngcccaccaccaccaccgtcaccacgaccactacctcgtcgcctcctcctcctccctcgnntcagaagatgcagcactttatggcgcaggacgacttcgggcttctacagga

SEQ ID NO: 47429 - DNA, 211 bp, Zea mays
  Clone ID: MRT4577_143262C.1
aattctacccactcatcctgtcatcacaacgatcccccatactcagagtaacttttcaacaatatatgaagaagccctcatcaccctcattatcattcccttcaaccttccatccctttctccttatcacctactttttcacatgaatactcttttattttttttctatatatcctcactttatctaattcttttacttccttttcttttt

SEQ ID NO: 47430 - DNA, 1007 bp, Zea mays
  Clone ID: MRT4577_143263C.1
attgggtacctcgaggccggccggattccgtcttcgtcgtcagcagcttctgcttgctctggggggaaggagagagagagagcgagagagagatctagtagagaggctagctaggtggtcctcgaacgaagatgttggcggtgttcagcgggcaggtggtggaggtgccggcggagctggtggcggcgggcagccggacgccgtcgcccaagacgaaggcgtcgcagctggtggggcgcttcctggccgcctccgagccggccgtgtccgtgcagctcggcgaccacggccacctcgcctactcccacaccaaccaggcgctcctccgccccaggtacgtacgttcgtgtacggggctgcatactgctttgctgctggcaggcactgccgccccctagctacgagtattattattattacttgtcggatctgtgttggatctcgtgtgctcaagcaagccgagactgagttcttctagtagttcttcctctcgcaagctaagagcgactgaaaaggacacagttccattccatccttcccctcacctttatttagctcttctcggtttaaaataactaaattttagtcagttcggtttatcttacggatccaaccagagccaccattttgtctttggaaaaaatagaattccttagaagaaaaatagagttttccccactactggatctggttcttctcgtgtaaattaatacgtcaggatgtatttattgtctgcatacgaaactgagcgtcgtcagtttctaactgaccggatgggatgactctcaggcaggcagggcacagagaggagttgggttggtgatgtgtcgcatcacatcatcacagggacgagattggaattaaaagctacgccgatacaacgtttgatttgaccttgcaatttttttagtagtaataataataaaaaaaaacacgaaattctgcccaccttgacagttacaggccgctcggttcggtagcaagtgagtgagtgagtgaaaatgggt

SEQ ID NO: 47431 - DNA, 636 bp, Zea mays
  Clone ID: MRT4577_143264C.1
cctcgaggccggccgggataagtccccatcatctaccctcgactcagggagtgagagcatacacacgcacttagctaggaccaccagcagtggaggaggcgatggcgtatcgccatgatctcctcgacagttctgggggaggcgcctcagggcctgccgacgctcggccgccgcgcctcctccttcgccgtcgtctgctccaataaaaagatccagaccgaccagccctacgggattgggggagctctgaccgcccaagccgacgccaacgggagaaaggttaaggtcaagggagtgtaccactgcgaccacaagtacggcgcgaacgtaaacggatacagcccaatctacaacgaggatgactggactcccaccgacgacgtgtacgtggttggaaccactgggcttctgatgtgcgccgtgaccctcgcatgggatcctcggtcggcggcggcctcctcgcatacagaccatgcgccctctccggctaaggatatccaatgactgcgcttcttgcaattcagcttgtaaaatcaggatgactgtgtataatctagactccatgaatgctcaaacttcgagcatgtaagaataagcagtgctactctataaaaaaaagacaaagaaacagcggtc

SEQ ID NO: 47432 - DNA, 768 bp, Zea mays
  Clone ID: MRT4577_143265C.1
ccggccgggattccgtcgtcgtcgtagcagcttctgcttgctttgtgggggaaggagagagagagagagcgagagagagatctagtagagaggctagtaggtggtcctcgaacgaagatgttggcggtgttcagcgggcaggtggtggaggtgccggcggagctggtggcggcgggcagccggacgccgtcgcccaagacgaaggcgtcgcagctcgtggggcgcttcctggccgcctccgagccggccgtgtccgtgcagctcggcgaccacggccacctcgcttactcccacaccaaccaggcgctcctccgccccaggtacgtacgttcgtgtacggggctgcatactgctttgcttctggcaggccaggcaggcatatcttccatcctccatgcccactgcctccccctccctagctacgagtattattattattgttacttgtcggatctgtgttggatctcgcgtgctcaagcaagccgactgagatcttctactagttcttcctctcgcaaggacagtacagttccattccatccttccaatttctggaaaaaatagaattccttagaagagaaatagagtttttcccccctactggatctggttcttctcgtgtaaattaatacgtcaggatgtattaattgtctgcatacgaaacagagcgtcagtttctaactgaacggatgggatgactctcaggcaggcaggcaggcaggcacagagaggagttgggttggtgatgtgtcgcatcacatcatcgca

SEQ ID NO: 47433 - DNA, 419 bp, Zea mays
  Clone ID: MRT4577_143266C.1
ctatgaggggtggtgagcctttatagcgtttttatttataggctttgaaccaacccacacgccggaagcggagaacttgagcacgggtagctacatcactaacggggggaggaggaacaagatgtgcatgctgcaccccctggtacgagactctctttaactggggggtctggcgaggacccaaaaaaacaagaagaagaacttttcatggggggggacacacgcaaactaagaccacctccacggccacagcaagaagccaaggagatgtacatcctaaatatagcgacccgggtgaagcaacttgaggccaacaaagcaggggagctgcatcgcctgctattactgtgtgtcacccgcacggactgaactggaccgtgcgcacacacctatatactagggtgtgggcacgtaccagt

SEQ ID NO: 47434 - DNA, 361 bp, Zea mays
  unsure (1)..(361): unsure at all n locations
  Clone ID: MRT4577_143267C.1
gtgatttggactgcagattcaggcttttattatctaccttacctgcacggtgtgaagtgtattgtggctatggagggtaactacaggaaggtgtggtaacagtggactagtcgggattttccacttttaccttcacagtacattccacttaatattacatctgttataggctaattttaatgtgaatttaaccttgtaacttactatatgttataaaatttccattgatctactgtttaggagtgaattttccatctaaattccgtctgccatgtgagagtcagattagggtttttctgtacgatttttttatttgnttgtgtttaagttgggtgagcgcagatggtaatctgtgatctgg

SEQ ID NO: 47435 - DNA, 301 bp, Zea mays
  unsure (1)..(301): unsure at all n locations
  Clone ID: MRT4577_143268C.1
atgcgggagagaaaaagatggacaatggcctaccgtctnataccgaatgcagggcttttgcttccaggaaaacaaggcccccaaaacacaagaccgttcccaacacacaagcaaggattcgaccacccactgttctgcaggagcccgtgccccctgccccgtgccggtgcagcggcccgagctgcttnagagggcctcccactcgacgatgtccatgctcatttccctcccgccggttgcttgtaactccacccgaatgccctccacnctcctcttgaacccgccccctggagctcccgta

SEQ ID NO: 47436 - DNA, 497 bp, Zea mays
  Clone ID: MRT4577_143269C.1
tcggaacgggctctctcagactctcacgttctcaccgtctctctctcagccagccgccagaaaccgagcgccgacctccaaggctcgcagggggagcacgagcatcggaggcgtggtgccgctggacgctggtgcgtggagcaggctataggcatcatcacgcaggaagtcgctaccactcgtgcactccacttaggatccctcagccactagcaagcagtcgcacgctgccatgggaggcaggcacaagccgcacaagtattctcttatgttttctatattttgatgttatctggttgtaatcatatttaagtttgactaggaaagatgagctcagagagcagcacagacggattgagtaagggtgtgagaccaagacctttgcttcatttattttgcagaacagtactcatttattgttttgtaacaatactcatatattgtttggttcaagtgtaaacgctatgtactcatatattgttttgtcaaccttctgg

SEQ ID NO: 47437 - DNA, 357 bp, Zea mays
  Clone ID: MRT4577_14326C.1
ctggccggggtcgcatggcacgccatcagcagctagcgcgctcctctagcccagacagagaaaggccggcatgcgctaatcgtaatagccatgggctccaccgccggcgacgtggtcgcgtcggtggacgaggaggcgtgcatgtacgcgatgcagctggcgtcgttgtccatcctgcccatgacgctgaagaacgccatcgagctgggcctgctgtaggtgctgtacaagggaggcacggctggtcggtcgccgagcgtgggactgaactgcacactgcaggacggtcggctgcggcgcgagaatgccgcgctgtgcggtcattggagcgcctcttgccgctctgctccatgactg

SEQ ID NO: 47438 - DNA, 604 bp, Zea mays
  Clone ID: MRT4577_143270C.1
gccggccgggccgggatcaccaccactgttggctacagactattagctatatctactcataagcgcacaacaatccgatcgaaccatgagggcgttgttcgttgccctcgctctcctggatctctgtgagagcgacacctccacgcatacagatggcggctgcggatgccagccaccgtcgccggtacatctaccgacggcggtgtatctgacacctacagctcacctgtcacctccagaggatctcccaccgacggaccacctgcctccgacggttcacctgccagcgccggcacatgtgatgacgccgattaatctgccgacgtcaccatgacactacgctactcaaccgccccggactcaaactaatacacattcacgactacatgaccgtgccaacatactgctatccaaacccgagtcacttgcatggaacctgtagcggtggtaaaacctcgatcctgtgtcagagcacaaagactatgatgcatcaatgtagctcgagggtaacgccctactgttcttctcattgacagactgtgaggaagcaacgctgccagtaattcacggaagtgagaactacatacaccgttaccaagctatc

SEQ ID NO: 47439 - DNA, 315 bp, Zea mays
  Clone ID: MRT4577_143271C.1
ctgtataacaattagtgtggagttcacttccgtcctgctgggcctcggaagaagggttattttgtcaccgaagaactgaaagcctgaattgaatctcttgtaggcctgtgccctgggattaacactgttatcagggaacgggggtgcggatcggcccacgtgatcactttcagaccgttttttggaataaacagtgggtgcactggcctctatattgacaaccacgttcctatgacaccatagatcgtgactgacatcgacaaatagggagactcctgtcttggaccatcgctcctgggccatgaaatctaagat

SEQ ID NO: 47440 - DNA, 537 bp, Zea mays
  Clone ID: MRT4577_143272C.1
gcccgacgggctcgaaatgacacaggatcaaatgctgtcctccctacctatataattctctcttacctttgggccgttctggggagatcgattaaagtggacataacttgaatttgaggatactatacggacgtgagacgcgtgatgactaaacagggatgaactttattcttcgttaagaaagcgctgttatatcatctttgcataatcgcgtatcttcacagcccgaagtcgtatgctcaaaggctacagatacgtgattccgtatatcttacgttgaaactacattatcttaatcgatccactttgtataattgcgactccattttgacctcctccagaccaggagggaggtcaatccaggatgatttgtactctatcaaagatccaactgatccccacgcctgtatcgcctatacacgatcgcgataaaacccgctctagtaatatgaataaggcctatgacaatttcaaatagaactacttcaatcattacgatgtgttcgaggggatataaaataaggtaccgtctatcgt

SEQ ID NO: 47441 - DNA, 313 bp, Zea mays
  Clone ID: MRT4577_143273C.1
gaaattaccccttacaaaacaaccacccataaaaatcacgcagaggggggggacagaacacaagaccccacaaccgatcttgcagaaaacatcgacaaagccaaaaaggttcggcacaaaaaccaaaaggctaatgaaacccgccctcaaacaaaactactacccaaaaccggccgaaaaaaaaaaaaaggacacgaccaaaaggcgctagcaggcatgccaagaggtgggacccctaaactaagacggagcatacagtatctggcaaccataatacccacggcaaaaagagaaaggagtctatatcgcaaaa

SEQ ID NO: 47442 - DNA, 399 bp, Zea mays
  Clone ID: MRT4577_143274C.1
atggagggggcgcagctgacgctcgagtggagggccgtcagagcacagcagcggcaggagaggagggtggcagcgatggagaaggaaggataccatttactaatttcatgtccacatataaccaggaatgggggtgagacaagacaagaaaagttggcaatagaatcaggacaaacgggaatacaaaccgggctgctaggcactggtttgctctggctggctgtgtgttgcggcacaagccacaagcagcaggccagcggtcagcgcacagccaaagccacaggggcacaggctgaggcagacaagaagcagacaacaacacagaagatcgggtgcctgcggcacgaatattatgcttcccaaccccaacgttggtggcaacaaccatccagagattaa

SEQ ID NO: 47443 - DNA, 718 bp, Zea mays
  unsure (1)..(718): unsure at all n locations
  Clone ID: MRT4577_143275C.1
aattcggcacgaggcaattctcccgcaaaaaaagacaaaaccctaaacccgcggagccggggtggagagcagccattccttcgctcccctccgcaatggcgtcgcgccgagccagcaacggccgctctcccctcgtgcggaaacagagtcagatcaccgcctttttctcctcccctaccccctctccgtccccctcgggcccgagccccggcgcatccaagccctctccatcgccgctgaaccctagtgcgaggacgaggtccccacttgccgcggtatccccctcctctcccaagctgccacagccgcagcagaaacagaaggaggtaaagaaggttaaggaggagcatgatgccgccttggtgcctgcgcccgcggccgcggaggtggtggggagggtgtttgncgggtgtactggccgctggacgacgcgtggtacaagggcaagggtggaggcctacgacgcggcctcccgcaggcaccgcgtgaagtatgacgacggcgacgaggnaggaggtcgatctcaggaagggagaagttcgagtgggccgccgtcgttgaggagtcgaccttgctgccggcgaggaagctgcggcgtctccggcggatgtctgatattctcgtggcaaaatcaccggctgaggcagaggatggcgcagggggattcactgaggacgaggactggaagaggggatactgttgtggaggatgcttctga

SEQ ID NO: 47444 - DNA, 283 bp, Zea mays
  Clone ID: MRT4577_143276C.1
cccacgcgtccgaaaaaaaaatatgtatatataaaaaaaaaaaatataaataaaattaagaggaaaaaaaaaaaaaaaaagtaaaaaaaaaaaaaaaaaaaataaaaaaaaaaaagggtgctggttttataggttctaattttactcacccttgtttgcaaccgtatacatctcatattggtggatttaaatcgaattcattggctgaagttttaaaaccttgaaattggtaaaatatgttcgatagttattttaattgttttgcatgctaatgtttttttgc

SEQ ID NO: 47445 - DNA, 665 bp, Zea mays
  Clone ID: MRT4577_143277C.1
gggcccggaggaaacgaggcccgcggtgtttaggtcgaaagcttgatagtgaagacggcgggaagtgtctgagaggaagccgaaagctgagcaacacttgcgtgtggagaagcctcgtggctctctacggaattactcatccgtggtacttggccctcgtatagtcgtatgagctaccctttgtgtagaggcaccaacaaggattagtcgataccttacgtggtctggatagctcggtaaaaatagcaacgtcgttcacgagagtttgcatctttacctttgttttttaccttccgcatttacattaagtacttaagtttcaatctctcatttctagttagaatatttatgaatagaacttaggttgcataactcctttttgcggtagagatagaaacacttagtcaaagactagtttgcacaatctaatttacattttttggatagggtttgttctagggatttatttgtggtataatttagagtgaagtttttagaagtcctaattcactccctcttagacgtcactgtttcttaccgcgtcgaaatgatttagggtttctactgcagaaagaggatgtcagtaagcgatgggtcagtaaaggctaagtggacgtaggatgagcatatttataagttacaacgaaagtccaaatgaagcgagt

SEQ ID NO: 47446 - DNA, 276 bp, Zea mays
  Clone ID: MRT4577_143278C.1
ccacgcgtccgtcttttgtcgatcgcgagcgggcaccctagatagcttgatgttgcgggtgggcacgggcgaagaatacaaaaaagcacgctttatttatgggcgtgcgacattggtgccaggcctgaggccagcctacgcagctgcgggcttgtggcctttctgccatgttatccaatacctggctgggatatggattaaactgctcccgccatccgggtgggggcatatgtgtatgtacatatgtatgtgtctatatacagagcaataacttgg

SEQ ID NO: 47447 - DNA, 163 bp, Zea mays
  Clone ID: MRT4577_143279C.1
aaaggggtggtcataccattttacataccacgctgccaaggacgccagttcttacactaaattggacacattacaagtaagaaacatagatggactgggcaatcctctcccacaacaatcaccatttcctcttggggggagtggggcccacccgaggagccct

SEQ ID NO: 47448 - DNA, 777 bp, Zea mays
  unsure (1)..(777): unsure at all n locations
  Clone ID: MRT4577_14327C.1
gccggccgggttgggctgcctgtcagtcctgtctggtgtgtgcaccgcgcgtccgcgcccccgcctgggcgcctggctgccttcgtctcgcccagaacgcgtaggcgcagcaacaaactaggaagcaacacccagctgccccggcgcaacccgtcctcttctactccagaggcacctcggcatccgccgaccggtttccgagaggtttgctggagtgcaccagcggtggggcagcaaatctgtaactgtacgcaccacttctttcccgtccccattcttctgggatttgggagctctcttctccggtttggatttcggagtccgtctcgtcttggggttggactgagtgcgctcgtcctgtgaatctggatcctgggcaccagtcgcgttggtgtagctggagcctggagccggaaaggtgtggccctgatttatctctttgtcgatctcgttttggcggatgggtcgtgcttgaagctgagcggtagatttctccctctaccgcctcgtcgactctctctttgggttctcacgggtgcttgagaccagatgtttaggtcgatgaacacaagggcgacgtttggcctactctcatgcgcgcaatcttggtgcctcttgccagtttttgggactccggngggttagattttttttgttcttgtgtccctgatttctttgtagcgngctaacgngtgagttcttgaagagaaagattagattttttggctccgagacgtagtaattttctgtttgctaattctactgcatgctccgttc

SEQ ID NO: 47449 - DNA, 659 bp, Zea mays
  unsure (1)..(659): unsure at all n locations
  Clone ID: MRT4577_143280C.1
nttcaccttatgttaagagagaaaaaggagaaaatctatctaatagtagtttgattgcacatcgattgtacaggaagtttgattgcgcaatgactttcgtcgataggcataatgtatatctagttgtataacaatagttatctatctagaaaagccaaaacattttataatttagaatggagggagcacttttctattttaaaaactctccctgagctttcataacttaattactttttaatttcaaatgctttacagggtggcggccttgctgacaagaaaagcatctctgagacgctaagagatgcatgccgaaaaagattgttggatgctcttggacaagcaaagttgcgactcgggaatattccgtgagtctgcttccagtttggcactgtttggttttgaccattggccactttgcccaaactgctaattaaagcatgagataccttgtgttccgaacttgttttgatcatgcaccgtatgacttgcagaaaaccttcgatttttacttgttccctgacttggcatgctgtcaggtgcggagacgaggcttctgctacacaccttgaaacagagtgcttcaaaaaatatgtgaaggcgggcaagacgttctacaactcacagatagccgccacagttcggtggctgtcatctgc

SEQ ID NO: 47450 - DNA, 847 bp, Zea mays
  unsure (1)..(847): unsure at all n locations
  Clone ID: MRT4577_143281C.1
gtcattaaatctgcgagttggccgacctgccgtttgccagaatgatggataccgcggcgcacgttctcgtgttcccttggccacggcaggggcacatcaaccccattctccatttcgccaccaccctcgtcgacgccggcgtccaagtcagcttcctccacaccgagcgcaacctccgccgtcttgcccaggcgcctctgcccggcctccgcttgctttctattcccgacggcctccccgacgaccaaccctgcagcttcttggatctcatggagtccatgtgcacgaccggcagcgccgcgtaccgtgccctgctcttgtcgcttctctctgccgttgatgcgccggtgacatgcgttgtcgccgatggcaccatgccgttcgccttcgacatcgccgaggagctcggcatcccggcgctcgccttcgccccgtacagcgcgtgcagctacctggcgctcctgtccatgcccaagctcctcgagctcggcgacaccgccttccctgcggacgacccggtgcgtggcgttccggggatggagggcttcctccgtcgacgtgaccttcctcgtggtctctcctgcgctgaaaaaggcgacggagaccccttggtgctaaagcttgccgaggtcaccgctcgtagctgcaaggcacgtgcgctcataatcaacaccgctgcgtccatggagggggcagcgctcgctcacatcgcgtcgtgcacatgcgaggtcttcgccgttggcccactgcacgccaggtcgaggatcgccgcaagcgcgagcctgtggcgngaagacgacgnatgcatggcgtggctggacggcacgaggacgatccgtcgtgtacg

SEQ ID NO: 47451 - DNA, 262 bp, Zea mays
  Clone ID: MRT4577_143282C.1
gggaccaaaaaaaggttcgctttttttttttttttttcgggggattcaaaaaatgaatgacaacccctttaaaggaattgggtcgctttgccccccacccgttggcaaaaaaaaatgggggggaaacaactggtaaaaaaattttcctggggacgggtacccaagcatggggggtttgcatgggttttgaacgggtgcttggttggggccccaccttaagaacccaaacaagggggggagccaagggccacccctttggccc

SEQ ID NO: 47452 - DNA, 511 bp, Zea mays
  Clone ID: MRT4577_143283C.1
ccggccgggacacccccaccaccactcgagcgagctcggccatttcgttctgcaccaggacagcgggagtgtcggtaggcgttcgctgcctgcttgtgccgccgtttctctgctagctcttcacgtgcgcgccatggccgcctcctcgagctcctgcctctccgtcctcctcgcgtcgtggctcgtgtgcgcggcgtgcctcttcgtctccgggaacgcttcgggggcggcgcacagggtggtcgaccccgagtggcacccggccaccgccacctggtacggcagcgccgagggcgacggcagcgacggcggcgcgtgcgggtacgggacgctggtggacgtggtgccgatgaaggcgcgcgtgggcgccgtgagccccgtgctgttcaagtccggcgagggctgcggcgcctgctacaagtgcggtgcctcgaccacggcgtctgctcgcgccgcgccgtcacggtcatcgtcaccgacgagtgccccggcggggtctgcgcgggcggcc

SEQ ID NO: 47453 - DNA, 168 bp, Zea mays
  Clone ID: MRT4577_143284C.1
cttcttttttttttcgccccgcacttctttactgggttacctccttccccgggggggcccaatccttcccttggctttttttacaaaccattatacccggtgccggagattaacgttccaaagctatttctcaacatttccttcagctagagcagagattgtcttatc

SEQ ID NO: 47454 - DNA, 673 bp, Zea mays
  Clone ID: MRT4577_143285C.1
ctagaacacacactgctcctcatctttactttctctacataattcttcaatatgttggtatgttcccgtgactccttggtttagctatccttatacatgcatgttgttacataaatcaattagtttttccctgaaggacaggcctggtgcagtggtgagaggcctttccactgagccaaagggcctgggtttgacgcagcctctgcgcaaaaatgtagggttaaggcttgccttggttattacttccccagacccgactcatgcgggagccgtcagcattgggagatatacgtggagcgtcagaattatatgtgcatctacaagaacagttacaacaattctccatcaggttgatgttcatacatctcagatataaatgtgggggagacggtgcctcatcaatgatgagtaggttgattctcatctagcggcaccattgctcactacaactggtttgcttgagcaacttaatgtcactctcaagaggaccctcctttcgaccgacaccctgaagcaccacacaagctttagaaagtcggaattgtacttcgtatacataaattacatgatattatatgttcatgtaattctatgttgattctttagaaataatatatatgatattgtaatgtgtgttcgacatcaatttattttatttgagttcgccgtgcgt

SEQ ID NO: 47455 - DNA, 227 bp, Zea mays
  Clone ID: MRT4577_143286C.1
agacagaaacagagcattgcaaacctgcaactgcaaggttggccaaactccaaacattatgcgacacgttttctctatgatgaagccgcagctacacgactcccaataataatgtacttgcactagacctggatggtgctacggtggtttccagacgcattacacggcataccagaagtcccgcccgggtagaatcgaccatccatcatacaggcggcgggggcagg

SEQ ID NO: 47456 - DNA, 624 bp, Zea mays
  Clone ID: MRT4577_143287C.1
gcggccgcgtcgacctacgaactgccaaccgtccgtctgctgcagcatatacaatatcaatctaaacagtgaacacgatgagaacgtacgctctcctatggcccttggccgcattcctagtgacccggacctccgggtcagccattccgatgtgggaattccttagtcgaggagaaaagatgagccacttgttcaacatgttcgtgaaacaagtagccgacttttgtgactcatcttcgatgccagactgtaataaagtattattggtttatggtttaaccaatttggcaaaaatgggagatgatagcctagacaaaatggacccttatcaaagaggatcgagaataatgatatgggaatctatgatgaaaggaggtttctttacttcccaaacaactgacaaatcggaacaagagctcaatgacccattagaaactagtggtggaaatgatttgggttcagcgtcgaataacgtcgaagaaatagctactccacctggtggttatatcatcggaccaatggttgtaagagtaatgcctgatggtcggccggtacctggcgactctcagaggcctctgcccaaagacgaagacgcagaagaatttatagccatgcgatccaaac

SEQ ID NO: 47457 - DNA, 300 bp, Zea mays
  Clone ID: MRT4577_143288C.1
cttaatctcagacagctggaaggtagtattccgccctcgcccagccacccgagtaaatgagaatgatgactgactgagaccctgatggtggtggcttaggcttaatctcagacagctggaaggtagtattccgccctcacccagccacccgagtaaatgagaatgatgactgactgagaccgtgatggtggtggcttaggcaagatgaacgtctgaaatggaggcccagggctgccacgatggctctgtagtcatcacggagggagctccttttatcttgttacctactcgcctcttgtg

SEQ ID NO: 47458 - DNA, 862 bp, Zea mays
  unsure (1)..(862): unsure at all n locations
  Clone ID: MRT4577_143289C.1
acaccccaccctaaaatctccaatcttctcatctttgatcgatcttctctccacagaggaaacggcagcgatccccggcgagagaccgagggaggagggctcgcggccatggcgcgcgagcagctggaggtgctcacggcgctggacgccgccaagacgcagtggtaccacttcacggccatcgtcatcgccggcatgggcttcttcaccgacgcctacgacctcttctgcatctccctcgtcaccaagctgctcggccgcatctactactaccgggaaggggcggacgcgcccggctcgctgccgcccaacgtcgccgccgccgtcaacggcgtcgccttctgcggcacgctctccggccagctcttcttcggctggctcggcgaccgcatgggccgcaagcgcgtctacggcatgacgctcatgtgcatggtgctctgctccatcgcctcgggcctctccttcgggtccacccccggctccgtcatggccacgctgtgcttcttccgcttctggcttgggttcggcatcggcggcgactacccgctctccgccaccatcatgtccgagtacgccaacaagaagacgaggggcgccttcatcgccgccgtgtttgctatgcagggcttcggcatcctcaccggcggcgtcgtcacgctcatcgtctccgccgccttccgcgccgccttccccacccaggcctaccaggacgcccccctcgcctccacgccggcgcaggccgacttcgtgtggcgcttcatcctcatgttcggcgccgtcccggncctcatgacctactactggcggatgaagatgcccgagacggcgcgctacacggcgctcgtcgccaagaacgccaagc

SEQ ID NO: 47459 - DNA, 536 bp, Zea mays
  unsure (1)..(536): unsure at all n locations
  Clone ID: MRT4577_14328C.1
attgggtacctcgaggccggccgggcttcgaacggacggcagaaacggaaaacgacggcataantcttggtgataagaatttgcaagatacggaggaaacgcaggaggaggagcgagctaattaaactgatcgtcaaagcatgttgcatgtgcatgaatgcacgcgcatgtccctgaaaaaaaaacgatgtatgtaatagtaatgttcttcaaaaaaaaaaaaaaaaaaaaaaaaaaaaaaaaaaaaaaaaaaaaaaaaaaaaaaaaaaaaaaaaaaaaaaaaaaaaaaaaaaaaaaaaaaaaaaaaaaaaaattcccccccaccgggccgcccccgccccaagtcccaaattcccccccaaccctaaaaaaaccgcacccccccgtgcaaggggcccccaaattccaaaccaaaccctaattccatttattttgggggggggccaaaggccaatgggtttccggttaaaaaaaaaccgaaaaggggggcccaaattttgaaactttcttgtttcccgccccaaatctgggggggg

SEQ ID NO: 47460 - DNA, 349 bp, Zea mays
  Clone ID: MRT4577_143290C.1
ggggcctccaaaacgggagcccccaaaactgaaccctaacagagcacaaaaaaacaaaaaccaaaaaaaccaaaaccggacagttccttacaggacgaacacaaaaaaacaaaacacaaaaaaacagcgtggcccaaaccagcaggggccccgcgcacaagggcaccgagcaaaaacaatcacaaaaaaaagaagccgaaaaaagggcctgggacaaaaccccataggggaagacccaaaaaaaggaggcaaaaaaccaactgggtactaaacaactgggggataaacatgaggacgatcatgttgaaaacccacttgttgtaaccccactggcgggaccaccctgagg

SEQ ID NO: 47461 - DNA, 2946 bp, Zea mays
  Clone ID: MRT4577_143291C.1
atggcttcggtcaagaatcaagctggaactgcttcggctccgaagctagttctctcgataacaggcggttcatgctcagagccggccaacaagaagcagaagaaggaggcacagagaagagtacaacatgtaggggtacaaggacccttcatcaaatcaagatggtctcacatcccaattaccttttctcaagaggatcttcagctcaaggattacccacacaatgatgctatggttatctcttgtgtgatcataggatttctggtccataatgttttggttgatacaagcagtgcagcagatatcatatttgctaaggccttcagacaaatgcaagaacccgaagacaagattcatgctgctacgcaccctctttgtggcttcggagggcggcagattgtagcacttggaaagattaccatgccagtaaccttcggattcgtcaacaacacaaggactgagcaaattgtgtttgacattgttgacatggagtatccttacaatgctatcattggtcgcggaacactcaatgctttcgaagcaatccttcatccagcatatctttgcatgaagataccttcggatcagggatctattgctatttatgggagtcaggaagctgccagaaaggctgaagggaattggactgattcaaaggcaatccataacatagatgaagccgaagcttatgtctttgcatggtcggctaatgatctttgcggagttaacagggatgttattgagcattcgcttaatgttgatccatccttcagacccaaaaagcagaggcttcagaagatgtctgatgacaaggccgaaggtgctcgaaatgaagtgaaaagacttctcagtgtgggagttatcagagaggtaaaatacccagaatggctggctaacactgtcatggtaaaaaaggccaatggtaaatggaggatgtgtatcgattttactgatctcaacaaggcctgtccgaaggacgagtttccattgccaaggatagattccttagttgatgcagcagcttcatcagagcttatgagtttgctggactgttattcaggctatcatcaaatctggatgaagaaggaggatgagccaaagaccagcttcataacccctagtggaacatattgctaccttcagatgcctgaggggctcaagaatgctggaggaagcttcagcagaatgacggcgaaggttcttcagtctcagataggcagaaatgtgttaacttatgttgatgacatcattgtaaaaagcacgaagcaagagaatcacattactgacctccaggaaaccttcgctaattttagacaggccggtttaaagttgaatccagaaaaatgtgtcttcggggtgaagaaagggaaatttcttggctgcctagtttcaacaaaagggattgaggctaatccaaataaaatcgaggctatccttcgaatggaaccacccagtacaaagaagggggctcaaagtttgacaggaagactggcatctctcaacagattcatatctagatcagcagagagaaatttaccattcttcgaagtgctgaagtcagccgaagtttttcaatggggaccgatccagcagaaagccttcgaagagctgaatcaatatttgatggacctaacaacgctaactccaccaacgccaggggctcctctgttgttatatgtggcagcctcgcactcagcgaaggtgctatatgctgttttgatggcttctagaaagcttcggcattatttccaagcatacaatataattgtcccttcttcacaaccattgaaggacattatgagaaatagagaagctactggaaggattggaaagtgggctgcggaactcaatgaattctgcattgattatgtacacagatcttcgattcagtcccaagcgttagctgacttcattgctgattggacgccaggggctcaagtagaagaggcaaataaagatgccgaagcatggacaatattctgcgatggttcttggggaaccttcggagcaggagcggtcgctgtgttggtcgcaccctccaaagttaaaacttgctacgcagcaagacttgattttagctgcacaaataacattgctgagtacgaagctttacttttgggtcttcggaagttaaaggcaatgggaatcagaagggcggttcttaaaactgattcccaggttatctctggtcatattgacaaaagttgtaaggcaagagacccaaagcttgagaagtatctggatactgtccgaaggattgaagcttcctttgaagggttttctgtaaaaaatattcctcgaggagaaaatgagcatgctgatttgctagccaatgaagactggagaactgaaatcatctcttaccttaagggtaatttcctttcagatgacgaagcttataacaagaggatagaggcaagagctcgtccatatgtaataatagaaggggagctgtacaagcatggtgtctgctctctgttactcaaatgtttatccagagccgaaggaataatgaagttaatattcaatcagccaaggggaaagtggccagaagaattaattaaagtggtgtggagccacaacacaatagtatcaaggtcaacaggttttacaccattcaaattgctatttggtgatgaagcaataaccccagaagaggctaaggcaggatcaataagaacaatggcttcggcgatagacgaagctgattgttctgtggataaagatgctatagaagggatcaggcttcaggctgtggaaaacatcaataaatatcaagccgaaacaataaaatggcgtgatagaaaggttcggttgaagaacattaagccaggacatttggtgcttcgaagagtggccaacccagacacagtgggcaaactacaactaaaatgggaaggcccctttctggtagtatcttcgtcaagacccggttcctacagataa

SEQ ID NO: 47462 - DNA, 382 bp, Zea mays
  Clone ID: MRT4577_143292C.1
gtaggatcaaccccaaacgcaagtacacatgaaaaatgcacaacatggtacaaaaacagatgccggctatcgccgaaagcaaaatacaaggggaacccaaacggaacaggcgttaaccaaatctggaacccaaaaccaaatgtatccacaattgggctggcaagcatacagaacttttccggcgaccgaaagaaccatcacacgttcttctgcaactaccgcaggaaaccgaaaaacccagagcacgcctaattataagctgtatacacccacaaccatatcacctgacgcccaaaaccaataagatggctcaacccatgcatcttatacaaatttaaggaacccaaggaggtaaagggcaatcctctacgacagccacttt

SEQ ID NO: 47463 - DNA, 3216 bp, Zea mays
  Clone ID: MRT4577_143293C.1
atggcttcgttcaagaaccaagctggaactgcttcggctccaaagctgattctcccgataacaggcggttcatgctcagagccggctaacaagaaacaaaagaaggaggcacagagaagagtacaacatgtaggggtacaaggacccttcatcaagtcaagatggtctcacattccagttaccttctctcaagaggatcttcagctcaaggattacccacacaatgatgctatggttatctcttgtgtgatcaaaggatttctggtccacaatgttttggtcgatacaggcagtgcagcggatattatatttgctaaggccttcagacaaatgcaagaacccgaagacaagatttatgatgctacgcaccctctttgtggcttcggaggaagacagattgtagcgctcggtaagattaccatgccagtgaccttcggattcatcaacaatacaaggactgagcaagttgtgtttgacattgtcgacatggagtatccttacaatgctatcatcggtcgcggaacactcaatgctttcgaagcaattcttaatccagcatatctttgcatgaagataccttcggatcagggacctattgctattcatgggagtcaggaagctgccagaaaggccaaggggaattggactgattcaaaagcaatccacaatatagatgaagctgaagcttgtgatcagtacaagtacagaagggagaaggctgcttcggccgatcagccaaaacccatgcttctatgcgaagatatcgcagagcacaaggtgctgctgggatctcaattgtctgagcagcaagagaaaactttgataaggtttctcttcaacaacaaaggctatcatcaaatttggatgaagaaggaggatgagccaaaaaccagcttcataacccctagtggaacatattgttaccttcggatgcctgaggggctcaagaatgctggaggaagcttcagcagaatgacaatgaaggttcttcattctcagataggcaaaaatgtgctaacttatgttgatgatatcattgtaaaaagcacgaagcaagaaaatcacattgctgatctgcaggagaccttcgctaattttagacaggccggtttaaagttgaatccagaaaaatcagtagagagaaatctaccattcttcgaagtcctgaagtcagccgaagtttttcaatgggggccagtccagcagagagccttcgaagagctgaagcaatatttgatagacctaacaacactaactccaccaacgccaggggctcctctgttgttatatgtggcagcttcgcactcagcggtaagtgcagcacttgtccaagagaagcttgaaggccaagtcaaaaagcaacccccaatatactttgtatccgaagttcttagtttatcaaagaaaaattatacagaattgaaggtgttgtatgatgttttgatggcctccaggaagcttcggcactattttcaagcatacaatataattgtcccttcttcacaaccattgaaggatattatgagaaatagagaagctactggaagggttggaaaatgggctgtggaactcaatgagttctgcattgattatgtgcatagatctttgattcagtcccaagcgttagcagacttcattgctgattggacgccaggggctcaagaagaagaagcaatgggaattagaagggcagttcttaaaactgattcccaggttatttctggtcatattgacaagagttgtaaagcaagagacccgaagcttgaaaaatatttagacacggtccgaaggattgaggcttcctttgaagggttttctgtcaaaaatattcctcgaggagaaaatgaacatgctgatttgctagccaagtcagcagcacaagggctgcccctaccttcggaagtatttttcgaaacaataaaagcaccttcggttgaacttcttgaaagagcagtcctcaatatatcccctgtttatagtgaagactggagaactgagatcatctctttccttcagggtaactttctttcaggtgacgaagcttataacaggaggatagaggcaagagctcgaccatatgttataatagaaggggagctgtacaagcatggagtctgttctccattactcaagtgtttatccagagccgaaggtatagaattgatgaaggaaatacacgcaggcctgtgtggatctcacattggatctaggcctttgcttggaaaagtttttcatcaaggattttattggccaaaggcagcttcagatgcagcggaattagtccaaaagtgcgaaggttgtcagaaatgtgcaagagatcaaaaacaaccatcgtctctaacccagttaatacaacccacttggccattgcaaaggtggggtcttcatttgttaggtccgttaccaccagcacaaggaaacttaagatatgttgtagtggcagtggaatatttttctaagtggattgaggcaaaacctttagccacaataacttcggttactatccaaaagtttttctggcaaaatattgtatgtcgtttcggagttccgaaggctattactgtggataatggaacgcagtttgattccgaagctttcagagaattttgtgaacaaattggcacgaagatccattttgcatcagttcggcatccggagtcaaatggacttgttgaaagggctaatggcatcataatgacaggaataatgaagttaatcttcaatcagcccaggggaaagtggccagacgaattaatcaaagtggtgtggagccacaacacaacaatatcaagatcaacaggttttacaccattcaaattattgtttggtgacgaagcaataactccggaagaagccaaagcaggatcaataagaatagtagcttcggtagaagacgaagctgaagctgattactctgtggaaaaagatgctatagaggggatcgggcttcaagctgtggaaaacatcagtaaataccaagctgaaacaataaaatggcgtgatagaaaggtttggctaacgaacattgaaccaggacatttggtgcttcgaagagtagccaacccagagacagtaggcaagttacagctgaagtgggaaggaccttttttggtagtatcttcatcaagacccggttcctacagattgaaggatatggatggcaacaacattcctagatcatggaatgcggacgagcttcggcgatattatgtttag

SEQ ID NO: 47464 - DNA, 318 bp, Zea mays
  Clone ID: MRT4577_143294C.1
aaaaaacaggtacccagggtaaaataccccccccggttgggaaaaaaaaaaaaatcctattggttaaaaatcccccaaaaacaaaaaagccagaattgttttacccccaccttttccggccattggggcggcccctaatgggcggcaacaacggatctgatttaatttggggaaacccaaacccaggcccgggcccggaatgtttttaaaaaagggccaggacttttcccttttgggccccaaaaagggccccacccgttttgccttttttgaaaaaggggaaggtgggaattccctcaaccttgaaggccgggggga

SEQ ID NO: 47465 - DNA, 807 bp, Zea mays
  Clone ID: MRT4577_143295C.1
ggtaactttctttcagataacgaagcttataacaggaggatagaggcaagagctcgaccatatgttataatagaaggggagctgtacaagcatggagtctgtgctccattactgaagtgtttatccagagccgaagtgctgaaggctattactgtggataatggaacacggtttgactctgaagctttcagaaatttttgtgaacaaattggcacgaagatcctttttgcatcagttcggcatccagagtcaaatggacttgttgaaagggctaatggcatcataatgacaggaataatgaagttaatcttcaatcagcctagggaaaagtggccagacgaattaatcaaagtggtgtggagccacaacacaacaatatcaagatcaacaggttttacaccattcaaactattgtttggtgacgaagcaataactccagaagaagccaaagcaggatcaataagaatagtagcttcggcagaagacgaagctgaagctgattactctgtggaaaaagatgctatagaggggatcagatttcaagctgtggaaaacatcaacaaataccaagctgaaacaataaaatggcgtgatagaaaggttcggttaaagaacattgaaccaggacatttggtgcttcgaagagtagccaacccagagacagtaggcaagttacagctgaagtgggaaggaccttttctggtagtatcttcgtcaagacccggttcctacagactgaaggatatggacggcaacgacattcctagatcatggaatgcggacgagcttcggcgatattatgtttag

SEQ ID NO: 47466 - DNA, 3513 bp, Zea mays
  Clone ID: MRT4577_143296C.1
atgggaactgacgaacatttggaccttaacgcaggaggtaagtccgtagatcaaaaggaatgtcaccttgtggttgtgaagcatattcttcgatatttagttcatacgccttacatcgggctctggtatcctaaacagtctacctttgacttgattgtatattcagactctgactgtgccgggtgtaaggttgataggaagagcacatcagggacttgtaagattctaggaaggtccatggtgttttggagttcaaagaaacaaacaatcattactctatccaccgctgaggtcgagtatgttgccgcagataatcccattgaacacagccgcactaagcatatagacgtccagcatcactttctcagagatcaccagcaaaggggagatatcgatgtttgtcatattagcaccgatcaccagttagccgatatcttcaccaagcctttacatgagaaaagtgattttggtgtagtcccaaaggtgaatggaaagggaaatggtggacttgcaaaggatcttcagctcaaggattacccacacaataatgctatggttatctcttgtgtgatcaaagtatttctggtccacaatgttctggttgatacaggcagtgcagcggatattatatttgctaaggccttcagacaaatgcaagagcccgaagacaagattcatgatgctacgcaccctctttgtggcttcggaggaagacagattgtagcgcttggtaagatcaccatgccagtgaccttcggattcgtcaacaatacaaggactgagcaagtcatgtttgacattgtcgacaaggaatatccctacaatgctatcattggtcgcggaacactcaatgctttcgaagcaattcttcatccagcatatctttgcatgaagataccttcggatcagggacctattgttattcatgggagtcaggaagctgctagaaaggccgatgggaattggactgattcaaaagcaatccacaatatagatgaagccgaagcttgtgagcagtacaagtacagaagggagaaggttgcttcggccgatcagccgaaacccatgcttttatgcgaagatatcgcagagcagaaggccgaaggtgctcggaatgaagtgaaaagactcctcagtgctggagttatcagagaagtaaaatacccagaatggctggctaacactgttatggtaaaaaaggccaatggcaaatggaggatgtgtattgattttactgatctcaacaaggcttgtccgaaggatgagtttccattgccaaggatagattccctagttgatgcagcagcttcatcagagcttatgagtctgctggattgttattcaggctatcatcaaatttggatgaagaagcaggatgagccaaaaaccagcttcataacccctagtggaacatattgttaccttcggatgccagaggggctcaagaatgctggagaaagcttcagtagaatgacagcgaaggagaccttcgctaattttagacaggctggtctaaaactgaatccagaaaagtgtgttttcggagtgaagaaagggaaattccttggctgcctagtttcaacaaaagggattgaggctaatccaaataaaattgaagctatccttcgaatggaaccaccaagtacaaagaagggggctcaaagattgacaggaagactggcatctctcaacagattcatatctagatcagcagagagaaatttaccattcttcgaagtgctgaagtcagccgaagtttttcaatggggaccagtccagcagagagccttcgaagagctgaagcaatatttgatagacctaacgacgctaactccaccaacgccaggggctcctctgttgttatatgtggcaacttcgcactcagcggtaagtgcaacacttgtccaagagaagcttgaaggccaagtcaaaaagcaagccccaatatactttgtatccgaggttcttagtttatcaaagaaaaattatacagaattggagaaggtgctgtatgctgttttgatggcctccaggaagcttcgacactatcttcaagcatacaatataattatcccttcttcacaaccattgaaggatattatgagaaatagagaagctactggaagagttggaaaatgggctgcggaactcaatgagttctgcattgattatgtgcatagatcttcgattcaatcccaagcgttagcagactttattgctgactggacgccaggggctcaggaagaagaagcgagtaaagacactgaagtttggacaagttgtaaagcaagagacccgaagcttgagaaatatttagacacggtccgaaggattaaggcttcttttgaagggttttctgtcaaaaatattcctcgaggagaaaatgaacatgctgatttgctagccaagtcagcagcacaggggctgcccttaccttcggaagtatttttcaaaacaataaaagcaccttcggttgaacttcttgaaagagcagtcctcaatatatctcttgtttatagtgaagactggagaactgagatcatctctttccttcagggtaactttctttcagatgacgaagcttataacaggaggatagaggcaagagctcgaccatatgttataatagaaggggagctgtacaagcatggggtctgttctccattactcaagtgtttatccagagccgaaggtccgctaccaccagcacaaggaaacttaagatatgttgtagtggcagtggaatatttttctaagtggattgaggcaaagcctttagccacaattacttcggtcactattcaaaagtttttctggcaaaatattgtctgtcgcttcggagtgccgaaggctattaccgtggataatggaacacagtttgattccaaagctttcagagaattttgtgaacaaattggcacaaagatccattttgcatcagttcggcatccggagtcaaatggacttgttgaaagggctaatggcatcataatgacaggaattatgaagttaatattcaatcagcctaggggaaagtggccagacaaattaatcaaagtggtgtggagccacaacacaacaatatcaagatcaacatgttttacaccattcaaattattgtttggtgacgaagcaataactccggaagaagccaaagcaggatcaataagaatagtagcttcggcagaagacgaagcagaagctgattactctgtagaaaaagatgctatagaagggatcaggcttcaagctgtggaaaacatcaataaataccaagctgaaacaataaaatggcgtggtagaaaggttcggctaaagaacattgaaccaggacatttggtgcttcgaagagtagccaacccagagacagtaggcaagttacagctaaagtgggaaggaccttttctggtagtatcttcgtcaagacccggttcctacagattgaaggatatggacggcaacgacattcctagatcatggaatgcggatgagcttcggcgatattatgtttag

SEQ ID NO: 47467 - DNA, 1314 bp, Zea mays
  Clone ID: MRT4577_143297C.1
atggcttcgttcaagaaccaagctggaactgcttcggctccgaagctgatcctcccgataacaggcggttcatgttcagagccggctaacaagaaacagaagaaggaggcacagagaagagtacaacatgtaggggtacaaggacccttcatcaagtcaagatggtctcacattccaattaccttctctcaagaggatcttcagctcaaggattacccacacaatgatgctatggttatctcttgtgtgatcaaaggatttttggttcacaatgttttggttgatacaggcagtgcaacggatattatatttgctaaggccttcagacaaatgcaagagcccgaagacaagattcatgatgctacgcaccctctttgtggcttcggaggaagacagattgtagcgcttggtaagattatcatgccagtgaccttcggatttgtcaacaatacaaggactgagcaagttgtgtttgacattgtcgacatggagtatcattacaatgctatcattggtcgcggaacactcaatgctttcgaagcaattcttcatccaacatatctttgcatgaagataccttcggatcagggacctattgctattcatgggagtcaggaagatgccagaaaggccgaggggaattggactgattcaaaagcaatccacaatatagatgaagccgaagcttgtgagcagtacaagtacagaagggagaaggctgcttcggccgatcagccaaaacccatgcttttatgcgaagatatcgcagagcagaaggtgctgctgggatctcaattgtttgagcaacaagagaaaaccctgataaggtttctcttcaacaacaaagatgtctttgcatggtccgctaacaatctctgtggcgtcaacaggaatgtaattgaacactcgctcaatgttgatccatctttcagacccagaaagcagaggcttcggaagatgtctgatgacaaggccgaaggctatcatcaaatttggatgaagaaggaggatgagccaaaaaccagctttataacccctagcggaacatattgttaccttcggatgcctgaggggctcaagaatgctggaggaagcttcagcagaatgatagcaaaagttcttcattctcagatagtgaagcgtcccaatcctctgggactcaaatgtgatacaattactagtcctaggaggctagtaaacacatttatacatcagatgattccagatctgcttaaacgagacaaacctataaaggtggcgaacaactttaagagttggtccacaactcgggacatatcatcagagtggggctga

SEQ ID NO: 47468 - DNA, 678 bp, Zea mays
  Clone ID: MRT4577_143298C.1
atctaaaaaaagaaagagaaaaggaagaaaaggagaaggagaaggagaaggctaaggctcaagcatcacaatcacaatctgatgttaaaggcacttcgagcggccaaatggccaacagaactgcaactgcgccaggccttataccaaagcatcagacgccacagcaaatacttatagcaaaggaggaggaacgacagagaaaacaagctgaagaaagagagaagagagcagctgcagcagagagaagacttgcggctctcgctgtccaatctgccggaacgagcgcatcaggtgcagcagcaacaaactgctccgcgaagagggcggcaccagatgacaattcgtgttcgtgctgtttcggttccttggtcggcaaggtgccattccaccgatacaactacaaatactgcagcactacatgtatgcatcttcattcagaaatgctgcaggatgattaaggaaaccgcatgatgcgtgattttgatgcaattttacctcatatacaatcaataacaggctttcttccttcccttgtgcctgctttccgtaattttgtcgtgcacatcttcagaactttaaaggttcgaaatcacattcgttctggttcgtgctaatgtttttgcttcattttggaacacttttattgagccaagcggaatcgccattcgcattcgacgt

SEQ ID NO: 47469 - DNA, 3423 bp, Zea mays
  Clone ID: MRT4577_143299C.1
atggcttcgttcaagaaccaagctggagctgcttcggctccgaagctgatcctctcgataacaagcggttcatgctcagagccggctaacaagaaacagaagaaggaggcacagagaagaatacaacatgtaggggtacaaggacccttcatcaagtcaagatggtctcacatcccaattaccttctctcaagaggatcttcagctcaaggattacccacacaatgatgttatggttatctcttgtgtgatcaaaggatttctggtccataatgttttggttgatacaggcagtgcagcggatattatatttgctaaggccttcagacaaatgcaagagcccgaagacaagattcatgatgctacgcaccctctttgtggcttcggaggaagacagattgtagcgcttggtaagattaccatgccagtgaccttcagattcgtcaacaatacaaggactaagcaagttgtgtttgacattgtcgacatggagtatccttacaatgctagtattggtcgcggaacactcaatgctttcgaagcaattcttcatccagcatatctgtgcatgaagataccttcggatcagggacctattgctattcatgggagtcaggaagttgccagaaaggccgaggggaattggactgattcaaaggcaatccacaatatagatgaagccgaagcttgtgagcagtacaagtacagaagggagaaggctgcttcggccgatcagccgaaacccatgcttttatgcgaagatattgcagagcagaaggtgctgctgggatctcaattgtctgaggaacaagagaaaaccctgataaggtttctcttcaacaaaaaagatgtctttgcatggtcggctaacgatctttgtggcgtcaacagggatgttattgaacactcgctcaatgttgatccatccttccgacccagaaagcagaggcttcggaagatgtctgatgacaaggccgaaggtgctcgaaatgaagtaaaaagactcctcagcgccggagtcattagagaagtgaagtatccagaatggctggctaacactgttatggtaaaaaaggccaatggcaaatggaggatgtgtattaattttactcatctcaacaaggattgtccgaaggatgagtttccattgccaaggatagattccctagttgatgcagcagcttcatcagaacttatgagtatgttggattgttattcaggctatcatcaaatttggatgaagaaggaggatgagccaaaaaccagcttcataacccctaacggaacatattgttaccttcggatgcctgaggagctcaataatgctggaggaagcttcagcagaatgacagcaaaggttcttcattctcagataggcagaaatgtgctaacttatgttgatgatatcattgtaaaaagcacgaagcaagaaaatcacattgctgatctgcaggagactttcgctaattttagacaggctggtctaaaactgaatccagaaaaagagaaattaccattcttcgaagtgttgaagttagccgaagtttttcaatggggaccagttcagcagaaagccttcaaagagctgaagcaatatttgatagacctaacgacgttaactccaccaacgccaggggctcctctgttgttatatgtggcagcttcgcactcagcggtaagtgcggcacttgtccaagagaagctggaagggcaagtcaaaaagcaagccccaatatacttcgtctctgaagtccttaatttatcaaagaaaaattatacagaattggagaaggtgctgtatgctattttgatggcttccaggaagcttcggcactattttcaagcatacaatataattgtcccttcttcacaaccattgaatgatattatgataaatagagaagctactggaagggttggaaaatgggctgtggaactcaatgagttttgtattgattatgtgcatagatcttcaattcagtcccaggcgttagcagacttcattgctgactggacgccaggggctcaggaagaagaagcgagtaaagataccgaagcttggacagtattctgcgatggttcttggggaaccttcggggcaggagtagcccctgtgttagttgcaccctccaaagtcaaaacttgctacgcagcaagacttgattttagctgcacaaataacattgctgagtatgaagctttgcttttgggtcttcggaagttaaaggcaatgggaattagaagggcagttcttaaaactgattcccaggttatttctggtcatattgacaagagttgtaatgcaagagacccgaagcttgagaaatatttagacacggtccgaaggattgaagcttcctttgaagggttttctgtcaaaaatattcctcgaggagaaaatgaacatgctgatttgctagccaagtcagcagcacaggggctgcccttaccttcggaagtatttttcgaaacaataaaagcaccttcggttgagcttcttgaaagagcattcctcaatatatctcctgtttatagtgaagactggagaactgagatcatctctttccttcagggtaactttctttcagatgacgaagcttataacaagcgaatagaggcaagagctcgaccatatgttataatagaaggggagctgtacaaacatggggtctgttctccattactcaaatatttatctagagccgaaggtatagaattgatgaaggaaatacatgcaggcctgtgtggatctcacattggatctaggcctttgctgggaaaagtttttcgtcaaggattttattggccaaaggcagcttcggatgcagcggaattagtccaaaagtgtgaaggttgtcagagatgtgcaagagatcaaaaacaaccttcgtctctaacccagctaatacaacccacttggccattgcaaaggtggggtcttgatttgttaggtccgctaccaccagcacaagggaacttaagatatgttgtagtggcagtggaatatttttctaaatggattgaggcaaagcctttagccacaataacgtcggttactattcaaaagtttttctggcaaaatattgtctgtcgcttcggagtgccgaaggccatcactgtggacaatggaacgcagtttgactccgaagctttcagagaattttgtgaacaaattggcacgaagatccattttgcatcagttcggcatccggagtcaaatggacttgttgaaagggctaatggcatcataatgacaggaataatgaagttaatcttcaatcagcccaggggaaagtggccagatgaattaatcaaagtagtgtggagccacaatacaacaatatcaagatcaacaggttttacaccattcaaattgttgtttggtgacgaagcaataacttcggaagaagcaaaagcaggataa

SEQ ID NO: 47470 - DNA, 193 bp, Zea mays
  Clone ID: MRT4577_14329C.1
ctcgaggccggccgggccgggcaatgcaccgatcaattaggtagcttcttctaggtctagctacgaccgtctgctcgaagaagagaagagcaacatgaaccatgcaggggaaggaggaggacgtccgcctgggcgccaacaagatctcagattgacaacccatcgcaacggcgtgcgcaaggcacgggaccac

SEQ ID NO: 47471 - DNA, 2707 bp, Zea mays
  Clone ID: MRT4577_1432C.1
gggtacctcgaggccggccggggaccattctcccaaatgtatcgaccgaggcagcagtagtatcgtcaccaaggaagagggccgaagggcgcgggaaggccgtataaaattgttctcggtgccggcccggccggggaagcgtttacttcttcggccgcgatctcgaggagggagggagggagcgggaagaaagagggggggcgcgcgcgcgcccatgttttgacctcgcccggcgtcgtctcggcagcgatctagatctgaggttgtgaggttcttgattgcgcggtcacaagacctgtcactgcaatggtcgccaagatgttgccatgctcatggatctcggcgtgcgtgctcgtgctgctcttgagcctgcacccgcgtgtccatgccttctacctccccggcaccttcatgcacacctactcccctggagaggtgatctcggccaaggtcaactcgctcacctctatcgagaccgagctgcccttcagctactacagcctgccatactgcaagcctctggatggcgtcaagaagagtgctgagaaccttggtgagatcctcatgggtgaccagatcgacaactctccataccgcttccaagttaatgtcaatgagtcagtattcctttgcaccacggacccgctcaccaaggagcaggccgagctgctcaagaggagggcacgagatctgtaccaggtcaacatggtcctggacaatttaccggtcatgcggttcaccgagcagaacggcgtgataatccagtggactgggttcccggttgggtacaacccgatagggagcaatgaggattatatcattaaccacctcaagttcagagtcttggtccatcagtaccaggcgcagggcgatgttgtggtcacgagtgaggatggtgttgcaatggtagagtctgatcgcaagagtgggttccagattgttgggtttgaggtcgtgccttgcagcgtaagacgtgatcctgagtccatgtccaagctcaagatgtatgacaaggtcgactctgtgaattgcccgttggagcttgagaaatctcaggcgatccgtgagaatgagcggatcacatttacctatgaggttgagtatgtcaagagcaacatcaagtggccgtccaggtgggatgcgtatctgaagatggatggtgccaaggtccactggttctcgatcatgaactcgatgatggttgtcttcttcctggctggtattgtgtttgtcatattcttgaggacggttcgaagggacctgacaaggtatgaggagatggacaaggaggcacaagctcagatgaacgaggagctctcaggatggaaacttgttgttggggatgtcttcagagagcccagctttccaaagttgctgtgcgttatggtcgctgatggtatccagatcactggtatggcagttgttacaattgtgtttgctgccctgggatttctctcacctgcttccaggggaatgctcctgaccggaatgatcattctctacctcttccttggtatcattgccggatacgttggtgtccgtgtctggaggactatcaagggaacctcggaagggtggaaatctgttgcttggctgactgcatgcttcttccctgggattgtgttcatcatcctcactgtgcttaactccattctgtggggcaagaagagcactggagctctacccatctcactgttcttcaccctcctggccctgtggttctgcatctctgtgccactcacacttattggaggcttgctaggcacacgtgctgcaagcatcgactaccctgtccgaaccaaccagatcccacgagagatccctgagcgcaagttcccctcatggttgcttgtgctcggtgcgggaacattgccatttggtactctcttcattgagctcttcttcatcctttccagcatttggttgggaagattctactatgtgtttggcttcctgttcattgtcctcttcctgctggtcatagtctgtggtgaggtttctctggtcctgacctacatgcacctttgcgtggaggactggaaatggtggtggaaggccttctttgcttctggctctgtcgcattctatgtgttcctctactctattaactacctggtgttcgatctcaggagcctgagcggaccagtttctgccacactctaccttggctattccctgatcatggcccttgcaatcatgctctccactggcgccattggtttcctgctctccttctacttcgtccactacctcttctcgtctgttaagattgattagaggtgtgccccgctgcctctttctgcaatagagtcatctgatcatggtaatagttaccctcttagaaatactacacaataaatcaaatggaaaaaatggatacatggcaacgcccatggcttttggtcatgattaattcaatcatttagcgcagcacagtcactcaagttgaaacttaattcttaggaatgattgtaagttcttcagctatgtttattgcactttgtaataccattcagttttgcttgctctgggcatttgtgagcagcctttggttttggaacacttgagatctattcaatatgaaaatgaagctattcatttacagttcgttactaaaaagagaaggttaaattgtaacatgggtgccacattagctgtgatgctcgctgttcgttaatagtaacaccaatacggctgattttttacg

SEQ ID NO: 47472 - DNA, 618 bp, Zea mays
  unsure (1)..(618): unsure at all n locations
  Clone ID: MRT4577_143300C.1
ngacaagctctcacaccaacccagctcgctcgtcccagtctgatcaggtcaagcacctagtatcgacctgctcgatcatacgagtaaagtgcccgtacgtgtctgtctctcttggtgtctgcttgcaacgcatatggtccactccgtctcgtcgggtgtcccttgctgctgatgtgcctgggtgcgcagacggcctgctccttcatgcagatcaacttgaactaggacacggaaagcccgtggggctatggccgcaaaaagaacctcgacaaagcgatgcagcataacatgacaatgtacacttctacgtccgctggcatccgttctttctaaaccctcatgctcctaagaacgacatgaggaaatctgacttctacaagcaacaactttggtcctgttcaccacgagcatgtgatttctcacatggccgagatatttcgaggactcttccttgaccatgacatggcgcccctgacagccgatacactggatacacataggctcataccacttgctgaacaccaaggctatgacaagcaaaatgctcttggtgaagaattattccttaactacttctgcgaacgaaagaatatttgacgacaaccaagtttttgatga

SEQ ID NO: 47473 - DNA, 206 bp, Zea mays
  Clone ID: MRT4577_143301C.1
gggttgggtttttttaattgtgaaccggtttaaatttaaattcgaacagaaataatctggactattaacaagcgcatgaccacggacaaaccaaaaagaagggggaagcgattccagcaagaggagaggaagggggaccggaaacccgaaagtgcgagaattcgggaaggcgagaacacgaaggaaggcgggcaaaatactggggg

SEQ ID NO: 47474 - DNA, 412 bp, Zea mays
  Clone ID: MRT4577_143302C.1
tcggcggcggatagcggcgaggcggtggatgcgaaaaatatccattacgacttctgctcgacgctgtgcgagggcaagaaggggacggacctggtcgtgtgcaaggagatctgcgcgctctcccagtaattcaacctgatgctttacggtaggatccaatgcaagggcaagtgcacctatcataagggcattacggtgccgttcatgaaggtctgctcataggagtgcgacaaggcgtacgtggtgaaggcggccgaggtcaccaatgcctgcagcgtcacctgcgccaaggagaagaaccctcgcctcagcgagaactgctagaggtcctgcacccctcctccttattgaagctaaccctctttgaaatgaatgaaccatgcatgcatgccatgtatgcatgcgccggggt

SEQ ID NO: 47475 - DNA, 277 bp, Zea mays
  Clone ID: MRT4577_143303C.1
gcgccgccctttctgctggaaatttttttgagcctctgtgtgaggcactaacattcaggaccatgaaatgggaggacgattacatggggttctacacggacggcaacatccgtggacacccacaaggccctagcctgcgatacccaccctgcgcgaaaaacaaatctacggggctacaagccaaccggaccgggaaccccattatgagctgatcacgcgaaacctttcctattaactcaacgcttcgcatctggaaccgaataggggaccgacacca

SEQ ID NO: 47476 - DNA, 528 bp, Zea mays
  Clone ID: MRT4577_143304C.1
ttatttctgggcaaccagaaactcaaacacaaactttattattagaactataacttataagaaattaaaagagggcacacaacaatgatggattagactgctagaatgctggctggtaagccaaagtaagtagtttgagtggcagcaattgttgcaattgaaagagggtgccagcgttaggcgcagtgtgctggtagaacggcaacaattgaggttgagtcaagaaggtagcagggttcacaccagatagctggctgtatggtaagatgagatgttggagctattatgcttgataattgaaagatgtaagttgtattgaatagaagaaataggtggtgggaggcatgatatattttggagacaggtacatgtggtggtggtataaaagaaggataggtcatagaggtgagatggtttaatagatagaacagttggtgctgtgaaaagagattgaggtgagataacaaaaagtgtttgttatatgatagtgcaatggtggtgggggcctttttttggatttatggtgag

SEQ ID NO: 47477 - DNA, 843 bp, Zea mays
  unsure (1)..(843): unsure at all n locations
  Clone ID: MRT4577_143305C.1
tcgtgtcctaaaccttcaactaagtggtcaaggctgccgtgataatgatatggcagacctcactgggatttcagaaatgtttcagctgagatatttgaagattgcaagcgatgtctgcatcaaactgccgaaccatgtactacagtgcctgggtacattggatattaccgatgcaagatttgctcctgttccatgggatgtgaattttccacgcttgctgcacttgcacatgagtcttcctgtcgagagagatctgctggattggatagacagaacaaggtcccccagtctaatgagccttggcaagctaaaccacctgcaggagctccatcttaccttttcttcactgtctactttccagcatgtggcaaaaaacatggaagctctgggttctttaatcggaggtcatcgcaacctgaaaactgtagcagtggctcaggtctcatcggttaaaaatacgccggcttcaaaaacatacatttcatgggattgcatggaacctcctcctcttctccagagatttgaattctcgccgcacagcagctgcatattctcacaggtaccttcgtgggttggaaaacatggcaacttatgcattttgaagattgttgtgaagggactgccagcacattgtgctgatattctcagaggattgccggccctcactgccctgtcgctgtatgtggagacgccacctgatgatacgatcatctttgacaaggccggtttctcagttctcagtacttcaagcttacgttcatgcggggtatagctttgggtaattttgaggcggatgcaatgcctagtctctggaaagctcagctagntttcgatgccatcccc

SEQ ID NO: 47478 - DNA, 809 bp, Zea mays
  Clone ID: MRT4577_143306C.1
ctccctcgccccggccgggccggccggctagttcgactgccgactcggccgcgctcgcctctgctcaatcaccggcgacggaggacgccgaggcggctcttcgccgccgactccatttctgcgagatccccgccgagcaagaagcgcagcaccgcgtctgcctgcaccagcgggtggccggccgcgtctccttccgagtcccgagcgtctgccgccaaacttctgagtgacgagtgtcagtgacatcgggtcgggttcgctggagaactgagggaggcttgccgccgacgcgatgggcgcctccgcaaccccgtcccccgcagggggaggccggttcttcacgggcttcaccaaactgtgcaagggcctcgccgtcatcatcttcctcgcccacattttggtccacctcttcccttcagccgccacctatctcacgctgataccagccaggtgataatgagcatagttggtcttcttctactcgggaaggtgttggagcctttatggggagctaaagagttgctcaagtttatttttattgttaatctctcaacttcagcttgtgtcttcgtaactactattgtgctactacataacacaggaggagggctacctgtaagtgtcaaatttcattatagcttgctagtcaaatgatttacattggcacttttatgtggaacattttcttaagtgtacttgcaaaaggcttggtactaaaaggctttgttgttgttgttgttgttatacttgcaagagtatttccagacagacaaaaaaaaaaaaaaaaaagcgaaaaaaaaaaagcggcc

SEQ ID NO: 47479 - DNA, 1150 bp, Zea mays
  Clone ID: MRT4577_143307C.1
cattggggacctcgaggccggccgggaatcctaaaccaaccccttcgcgaaaagaagaaaagaacggtggtcgcctacccgatcggatcccaaaattctccacaaccccatggcggcgagtttgtggcgggcggtgatgggcaccggcgcggcgtccacgaacaccaccgactcctcgggcggcggcgttgagttctggcgcgccccggagcgcgtgggttggctgaccaagcaaggcgagtatatcaagacatggcggcggcggtggttcgtgctcaagcaggggcggctcttctggttcaaggaatcgaccgtcacgcgcgcttccgtgccccgcggtgtcatccctgtcgcctcctgcctcaccgtcaagggcgccgaggacgtcctcaaccgaccctacgccttcgagctctccacgccgcgcgagaccatgtacttcattgctgacaccgagaaggagaaggaggagtggatcaactccatcgggcgctccatcgtccagcactcccgctccgtcaccgacgccgaggtcgtcgactacgacagccgccctggcgacaaatgattgatttgtgagccggtcacacctgttactctgcagcgtctctatgctactttatctctgcagcgtctctatgataattagtgcctgtttggtttgtgctaattatgtcacgctttgcctaatgttagtcgtttcaattgaataactaaccttagacagaaaagttagtcaaagtgtggtaagttaggacatgtttggtttgatgactaaattatcacattttgtctaacttttatgtttaagattagtttttcaattcgaacgactaagcttagacaaagtgtggcgcagttagccacgaaccaaacaggtctttagtcaccgaaccaaacaagcccttagttaaacaggtttttagtcaccgaaccaaacaagcccttagtttcacacttgttattgttgttttgtggatgtatgatctgtgtatttgtataatattttggtcattggggaataagttcggcatcttatgtatagcgtgctatctgatacagtactgcatatcagttgtctactttcaaatttgtgcactgcccgttaaaaaaaaaaaaacaaggcccctaagaaaagggcggccgctct

SEQ ID NO: 47480 - DNA, 611 bp, Zea mays
  unsure (1)..(611): unsure at all n locations
  Clone ID: MRT4577_143308C.1
cnctccagagacgcgaaacccagcagaaccctatccccacagcccctcgccgccgtcgccgccgccggcggcgccgcgcgggaggagatgcggcagacagtggtgaacaccctcgagcggaagctcttctacataccttcgttcaagatctaccgcggcgtcgctggcctgtacgactacgggccgcccgggtgtgcggtcaagtccaacgtcctggccttctggaggcagcattttgttctggaggagaatatgttggaggttgactgcccctgtgtgacacctgaggttgtcttaaaggcatcagggcatgtcgagaagttcaccgacctcatggttaaggatgagaagacaggcacatgctatcgtgctgatcacctgttgaaagatttttgcaaggacaagcttgagaaggatctcaccttatcccctgagacggctgccgagtttaagcgcgtccttgctgtgttagatgacctctcaacagaggaactcggtgcaaagatcaaggaatatggcattgttgcccctgatacaaagaacccactctctgctccctacccattcaatcttatgttccagacatcaattgccccaacaggtcttagcgt

SEQ ID NO: 47481 - DNA, 300 bp, Zea mays
  Clone ID: MRT4577_143309C.1
tcctgggagctccaaaacctagctcctaattggagcccggaagggatggattcctcacgagcccgccacgattcggctcaaggagcatgataaggctacaccgttccacaactgcgtaagcataggacggtgggggagggaagctcgacgaggactacctcgtcgatggaatcaccatacaattaggcagtgttctctgtatcttggcaggctctcaacataaggcgaatgatgaggtgcccgaacccaaactactgatatctgcaagctgaaggagatacatgaagcgatatgatgcta

SEQ ID NO: 47482 - DNA, 324 bp, Zea mays
  Clone ID: MRT4577_14330C.1
gacggatgcatccactcgtacgagcaatcgcagaagcattatacctttataggcttcgtggtctcaacaggggccaggcctatcttaggtgcagccatgggtgctaaacaagttaggtgatacatcagcctgcagcaactattgctacctttgatcatccatgtagctttggcaaacctatctctctactcttatcagcaacaatatgttacattcaaccgactgattacactgtaccctgctgcgtattagcagtaaccactattaccatttatgcagctagcgtctgactactttaagcaacaacagctgcatccatttaac

SEQ ID NO: 47483 - DNA, 219 bp, Zea mays
  Clone ID: MRT4577_143310C.1
ccccgcgtccgcccagcgtccgcggacgcgtgggcggacgcgtgggcagcagccgccgcgccgcgtaaaacccgagggggtgggtgttcccagagactccgagcacaacaggtctgcgtgggcggcgacatgggtaaggttgagggatcgattgccctcgcggggaaggtgcgtgggcagacgcccaaggggaaaaccaggacaagacgaaaaagaccc

SEQ ID NO: 47484 - DNA, 402 bp, Zea mays
  Clone ID: MRT4577_143311C.1
gcatcgacgggatttacattgtcgcctgaagccgactcccgtcaaaggcctcgtgcgctccagccccgtgacgaaaatagctgcccaaccggcgaccgaccttcgggggctggcatcagcaagacgaccacctacggggccaagggcaggcaggagctggctcctcgaggacgggtgcggggctccaacaacaaaggggcaaatgcatagctgacagacacagttgcagaacggtggcgacggtgcagccgaggagagcagactgggcagctgctgaggccccggacgcgctgtcggcgaccgggaacgaggacatggacccgctagggaacctgacgtcgctcgcggagagaacattgatagtcataccaagagctgctcccgagaccatgaacgggagga

SEQ ID NO: 47485 - DNA, 272 bp, Zea mays
  Clone ID: MRT4577_143312C.1
aattcggcacgaggcgacagcgagcgcatcaaagcacccacgcagggcagcaggccaggcggcggtgctgccggcagagacacccacccccaccacacccaagcccggcgccttgcgtctccactccacctcccggggcgtaagaggtcgggtgcccgtgcccatcccccacataccagagcgtcggaagagggtttcttgaggggtttttagtcgggtgtccaaactttggttcggagtcaaatgccagcggagtgatgtggcccattgga

SEQ ID NO: 47486 - DNA, 293 bp, Zea mays
  Clone ID: MRT4577_143313C.1
ggggcggaaatatctgcaaacaaaaaccttgtgggacaaaaaaatggggggaacaaaaaccgggggcaaacaaagggaaccacgggggaacccgcccccaaaccaaggggacaacgggggcccacacccctacagaaaggggcgggcgccccctaccatggggagagaagataacggggcccaaacccggatggggccacaaaaaaccccccccaacccaggggggggccccccaagacgcccccaccaccctggggccgaccggcggaaacggacccacgggcctacccggg

SEQ ID NO: 47487 - DNA, 306 bp, Zea mays
  Clone ID: MRT4577_143314C.1
tattgccgggtcgacgagctgttatttcggcggccgcccttgggcaccatgggttgccttatatggatgttacatgtgctgtgtgcagagggcctgaacctcatcaactccagtcgaacactagtcgtcatgcacgatctcaatacgtacttaaaacgggctgatccccgtgttataaatttaatcacacctttgggtacataggcgacccaaaaccacgggtgaatactgaacatgaatagggttatcctggaggcagacaagacggaccaccgggaggctgcggtagactttggagatctttct

SEQ ID NO: 47488 - DNA, 176 bp, Zea mays
  Clone ID: MRT4577_143315C.1
gatgtttgaatacatggacatcgtacttattcaactacaagcatgcccatgatgtttgaatacatggacatcgtacttattcaactacaagcatgcccatccatccagcactgatgactagcatagtggtggcaaaaaaatgagtaacggtggggaaaattctcatacatggtctc

SEQ ID NO: 47489 - DNA, 1298 bp, Zea mays
  Clone ID: MRT4577_143316C.1
ggaccctcgaggccggccgggtacgccttatcccttgacgccaatgcagaatgctcattaagacttcacatacggggcgtactacatcggaaagatggtatggagtaagggatacagggagcttcttgatctgctgtccaaatatcagagcaagttggttggtcttgaagtggatttatatggcagcggagaagattctgatgaggtctgtgaatctgccaaacgtttaagtttgtctgtcaatgttcatcctggtcgtgatcatgcagatcccttgttccacgagtataaagtattcatcaatcccagcaccacagatgtggtctgtacgaccaccgctgaagccctggcaatgggaaagatagttatatgtgccaatcacccgtcaaatgagttcttcaagcagttccccaactgccgtgtctatgacaatgaagacgagtttgtacaactaacactgaatgctctatcagagcagcctgctccactgacagatacgcagaggtacgagttgtcatgggacgctgcgactgaaagattcatcgaggcctctgatataaatcctcatgtgccggagtccagggcccatcaaaactctagggctttgttgcctgcttttctaagaactcgtaaactgaaacagaacttagaggatgcgtcagtttacctgcaccaagcgctgtcaggtctggaagtcactcgctgtgcgtttggtgctgttcctaagacgctgcagcctgacgaactcctctgtaaagaccttggtttggctcctccggcaaagaagagaaggctgaaaattaagaagacgtaacgttggtgctgttccaaagatgacgtaacgtttaagatgagcaatgcttcgcctcatgtacagcacaatgtggtagacatttttactatttttcttctcaaaagagacattatcatacagtccggactccggtgggatttctaatggaggtttaatgcttcttttgactatttattactgggacgtgtgaactggggattagcacattgtaaattggtgtgctagcagctagcttagagagctaaggattctttgaatagtgctgtaattgtgtgagccgattaatggatcgtaatgaactgtgatgtctggtgtactcgagctcaccgtttaggccctcttttgaatgtgagaatttctgtttgttgtttatttcctttgaaaatcaactgattcttataaaatctctaggaaatttgtgttctaaaaaaaaaaaaaaaaaaaaaaaaaaaaaaagggcggctgtttgcgatctagaactagt

SEQ ID NO: 47490 - DNA, 1655 bp, Zea mays
  Clone ID: MRT4577_143317C.1
ctcgaggccggccgggcgctgcttttcctttctcctctctcccctttcctctccccaagcaggcggggcgagcgagcccagcaggcgtctctcctctcgtccatccgtttcctcctccccctgcttcccggctcgcctccctcccctccctgtgcgcctcttttcatgcgcgaggagggaccgtggggaccaccaccaccagcaccaccacctccatccgtgcgcctctcgctctcgctggtggtgctcctcctcctcctcctgctcccggggcgggcggcctccttttccacctcctgctggtgccagggccgggagggcgtcgcggaggtggcgcgcatggggctcgccggggacgggtcggcggacaccgcccacctcagtaataatgaaaatgggcggttcatttatggagttgcgagttctcctggtaaaagagcatcgatggaggacttctatgaggcaagaatagacgacgttgatggagagaaaattggaatgttcggtgtatatgatggtcatggaggagtccgagcagctgagtatgttaagcagcaccttttcagcaatttaatcaaacacccaaagttcatcactgataccaaggctgctatcgccgaaacttacaacctcacagattcagaatttctgaaagctgatagctgtcaaactcgagatgctggctcaactgcctcaacagctattattgtaggtgaccgtttgcttgttgcaaatgttggagattctagagccgttatttctaaaggaggacaagcgattgcggtttcaagggatcacaaacctgatcagacagatgagagacaaagaattgaggacgcagggggctttgttatgtgggctgggacatggcgagtgggtggtgttcttgctgtctctcgcgcatttggtgataaactcttgaagcagtatgttgtcgctgaccctgaaatcaaggaggaggtggtcgacagctcccttgaattcctcatccttgctagtgatggactctgggatgttgtcactaatgaggaagctgttgccatggtcaagcctattcaggacccccaggaagcagcaaacaagcttctcgaagaagcgtcccgaaggggaagctctgataacatcaccgttgtcatcgtccgcttcctatatggaactaccggtgataaatcaggcgcagacaaagagaccaccaatgaccaaaactcctaattacctcctgtagggatccctcatgcgtgtgttttcttctggctgttgtatctgatgctcaaagtagatgctccgtgtgtcttccgctgctgttccgcaaggaaactgactcccccgaccgtcgtcgtgatgctgcccgctcatgctcctagacgggaatgactgccgcagaatgacgaatagggctggtgtgtgttacagtatggtccttttcccctcctttccattaagctctgtgatgtagctgtccgtgctgttgattcatgagatcatgctagagatttttcctggcagtgcgtgtaaaactgtcgaactatttgaacgaaagttgtacactgcagtatgtaacaatctcctagatccgccttttgtggcgtctgccctaggtccgcctttcaaataatgaagaaccaaaaagaacaaacaaaaagcgcaaaaactat

SEQ ID NO: 47491 - DNA, 2795 bp, Zea mays
  Clone ID: MRT4577_143318C.1
cttttcagcaatttaatcaacacccaagtgcatcactgataccaaggccgctattgcgtgaaacttacaaccgcacagattcagaatttctgaaagctgatagcactcaaactcgagatgctggctcaactgcctcaacagctattattgtaggtgatcgtttgcttgttgcaaatgggggagattctagagctgttatttctaaaggaggacaggcgattgcggtttcaagggatcacaaacctgatcagacagatgagaggcaaagaattgaggatgcagggggctttgttatgtgggctggtaatggttcctctgaatctttcaataaaaagaaaccatctatctcagtacgtgccgttactgttatttgtactgtttgattattcgaaatctgtagggacatggagagtgggtggcgttctcgctgtctctcgagcatttggtgataaactcttgaagccgtatgttgttgctgaccctgaaatcaaggaggaggtggtcgacagctccctcgaattcctcatccttgctagcgatggactctgggatgttgtcactaatgaggtacctacagatgttactaaatatctccttcggtgcaattggtctgtctgtctgtcactccacctgatgtaatgtattttacaggaagctgttgccatggtcaagcctatccaggacccccaggaagcagcaaacaagcttctcgaagaagcttcccgaaggggaagctccgataacatcacagttatcatcgtccgcttcatagacggaactaccggtgagaaatcaggcgacgacaaagagaccaccaacgaccaacactcctagctgtctcgtgtagggatccatcgtgctgtgtgttctgttttctcctctctcctctctcccctttccttccccgccgcggggcgagcgagcccagcacgcgtccctctcctctcgtccatccgttcctcccttcccctgcttcccggctctccctcccccccatccctgcacgccccttttcatgcgcgaggaggggccgtggggaccaccaccagcacctccatccgcgcgcatctcgcggtggtgctcctcctcctcctccccctgctcccggggcgggcgctctcctgttcctcctccttgctggtgccagggccgggagggcgtcgcggaggtggcgcgcatggggctcgccggggacgggtcggcggacaccgcccacctcagtaataatgaaaatgggcggttcatttatggagttgcgagttctcctggtaaaagagcatcgatggaggacttctatgaggcaagaatagacgacgttgatggagagaaaattggaatgttcggtgtatatgatggtcatggaggagtccgagcagctgagtatgttaagcagcaccttttcagcaatttaatcaaacacccaaagttcatcactgataccaaggctgctatcgctgaaacttacaaccgcacagattcagaatttctgaaagctgatagctctcaaactcgagatgctggctcaactgcctcaacagctattattgtaggtgatcgtttgcttgttgcaaatgttggagattctagagctgttatttctaaaggaggacaggcgattgcggtttcaagggatcacaaacctgatcagacagatgagaggcaaagaattgaggatgcagggggctttgttatgtgggctgggacatggagagtgggtggtgttctcgctgtctctcgagcatttggtgataaactcttgaagcagtatgttgtcgctgaccctgaaatcaaggaggaggtggtcgacagctcccttgaattcctcatccttgctagcgatggactctgggatgttgtcactaatgaggaagctgttgccatggtcaagcctattcaggacccccaggaagcagcaaacaagcttctcgaagaagcttcccgaaggggaagctccgataacatcacagttatcatcgtccgcttcatagatggaactaccggtgagaaatcaggcgacgacaaagagaccaccaacgaccaacactcctagctgtctcgtgtagggatccatcgtgctgtgtgttcttctggctgttgtacctgatgctcagagtagacgctggctgctgctccgcaaggaaactgactcccccgaccgccgttcatgctcctggctggctggctcgctggccgcctcgacgggaacgctgccgtagaatgacgactggggctggtgttgttgttacagtatggtccttttttctttcttctttcccctttcatccattaagctctgtgatgtagctgcccgtgctgttgattcatgaaatcatgctagagattttttcctggcagtaagtgcgtgcctgtaaaactgtcgaactatttggacgaaagttgtacactgcagtatgtaaccatcaaaatctcccctacattcgccttgtggtgttctgctgtcatgcctcctgaaaattgctaccaagccgtggatggaggtgtgcaaggaatcggaaagctcgagattctacagagcacaaaataaaaaaaaaaaaaaaaaatttaaaaaggtttttctatcaaattaaagcaatttttttaaaatacgtttaccgtcgtaacatggcatatctcagtgtctattcctatacttacacatgtatcagaaacttctgtttgctgcgcattattctggacgagtatttccccataacgaatggatgaacctgtgtgcattaggtagagatccagattctctcagaaaacattctgggttcagcttctttttagaaacg

SEQ ID NO: 47492 - DNA, 209 bp, Zea mays
  unsure (1)..(209): unsure at all n locations
  Clone ID: MRT4577_143319C.1
gtctgcccccatctcccgctctgccgccgccgccccccgccttaccgtatctccctctcagccacctccaccacccccacgcttctccccatcgccggatccgctattagatcgccaaggttaggcggcagagctccacgtccgcgacttgctcgtgctcgtcaaggaagngctgccgatcgatctgcgctcacgcggcttgtgtgcca

SEQ ID NO: 47493 - DNA, 381 bp, Zea mays
  Clone ID: MRT4577_14331C.1
cacccactcacactcttttaccccactacttcaggccccgtatgaaccatggcgggggatccacctccttattactcctccaccagtcaaacatccacctcttgtctttcccaagcatggccaatcacccgtcatgcacttcacatctgataatatggacagccctatagcaagaatccgtctccaaccacaacaacgtgtagagccttgcagcgcctctactcctaaaaagggtctcagatatcacattatccctagtggatacttccgactgttcatacagagattcacacatcacatcattcaagcccatagagatcccttactctatatctttcatagccatcaggttcaaactgttacacctttactagagcgtcc

SEQ ID NO: 47494 - DNA, 430 bp, Zea mays
  Clone ID: MRT4577_143320C.1
tataatcacatctttacctcgcctgcggcctcttgcatcgctgctggcatgcggagaactgcgtaactgagatgatgttaataaatatctgctatatggggaccagcctctgaaggttacattgaccttcaaggatggttgaggacggcctgctgtgattaggccagagcagaactgacatcccaaactactagtgttgcgggcttggctgccaatctatccaacacggtggtgaaagacaaaagaccattttacacaaatgttatggaaagtgttattcatcacacattgcatatacgagagcctcctacttatagcttaaactgattgaggttttacatgagtacaacatggagagtacaactggttggttgccgccatagaaagccaatcaatcaaggaagggcatagagggtgcaaccactttctt

SEQ ID NO: 47495 - DNA, 418 bp, Zea mays
  Clone ID: MRT4577_143321C.1
aacgcccgagacggctggagagccacgacgctgatggcgacaaccccaagcgccagctctaggtcggcaaaggccccccctacctccgtcacggagggggctccctcccttggaccacctagtactagtacaaatcatttctagcggacgtgtttacactccggactctggaaccagagttagatcatcggcctagtcgtcgtaggtgtagaatactgacaggtgatcaagaacgttaggtatattagggttaggggtagccttagtccctgggatgaggacaagggggaggtaatcaaggcccggttaacaagggcatgggaggggactacaacgagcgaggacgaggttcgggaggttaggtactaggaggttaagtaggagaaggttaagaaggagaaatggttcttgatccaga

SEQ ID NO: 47496 - DNA, 359 bp, Zea mays
  Clone ID: MRT4577_143322C.1
atgttttcttctgtttttcggattgaactttaaaatcctagcattttggccaaaatcctggatgtacccattgagtgcttaatttcaggtatcttggtgccttcctgtaaaactgttgtttcagttcctaattttcaaatttgttgcgcttggtattaacttctgcttgtacccatgaagttatttattaatgctttgttggactgcattttcaaataagttcctgaaacctgtgttttatggtatgtctggtgcttccattcttatgatgctatgttgaggacaaaacacgttttcacacagacgcctctttcaggacgggaattagatgtcacaagccaactgaaaggttcaagaag

SEQ ID NO: 47497 - DNA, 446 bp, Zea mays
  Clone ID: MRT4577_143323C.1
gcggtactcgttgcctacttctacttgtgcgagccccgttatacaaccagtggcacggaaccaactttctagacaagcacaatcagaagtagtagtagaaacgcaggttatagaagaaccagaagtagtagaaaaaccagctagcaatgcaaatggcttacaaaataggttcaggttcacttgctattgttgatgaagatatgagagactagggagaaccagaccactagtgagctggtcatggacgccgacccaagaagaagccataccaccgtgaacctggtcttgacaaggccatggaccttcaaaagaagcctgcccttctccttcgtctgcgtgacctcattttggcacaaaagacagggtcactacttgtacgtgaccttgaaaaggaggttggctttgtccaaaaatgggattttctttcactcatcggacgccacccc

SEQ ID NO: 47498 - DNA, 299 bp, Zea mays
  Clone ID: MRT4577_143324C.1
ccagaactcgtgcgaaaagtgcaaagatctccaccctactgcggaggagttactggactgccaacgatatgtgaattggagcgacccaaacgagacgcagctggaggagatccttctcaagagtctgggcaccacctttgacaatgctgtgagtctgatcaccacaatgggctactctgaggcggttgcacgggctgctgttgtgcgggcagctgcgcaatacaactggagggagagccttgcagggtttggagaggcagcagttgaggttctcaagacggaaggggacatgttgccga

SEQ ID NO: 47499 - DNA, 268 bp, Zea mays
  Clone ID: MRT4577_143325C.1
aaaaaaaaataaatcccatataaattggtgggaaaaaaaattccgattttaaaaccttttaaaaaagaaattaaaaagtttttttattttagggccaggtttaaaaaaatttgggttaactgaaatgtggcatggaattttatgcccaaaaactatggaaaattcttttgtaaataggttttaaggatgaaggggaaaaatttttttatttatgggataaaaagcatgataatttttgggaaaattaatccaaaagggtggaacattt

SEQ ID NO: 47500 - DNA, 452 bp, Zea mays
  Clone ID: MRT4577_143326C.1
aaaaaacttatttaaaaaaatgggggggggtccaaacgggggggggtaggacccagttttagaaattagattttttttttttaaaaactaaaaagctaattttttttaactaaaaaaaaaaaatggggtgggaaaaaacttttgggggttaggggcctttataatgctgtggcccctggggggggatccccactggcacattggtgacccgccccccttttgaaacgagtcctgggatgcctttgatcgggggcccccccccagggggctaaaatcctgattcctaaataagaaaaccaacccgttgtttcgaaaatggggccaaaaattgactggaaactcaaaaattcgggggggccttgaatttcgaccacccccctccggaatgtccggaagaaatgggccccccgctcgtaacaatccccgatgaggacgggtaccaccggccccgg

SEQ ID NO: 47501 - DNA, 351 bp, Zea mays
  Clone ID: MRT4577_143327C.1
cgctcactcctccggctcttcttctgcaccggcaccagtccaccaccacctgccaccgtgcggtcccaaccaaccacaccgcagcgcagcaatgagcggctaacggcgccatcgtggagaagcgacccgcttaactggggcgccgcggcgggcgaacttgcccggagccacctggaccaggggaaacgcatgggggcgcaagcccggcaggccgtggtcaagatcgagggcttcacccttcgcgtcgggcaggtgggcggcgtcgacttcgacaaggacgcgttcggggtcgccgtcgagctcgacgaggaggcccgcccccgcgttaaggccagcagcgagtggatcctc

SEQ ID NO: 47502 - DNA, 242 bp, Zea mays
  Clone ID: MRT4577_143328C.1
ggggaaaaaaaaccggtcccactttttttttttttctggaatccataacagggtacgggtttggcccccagggcggcccaaagctttaaaagccaaccgaaacaaagttttttttcccggccccaagtttccaattgggcaaaaaaaaagggccccaaacccctggggggtttttttttttggggaaatggagggtgttgggccactccaggctttccctccggttagtttttaaagggggg

SEQ ID NO: 47503 - DNA, 1477 bp, Zea mays
  Clone ID: MRT4577_143329C.1
tcgggcaactcgcctaccattgaaacctgggtagcccaaccgccggcccgcagcgaaaccccagaatgttcgtcctccgcaaaaccctcctccatgcgccgccggccgccgccgcggcggtcccctctcggatctcttccctcctccgcctcatcccctctgcatctttttctgaggtaagcggaggtggggaagaatggggcgcctcctcacccggaggcggcggcggcaggggtgggggtgggaacgaatggagctccacctggtctaccggcctcaccaaggaccatttcgacggatcctcgccctccgtcggccgttctgtcccttccgagtcagcgcccgtctctcgtgagcgggcggccattcgcgctatggatgagtgggacgagagggtccgggaactggagcgtaacaatgtcgaggcgaaggcgtatgtggattcatgggacgaccggatgcgggagacctgtgcgctgctgaagcaggtgcgggagccgggcgctcggggctcgtatctcaaggactcggagaagcaggagatgtaccggctgcacaaggaggaccccgcgacttacaccgtggagcggctcgccaaggacttccgtgtcatgcgacagcgcgtgcacgccatcctctggctcaaggagatggaagaggaagaggagaggaagaggggccagccgctcgacgactccatcgaaatcctgctcgacagctgcccagagttcttcaattctcatgacagggaatttcatgtagcatctcttccatataaacctgacttcaaagtaatgcctgaggactgggatggcacaacacgagattcctgatgagttcctatatggcttttcatttgacggaagataaattgcaggataagttaagtgccccaagtacagccggcgcaagccagacaatggatggagctacatggtcgaaaagcttggtcctcagggaaagcgtggtggaggagggggctggaagttcatcagcttgcctgatggatcaagccgtccactaaatgatatggagaagatgtatgttaagcgggagactccaaaacggcggcggaggataattgcaccatacaagtgacatggacaacttcagtttgctgaaatgcaaattttctcaactgtcttttgacattgtccagcgaggctgaagcaagaaactgtgaagtagtttggaaccgccagaacagctcctgtttttttcacagcacagtagatggtttgatgtgttttgtaacaaggattatttccccacattttggcagccgaataattatcttttaaacttttcggtgttcctcccgtctctatgcactgccgagcaacaattccaagccacgcgcgtcgttacccgtgctgcaaggaaaaacgcctgttgtactttttgcacatataaacattttgcacatataaacatttctcttaagcaaactcaaaaaaaaaataaaaacctgggggtt

SEQ ID NO: 47504 - DNA, 175 bp, Zea mays
  unsure (1)..(175): unsure at all n locations
  Clone ID: MRT4577_14332C.1
acctgcccggtcagnatcattgattgatgtttttgttggattagtcaatagcgctcactgggtcncaacaaccccctctgttgctccatgacctgttccttctcctggctgttctccaggtgacttgctccatcgcctgtcccgactagaggagggaggaggagcccacaagacg

SEQ ID NO: 47505 - DNA, 612 bp, Zea mays
  Clone ID: MRT4577_143330C.1
tcatgacagggaatttcatgtagcatctcttccatataaacctgacttcaaagtaatgcctgaggactgggatggcacaacacgagatcctgatgaggttctatatgaaatttcaatgaaggaagataaaatgttgtatgaggaattcgttcaacgcttggaattcaacaagaagaaggtggcaggagaggttaagtgccacaagtacagccggcgcaagccagacaatggatggagctacatggtcgaaaagcttggttctcagggaaagcgtggtgtaggagggggctggaagttcatcagcttgcctgatggatcaagccgtgcactaaatgatatggagaagatgtatgttaagcgggagactccaaaacggcggcggaggataattgcaccatacaagtgacatggacaacttcagtttgctgaaatgcaaattttctcaactgtcttttgacattgtccagcgaggctgaagcaagaaactgtgaagtagtttggaaccgccagaacagctcctgttttttcacagcacagtagatggtttgatgtgttttgtaacaaggattatttccccacattttggcagccgaataattatcttttaaactt

SEQ ID NO: 47506 - DNA, 458 bp, Zea mays
  Clone ID: MRT4577_143331C.1
ccggccgggaggattcctataggtgcgggtcagggggagaggcctgacgtcgtcgccgatgccaacagccgggtccactggattgccggagggagttcttcgccattgctcgggaatggttaccgtggccacccagtgaaggatcctctcccgagccagactcaatttctcgtcggaattgatgaccatcgtgggtgcgtgtctcaccgtgggcgggaatctgcacaacgaaaacgctggtcaagaacaggtaccacaggatgaggtgcttggaggatgttgtgacgagttcgtgagaggtctaggctgtcgtcttccagttaactttggattgctggaccgttgtctccttataatgtatttatttacttattttgtaccgaactcctattatatagaaaagttgtgacattcgatcctgtgccatgatcaaaaaaaaaaaaaaaaaaggggcggcc

SEQ ID NO: 47507 - DNA, 341 bp, Zea mays
  Clone ID: MRT4577_143332C.1
agaggtgacgacagcagttgtatagttcttttaggtgagggggtaacagtggtatagatcaagcttattcaccactcatctaccaaaactcgacggcaagcctatcccaagtccaatacaaaccataagctttgcagtgttacaccatggtccgaaacaaaaggacaaggacacctggtagcgccttgccttccaagagctccaagctcggtcgcgccaccaccggtccaaatgtggctcatcttgtcagccagcctatccgacgattgttgtgacattcgttagcgttgtaagctcagccagctttttggcaatcgcacctcatcatttacaaagcatat

SEQ ID NO: 47508 - DNA, 501 bp, Zea mays
  Clone ID: MRT4577_143333C.1
caaagggctatgacttaacattagtagtggattagttctgggtatagattttagagtagacgcacgtgatccgatctccgccggcctccattttacaaaacccctccttgtccgggccgcacacgacggagccggagaagaaggaaacagcagaggccgcgcgccgtgcgctcctgcccttccatcatgtcgcctagctagcttctgaccaatctcctccgatggctattagctaattaactaatgaactcactacctcccaagaaccctaattaaaatcaactaagtggtgtgaaaaagtccagcgacgcaacccggtggagagctagcgcgcggacgtgcaccgagctagaacggccgggtacttggtgggtggctagccgtccgtcggtcggccggagtggcacataatgcatgggggaaccggccggccgctggccatgtcatgaatcggtggatcgaggggtacgatcaggcgtaggtccaggcggcgaacacggg

SEQ ID NO: 47509 - DNA, 418 bp, Zea mays
  unsure (1)..(418): unsure at all n locations
  Clone ID: MRT4577_143335C.1
tctttnaaaccctattaatactaatcctatgcaggacacacgaccaccgggggccttttaaagtgtatttcccggtttttccccccatcacaaaaaaaaaacggggaatatctctgggaaaaaaaaaaacaccggtcccccccaaaagctggaaccacaaaagcggtccccatgtctgctaccggctccaaagaggggggggggaaaaaaacaaaaaaaaaaaggggggcgggggcaaccttggtcgccccaaaaaacgcccaactgcaaaaaaacccataagaatgccccggggggtaaaagatacccaattacggacccacctttgggggagggggagcttcttccaccccaaaaaaacaggactgggcacatactaaaggccctctcaccccataaaaacaggggggtgacaaag

SEQ ID NO: 47510 - DNA, 475 bp, Zea mays
  Clone ID: MRT4577_143336C.1
tgaaaaaaaaaaaaaaaaaaaaaaaaaaaaaaaaaaaaaaaaaaaaaaaaaaaaaaaaaaaaaaaaaaaaaaaaaataaaaaatgaagggcgacgcgatataatattatatagcgttggcgttaactgcaactggagtgcgccgtcgcttgtgcttcgcggttgacctgggctgaaccttggcggtgcgccgggggggtctgccttgcattgggatccagcctttcccctgctcttcctaagggtggaagaggaccggaaacggtcctcctttcccttgggttgttctccctgtgtggggactgggacgcgctttgtaccggccctttaacttgcgttgtttgtggggggggcgctcagggtgaccgttacgttagcccggtcgttggcgcccgcttctcgcgctctctttcctttctttctcccctcgttcgctgcctttcctcttctttctctccttggtggttggcttgggg

SEQ ID NO: 47511 - DNA, 135 bp, Zea mays
  Clone ID: MRT4577_143337C.1
tatttgacccacgcaggcgaccgaatttattccacccccgtgttcaacgatgggacggaccaccggagccaaagatcggggcagatagcgtcagcagccctggtaaaaggctaccccacggtgaacgaggactac

SEQ ID NO: 47512 - DNA, 521 bp, Zea mays
  unsure (1)..(521): unsure at all n locations
  Clone ID: MRT4577_143338C.1
cgtgctttacacacaattatatttgatacccatnnnnnntatatgttctatacacatttagatctcgagatgtctcgctccctccaacgaaataagtccaagaaattttgttgaggcttaaatgacctcaaaacaaatgtttacattctgacaaatcttttaaagatgctataacatattcgatctttnnnnngaaccataggttccaatctgnnnnntcagcttgccgacattgacttggctccacggtgtcgctgtcaccaccacacaggaaaatcggtctctcgtagccgccacaatgtgccctccaatcatgtttcaggcagtagtaaacctgtcaaatcactgctacttgtagcttcaaggtacttgatcaaactcggtttaatattgaggaattattgcacagctaaagtaagcattgannnnntaccgaaaacagtaagcagcagcatgataaattctttcagacaatcaaagtcagattagtgttgatatcttaaacctctgnnnnngattat

SEQ ID NO: 47513 - DNA, 901 bp, Zea mays
  unsure (1)..(901): unsure at all n locations
  Clone ID: MRT4577_143339C.1
ctgtactttacacagcacccaggtagnaactcttgtgtgggtgtgggtgtgggcagggctagaaggaagaaccatgcatgctactacattcatataatctttttcagaggtttaaggtatcaacactaatctgactttgattgtctgaaagaatttatcatgctgctgcttactgttttcggtagggggtcaatgcttactttagctgtgcaataattcctcaatattaaaccgagtttgatcaagtaccttgaagctacaagtagcagtgatttgacaggtttactactgcctgaaacatgattgcaagtgttcttagtatatagctcttctccatttcctctccaactgtcacatgtgctcatacgcttttgccttagtttattatatgtccagaacaccaacataaaaaaacctgccctcgattagcattattcagtagagagagttgtggagaaataaagttaatttgtttgttggcgcaactaattagaccacgttttcattaacaataatactaacatgtttttgttgtagggagggcacattgtggcggctacgagagaccgattttcctgtgtggtggtgacaacgacaccgtggagccaagtcaatgtcggcaagctgatttttcagattggaacctatggttctttttaaagatcgaatatgttctagcatctttaaaagatttgtcagaatgtaaacatttgttttgaggtcatttaagcctcaaacaaaatttcttggacttatttcgttggagggaacgagacatctcaagatctaaatgtgtatagaacatatatttttatgggtatcaaatatgattgtgtgttaaaaaaaaaaaaaaaaaaaaaaaaaaaaaaaaaaaaaaaaaaaaaaaaaaaaactccaaaaa

SEQ ID NO: 47514 - DNA, 599 bp, Zea mays
  Clone ID: MRT4577_14333C.1
cgtactttttttttttttttttttttttttttactttttttttttttttactttttttttttttttttttttttttttttttttttttttttttttttttttttttttttttttttttttttttttttttttttttttttttttttttttggtagatattatttttttttttttttgccaggttaaaaattttaaattaaatttttagaaaaaagaaaaaaatgtccaaaaaattttttttaaatggtaaaaagaaaagaaaaaaaccaaaaattgaaaaaatgttaaaagggctttttaaaaaagggggggacataaaaaattttttggatggaaaaaaacttttttattttcttgtaaaaaaatttgcatagggaaggaaaaaaaggctttttaaacaaaggaaaaaatgttggcgaagggggtaatttttgggttgggggggaaaagttaaaaatggttgaattttggttttgtgttttcccggttttgggcacaaccaaaaagaaatgttttccctaaataagggggggcgtggagcaaacagaaaagtggttttggggttgggataaaattcgaggggggagaaaatttttttg

SEQ ID NO: 47515 - DNA, 211 bp, Zea mays
  Clone ID: MRT4577_143340C.1
aataaacattagcggggaacaataggacctggcatataaaccactttgaatatttttacatttgcactgcctacgccacgtgccttaagaacagctggcatttgtaccaattctagaagcacacatacctccaccaatgagatactgagtctgatgaactagccatgctaatttgtacacccttacaaacaaacagggagcaataccccgc

SEQ ID NO: 47516 - DNA, 119 bp, Zea mays
  Clone ID: MRT4577_143341C.1
tccatcttaaagcagcgtgaaggctaccgatggtagagagcgcccttctggggacctcggggatgctttcattctcgatcttcctgatccaaatgggcctggtttcactcacatctacc

SEQ ID NO: 47517 - DNA, 674 bp, Zea mays
  unsure (1)..(674): unsure at all n locations
  Clone ID: MRT4577_143342C.1
ggtccggaattcccgcgtcgacccacgcgtccgatcaggacatggctaccccagagatggtctccatgttgaagagaaacaactgtggaaaagccctggatattgcccgccaggcacgagacatcctgggaggaaatgggatttctgatgagtaccatgtcatccggcatgctatgaatctggaggcagtgaacacttatgaaggtacacatgacattcatgctctgatccttgggagagcaattactgggattcaggcattcacggttggcaagtgaaactacttcaacagagaaatactttgccctgagtctgctcaagaagaaatgtatggacacaacttttatggtggaaagtgagacactgatttgagattcaggacatttctttctggaagacattcagatatgctctatagaaagaagatgaaattaattctctgtatggccctcagccctttttaactggatgaaatcagcctccacctaccctgttttaagttttttggaactgggtgagacaaaggggagtaacacaggagccactgagatggagcagaccttgtgagaaggtgcaatggactttacagnttaccttcttgcctctatccaggggcagtgccttctatgtgctctgaacagataagagatgaaaataaagagcctgtgccttac

SEQ ID NO: 47518 - DNA, 435 bp, Zea mays
  Clone ID: MRT4577_143343C.1
gactgacttgattgcactgaaccatgccgacttcatcatcaccagtgccttgcaagagatcgccggagacaatgacacacgtcgggcactaccgagtcacacatggcgtgcacattgcctggcctgtaccgtgtgggccacagtattggtgagttgataccccaaattgaacatcttgtctcctggcgcgaacctgtgcatctacttgccagacacccagtgacacaagaagatgagctcccttcacccggagatcgaagagctgctgtacaggcaaacagagatcacggagcacatgttcgttctgaacgacaggaacaagccaatcatcttctccatggctcagtctaatcgtgtgaagaacttgactgtgctggtagatctgtacagacggaacatgcggctgcaggagctgctgaacctcatggtcgcctg

SEQ ID NO: 47519 - DNA, 228 bp, Zea mays
  Clone ID: MRT4577_143344C.1
tccacgcctccgagcacgccttgccggccgcctccgtatgagcgcggcgcgccctggggtccatcgcgcattaaaaacggctcccgaaggcaccctgcgtgatgcgtgccggctgtgttcaacctagcagcgcgttctctaattccacggcgctgaacggctgctaatcttcgaccttctcgccgacgcctatgaattagactgacacctgtcgttgccgctctatcg

SEQ ID NO: 47520 - DNA, 432 bp, Zea mays
  Clone ID: MRT4577_143345C.1
gaggcttaatttggggagggccccaatagggggaatgtgcaaaaatggccttaacaacgacatgcccattttaaaccacaaaaacccttatttttaaacatgaacagtttggaagttttacataccttaaaaaataaatggaactgtaccttttatgaaccctgttactaatacttttcaaaaaacatatggctttttcataggagtattattaatcaccaaatgccccaacagcaggcttccaacgaggagggagccccttaaacaaacacctgaactgtagtttgcctaaccatcgggacccttaaaggggagcaaaaaacctaatccaccccatttttggcgaaaaaagcaacccaagaaggctttccaccatgttttcacaaatgcccacctttaaattaggcctagctttgcggcccctttttttaa

SEQ ID NO: 47521 - DNA, 231 bp, Zea mays
  Clone ID: MRT4577_143346C.1
gggaaaagccccagatggcttattcaagtcccgggtcagggcattactaaaggggatattggtttttttttctaaaaaaaaaagggtctagacaatcctgtttttgaacattagtacaacaaccaaaccctaattggggaccaaagatttattgggactgacaaaaacaagacccacttattcaaaaagggggacttacagaagctgtcctggtggtgacaatacaaaacc

SEQ ID NO: 47522 - DNA, 518 bp, Zea mays
  Clone ID: MRT4577_143347C.1
ttgggattctctttctctctcgctgctctgctccccacggaccacggggcaccaccacaaaccagacgcgacgcacgcgcgcaaaatcatccggcggagccagggcggaggcaaaccagtgggccgccgagttcgacgcctggctcaaggactcgctcctcgacggaaggtacgaggacgtgaaccggttcgaggagaaagcgccgcacgggagggtggcgcacccgtggccggaccacttctacccgctgcacgtcgcgctcggcgccgccggggacggcgcaaaggcggagcagatccaccagtgctggaccaacgccacgctctcctacgcgtcctacaggttcaccaccaagagctgacgcgcccgtgcagctgtcgggtggaggaccaccgccccgctcgccccccggggccagctgctgaattcgtgggaagcacatccgtcgacgtgcgtgacagcattcatatacacgcaccgcatgtagaaatgcgtttttcttaataaactcccgagt

SEQ ID NO: 47523 - DNA, 618 bp, Zea mays
  unsure (1)..(618): unsure at all n locations
  Clone ID: MRT4577_143348C.1
agcagtggtaacaggggagagggcgcgggtagcaagcagctcattcagtcttgtcgacatcatgcttcaattggtctgaagtccaaagtttccccgctgatcctgaataaactcttttgtcccgttccagctcaagtacccggctccgggcgctccggacttggccctgcggactgtagagctcctggagcaagccgggttcggccccgtgaagcaggaccacagccgcgggctcgaccacggcgcctgggtgccgctgatgctcatgtacccggacgccagcatccccgtgtgccagctctcggtgcagaccgaccgcgacggcacgtaccactacaacctcggcaaggcgctggcgcccctgcgggaggaaggcatcctcatcctcggctccggtagcgccacgcacaacctgcgcaagattagcccgtccgacgcgcccgtgccgcagtgggccgccgagttcgacacctggctcaaggactcgctcctcgacggaaggtaaaccagaaacgaaactgctcagcgctcatagtcgagatacctgttgctgctgctcatccccaanaaaanaaaaaaanaaaaaaaaanaaagtactctgcggtggtaccactgct

SEQ ID NO: 47524 - DNA, 366 bp, Zea mays
  Clone ID: MRT4577_143349C.1
gggaaacaaccaaaaccggaagatcttaatgtggggggggggggaacagtgtttttttttttcaacaccatgaaaagaatccttcgaaggaaaacccaaatgcggaaaaaaaccccccccgggtaattacaataaagaaaaaggggatggaaagaccgatctttggtgatgaaaaaccctccctgcccgcttgaggggaattccagacaattgggaggaagttatttatgtttcagagagagggaccactcgggcgggaacacggtaaagacgagttccctggacaaaatggtcgttcctagagaatccgacctagataccaagccggaagcaaaaagggaaatacctgggggccgtaagaagggg

SEQ ID NO: 47525 - DNA, 540 bp, Zea mays
  Clone ID: MRT4577_14334C.1
cgcataacccccatcaagggagcagggttattggatagaaaaactcagttttgtagtcacaaggtcctccatgtcaaaccaaaaaataaactttggggctccggaataaatccagaagcccagggaaaagaactaattcgcaagacgtccgagttttacatttcctcgggggaaagccccaaaattagttctagccccatttaactttcattatcacacttataatcctgcagtttttggcgcctatttctgaaacgggaaaatggggctagcaaatgccttaggatgaaaaagtcaaaagaacgttctttttgatgataaactcgccggccttgggggggctgagggacttctccaacatgcgatcaagcctttgggtttccttctaagaatactcgtggcctttctttaaaatcttctttgcgaggggtacaaaaacctttccatgccttgcagcaaaaccactgagcttatctgcctcctcctccatactggaaaggacttcctttcgcttgtcaccggaagcccaaggaactcctt

SEQ ID NO: 47526 - DNA, 1729 bp, Zea mays
  Clone ID: MRT4577_143350C.1
gagccaggggagagcgggcagagccaaaccagagacgcggcacgcgacgcggaaggaccagcagcggcggcgcggcgacatcgcgaggccagggcagaggcgaccgccgagagtccctgccaccatggacaccttcttcctatcgcacggctcgcccacgctctccatcgacgacagtatcccggcgcggcacttcttcaagtcatgggtgccggcgaaggtcgcgggcgaccagcccccgcgcgccatcctcgtcgtctcgggacactgggagacggccacgccggcggtcaacgtcatccgcggcagcaacgacaccatctacgacttctatggctttcccaagcccatgtaccagctcaagtaccccgctccgggcgctccggacttggccctgcggaccgtagagctcctggagcaagccgggttcggccccgtgaagcaggaccacagccgcgggctcgaccacggcgcctgggtgccgctgatgctcatgtacccggacgccagcatccccgtgtgccagctctcggtgcagaccgaccgcgacggcacgtaccactacaacctcggcaaggcgctggcgcccctgcgggaggaaggcatcctcatcctcggctccggtagcgccacgcacaacctgcgcaagattagcccgtccgacgcgcccgtgccgcagtgggccgccgagttcgacacctggctcaaggactcgctcctcaacggaaggtacgaggacgtgaagcggtacgaggagaaggcgccgcacgcgagggtggcgcacccgtggccggaccacttctacccgctgcacgtcgcgctcggcgccgccggggacggcgcgaaagcggagcagatccaccagtgctggtccaacggcacgctctcctacgcgtcctacaggttcaccaccaacacctgacgcgctgctcgtggtgtcggtggaataccacccgcccggccagctgctgaattcgggggaagcatccatcgacgggtgtggcactggcagcattgcacatactgtatttctaataaacccccgtgtgcctgccgttccgttcgcggtagatatgcgtttgttattgttttgcattgtttggtgcagcagcttaggctgattgattgcctgcatggtggtgccgggttctcgctggcctagctgaagcgtgcattctatcgagaaacgttttgtttgttaatgtattctatcatcgtttttaagagttgaaggccttcatcaaaaaaaaaaaaaaatcccccagtcgcagccgacacaagagccgactactactcgatcgacctctcgagaacacccgctcgcggacagtcagcgccgacatcaagcactgccaggccaaaggcatcctcgcgctcctctccatcggcgggccgcccaacaccaacaccggcgccggcgccgggtactccctcccgaccgcgcggacggaggcggacctcgccgaggacctgctgggacgcctacctgggcgactcgcgcgcgtggctgcaccgcccgttcggcgacgttttactggacggcgtcgacctgcacctcgaccagggcggcgtagacggccagtacgacaagctggccatgcgcctctacgtctacaacaggagctaccgcggcaggctcgttccgacactgacggccacggtgcggggcaagtacccggacccgcgcgcacatgtggtgctcgccacgggaatcgtctcccacgtccac

SEQ ID NO: 47527 - DNA, 242 bp, Zea mays
  Clone ID: MRT4577_143351C.1
ggaaaagaatcaaataaatcattttattggtaaccagaaaacgcagcggggttgtacatgatcgccgggacaaacagtggggcgtggaggggggggccacccaccacgggcacacttttttcggcggcgccgtcgggggcgattttataaatacacacacgcccgggggcaccttaaaaagggacacacacgacacacgatctggggttacgcgcgccagaccaggagaatttttttttggg

SEQ ID NO: 47528 - DNA, 1356 bp, Zea mays
  Clone ID: MRT4577_143352C.1
tcggcacgcgcccatccaagcatcccatccattctctttctctctcgctgctctgctccccacggaccacggggcaccaccacaaaccagacgcgacgcacgcgcgcaaaatcatccggcggagccagggcggaggcaagccagagacgcggcacgcgacgcgtgagggcgaggagcagcggcagcgcgggcgcggcgacaccgcgaggacagagcgagacgcagcggcggacgaggggcagaggcgagcgccgcctagagtccctgctaccatggacactttcttcctgtcgcacggctcgcccacgctctccatcgacgacaacatcccggcgcggcacttcttcaagtcgtgggtgccggcgaaggtcgcgggcgaccagcccccgcgcgccatcctcgtcgtgtcgggacactgggacacggccacgccggaggtcaacgtcatccgcggcagcaacgacaccatttacgacttctatggctttcccaagcccatgtacaagctcaagtaccccgctccgggcgccccggacctggccctgcggaccaaagggctcctggagcaagccgggttcggccccgtgaaggaggaccacagccgcgggctggaccacggcgcctgggtgccgctgatgctcatgtacccggacgccgacatccccgtgtgccagctgtcggtgcagagcgaccgggacggcgcgtaccactacagcctcggcagggcgctggcgccgctgcgggaggagggcgtcctcgtcctcggctccggcagcgccacgcacaacctgcgcaagatggggccgttcgacgcgcccgtgccgcagtgggccgccgagttcgacgcctggctcaaggactcgctcctcgacggaaggtacgaggacgtgaaccggttcgaggagaaagcgccgcacgggagggtggcgcacccgtggccggaccacttctacccgctgcacgtcgcgctcggcgccgccggggacggcgcaaaggcggagcagatccaccagtgctggaccaacgccacgctctcctacgcgtcctacaggttcaccaccaagagctgacgcgcccgtgcagctgtcgggtggaggaccgccgcccccctccccccccggggccagctgctgaattcgtgggaagcacatccgtcgacgtgcgcgacagcattcatatacacgcaccgcatgtagaaatgtgtttttctcaataaactcccgagtgccgatcgcggtagatatgtcttgcattgttcaacgcagcagcttgtttcgagaagcattctgttgttaaatctcattccatcatcattgtcttcaagtggtgcatattacgtgtctttttgcccttctc

SEQ ID NO: 47529 - DNA, 233 bp, Zea mays
  Clone ID: MRT4577_143353C.1
gcagcaactgctccaggacttcttcaactgctaggagctgtgcaagaacatcaaccccgatgaggctgtctccttatggtgctgttgtccatgctgccattctgagcggtgaggtctattagaaggtgctggacctgcttgctgtgtacattaatcctctgttcatgtgtatacagacttattcaatagtactggctgcaataagccatcagaacaagcattttaccatcatt

SEQ ID NO: 47530 - DNA, 1234 bp, Zea mays
  Clone ID: MRT4577_143354C.1
cgctcgtgccgcagtgggccgccgagttcgacgcctggctcaaggactcgctcctcgacggaaggtacgaggacgtgaaccggttcgaggagaaagcgccgcacgggagggtggcgcacccgtggccggaccacttctacccgctgcacgtcgcgctcggcgccgccggggacggcgcaaaggcggagcagatccaccagtgctggaccaacgccacgctctcctacgcgtcctacaggttcaccaccaagagctgacgcgcccgtgcagctgtcgggtggaggacccccgggccagctgctgaattcgtgggaagcacatccgtcgacgtgcgtgacagcatgcatatacacggacgcatgtagttctcgctggctcttcttaaacttgcattctatcgagaaacattatgtttgttaatatatgtattccatcatcatttttaaaaaaaaaaaaaaaaaaaaaaaaaaaaaaaagtcgaggccggccggggagaaccaaaccagagacgcggcacgcgacgcgggagggcgagcagcagcggcggcgcggcgacatcgcgaggccagggccagaagcaacagccgaggaggggcagaggcgaccgccgagagtcccggccccggccaccatggacaccttcttcctatcgcacggctcgcccacgctctccatcgacgacaatatcccggcgcggcacttcttcaagtcgtgggtgccggcgaaggtcgcgggcgaccagcccccgcgcgccatcctcgtcgtctcgggacactgggagacggccacgccggcggtcaatgtcatccgcggcagcaacgacaccatctacgacttctatggctttcccaagcccatgtaccagctcaagtaccccgctccgggcgctccggacttggccctgcggaccgtagagctcctggagcaagccgggttcggccccgtgaagcaggaccacagccgcgggctcgaccacggcgcctgggtgccgctgatgctcatgtacccggacgccagcatccccgtgtgccagctctcggtgcagaccgaccgcgacggcacgtaccactacaacctcggcaaggcgctggcgcccctgcgggaggaaggcatcctcatccctcggctcggtagcgccacgcacaacctgcgcaagattagcccgtccgacgcgcccgtgccgcagtgggccgccgagttcgacacctggctcaaggactcgctcctcaacgga

SEQ ID NO: 47531 - DNA, 577 bp, Zea mays
  unsure (1)..(577): unsure at all n locations
  Clone ID: MRT4577_143355C.1
attctactcggcgcccccggttcacacacactgatcggctcagctacagcctacggagtacagacccaacccaaccccgggagacaacagggcacggcgaggatgctgctgaacccggcctcggaggcgctggtgctcgacagcatccggcagcacctcatggaggacacggcggccgcggcggcgccggtggcggaggcgaggcggcagcggccggcctactgccgcagcgccagcttcgggagcctggtggcggaccagtggagcgagtcgctcccgttccgcgccgacgactccgacgacatggtcgtctacggcgccctccgcgacgccttctcctgcggctggctccccgacggctcctttgccgccgtcaagccggagcccctcctgccttccccggactctgcctacgcgtgcgacggcccgtcctgcttcggtttcctcgagccggagacgccccccgccacgtccccgggcgaggccnnnagaggaggncncnnnnnntcntgnncgaggcggccgccgcggnggcgaggggcnngcnctaccgcggggngcggcngcggccgggggg

SEQ ID NO: 47532 - DNA, 717 bp, Zea mays
  Clone ID: MRT4577_143356C.1
gatgtttttgaggcgcccgtccaagcatcccatccattctctctcgctgctctgctccccacggaccacggggcaccaccacaaaccagacgcgacgcacgcgcgcaaaatcagccggcggagccagggcggaggcaaaccagagacgcggcacgcgacgcgtgagggcgaggagcagcggcagcgcccgacagagcgagacgcagcggcggaggaggggcagaggcgagcgccgcctagagtccctgctaccatggacactttcttcctgtcgcacggctcgcccacgctctccatcgacgacaacatcccggcgcggcacttcttcaagtcgtgggtgccggcgaaggtcgcgggcgaccagcccccgcgcgccatcctcgtcgtgtcgggacactgggacacggccacgccggaggtcaacgtcatccgcggcagcaacgacaccatttacgacttctatggctttcccaagcccatgtacaagctcaagtaccccgctccgggcgccccggacctggccctgcggaccaaagggctcctggagcaagccgggttcggccccgtgaaggaggaccacagccgcgggctggaccacggcgcctgggtgccgctgatgctcatgtacccggacgccgacatccccgtgtgccagctgtcggtgcagagcgaccgcgacggcgcgtaccctacagcctcggcagggcgctggcgccc

SEQ ID NO: 47533 - DNA, 337 bp, Zea mays
  Clone ID: MRT4577_143357C.1
ctatccaaaatttttattgaggggtggggggctccttttaacaacatttttacatatcatactattattatatggaaaggcgaaagagaagattaaaaaaacagggggctataacgaaaggaattttttttacccctcctttacatcccgcatcactgcagcagaaaaaacaccaaaaccggacagatagaaagagagagattttttaccccaccattcaactgcaggaggcgtagcagcagctatagaggtagccaccacgggctatagctatttgatttcttcccctcctctcgctcctaatttaaacctccaccctgcaataggggggggcccc

SEQ ID NO: 47534 - DNA, 1559 bp, Zea mays
  Clone ID: MRT4577_143358C.1
gtccaaagtttccccgctgatcctgaataaactcttttgtcccgacgccaggcaccgttccgggatcgacggacgcacccaaccacattgggtacctccacagacccgaaccgagcgcgacgacataatggggcagagccaggggagagcgggcagagccaaaccagagacgcggcacgcgacgcgggagggcgagcagcagcggcggcgcggcgacatcgcgaggccagggccagaagcaacagccgaggaggggcagcagaggcgaccgccgagagtcccggccaccatggacaccttcttcctatcgcacggctcgcccacgctctccatcgacgacagtatcccggcgcggcacttcttcaagtcgtgggtgccggcgaaggtcgcgggcgaccagcccccgcgcgccatcctcgtcgtctcgggacactgggagacggccacgccggcggtcaacgtcatccgcggcagcaacgacaccatctacgacttctatggctttcccaagcccatgtaccagctcaagtaccccgctccgggcgctccggacttggccctgcggaccgtagagctcctggagcaagccgggttcggccccgtgaagcaggaccacagccgcgggctcgaccacggcgcctgggtgccgctgatgctcatgtacccggacgccagcatccccgtgtgccagctctcggtgcagaccgaccgcgacggcacgtaccactacaacctcggcaaggcgctggcgcccctgcgggaggaaggcatcctcatcctcggctccggtagcgccacgcacaacctgcgcaagattagcccgtccgacgcgcccgtgccgcagtgggccgccgagttcgacacctggctcaaggactcgctcctcaacggaaggtacgaggacgtgaagcggtacgaggagaaggcgccgcacgcgagggtggcgcacccgtggccggaccacttctacccgctgcacgtcgcgctcggcgccgccggggacggcgcgaaggcggagcagatccaccagtgctggtccaacggcacgctctcctacgcgtcctacaggttcaccaccaacacctgacgcgctgctcgtggtgtcggtggaataccacccggccagctgctgaattcgcggggaagcatccatcgacgggtgtggcactggcagcattgcacatactgtatttctaataaacccccgtgtgcctgccgttccgttcgcggtagatatgcgtttgttgatgttttgcattgtttggtgcagcagcttaggctgattgattgcctgcatggtggtgccgggatctcgctggcctagctgaatcatgcattctatcgagaaacatttgtttgttaagccccgtttggatcattgaaattgaattccattctaatttaatagttaaaggccttcatcaaaacgcgtgactagtctcctcgaccagaaacgaaactgctcagcgctcatagtcgagatacctgttgctgctgctcatccaaaaaaaaaaaaaaaaaaaaaaaaaaaaaaagtactctgcgttgttaccactgct

SEQ ID NO: 47535 - DNA, 207 bp, Zea mays
  Clone ID: MRT4577_143359C.1
ctacatcaagccccatttcctttgtgcacctagacgcccaaatggtacatgcatgcgctgttgccaataagctcaggggacaagggtggccaatggagatgatagttacagccagccacactggcttgctgaaactacaactattgatgcagctctaccatgacgctgtggctaacaccagactgttcgatacaacttctacagctg

SEQ ID NO: 47536 - DNA, 191 bp, Zea mays
  Clone ID: MRT4577_14335C.1
cccacgcgtgggcgaacgcgcaggcgactacatgatttttattttcagctactaggtctcgcacggctggcaggggcagctgtcacattacatgggcaataacgagtgtaaaatgtgagaaaggttccctgagcacatcctcagagattgcgcaccgctcgattttgatttctacatggaggagatgttat

SEQ ID NO: 47537 - DNA, 549 bp, Zea mays
  Clone ID: MRT4577_143360C.1
ggcgggggctctgcaaacaaacctggaaggggggattcaaaaaaaaaaggcagccacaaaacaacaaccttttttttttttacggctacaagcaactacaaaaatccgccaacccaccccctaaaaaaaaggcagctaaaaaaacactggccctacaattacagttaaaaccaacgggggggaaagggctcgcccttaacgctacccaccccctaaacaacaagcccgggatttcacacagcaacctaaaacaaggcttgaccactcttcctttgggcccccaaaaacaaaaaggggtataaaagggcatgaaccaaggatgggcccattaaggcatacatagtactcaaaaaaaccattttccgcacccaatttcacgggggcactactgggaaacaaattggggggcaaaaagccccaaagctttggcttacaaaaaggaccccttttattcaaagggaagtttgcctgcctctaaaaaaacatttttttcattttggacgcagaaaacgacttgaaaataccccggaagaggcccaaggcaccttc

SEQ ID NO: 47538 - DNA, 526 bp, Zea mays
  Clone ID: MRT4577_143361C.1
gttgactcgtgcatcgcttgctcataatcatcgaattttttacatgcggcttcaaacttgccaacaaatgcacgtgcaaggcccagtacctcgccagtgctacacgcactagctccactcggttactgagctctatacccaaaactaggtgattccaggggtgccaaggcgaacaagactgggacgcaacccaagcgaaacaaaaacggatgaaatgcgccataggggtaaacctgagcttccgtatgacatatatgtagagctctgccccggcaaaaataaactacccatacatcttccatgcttgctctaaagccatttgaagaggatgcctccatgtgcggccaagaagggtagcaaagtacaagggactcgacagtcatgagctagatgaggatgatcaacgaggggcctgtagctgccttgatgggatcaccgatagcggcaccgctgactgcatccttgagtgggtctgaacccttcgagaccaaggttgttgcatgctcagatgcaccaacctcaatgt

SEQ ID NO: 47539 - DNA, 324 bp, Zea mays
  Clone ID: MRT4577_143362C.1
aacccaaatcacacccccaacatttttggggggggaatcttagtcccaaattttacagggtacaaaaattttacattggccatgaccgggggggttacaaagggggttcaaagaaataactttaaacgggtataaattatttataagtttaaaatatatgctagctcaagggaccctcctcaataaaaagataaagaggggggttacttatataaaaagggcgagcccaccgggacttaacaccattaacaggggcacaaaactttaacctttgttgcagggaaaagggttaaaaccctttacaagctacccaattaaatggct

SEQ ID NO: 47540 - DNA, 264 bp, Zea mays
  unsure (1)..(264): unsure at all n locations
  Clone ID: MRT4577_143363C.1
aatttttaagggcatgaacaaatngnnngaaaggggggcttataaggaaaaccgagcggaatacgttttacatggaaaaacgttgcaccggacccaagataacgacacattacagttgacacggcatatgcaagtcttgctgttcttcttttttgacaaaaacaatcagcaaggagttccttattgaggtaaagagaaggcggtcggcgactagcgtcagtcacccattgttgttccgaaaccgcgccaggaccggacgcgtgg

SEQ ID NO: 47541 - DNA, 162 bp, Zea mays
  Clone ID: MRT4577_143364C.1
gaactcttcaagcttcaactacattcgttaataccactccaacaaccttcaccttcaaaccccaagacaccaaaaagcccgcccaaactccatcaaaatgcgtgctgccgctttcgtcgctatcttcgctgcaaccgccatggcccagactggcggtcacgc

SEQ ID NO: 47542 - DNA, 480 bp, Zea mays
  Clone ID: MRT4577_143365C.1
ggaacgctgggaacacaaacaatttttcttgtaataaaaacaacgaattttttatccatttgcttaaagggggggttatactggttgtgtttccggggcaattctcttttaaaacgacccaaactttgtgggcctatttaaggtgggtacctttgaacaaataataaggtgtttacaaacgggcccttcaaaaaaccaggtttaaccaagggggcttttcaataaccagttttaaccggacaagcctttctgcttccaggtggccacgagaaaaccaccttttcacccaggggggtcgtttgggggaacggtttcaaacttccgagcggggttttgtttgggggatttccactaatttttggttgttggctttggtgccccctagaattaagccttagggttccaactcactggtgtttagtttggggccctagtaaaaaaccttgattttcaaactgatttggggggctgtttgttcca

SEQ ID NO: 47543 - DNA, 406 bp, Zea mays
  Clone ID: MRT4577_143366C.1
gaacggtgagaccttaccttgcctttttaaacccatgccaaatgaacttatttgctgagaaagcttcagggttgttccttctgaatctataaaatttatcatcaattatttttcagtagtatagtaccatatagttgaattgaagattataactagtatcaatatgcatcaaatatgttctgtagtaagatcttgagttggcgcttcataccttgcattcccgttgtccttattctctctctctctctctctctctctctctcacacacacacacacacacacacacacacacacacacacaaactcaggtgctggccgttaagaagtttgatccattgagcttctcgggaagcagcgacttcatggatcttgtgaacagcattttcaaactgcatcattcaaaca

SEQ ID NO: 47544 - DNA, 1169 bp, Zea mays
  Clone ID: MRT4577_143367C.1
cgaatagaggaactagtctccgccctaggcgctcctaaaaagtgctactgattgttttttaattcacgcactctgtgaaccaaatcctactccttccttatcccaggcacgactccccatgctgctgcgagctgcgagctcaccgattcccgctcctatccattgaagactactcgcagcgcgcacaagcccacaggagtgcataattgaccgcgcgcacgacgacgacgacacaccaacagcaacaggagagaggaggagatccataagggatggagggcggggagacgaccctgaccaggatccgagccggccggttccgagatcgatccgtgtcgagttttccgggcccgagctggaaagattcggcaagtacatctgatcttgtagcatatactagtgttgtacactgtcctcccatgccccagtggcttgctttcctgcaacaagtgaacccacatcctcctcacctcagcagcctcaccgcccatcgcagactctgcgcggctgctgacaaagagtgcagaattgccaagactagtacgcggacgacgaccagcagcagctgtccgggttccatggagggcggcgacggcgagacgacgctgtccgggttcggcgtcggcggcgtggacaccaaggtgctgcacgcgttccagaccagcttcgtgcaggtgcagacgctgctggaccagaaccgcctcctgatcagcgagatcaaccacaaccacgagtccaaggtgcccggcgacctctcccgcaacgtcggcctcatcagggagctcaacaacaacatccgccgcgtcgtcgacctctacgccgacctctcctcgctcttcgccgcatccgacggcgcgtccgagggcgggtccgtcggcaccgtccgccaggcgggcgccgccggacacaagaggatcaggtccggcctcgactgacctgtttaattaggcagcttcaagatcatcccccttcgtcttgtcttagcttagtacctgtaccagtacagtagctatgtcatgccagtgccaccaccagccagggagggacctcccttttcatttttgacttgagctcatcttctcaattgcatctgtccacaacgtacgctatatctatatctatcgatattatctcctctgctacaattaattactccggtttcttgtgct

SEQ ID NO: 47545 - DNA, 777 bp, Zea mays
  Clone ID: MRT4577_143368C.1
cccacgcgtccgcccacgcgtccgcccacgcgtccgcggacgcgggggctggatctcacgggcgactataaaaaaaatactcctactagtaggaagaaaagaaaaaaaaaacagaagaaagcagtccagcctgcctctgcctgtttcgtgtgtctgaggatctcctgatctccttcctccctgtccttctcctcccctccccggctacggaggtgctggtgggtgctacggaggagtactacgacgacgacggcgaggaggagcctgtctttttgtttgtggacaagtgaacccacatcctcctcaccgcccatcgcagactctgcgcggctgctgacaaagagtgcagaattgccaaagactagtacgccgacgacgaccagcagcagctgtccgggttccatggagggcggcgacggcgagacgacgctgtccgggttcggcgtcggcggcgtggacaccaaggtgctgcacgcgttccagaccagcttcgtgcaggtgcagacgctgctggaccagaaccgcctcctgatcagcgagatcaaccacaaccacgagtccaaggtgcccggcgacctctcccgcaacgtcggcctcatcagggagctcaacaacaacatccgccgcgtcgtcgacctctacgccgacctctcctcgctcttcgccgcatccgacggcgcgtccgagggcgggtccgtcggcaccgtccgccaggcgggcgccgccggacacaagaggatcaggtccggcctcgactgacctgtttaattaggcagc

SEQ ID NO: 47546 - DNA, 1355 bp, Zea mays
  Clone ID: MRT4577_143369C.1
tgcctgtttcgtgtgtctgaggatctcctgatctcctcctcccccctcccctgctccctccccatcgtcatccacctcctccacccatcccctcctcgctcgctctctcgcggcttccctctcctcctctgacctgcgcatctgaagcatagatagcaagcaaggaccctgctcagtgctcacctcgccggaggtgctgctgctacggcggcggcggcgtactactactactacgacgagtcactgacaggttcgctgcgatttcgcctcgacccggctccacggtccgtgctccgtcgcccccggcgggcggacccgattcccgggtctccgccgccctcttcgcctcgctcccgaggtcgtctccacgtgctctcgggaactctgcgcgcagctccggatctcaaccgtttcgttcccctcaaccaccttttcgtttacccggattcctttttttttatctcgttcgtcgtcatggatcgatgatcaaggtgtccgccttcccttcgagtacaggcagcaaggggggaaggaaatcgcggcagttaattccgagatctgtgccgatttttagggcccaagctggaaagattcgactctgcgcgcgcacaagcccacaggagtgcagaattgaccgcgcgcacgacgacgacgacgaccaccaacagcaacaggagagaggaggagatcgataagggatggagggcggcgagacgacgctgtccgggttcggcggtgccggggcccccggcgtggacaccaaggtgctgcacgcgttccagaccagcttcgtgcaggtgcagacgctgctggaccagaaccgcctcctgatcaacgagatcaaccacaaccacgagtccaaggtgcccggcgacctctcccgcaacgtgggcctcatcagggagctcaacaacaacatccgccgcgtcgtcgacctctacgccgacctctcctcgctcttcgccgcggccgacggcggcggcggccgcgccgcgtccgagggcgggtccgtgggcaccgtccgccaccaggcgggcgccggccacaagaggatcaggtccggcctcgactgatttgttgccaggcatttcttcttcgcagagaaaaggagtagcagtactaagtacagtagctagccacgtaccaccagccgcagcgaaaccacctcccttttgttttctgacttgagctcttcttgtatctatcgacatacgctatatatctatctatctatttatatatctccactacgacaattacaataccattgctgttaagagctactactacttagtatgcgattagtctgtattttcgatgcaatgcaattcatggacgatgcacccaaaaaaaaa

SEQ ID NO: 47547 - DNA, 221 bp, Zea mays
  unsure (1)..(221): unsure at all n locations
  Clone ID: MRT4577_14336C.1
atcgagnttggtgatangctggttgcccananaagaatttncagttcaactttaagcttaccatgagaacaancanatncagaangtaaacttnanttatagncaaaagngggncagntctttaggnnaaggaaanaaccttaaatagtgaatnagcaactacatcacttanccantgtaggcttaaaagcagccatcaatacananancgntcaaggctc

SEQ ID NO: 47548 - DNA, 651 bp, Zea mays
  Clone ID: MRT4577_143370C.1
cgggagggtgattgatgcttgttattggccagcagccaaaatctatagtgggaactcctgcatacattgctcatgaggttcttctgaagaaggaatacaatggaaaggttgctgatgtgtggtcatgcggagtgatgccatacgtgatgctgacgatcaccatccctgagataagaaaccatccatggttcttgaaaaacctcctagctgaccaaatggatgacaatacgatgagtaagcagtacgaggagcctgaacaaccgatgcagagcatgaatgagttcatgcagatcctggttgaggcgaccattccagcagttggttcacgtggactcaatcagtttctgaatgatgacattgacctcgacgatgacatggaggacctagactcagatgccggtcttgacctggaaagcagtggggagatcgtgtatgctatttgacaacattgaatactttgttgtgtcgtaggttaccaagataattagagacaaggggcaggttgttgtgcttgcaagtatctgttgcagctgttgttcatgcctgatgttgatgcctcttttcatactgttgtgtttggatggcgtaccaccagtgttttacaacagtttggcccttggaattgctattgctaaaactttggtcctctgg

SEQ ID NO: 47549 - DNA, 254 bp, Zea mays
  Clone ID: MRT4577_143371C.1
aaaaccaaaaaatttttctcacggaagaagaacagcaggcgaagcatcggcagattggaatatcgatcgagtgatcgctgcccgagggaggggaggagggcggaagatggcggagtgccggggcttattggagtgcctgctcaagctgctcaactttattctaaccgacccctgcctaaccatggacggctacaggatctacctgctcgacgagcggacgaagacacctgaggacagcagcaacggggggttga

SEQ ID NO: 47550 - DNA, 2121 bp, Zea mays
  unsure (1)..(2121): unsure at all n locations
  Clone ID: MRT4577_143372C.1
gcgatctataactatattgcatgctaaagttgccttgtacatttacatttgtttcctggctctactgaatttttggatcaaccttactaactgttctttcattctaattgtacgtgagaacaaaagctgcgggtcagggctaaggaggctcatgagaccactaaataacatgcggtcttcggttatctcaagccacatcatgcatcttgtttgctaaaaaagttctatttctcaaattgctaactgcattttactgcttcggggctctcttgatttgttggatgatatcttgttgggttataaagctgaatggccaatggatattggcattacaatagacacactaaaaatatatgctgaaagtcagaaacaaaatacaatagagttgtgaagaaggtatttttgacaactatgcatcgttcctatcttggtggcgaaatcttatctgatggatattcgtgttggctggaacattcgggatcaccatccctgagataagtaaccatccatggttcttgaagaacctgccagctgacctaatggatgacagcacgatgagaaagcagtacgaggtgccagagcaaccgatgcagagcatggatgagatcatgcatatcctggttgatgcgaccattccaacagctggtacccgtggactcaatcaactcctgaacgacaacggccttgacctcgacgatgacatggacgacctggactcagaaattatagagagacggaaatactttttaaattagaatctaactacaattcgatttagttcaagtcaatattcagagttctactttctggaattattcagagttcagttattcaaagttattaatagctatacttagccacccatgatgtagtcaagaaaaaaataactgaactcttctgcttataatttcaactatattaatagatattgttatcaggtgtttaaaaagaatgtggtcatcttgtgtgacatttgtgttcttaaattgttgctctgcttataaccttttttacaatgtactcatcagttctatactcgcagccaaaatctatagtgggaactcctgcatacattgctcatgaggttcttctgaagaaggaatacaatggaaaggttttatgcgtagtgtcgttaattattctacacttgacatactgtttttgtttagtgtgcatgttattattctccacttgaacaacatgtttgtttgtcaaaacattttatacacgcacgatttgtagtcatgcataacagggaactatgttggaaggttcgaatgctaaattagtcactaactctttgttactgaactaaggttgctgatgtgtggtcatgcggagtgatgccatacgtgatgctgacgatcaccatccctgagataagaaaccatccatggttcttgaaaaacctcctagctgaccaaatggatgacaatacgatgagtaagcagtacgaggagcctgaacaaccgatgcagagcatgaatgagttcatgcagatcctggttgaggcgaccattccagcagttggttcacgtggactcaatcagtttctgaatgatgacattgacctcgacgatgacatggaggacctagactcagatgccggtcttgacctggaaagcagtggggagatcgtgtatgctatttgacaacattgaatactttgttgtgtcgtaggttaccaagataattagagacaaggggcaggttgttgtgcttgcaagtatctgttgcagctgttgttcatgcctgatgttgatgcctcttttcatactgttgtgtttggatggtgtaccaccagtgttttacaacagtttggcccttggaattgctattgctaaaacttggttcctctgagaagaccttttgttttaaaaaaaaaaaaaaaaaaaagggggacttttcaatgcttttactgattgaagcatggagatatctgaattttcttatcaagtatctacaacaagcagtttgctttgctctatctctcataatagatctttataatgtgacatttttctatgtatatgaacatatgaccctcttgatttgatagatgatatcttgtntacttgtgtagcactgatcttgttttatgcactcatatttacttaccat

SEQ ID NO: 47551 - DNA, 272 bp, Zea mays
  Clone ID: MRT4577_143373C.1
caagaaccaggcggacccgccgacgaccgagggcctgcgcgtggaccgatgggccggggccaggtacgcggacgggcgccgttaaggaggctaaatggcggacgccgacgacggagagcaggcggcgcgccttgaggacagactatagggcacccggtgggccgacttcatgaacgacgcgcgcatgaacaaccctatcttaacttacactgggtacgcagaacaaagttggcctttgaggtaagcgagaagaatgaagagatctgtaatgt

SEQ ID NO: 47552 - DNA, 508 bp, Zea mays
  Clone ID: MRT4577_143374C.1
cattaacatccactttttgcatgcaaaagcaacctctaatcattgctctccacgctaccgcccttcttctcgagccacggtggacataccgcatcgtatagtataacttactctgaccagctcgtcctcgatcgccaatggctggggctagggctggtacgagccctgcgacgccggtaacggcacggtggcggagctggagtacgacggccgcggcgtggccgcgggcgcctgctgcttgatcgccacggcgggcagcaggccgcgcgcccgccgctcctgctccttcaccagctcctccgcgaacgcgtccagcttctcccggttcgacttggccgacagccgccgcccccggaacagctccgcctccacgttccgctgcgccagcatgccgtccgccaaggccaccgccttcttcgcgtccagcgacctcagcgccgtcccgacgcacgacgcctggatgcgaacgtagttgcgcccgcacgtgtgcccgaacgccatggccact

SEQ ID NO: 47553 - DNA, 270 bp, Zea mays
  unsure (1)..(270): unsure at all n locations
  Clone ID: MRT4577_143375C.1
ccccctggggggcccgcccccttttttgcgccccgccggcgccgggcagggcgnccctcggccgcccgcccgcccggcgcgggccgtgaagggtcgccggcatcggtcaagggcgtcggctgggcttactatggctccttctagcgggtcatgaggcgcacgcgggggctccaccacggcttctggctcagcgcggaggcgcgagggcggagtggggccccggcggccttcctgctcggacctaccttcgatcgggaggcggccaggccg

SEQ ID NO: 47554 - DNA, 421 bp, Zea mays
  unsure (1)..(421): unsure at all n locations
  Clone ID: MRT4577_143376C.1
aactacctccagtattgatatcactcaatctactttactcaatacggagggaccggntgattgaactttgctgacggatttcatgctaaacatataagctgcatgctgtatcgtaggtaccacatataactgtgccataacatcaacgtgttgaggaagacgaatgacggctacgtaggagggtacacccttgcttagtgcacggtcctatggacctgactccttattctatggggtagacatgcacatgatgctgcaacgggctctgggatgcagggacagcacctgccatacacacatttaaatccttctttggtagagcgacaaagtttactttcatgctcgttagcacgagcgcatctaactatttgatctttcggaccgctaggccacagaacaatgtagggacccctcttaagac

SEQ ID NO: 47555 - DNA, 368 bp, Zea mays
  Clone ID: MRT4577_143377C.1
gtcgaatcgacaaatgcgtgcgtgtgcgcagggctgtcgtacaacgtcgcctggtggggcggggccgcgttcccgcctgagaggaagcacgggctgctgggcatgattcgctggagaccttcctggacctcggaaactgtaacaggaccgctggggcgccggccttgctcatactgtccatagtgcaacagccgatcgaggacgacgacatgcagccgagcagtagcactcgggccacggacattgtcacgacggcggcgtagcggctgccggacgagccgacggtgcgcctcgtctgcccggaaggtaagtgcgtggacgttccttacggctactactacaacggcaaccaaattcagatgtggagc

SEQ ID NO: 47556 - DNA, 404 bp, Zea mays
  Clone ID: MRT4577_143378C.1
aacatgtcatatgggtctaatggtgaggacgacgctacaaaggccaccacatcatatggtccccatggcgagtatgaatcaagtcacagccacagtgtcatatgggttccaaagcatggaacatataatgagcgccaccacctcatatggaatccacgatgaacaccctaatacagatcttgtggaggaatttaccacctaggacgtcacagcacaaatcatatgtgctagtatagcatgtgatacggtgcttgcttgctgttacacccatgaaccgccacaatctggtctcgaagttggtctgaccaactatgccacagcctactgcacaggccttctgttggctcgccgtgtgctcaaaacccgtggattatataacgaatatgagggcaatgtagaggcca

SEQ ID NO: 47557 - DNA, 901 bp, Zea mays
  Clone ID: MRT4577_143379C.1
ggccgcttttttttttttttttttgccaattcactctcgtctctttggagaagtctaatttacaaacccattcactctggtcgtagacaccgcgatcctttgaaagagaaaccacaagttagagttcgagccccaaactcttgctagcaattaagcatatctccaccagttcctcccgttccatgccccgaaggccaaggcagaaaactagtcacaaactcaaatattaacacaacaatgatctccaagcaccacaatgcctagcacaacataaagcacgattgattattcagttttgcgacaggcacccatgcccatatcctgaggcttaaggaaaaatgaaacaagagcatgcagaccaatcatcgatgcaactaccatacgatttccctaagacatagctccacagcaccacttattgctacctgctagtacaaccgagccaaactacgggacgacaggtgggcaggcttcacatgtaaaaaaccttagcctgcactctgctaccatgagaagctacaacctgtacacatcaagaaccatggaactatacagaacggaagcatcggaccgtctcatcttcctggagagaccaatgacctttcctccgaccccagcttgaccaaaggctttgtagcggcaggaagctttgcgggctcgggagcaatgacctccccgggggtatctcccctgggagtcagttctggctccctggtgtaggtgaactggagttccttgtttgctgccaaggctaataactccgattcgtctagcccccgggttgggccaaagctacatctatctggcttgggcttcgcaagggcatccttgaacttcttaatagttgcggttttaccagctgaagctgcaaagtcgtccctgtgctcctctgtagaatctg

SEQ ID NO: 47558 - DNA, 370 bp, Zea mays
  unsure (1)..(370): unsure at all n locations
  Clone ID: MRT4577_14337C.1
ggggggggtttttttttttcataatgtgcggggggggggttctctttgctttgtttaattgcagtcagggctcgcgaaatggtataacaggctaggctagcacaagaccagcacaggcctcgaaaacagctcgacacaaatctccgggggtttgtagggggtatttcaaactaactccanattcactttcatgaatcaccacccataaagcacaatttcccatccaccatncatctcctaaacccttaccatataatctccatctctacacccaattccaaccattcccnatntcatctctttcccttctccaatgtccatcctttctaatcatacattttccaacccaaaatcactccatacctcccct

SEQ ID NO: 47559 - DNA, 282 bp, Zea mays
  Clone ID: MRT4577_143380C.1
tccaattctcctttagggacagcttagaattatttgcactattgagtcttcatgttcccacttcaaaacaaacagatgctctgagagcaaactggcttgaattggtgacatttagtccctcaagccaccagatgtgacagtgttgagaactacctggatttgtatatatacctgcgcttgttttaaagtgggctcagcacatagggttcccacgaagctccgaaactctaagtgtttgctgcaattttataaggacttcctgatgggttctctcttctcccc

SEQ ID NO: 47560 - DNA, 593 bp, Zea mays
  unsure (1)..(593): unsure at all n locations
  Clone ID: MRT4577_143381C.1
ttttnnttttnnnttttatattctattttctcttttatttgtttctttatatttatcttgtatttcttttaatatcttacttattctactactactattattattattatatttagtagtagtagtagtaggtggtaagtagttcttctttgtattaattaaggtaacttgtttagttataacttagtctacatacattcccatggttttgcaaagacatcctgcccttccacatgtacggttgcaaagaattggcgatctcgtcgttgaacatgtcgccgtagccctacaaaggcggagagtaggcgctcctctgaaagaggcgcgctgtaaaaaaaatcctacggacgaaaaaagccggctggtactggtacaggaagcaaaaagagccggctgcaaacccctgtaatagtacggctcgtacgccggccaccgggtggaggagtaaaagttgttgctactgctgctgnaagacggcgtgtagggctcgtccatgtagccctaaaacagcccgggcctccccatcgggatgggcaccaacaccggagccggggcgggggcgtagtaggacgcgctcacgctcgggcgcacct

SEQ ID NO: 47561 - DNA, 180 bp, Zea mays
  Clone ID: MRT4577_143382C.1
acacattcaacatttccaataaataaggccgccgatatgcccatatccctactcggaacaatatgtggtcttatcaggacgtatccggaacccaagggaaaggagaatggcattcccaagggaatttgaaagccacattgatcagaaataaggatgctaaaatgtccatatctgaaaccc

SEQ ID NO: 47562 - DNA, 633 bp, Zea mays
  Clone ID: MRT4577_143383C.1
ggtggtcacccctttggatgtccacaggcaggcatgaaggcagggtccaagcagaggaggagattcctcaacctcaaagccttcctccatgcatggaagaggctcgccgccgctgagacggcgggcggcgctgggtgggcccagctcgacggcggcgagggcgagggcgaggccgccatccccagggacgtgcccaggggccacaccgtggtgtacgtcggggaggcgctgaggcggtacgtggtcagggtgtcctccctcgaccacccgctgttccgcgacctgctcgaccgggcgcgggacgagtacggcttcgccgccgccgacaccaggctgtgcctcccctgcgacgaggacatgttcctcgctgtcctctgccatgtcgacgcccagcgcgagtggagcccggcactgtgcagctgaccgcggtaccggcccgccctcgttgtatttgaccgcctatgtgttccgtaattcagctcgagatgttcaaaaaaccattatgggtgtaggctgaattatagggtataggctgtagagcaagctagcaattagctccagtgtggtccataaccatattgtgccccaacttttcaaggatgcaccgcaaggtgctttgaattgttttaaaaa

SEQ ID NO: 47563 - DNA, 496 bp, Zea mays
  Clone ID: MRT4577_143384C.1
tggattaatcgaaaagacccaaaagtccaacattgattccttcagacgtgtcaatggtttcaaatatttcccatagtgacctaggatggtgtgctcgtagtgcgaaaattagcacgttcgccctgttaatccgccagggcccaaattactcaattttcttccatgaacgatttgtgtcaatggatttgttcgatccaaaacttgatataatgggtgtaatcccaaaaaggattcataagtagttgttaacggagttgaagttaccaaattctgaggagttggtatcaatatatgcctaattgctgcagagatagctcccttaactacattttctaaacgagccagagccaacccgagctggtctcgtataagatccgcttcagagcgaatacgtttatttttcaaatgattcatatcatgaagtgtacccattccacatttcattccaatcaaaagatcggcaggtgctaacacatctcgcggttacaaaaatata

SEQ ID NO: 47564 - DNA, 490 bp, Zea mays
  Clone ID: MRT4577_143385C.1
cgcgcctccgcgcgctcgcacgcctacccgccgatctaatcccgagcgtcgatccgagatccaacggccagaggagcccgataccccttcgcccgcgcaaacttcataaagagacccctggttttctgcatattaacccgccgtccctggaatttcgcagttaggtcctcagaccttttatttaatcaggaataagtatttaaagagtatttttaatccctaatcttgtaaaattcataactttgtcatatgaactccaaattaggtgctccaaattgcaaaatgttcataatatttttacctacctgtttaaaacaatgtttccctgctgtttttatgtcccaattaatagttgatctttagtttagaattaatgttattggaaccctaatagaaataaaataaagatagtagactttaataaaagttggagtacttaagtttatatacctaacaccatgtaatgatttaaccccacccgacagcaacg

SEQ ID NO: 47565 - DNA, 283 bp, Zea mays
  Clone ID: MRT4577_143386C.1
atgaaacttactgagttgaataacttaatatatttctgttttcattcccaagggaggccatgtctggagatagaccttgaatttaataaattttaggcactataccatttcagtggagaaaattgttgggaaatttggggggatggatatataagggggaggaagtcactggccagtttgaggtgcttccattggtctgggtaactagccatttcttcctgattgtgcctagtatatcccagacagtttgtttctatgcagaagaattttatatgaaattttc

SEQ ID NO: 47566 - DNA, 228 bp, Zea mays
  unsure (1)..(228): unsure at all n locations
  Clone ID: MRT4577_143387C.1
gcacgagaataatgaccccaagactcatgtgttgtctctcaacagagctggtggtgctggagtttcttcttcagaaagagtccagggcgaaataccagtgcaccttaagctgctggctaaattttccaataataatgggattatggcccaccaagntagaaaggcaatatacccaagggtccaccgaatnntctggtcaaggnggcttggttggattcaaggtntntc

SEQ ID NO: 47567 - DNA, 130 bp, Zea mays
  Clone ID: MRT4577_143388C.1
cctctctcttctactaggctcaaatgggcctactaggcttgtgctacctagtttgaattagtgttatataaatgatatttggtctaatcttttatattactgtataattaaggcgtcgcctcaccttacg

SEQ ID NO: 47568 - DNA, 261 bp, Zea mays
  Clone ID: MRT4577_143389C.1
gataaagatcaaatagaaagtgcctcataagaatcccatatttaaatgtactgaactataatcagccatttactgatttactgactctaaatcagccgttagatattcatgcaacaaacaatagataaaaatggctaaagaattaaagacaggtatgagaacactgacttgctaaatagggaaactggaaagagacagaaattatgtcaaaaactagaaatgtcaagggaaagtacaataactgacattttaaaaacctgc

SEQ ID NO: 47569 - DNA, 461 bp, Zea mays
  unsure (1)..(461): unsure at all n locations
  Clone ID: MRT4577_14338C.1
tccttccgggacattttcccaatgaaccaatgcactgatgagatagttttgattctcatagttctcatcgttactatagtttccatcaagaatttttccaagaattgtcaccatctatggctaattcttgctgatggatgttccaattgtcattaggtatcctgcacacataacccttctgcgtggaaatcatgaaagtaggcagttgacacaggtgtatggtttctatgatgagtgtcagaggaagtatggcaacgccaatgcatggcggtattgcactgatgtttttgattaccttacgctatcagcaatcattaatggtcaagtaagttcctctagggaaaaaatacaggttttcatatcatgctatctcggcaagtctacctaaattatatgctggattcaggtcctctgtgttcatggcggtctttctcctgatgtacgtactannttgatcagat

SEQ ID NO: 47570 - DNA, 282 bp, Zea mays
  Clone ID: MRT4577_143390C.1
tgagctcatagcaccgtacagtgtgttcgcaatgagtcctttgggggcgagaatcacgccataaaccctgaatacatgttcaagtgccacagacagggtatcacgcacgtggactgagcaagggaggcgatgaggctgatccacgcggaatacactatcctgacggccgaggactgacatggggagctgtagaagaagttgggcatcgagcacgagcaccatggtcctcgtgtacaactccatcaagagccagcctgagcctagtggacgacgggaaagact

SEQ ID NO: 47571 - DNA, 203 bp, Zea mays
  Clone ID: MRT4577_143391C.1
ggtctttactttggtatgtattatttttttaaaccactgcttcttattaatacccccgccgattatcttattagccagcttctttcttcaatagaatataaccattgatgctggccttgcctcctaccccatttacactgttccccctcccatgatgatgacatcttgtgaggccgtcaaatacaacaactccttggacgctt

SEQ ID NO: 47572 - DNA, 500 bp, Zea mays
  Clone ID: MRT4577_143392C.1
taaaaaaaaaaaaaaaaaaaaaaaaaaaaaaaaaaaaaaattaaaaaaaatataaaaataaaaaataaataaaatttttttttttttaacatttataatttttttttttttttttttgcatcatcctatcctctaatttccttttttttccttgttcttgagggccctttgatccttttttttaaaggtcctaaatagatcgtttggtgagtgttataaacattgaggggcaaaataaccctatgattatggtatttaaaatcttatgggcgagctctttttattaggtttcgaaaataaaaacaattttatccccccacattttactgcttttaatagccgatccctctcattatttataaaaagaagactcttattgacggctatatatacactccctgttgtttgcccttaaattaagtgcatttgtgttttcgccatcacggctactgcaaagctgagttctttttctctcaaggtcataaagcatgtttcttttt

SEQ ID NO: 47573 - DNA, 365 bp, Zea mays
  Clone ID: MRT4577_143393C.1
ccccatcgctccgccactcccatggcgtccctctacggtgctgggcgccggcgatcaccgtaggacgacggtgaggacgatagatccggcagagggaggaccaagcgcttccgcctctccccggaggaggacgcatcgtcgccggcggaggcggggcccggcgcggcgacggaaaccggctggctttccggcttagtctacagagcgaagagggtaatatcttccggtttactgttctccttgcccgaggagaccgactcgtgggaggacgaggaagaggagaaggactactacgactactaagagggcatgcactagtatgaacatgaagctactcatgacactcatggagcagatagttcttt

SEQ ID NO: 47574 - DNA, 244 bp, Zea mays
  Clone ID: MRT4577_143394C.1
agcaccgctcgctgatgatgctgatgaggatgactttctgttcgaagaccggttcagcattgtctacaaccttgaccgtgaattcggcccgaggtttaatgatcatatgcagtattgtgttaatcatctagaggaaatttacaagctctccaaggtgaaagtccacctatcggctgtctaagggatcatgatggacatcattgataagatattggtacgcggtgagtagatagagcgtttggtg

SEQ ID NO: 47575 - DNA, 691 bp, Zea mays
  unsure (1)..(691): unsure at all n locations
  Clone ID: MRT4577_143395C.1
ggccgcttttttttttttttttttagtaaagatttctcagtatagacattaaacaaatgccgagtacagaatgagaatccatcaaacaaatgcgaaacggttgccttccttacgaagattccaagaatgggattccaattggggtggggaacaacagagatgttacccgagcccactgcccctgtagctcttccaacttttaaaccaaaataagaattcaaaatacattcgacgccacatggcccaccacctgcgtgacctcaggagtgacgtcatcgtaccactggcgacgtgggaatccatgtttcatccacttgattttctttttgaaaaatcctttgacaggaaactgcagtcctaccagtttccaccttaccattgcccaatgtcaggtcgaccacaaaattatactgcccacacaataacaaaggcttgcagactagtaagtacatcaggattcgtccccaaacttcgtgggggtatttggaggatttacctctccatccgtcaggacaacagaaatctcgatatgcgcttcattataacgacatctctcatatccccccnnttgctaaaaaagcaggagccagacgactgctagcgggtacagtctgcctagcccacctgcagaatctganaagaaatcagaaaacacagaaganannnnnnnnnnnnnnnnnnnnnnnnnnnn

SEQ ID NO: 47576 - DNA, 229 bp, Zea mays
  Clone ID: MRT4577_143396C.1
attcattgagcggaggcgggcaaaggaccatccagattcatggacagctaaatacttaaacaaaaccccggacaggacatgattacggctctagacttccacacgatgctctacggaaccaccatctacacaagtggtggggacggattaattacacactgacgcgccttattggggaagcaaaggcaaggcttaccctaacgggcagagccatctataggagcccgca

SEQ ID NO: 47577 - DNA, 522 bp, Zea mays
  Clone ID: MRT4577_143397C.1
aaaaaaaaaaaaaaaaaaaaaaaaaaaaaaaaaaaaaaaaaaaaaaaaaaaaaaaaaaaaaaaaaaaagctgaacaaataaaaaaaaaaaagtttgggctttgcccaaaaaaaaaaaaagggttgtactttggccgttccccccttagggggggcttttgggaatttccttcaccctggggggggttcccctcttgcttttagggggcccatttccccctttggggggcccatttacaattcctgggcccccctttaccccccccgtctcggggaaaacccgggcgttccccctttttaattgctttgggggaacaaatgccccattttccgccgcgctggcgctctttcccgaaagggcccccaccgtgcgcccttactgacagttgcccgccctggggggtaaagggccccccccttggggggtcctttaaccccgccgggtgccgtggtcacccccctggggcccgttcccttggcctgcgcccttacccccgtcctttgggctgcctgccttcccttt

SEQ ID NO: 47578 - DNA, 393 bp, Zea mays
  unsure (1)..(393): unsure at all n locations
  Clone ID: MRT4577_143398C.1
tccctgtcagccgccctttttttttttttttttttttttatnctggagccgaagattttttttcctcttcctcttctatctttactgttacagaaataacggacaaagtaaaagtgatgaattacctatactacttgtctgtgtgataattacatgttacagttggttgatctcccagtcctcacatacactaacgtctatggtcatcgtattgttgccgtccttccctgtcccgggagacgacagcaccctgcagcaattccgtctcggagacttgtcccacaatgcgggatcgggctttttaaccacgagcacgctgtccagcagggagtcggggtccgggatctttcaccggcaaaccgggcgtgctttgccccgccgccgtcaccgttg

SEQ ID NO: 47579 - DNA, 634 bp, Zea mays
  Clone ID: MRT4577_143399C.1
ttgggtacctcgaggccggccgggcgatagttacgtaggaggcgagcctccggaagtggatacgtgagtactcgacctgccccgtcgatccggctgcggcgcggcgtgctaaatcgctaccgatcatggtggtggaggtatatccccgaggggtcgaagaacctaaccgccaccggagatgttatgtattcaggtggagaggttgacaggaggggggtcgacaggatcaacaaccgcgttgatgagttcaataccaagaaacccctcttcttctacgtcgacctcgccaataggtgtttgcaacggcacggggatgtacatgttatctcggtccttgtggatggcctatagaccaccgtatgtagcatcacgtgcgcagaaattcgtggcacactgtgcatttgctgttgataagaacattgagacctctacctgttgaaatatgcgtgtgatgaacatgtcgttgattccaccacggcaggattgagataatcttgctaaagagcgacacatttgctgagctgatgtccgctgctgctcaacataggggcgaagcggaagatggtgtagagcaagcttgagaactgtatcgctgacaagctgctgctggtgcgctctgataatgttgtgtaat

SEQ ID NO: 47580 - DNA, 954 bp, Zea mays
  Clone ID: MRT4577_14339C.1
ccggtggatctcgggaccggccgatatggagggagaataaaaccattcgcagcgccggaccgggcaatcactgctactcctacatcgatcagtgctgtgtagacaagaaaagcgggcagcttcgttcaaccccgagaaagcttggagccagagcagggggggcgaagagacgatggtcgggatcttctccaggttctccgccggcgcccaccgccgctccaagagcgtggccgaggctgtcgagacgctggcccccaacataagtacaggagaatctgacccagcggcagctgttcctgcggagagcccccatggcatcgaggttggtgttgagttcaagccagtggagcgccccgtggaacctatcaatcttgatgagccagtgaaatgcccgcttcctgagccgtctatactgcacgacgggaggatatggaaggagaaaatgtcttcagtcagcacgagggtgagaacagacttgccggtcgtgaaggaagggtcgcagctggagcctgacggtagcagcgctaggtcacgatctgcagttccaaggcgcgccatactgccctccgtaagcgcgcccgagcacaacatcctagcgctgcttgacgagtgcgacgtctccgggagccgtggctctgctgaatgagctcgagttgggcgtcgccagcacattgtaactaaactgcgtttgccacgagctgatctgagcacagcaaaccttacagtatgtctgaaaagaattggaactacgcaacagatcttttgtctggattgtatctataaatacgagtgaaagcgttttggggaaattgtctcgcacttgtcggaggcagttatggttactgaaactgaaacatttggttttgtgttgaaaaattttaaaaaaaggcccctgagcgtgcagctctgaatgtgacgccaagttgtcaagtgcaaaatgaaaaacggccccta

SEQ ID NO: 47581 - DNA, 469 bp, Zea mays
  Clone ID: MRT4577_1433C.1
gggcaaaggggcccgccccttcccagggggggcccccctatttttttggccaggcccaaaccccaaagggggggggcgggtatggaaattcccggggtatggggggggatggggggggatggggggggattttcccctggtaggggttaaaacccgcccaaccccccccaaaacaggggggttttccccaaaacgaacaagccctaaaggggttaatccgccccccacccctaataattcataacccaaaccccaaaaaaaaacttttttccccgaaaaccccaaaagaggggggggaatccccaacccccataaaggggcccggtcccttggccccctcacggaaacccgggcctttcgggcatatatgggcccccaatcgatcttcccgggcggggaaaccaacctagggaacccaaagcaggcccaaaacccaattgggcccgcccgcccaaaaaaggctgggggg

SEQ ID NO: 47582 - DNA, 787 bp, Zea mays
  Clone ID: MRT4577_143400C.1
ggtcttccttactcgagtgctaacgatggtgatgatagtgctttatgttttcaagatcaaattggttcaattatggacaagacgaatgtgcattcaatttcttctcttaccttctccagctattccagtgatccaaatgatgtgaatgaaaggaacttaaacaaagcaaatgtttatcaatgccagaaatgcaatttgactttcggtgaccggacttcatatgcgcaacaccatttggcgtatcatgaaatgagtgttaagaggcgtaggactggcaagtttggtgagccagtagtagggaaagatggaaaatttgaatgccctatttgtcataagacctttgaggaggaaccacagtactttggtcatgtcggatctcatgcaagatatgaaggtttagctcctgaagcattcttggataaggctacttccagaagggcagctaatgattcattggcagaaattccatttagccttcaggaattgactgaatcacatggacagaacaacaaggtttcttatggtgaaaagggttttcagcaccacaatcattcaaataaacatggtgataataaccttacagccattgatctttttggtacaaattattcggataatttcatcaggccaaataaaacttgcggtagtcctgaagagggaccttcctgtaatgatgctccaagtgtatctagatatacaaattgtacaggccatgctgatgtgatagtttccagaagggcatcaatctccaataatcaatctggtagcaacattaatgggctttata

SEQ ID NO: 47583 - DNA, 371 bp, Zea mays
  Clone ID: MRT4577_143401C.1
gcgggttcgtactcgcctacctgcgcgggtcaaacctttcgcggttctcccaatttccgccgccggtccatcccgtaacgcgacaccatgagggagtgcatttacatccacattggccaggccgctatccaggtccaaaacccatgctgggagctagactgccttgagcatggacattcaagctgacggacagatgcccagtgacaagaccattgacggaggtgatgatgctttcaacaccttcatcagtgagactggtgctgggaagcacgtaccccatgctggcattgacgaccttggacccactggcatcgatgatgagagaactggcgcctaccgccagctcttccaccctgagcagctcatcagtg

SEQ ID NO: 47584 - DNA, 215 bp, Zea mays
  Clone ID: MRT4577_143402C.1
agttattaccagtctcccatggacatggctggtgaggtccgaatacaatgggttgggactagtgccaacgatccaacatatgagcacaaggcattcatgaccatcgcagggcagataaacaacaggacggcaggccacaccagactccatgtggtgctagtagacctcgaacccaccaaatgcggcgtcagcctttttctcaacaaaagcgctgc

SEQ ID NO: 47585 - DNA, 347 bp, Zea mays
  Clone ID: MRT4577_143403C.1
gactggcagctccagcgcggtggcggccgccctttttttttttttttgtcgcgcatgaacgcacccatcaaatactgtttactagtagcgtctcgacggcaagcacacatcctctagcacaccagaacagctactccgccgtctggactgccacagagaacagattgctctctcctactgagcacgtcccttgcacataatctgctgagacagcaagaaggcctatggcctacaatctgtctagcttcaaccgccgcctgtggaccctttcatcagtgtggccctgatcttgatcccctcagactgacaaacggtcgctgatcccaggctcgtaccgccccttaaaa

SEQ ID NO: 47586 - DNA, 341 bp, Zea mays
  Clone ID: MRT4577_143404C.1
tcattccaattaccagacactaacgcgcccgggattgatatttattgccactacctaccccgcgtaacgataggctaatatgcgcgcctgatggcttgcttcacccaaacattacccatgacacgatcaatggttttaaaacaccacaacctggctggacagccaaacagattcatgcaagcagatcagtattcctcctcctccacgccgacatcactgccgccctctgcggcgacctcctcgtagtccttctccagggcggccaggtcctcgcgtgcctcggagaactccccctgctgcatgccctgggcggacggccagggcactaacccgcgctgggg

SEQ ID NO: 47587 - DNA, 848 bp, Zea mays
  Clone ID: MRT4577_143405C.1
ctcgaggccggccgggccgggtttaggtgacactatacgagaccggccgggccgggatccactttgatctctcgagctgactagctaggcaggccgcaggtgctgcagtccagggatggccaccaagctcgccgttctcgccaccttggtgctcgcgctgctcggccccgtgtcgtgccaacaacagcaagcgggctacggctatggcgccggcagtcctacacctacatcgtcgccgccgccgcctgctgcatatcctccgatgacgacaagcccgacgccgagctctcccaccgcctatcctcctcctcctcctcccacacctagcccgccgccacctgccgctggtgccggactgagcgtcggatactacaaggacaagtgcgccgaggcagaaaccatcgtgcaggaggccgtgcgcgctgccgacgccggcaccaaagcagggctcgtccgtttgttcttccacgactgcttcgtccagggctgcgacgcctccgttctgctcaagcccgacaacgacaccaacccgcagccggagatgctcggggtccccaacctgagcctgcgcggcttcgaggtcatcgacgcggccaaggcagcggtcgaggcgagatgcccgggcgtcgtgtcctgcgccgacatcgtcgccttcgccggccgcgacgccagcgcgttcctcagcggcggcgccatcaacttcaccatgcccgcgggccgctacgacgggacggtgtcgctcgccaacgagactctccccaacctgcccccgccgttcgccgacgtccggcgcctcaaggcatgttcggccgccagggcctcgacaccgtcgacatggtcgcgctctc

SEQ ID NO: 47588 - DNA, 176 bp, Zea mays
  unsure (1)..(176): unsure at all n locations
  Clone ID: MRT4577_143407C.1
agccacaccaggacaggngatgcagnacagcgaaggggtgaaggcgaaggnacatttggtgatgctcggcgaagggaaaagggtgaaggggaggggttcggcaaaaatgcaggngcaagacgtnggcgaggcgacnnggcggccacgcggggtttgatngagggaggatggccaag

SEQ ID NO: 47589 - DNA, 755 bp, Zea mays
  Clone ID: MRT4577_143408C.1
gagaaaccctagaatggacagactacatgtcgctcgccttcacacagcacgtaagaacatgtagacatcttagcatgcacagcaacggaaggcggtgaaattgacaattaattgactgcatatccacccacccatgcaatgcaatgcatacattcatgcgttcaggtgatcacggagacgctgcggatgggcaacatcatcaacgggatcatgcggaaggcggtgcgagacgtggaggtgagaggccacctggtccccaagggctggcgcgtcctcgtctacttccgcgccgtccacctcgacgccgccgtccacgacgacccgcacgccttcaacccctggaggtggaaggagaggcccgacgtcgtggccatgagcggctttcagccagagcgggtgccctgggctcgacctcgcaaggctcgacctggcaaggctcgaggcctccatctttctgcaccatctcgtcaccaatttcaggtgggtggcggaggaggacaccgtcgtcaacttccccacagtgcggctcaagcgagggatgccaatcgcagtgacgcccagaacctgctgaacgcaacgcaacttgccaggcaaaaccatactatacatttatactcaactaaagaggtgtgagaaataatacagtacatgcatgcatgtaatggagggcgaaattaaaagttggcacggcaaagaagctgctggtatgccaaaagttcagtttgcaaattatatagtttaattactattacact

SEQ ID NO: 47590 - DNA, 332 bp, Zea mays
  Clone ID: MRT4577_143409C.1
atgaacgcatgtgcaacacttgaatgtctgcctacctcctgtagtgagtagccacttgcaggacgtcgcattcagccacgccgagaagactgcccgaggagacccggccaccatcgcgaggaacactgagtgaggggaccaggctatgctggagagcaacgacgactgcatggaagcacaccgtctccaagtacaaagacgacaccgcggaaagcaacggcagatctaactctagaggcaacacgaagttcattgtacggaaccaaccatggaggcgacctgaccagcatacatggcaccgacctgttcaccggcctgacgaaaccagaggt

SEQ ID NO: 47591 - DNA, 407 bp, Zea mays
  Clone ID: MRT4577_143410C.1
aatagaggcgctgaggcctcacccttttccctggtgttgcaagttgcaacacacagcgtccggcgagatcggcgatcagaaaccacgagcccacccaccatccggaacgcgcgcgcgatgtgtcccgtcagaggcggtggttgttcttgggcagcgtccgtcgtcggctctgtcacggcggcgctgctcctcgccgccgtcatcgtgcggctcttcgtccccagtgcctgttcttcaggaattatcaaggggcggcggcaggtaggtgctgcaggccgacgcgtcggcgttcgttccatggtacccgcgatcgctcatggagctgatggggcaatcgtccatcctagtgctcggcggcggcctccagcgccgggtgcacggcctcgcggccgcttttttcattcgcc

SEQ ID NO: 47592 - DNA, 471 bp, Zea mays
  unsure (1)..(471): unsure at all n locations
  Clone ID: MRT4577_143411C.1
agnagcactgtagaacactgacaatgacgcttgataacacactgtcaaagcttctcgcgacggaaacgcaaaacacgaggatcacccagcctggacctccacacggttctggttccatccatcattttatgcgagcacaaaacatgctttctgctctggttggcagagagacagactcttgcttaaaatatccaaaaaaaatgggcaggctgtattgctggcatgaagaacgcaacctgatacgactattcctgtatccactcctttgtacatcgcggtaatcaataatgtcaagaatacaataccccaaatcgtgcaaaacatgaaccccgccctgttccggtctggcatgtgccttggcaacgttctgtcatatacagcatattggaactgtgttgatagtctgtccggaccttctctcgcggccaaagcggcccaaggcgccggcatggcggacggcagctacaccat

SEQ ID NO: 47593 - DNA, 246 bp, Zea mays
  Clone ID: MRT4577_143412C.1
ggataccgaacctcggcggcgtcggcgccacgcgagcaaaaaccctagtgcgagcaagcgagaagcagagacctcagtaactcgagcaacgcgcgcccggcccgacggcatggagagcctcatcctcgcctccacctgctccgcgtccccacagctcccgctactcacctccgccgcccgcatccgcaggcagcccgtatccgtaccgccgccgtcttcggcgtccatcagcggtaccgcgaggaa

SEQ ID NO: 47594 - DNA, 270 bp, Zea mays
  Clone ID: MRT4577_143413C.1
tagccttctattgagcttgaacttcaaacaaatcaactctgaatgcacctactcgatcctagatgcagcatcgaagaacctcaggaccttaacaaccttagccctgtgtgtttggcttactagattgtccaggaacaactactccttcagtttctcgaagtatgacgctgggatctcaacaggtggtagcaaagctgatacacccttaaactgttcaagaggtttattccagttaggacactgcgactatgcttatgcaaacgatctgac

SEQ ID NO: 47595 - DNA, 270 bp, Zea mays
  Clone ID: MRT4577_143414C.1
tggggccgccgccgtttcgcgcaccgtaccctagccctcgtcagcggcggcttcgagctcaagcagccatgacgttcaagcggaggaatggcggacgcaacaagcacgggcgcggccacgtcaagtacatccgctgctccaaccccgccccctgctgcaccaaggataaggctatcaagcggttcttggtgaggcacattgttgagcagctgccgtgagagatgtcaggaggctgtgtaatgatgatatgttctaccaaattgtatgaaa

SEQ ID NO: 47596 - DNA, 739 bp, Zea mays
  Clone ID: MRT4577_143415C.1
gacaaaatgattcgttccaagaaaaagaaaacattctgacaagaaaggaagcattgttttcggtaggtacatctacgggaacagggcgaacgagcacatgaatgttgacgaactgaacgccctagagaggtacttggagatatggatgtacaacacccgctctgcaaaggtaattcaccacccaaatgcatcttttttataaaaaaaatggtttcagacttcgctaaactgtaccctgcctaccagatgcagataatggctcaagagatccaagcactgaaaagcaaggcatgtcaaaaccctgtacttatattaactctacgaagacccgaggctttcagcacccatttacctcactaaaagtgtctgcgtgtacgcaggaaggcatgttgaaagctgccaacgagattctccaggaaaaggtattttccaactgtcagctcactctgttggtacaaacttcaggtttcattccttgaaaacggagaggatttgctgtttgcaccagattgaccataaacattgtaagtaccaaggataaatgtcactaccgacagagattaaaaatacatcgtccagttggtttccacaaccgatacgcaccttattagagaaaaactaggaaacaaaacaaaacaataaggattccagaaaatagacatcaatgtttttgtcaaactggaatgctcaaataggcatcattcaattcaacatggttcagctcttctgtccttgtcct

SEQ ID NO: 47597 - DNA, 319 bp, Zea mays
  Clone ID: MRT4577_143416C.1
gggctggtgggaggacaagtggcattatataagagctgcaccatgtttaattgaatgatgcctatttgagcattccagtttgacaaaaacattgatgtctattatctgtaatccttattgttttgttttgtttcctagtttttctctaataaggtgcgtatcggttgtggaaaccaactggacgatgtatttttcatctctgtcagtagtgacatttatccttagtacttaaaaaaaaaaaaaaaaaaaaaaaaaaaaaaaaaaaaaaaaaaaaaaaaaaaaaaaaaaaaaaaaaaaaaaaaaaaaaaaaaaaataagg

SEQ ID NO: 47598 - DNA, 870 bp, Zea mays
  unsure (1)..(870): unsure at all n locations
  Clone ID: MRT4577_143417C.1
cattgggtgcctcgcgggcgggggctccctccccccctccggagcccggagccagagaccaaccacctgcggcggcgatggggatcggtgagcacttcgagggcgtgaagcagcactgggcgagcaacttcgccttcctcgactactacaagaaggtctacggccgcgccgagcccctccccaagtggtccgacgccgacgtcgacgagttcatcgcctccgacccggtctacgggccccagctcaaggccctgcgggagtcgaggaagttcgcgcttgtcggggccttcgccggcgccgcccacctcggcggcgtcgcgctcaagtactccaaggcgccgcacggcgtcgtgctggcgaccgggttcggggcgatcacgggcgccgtgctggggtccgaggtggcggagcactggtaccagctctacaagatggacaagcagggggccaaccttaggttcatctactggtgggaggacaaggtctcaggacagaagagctgaaccatgttgaattgaatgatgcctatttgagcattccagtttgacaaaaacattgatgtctattatctgtaatccttattgttttgttttgtttcctagtttttctctaataaggtgcgtatcggttgtggaaaccaactggacgatgtatttttcatctctgtcagtagtgacatttatccttagtacttacaatgaatatggtcaatctggagcaaacagcaaatcctctccgttttcaaggtatggtttctcaaactactattttcctgtcagtagttataacctcagaaataagaataccatgatcatgttgcaantattggtggatctgtttcttatataaggctatgtatgtactgtcatt

SEQ ID NO: 47599 - DNA, 2080 bp, Zea mays
  Clone ID: MRT4577_143418C.1
ccggccgggagagacatttatgagtgcgactgcagacaatcttgtttccttctctcccctccccacaccccagggcggcctccgccaccgcgttccgggacgagtcaccgctccgtcggcacggcagcttgctccagtccacgccacgcgctacgtcgtcgcggtcgatcctcccgtgaggcagccgtgtcgctaggcaccgcctatttctcgaacaaagtcgctcgctaccatggcggcagcatccgccgccgaagctaacagcgtgagcaatgacgaattcctcgtacgcgacgacgtgccggggctgctcgccgctctcaaggagatgaaggacggactggacctcgtcaggggcaaggtcgaggccatcacccggaaggtcaaggcgaaccagttgccggcgggcaacgggatcgggtacctagaagcgaagaaccacatgcttcttggctactgccaggacatcgtctactacctgctccgcaagaccaaggggctctcggtggatggccaccccgttgtacggagccttgtcgagattaggctgtttctggagaagattcgtccgattgacaagaaggcagagtaccaaatccagaagctcaccaatgccgctgacaatgcaactgctcgagagaaggcaggaaatgcagaggtgaaggggaaaggacgggcattcggatgaggaagacctcctgatgtataggccaaacccagagatgatggacacaaagcctgctcctgatgggcaggacactggctatggggcttaacgtcctccgaaatttatgcctactagcatggatgatgaagagaaacgtcgtaaaaaggattcaaggagagataaagcgatagcccgagtggcaacagaaaacccttatattaaagagataattgatgatgctgcagacagacctgaagagtggaaggaaacagtgggcgatgaaagcagagaatttgggaggtacatgagacagagagaggagcaagagaagcaggaagaggagttgttcactcgggctcctgttactaaacgtgataagcagatggagaagcgcataaggagacaacttcatgggctaggaggcttaactgacggtttcgaccttgggatgaacatgctgttgggaggagacaaggaagatgatggcggttcaagcaaaccgcacggcaagagcggaaaccgaaagaagcatctgaagagcagcaagaagaggaagaggcattagcctggacccacagtcccacactgctgtaagcctgtaacacttcaacatactgataaagcctagaagacggttcaagcaagccacacagaagctgaagaaaataccaagaaaccaagtagagaagaggctttggttcctcaaaagtgtaggaaaatatgatctgagcgactgatcctgagccattggaacagtataaattagggcttgttcgttttgctctcaatccatatggattgaccgtgattgagtggatttcaaacccgaataagtcaaaatccttcataatttttccaataccatccaatccacatgtatttgaaataatcgaacaagaccttatatggcttgaacgtggtagggtagcaaattttgttcattgtagagtatcccagatgtgataattgtttccccgagtctcctgtttttgtttgcatcggagccaaatgaccaagtatccagacacgatgatatggcaccaaacaaaacaggattgtgacatgtaatgcttgaacagcaaaaggagttcggacagtgagtcaccagtctctatgggctcgtccaaacatattttacatatcgttgggacggtctttgtagggctgcatagacagcatagtttcgaactgtctcacaggcaacaaaatacatatgttgcagccaaatacaaagcacagttctaaaccaccttataaaaaaccaaacacagcctgtacgcaacggaaaaagggtattagaagaaaaaaatgtatcatcaagatggcaatctcttgtgtataagcagcagatcagaatacatgtgatgttctggacaggtttgtacttcaattttttgcaatcattttaatggt

SEQ ID NO: 47600 - DNA, 1534 bp, Zea mays
  Clone ID: MRT4577_143419C.1
gtcttccacttccaagcttcctttgcctctcgcaatttcttaaacctcgagttgggtacgatggtggaatgaactctggatcgctctctcgcatgtcgataggtcaaggcgaaccagttgccggcggccaacgggatcgggtacctagaagcgaagaaccacctgctccttggctattgccaggacatcgtctactacctgctccgcaaggccaaggggctctcggtggatggccaccccgtcgtacagagccttgttgagattaggctgtttctggagaagattcgtccgattgacaagaaggcagagtaccaaatccagaagctcaccaatgccgctgacagtgccactgctctagagaaaaccatcaatgaccttgacctcaagaagggcgggcactcggatgaggaagacctcctgaagtataggccaaacccagatatgatggacacaaagcctggtcctgatgggcaggatactgatggtgtttaccgtcctccgaaatttatgcctactagtatggatgatgaagagaaacgtcgtaaaaaagattcaaggagagataaagcgatagcccgagtggcaatagaaaacccttatattaaagagataatcgatgatgctgcagacagacctgaagagtggaaggaaacagtgggcgatgaaagcagagaatttgggaggtacatgcgccagagagaagagcaagagaagcaggaagaggagttgttcactcgggctcctgtaaccaaacgtgataagcagatcgagaagcgcataaggagacaacttcatgggctaggaggcttaactgacggtttcgaccttgggatgaacatgctgttgggaggagacaaggaagatgatggcggttcaagcaagtcgcatggcaagagcggaaaccgaaagaagcacctgaagagcagcaagaagaggaagaggcattagccttggacccacactgctgtagcacttcaacataccgatacagcctagagacggttcaagcaatccacacggaaagttgaagctggagaaaataccaagaaaccaagtagagaaaaaaagctttggttcctgtaggaaagttgaagctggagaaaatacaagaaaccaagtagagaaaaaaagctttggttcctgtaggcgtattatttctgaaacagaaaacttgatctgagcgactgatcctgagccaatggaacagtatgaattatatggcttgaacatggtaggtgtaccaagttttgttcatcgtagagtatcccagatgtgatcggctaaaaaaaaaagccgccctgaagaacaacaagaggaagaggcattagccctggactcacactcctgtatcacttcaacatacttgagtgtgtgacatgtcagttattttacagatatgttagttttaccatagtattgttcgatgtgatcctagcatgcccgtgaatgctttggttccctatagagctgttgatgtcttacacaaatgtattacaaaacttttttcataacaatataacacacatttgtacat

SEQ ID NO: 47601 - DNA, 230 bp, Zea mays
  Clone ID: MRT4577_14341C.1
gagaaaggacccaccggaggggaactaaagtggctcaacggtggggatgattttaaggaaaggccctcaatctagaaagccggtgggtgtggaaacaaaaggattaaattctttgaaccaaaacagcaaccataagacggcacaaacaaaaatcaaatccaagtgatttgtcaaacccggcagatctagaacataccggcgtagtcggcaaaacagaaaagtccaaaaca

SEQ ID NO: 47602 - DNA, 263 bp, Zea mays
  unsure (1)..(263): unsure at all n locations
  Clone ID: MRT4577_143420C.1
gtgttagtctttggacgccgctacgaagctacagagcgctagagagctggaaagagctggngctccgcaactcagacatggactacatccagctaagccaaagagctgaaggtctggcaccgtgacttcccagacgtgatctcaggagcgcatatcattgaagtaattcctgataccgcagcagaacctgtcggactcaaggaaacgacgtcataatcagcatcaatggcagaccgtgactcagccatgatgcagcgacgcat

SEQ ID NO: 47603 - DNA, 495 bp, Zea mays
  Clone ID: MRT4577_143421C.1
aaggaaagtgggcacgcccgcaagctcggatcctgaataccgggcgccatctattctttctactcaggtaaatgccagcagccgctgggcaaacttcttgcattctaataacggtgacaggaacgacgtaggacatggaggccaccctagcgccctgaagctcaatccaagcgttcatatccattggccacgccatccagctcacgatgatctcacatcagtgaacatcgattagcctactaatacgctcacggtggcgcggccacaatcatcaccaccccttcaatctcaaaactcagtacagagccacgtggaccaggccatacatgactatcctgggggcacggacaccgcgatccatttcccggtcgcggacgcaggtctgccgtacggttgctagaggacggaccacatctcattgactgacctcaagcgcaacttctatctggccatcgcgcggttcggcgaggccttagcacggcactgtcggcgact

SEQ ID NO: 47604 - DNA, 1029 bp, Zea mays
  Clone ID: MRT4577_143422C.1
cgttgctgtcgccggaacctataatttgaggaagcatgctcctggtaagtgccactgcctcattgattgtgtacccaacagctgcaggatcaccttctgttctaaggaaatcacgctcagcaacactttctgaaggcatcttcttgccatcttggtgctcgtgagaagattggaaccccaatatgtctccatctaatgtgaacctacaagacctgatccgctccactctttcgctccacaccttccaggagtgcccagtatgttcaccagcagtcaaccaatcccctggtgtagcccttttattcttctgcagccctgaggttttcagacccttggccttacccacatccttcgtgcctccagacttctcccttccccgccgcctcagcatctccagcaatgcagggttcagcttatttacaatatctgcttgggcctctgcaatctcccctgcagacatcccagccaacctagccatgttctctgcgctgatctctgcttccatagatgactccctgccgtcgaggtccatactctctgcttgtgatgccaaattcctagcctcacttgtgttcaccaattcatctctcgattcaacctgactcattggcttcttggacacgacatcagaaaccaaaagcacgggacctggcccttcgctagcatttccactgtcaagccgcatagcacctccctccaatcctctcccctcagctgccacaccacctaccttagaagctacagccccagcatcaattctctgatcgctctgtttcttggcctgcactggcttcccctgcctccgcttggggggagcatcgccaacaaactcacgccaccggctaaaatccatgcccttcttctccttcctcccttcacaaggaccagctgcagcagctgccacaggatggtagtctgtctcatccatgtccatctcgtcgtcgttgtccgcggtctcatccttgggggcgtccttcccaagggaccccagtgggggccgtgggagcggtggcgggcgacggggaaggg

SEQ ID NO: 47605 - DNA, 357 bp, Zea mays
  unsure (1)..(357): unsure at all n locations
  Clone ID: MRT4577_143423C.1
caggaaccggaccgganaacccgggccgacccacgatgaaataccacgcgnccgcggacgcgaggggggcgggaacgcgagcggccgcccccgaaaaaaaacccaacgcagaagaggcaaaacccgcgccaagccgtccctgaactgtacacaaactagcagtaagcaaacaagccaagaggcacccaggagcaggcactaaggcgaaacaaccatccctagcaaacaagctacaacagaaggataaaccaacacaacgactaaaactgccataaaccaagagacaagacacgcagaagacgaaggcgaaaaccaccgggnccaaaaagggggaacccaacagccagccaacgaagc

SEQ ID NO: 47606 - DNA, 948 bp, Zea mays
  Clone ID: MRT4577_143424C.1
ggggcgagaagataaaagcagcggcagtgggcagaggcgagagggcactcgactcctccagcgtccaacgccatccatcccgacctcgcaacgcaagcaaagaaagcccaggcaggcgtgtgcacggcgcggcggggcaaccaagggtgggtgaacccgcagagaggggcagctagcttccttccttcccaggcgcgcgggagaggttagccgccgtataagtagacagccagccagccatgtcgtcggtgtcgtcgtcgctgtccaacttcctgctctgctgcttctacccgtcatccgccggccaccaccgcggcggcgcctactactacagcagccacccgacgagcgccagcaccctgcactaccacgagggcaccttcgccgggcgcagggccatgggccggagcagcaggccgctgtcgctgcagacggtggagctgaaggtgcgcatgtgctgctcgggctgcgagcgcgtggtgaagcacgcggtgacgaggctgcgcggggtggactccgtggaggtggacgtggagatggagaaggtgacggtgacggggtacgtggaccgccaccgggtgctcaaggaggtccggcgcgcggggaagaaggcggagttctggcccaacccggacctgccgatgcacttcacctgcgccaaggactacttccacgacgaggagtcgtaccgccgcacctacaactactaccgccacggctacaacggcgacaagcacggacagctccacgagccccaccgcggcgccgaccccgtcagcaacatgttcaacgacgacgacgtcaacgcctgctccgtcatgtgatctcagtcgcgctctcgtcgtcgacaggcggtgtgtgtgtgtgtgtgtgtatgtgctcgtcagctcgtgcgcgtgtaacagaaccgtaccaaatggatggatgagtagtagcaatgcaatcgac

SEQ ID NO: 47607 - DNA, 341 bp, Zea mays
  Clone ID: MRT4577_143425C.1
tttcttttttggggttatttttaacacacttttggtttatactacttgttcatttgcgaaccacaaacccgggttttacatacaaaaaaggggtccaacaattaagaccttacagttaaactagtgcccaaccctaaaaccccttaacaagatggggggcctttgtttggcgggaggcattacattacctaaaacccccccctctgatttaagacccattttttgacttttttttcctaaaactgctcggggggggttagaaaaagcctggagctgattatttttgtgagaacacatttttcccttgcatgagcagttccccttctggacatgcaacactg

SEQ ID NO: 47608 - DNA, 207 bp, Zea mays
  Clone ID: MRT4577_143426C.1
cggacgctgggcacgtgccaaattatggacattgcgggataatcagtcctttgcttgccaatgtgtgccgtaacgaattggattggtggatggaggagaaaattaaccagtacttttgcccatccaagcatgattcaatttggaaggaggtaggtgatgatgggtgccacaatcccgcttggcctgagttcgtcccatcagctggga

SEQ ID NO: 47609 - DNA, 145 bp, Zea mays
  Clone ID: MRT4577_143427C.1
gcgctcacgcgttcgctctcctattcggacatcaccatgctccatcggatcgtcacgtgtatcgtgctatccgttggcactctcgtagacaccttgctagcctagatgaaccggatgcaaccggacagggacaccgtcggcgaac

SEQ ID NO: 47610 - DNA, 338 bp, Zea mays
  Clone ID: MRT4577_143428C.1
cagatgaccaggcaaggaaaagaaaacaaagggtgaaaacaatgcaaaaaaactggaagaaacttcaaatcaaagaggagcacggactttggccgaaacagtgggcaaccgaacaacaacaaggggggattgccaacacaagggcaagactaggaattgccatcggcaatgcgggggcgggggcgcaaaaccagcgctgttgtactatcaggggagggggaagaataaacagagcacacgggggggggaaacggggcctacggagagcttggcgcacaccaagtggaggtttgtggcccacatgtagcactttcaaaccagagaagaaccccaccctc

SEQ ID NO: 47611 - DNA, 396 bp, Zea mays
  Clone ID: MRT4577_143429C.1
gtatccacctgattgattgctgattgctgaactcgacacccggagggcaatgactagcgaactcgctctcctgcatgtccgatgaagagtactcttccaagcaggcggacgatgacccttccacacagcagcggtgcatggagcgcttttgtgctatgtggcgtgtctggtctatcggtggcggcaccacgaggcacaacacatggtgataccccactcaaccagacgcagctaagcgaagcgccagcgcgcaggaatactgcggcgcggagctttaacgccgcacaggtcatgcgccactgcgtcgagaacctgaagcaccactgcagcccggttgggacgcgatactgctcgccacagagccaggcgctgcagcagcagtcctatcaccagatc

SEQ ID NO: 47612 - DNA, 2077 bp, Zea mays
  Clone ID: MRT4577_14342C.1
ccggcattgctttcctcgaggccggccgggagtttctgtagtctcggctgcgagcctgacccagacagacacacaccagagggagagggagacggagagaagggcgagcggcactagcaagcatggcggcggccgtcctagcgcccaagccgcctccttcgctgcctaccagggcctttccttcctcatccccctcgcggtttgcccctgccttcatctccccgcgtcatcccctgagaagattgctcctccgccccattccgtgcgcctcatcgccgtcttccgtcttgatgccgaacccggacctcgagactgagcctgcccacgatggagatggagatggagatgaggcgccgccggagtccaggccccgccgcatcgcccttttcgtcgagccgtctcccttcgcctacgtctccggctacaagaaccgcttccagaacttcatcaagtacctacgggagatgggcgacgaggtgattgtggtcaccacgcacgagggcgtgcctcaggaattccacggagccaagctaattggctcatggagcttcccttgcccctggtatcaaaaggttccgctgtcgctggccctcagtcctcgaatcatcgcagaagttgctagattcaagcctgacattattcacgcctcttcacctgggataatggtatttggcgcgcttatcatagcaaagttgctctgcgtccctctggtaatgtcataccacacccacgttccaatttatatacccagatatactttcagctggcttgtcaagcccatgtggctaataataaaattcttgcaccgagctgcagacctcacactggtaccatctgttgctatcggcagggatcttcaagctgctcgtgttacagcagccaataaaatacgcctttggaacaagggtgttgactcagaaagcttccatcctcgtttccgcaacatggaaatgcgttcaaggctaacgaatggtgaaccagaaaagccacttgtattttatgttggacgcttaggagttgagaaaagcttggattttcttaagagagtcatggaccgacttccaggagcaaggattgcatttattggagacggaccattcagagctgagctcgagcagatgttctcaggtatgccggtggtgttcacgggcacgttgcaaggggaggagctatcacaggcctatgccagtggggatgtgtttgtgatgccttccgagtcagagacactggggtttgtggtgctggaggccatgtcatcaggagttccggtagtcggggctcgcgccggaggaatacctgatatcatacctgaggatcaggaggggaggaccagctttttgtacacaccaggggatgtggatgactgtgttggcaagatcaagcggctcctgtcgagcgaggaactgagggaggccatggggagagctgccaggaaggagatggagaagtttgactggcgagcggcgacgaggaagatccgcaacgagcagtacagtgctgcaatctggttctggcgcaagaagagggcacaggtgctgcggcccctccaatgggtgctgcggctgctgaggcggacaatgccaggagctgccgatgccgcagcgaagcaatcctaggagaggggggctactatggttgatggtcctcttttttcccattccttgtattatctccgttttcgaatatttgtcgtccgctagttcatttttaactaaacagcgacaaataaaaaagaacgacgagagtataaaatgggctaaggaggccatggcagatgattggatatgtttcaggattagaggggaggaaggtcaagcttcaacattccaattcactgaagaatatataatgtacgtttaggactgttaggttgtaaatcgtcaaagtgtctatgtaatgcttcttcttggcatgctacactatatagtactaatattgatcctttaacaaaaaaaaaaaaaaaaaaataaaaaaaaaaaaaataaaaaaaataaaaaaaaaaaaaaaaaaaaaatacaaaaaaaatattaacattaaaaaactataaaaatataaaaaatagggggggcccctttta

SEQ ID NO: 47613 - DNA, 332 bp, Zea mays
  Clone ID: MRT4577_143430C.1
tttggtcgtaggtaccgattaatgaggtgacatgccatcgcgtgtgactcattattaacaataaaacaggtcccctcttatgatcggttggaggtaggaacgctgcttgggcttgtttacgcaagtaggtgggggggggggagttgatgtacttgttgtagggcgcctgggttaggtgcgccgggctggtggactggtacaacctgtggccgtgtctgtgggtcgctgggctgaccccaccttgctggctgtttggtagctttttttgccgcttgggcggggcttgcctgttggctcctgcccggtggctggctggcaggaaccggtgtggg

SEQ ID NO: 47614 - DNA, 1313 bp, Zea mays
  Clone ID: MRT4577_143431C.1
cattgggaccctcgctccagcgaggcatacagccgccgccgtttcttcattcttccttgcagcgccgacgctccatcttccgctccctcccttgctcgcgctcggcacgtaggcgacggtggcagcgctcagcctcgggctctcagcgacggcgtcagcggcttcccctctcgccagtcgcctcgtcctccgcacaccggccggtggccctgccaaagaggcaacggagagggtttccagaacagagtatacagagggcaaggctgttatgagcaacaaggaggagaaagaatgccaaatgaccaaagaagagaagaggcggaagaagagggagaaacataaggacatgggtcagagcggcgattatgagggtaaggctgttatgagcaacaaggaggagaaagactgccaagtaaccgaagaagagaagaaacggaagaaggggaagaagcataaggacaagggtcagggcagcaattctgatagctcatgtgccaggaaccatagcattgagatggagcaagctgatgtgtcagccaagatggctgaagactcctgcttggagcatgcagaggctgttacgagcaaaagctctgcgaagaaacacaggaagaaaaagaggaaagataaagaggttgaaactattggccagaagcagatactcgatgctgatgaaaatgttgggtcagaagatacgaagaggaacagcagagaaagggaacatgataggaagtcaaagaagcacaaacgaaagcatcaggatgacgagactgcctcaaatggttcttctggtaatcaaattgttttaggggaagataagaggacggaaaaagagtatttagttaccttggatttggaagaggacaataaatctgatatgtcaaagattgggaagaagacagatagcaagaagaagaggagaaaagagagaaatgatggtgttgacctaagacaaaatacactagttggagagggcaagaatggtaagaataacaaagagaaaaaaatgtgtgaggatgagaatggtggcggtgaaagagagaaagaaaacatgggaaagcagaaggataagtgtagacgagtgagcttcactgatcatgtggaggtgtttaatataggtggtagtgatgatgtagagggtgatgggagtggtgaaactgaacttgtgcatggacgacggtttagccctgaggaagatgcaaagctaatggaagcgatattgaaatatgcagagttgaagcaattaggagagaaagggttacagatgattggggaaagtaataagcatccagagaccaggggttgttgggctg

SEQ ID NO: 47615 - DNA, 208 bp, Zea mays
  Clone ID: MRT4577_143432C.1
gcttctctctcggaagaagggggccgagatcatccgtcggattgccttcaacaggggggaacccaaccagagcaacggggggtagcccgcccacctggaggttcacatgcaaaaggacccagaaaacaggaccaggaggagcgcgcatggcacactcggccgcaccgagagcggctatcagcaccaccgccgcattgaccacgccagc

SEQ ID NO: 47616 - DNA, 778 bp, Zea mays
  Clone ID: MRT4577_143433C.1
gttggaagcaaatagagatagagatagatagatagatagagacagagagactatattgcaacagaaggaaacaagggtacaaaaaaataggcacgacaaataaaaatgagtaaccagctgctagtgttcccaaaactatgcacatatatctgaccgtagaatgatagaaacaactatctacgttaagaacataattttgaaggcgtcatgcatttctactatcttcttggcctgtcaattgctcacccttagataaaggaacaatgcagcaattctcgtaggtcttgacgtgatgcatttccaatatcttcttggcctgtcaattgcccaccctcagatacaggaatggtgcagcaattctcataggtctttccagaccttgtagtcagtatttgagctgttgggatttattggtgtatcctgacatcctaagaaaaaggttggtcgcacatccatattgatcaaggcatgtgcagtggatcttgcactagcaacaatagcgacctcgtcagcagcaatcatggcttcgccatatccttcatcttttatgccagcattttccaacctgaattttgtctttgcgccccagatgacgaatgtttcattgcaagtgtgatgacgatggttgccacgtaaaccacctggttggatctgtccaacatgaagtagtaaacagaccagtgctccacctggaaggccagcgtcacgggcggcggcgacggggtccagtagccacccgcgcccgtcgcgggcgatgggggtggggtagagctccgca

SEQ ID NO: 47617 - DNA, 198 bp, Zea mays
  Clone ID: MRT4577_143434C.1
ccaccttcttgaggggggcattttaatcacagtgtcgtaaaggcccgaaaaaaccatacatacatgtgccttccctaacccgatagtcaaaaagaagggtctcccaaacgcaagaccttctgccaaaaagatacttttactgggaacaatcccttcactggggtgcggctcgatccacgcaattatccatctatggag

SEQ ID NO: 47618 - DNA, 437 bp, Zea mays
  Clone ID: MRT4577_143435C.1
gaaatatggactgttagctacttagctttatgccctggaatcacctccgcatggaaccacttagcccaccgctaaccaacaaaatggaccacattctttcctgccttagagaatggacctgtatcaatccttatctaaaccatatatggcttctccttcctagaacatattctcccaaacacaccaaggataccaccttaggatgagccaccacccgtctcatacgtgcaaccgctcacgcgagcacgcctcctaagctcctcctcctctctcgacacacgcattgcgccccgttactcatcatcatcatcaacatcatcatcatccatcatcatcatcatcatcatcatcatcatcggaaccatgatgcgaatccaccacttgcaacttcttgcctcttccgctactctttctttccttttatcatggaccttatc

SEQ ID NO: 47619 - DNA, 522 bp, Zea mays
  Clone ID: MRT4577_143436C.1
acaaaaccaccctttggatatattttattaagcggggtaaaaaaggaaacaacccagcattatatacaggggcggggggcatattcgctacccttatgggaacaggaggtagccttcatttttcccatagcactgggccaccgggggggatttcaccggttttgaaagcataaacctttggacgggattggttctgactaaaaactggggtggtgccttgggggctcatttggtcagggtcaggggggacccttgaacaatcatgcaggttgggcactcaaaggaccaggggggagggacaggccagcgccattggggttacctatcatgggaaagagggacgaaaatgggacaggccggcaaaaataaaaacaaccgaagacaggggaaatcccagtctgttctggggaaggagccaacgtacttgcagggggcctcgtaacaaaaaagctgccccgatcacaatggagcacagcagcagaaggggccccttgggggggggggacgaaccatcctgggggg

SEQ ID NO: 47620 - DNA, 845 bp, Zea mays
  unsure (1)..(845): unsure at all n locations
  Clone ID: MRT4577_143437C.1
gggaccctcgaggccggccgggccgggtcttttctatagtggttgtttgttgttttatataaaataagaaggcccttacaataaactaaaccaacctaggaggaactaggtacattgcaaaaagaggactttagctaatggggggtgcacgcccatatctcccaccaactgagctaggctcaaatcctgtttttgtaacatataagattgatttagtagagtgctgatgaggtctggcatctactacattgtaatggtatctgaatggaaccaaagcattttaaagcatgaatccatatagttactttagatgatatagttgacttaataacttataatctgtagctatggtacattctcaactagcttctttccaagacatttagaatggtaaagtggtatacagattttatagggtatctgttaatgaaaatctgcagttgtgagtgcatcacaactgtgtatatatagcatatgttgctctttgccaaataccagggaaagtggaaacatctcaaaatttagtgataattaagactcgaaccttcctaaggagttaactcatttcacattcaaacaagataccatagagaaggaaaaacagatgtacttgtctggacaaaagtccatgcaaaaatgaagaaacatctatgttctcctaatctattgacttgtgcagacaaaatcatctcatacaagaggtgatgattgaagactaatgaattgcttctgcattctaaaaaggataaggtacccagnccttcatcggtttcatgtgcgcaggctgcatccatgtctgcatcagcagactccgtcgcacctgaagatgcctacccagaagctac

SEQ ID NO: 47621 - DNA, 529 bp, Zea mays
  Clone ID: MRT4577_143438C.1
ccgctatgacagcggcacgacgatcttctcgacggcagggcagtatttaccaggaggagtactcgattgcatgctatcggtaacaactgctaaggcctaacgatcctggtggtcgacgcctactcctggtcgcttagaagaagggagcttcaatctcctacagcacctcccgctccgccgagaagagttcaagatcgactcccacctggcgtgcgctgtggcaggggatcatgtaccaacaccaacatgctgataaacaccgcgacgcctgcacgcccatgcgctactctgctcgtcctacgagggagtcccatacccgtatagcatcttgatcagttcctctgccacaccaagcagggatacacccaaaagggtggcctactgcccttaacacgtctccttcctaaaaaaaaaatgagacaagcaccactgtttacaattctacatgacctacccatctgtcagctacggtaggtggaatgtcggcgctgttggagccaacaactagcccgcgcattacatgctcaag

SEQ ID NO: 47622 - DNA, 177 bp, Zea mays
  Clone ID: MRT4577_143439C.1
gcgaggtgaagacgcgtcagttgccagcagctaactgcatggggggccggccaggttcggcggcccagggctagacaccgagtgatgttggcctgctcgtacgtatgagcagtgcggagcgtcaccggatccaccatggggtttagcgagatctgtcagatgatgaccgccggaacc

SEQ ID NO: 47623 - DNA, 317 bp, Zea mays
  Clone ID: MRT4577_14343C.1
tcctcgcttccggggaaggcaggccaaatcggggggttaattcgagataaggctagattcaggcaacagaccgatagcgaacaggtaccgcgagggagctcgggttctcgttgggctgacctttgggtggagagcgagggagcgcagactagagccatcgagcagtctctctgtgacatgcattgcaaagcactgcagatacggcgtagatcagattgtattgcgacaaaaccgggagggaaagcacggaggggaggacatagatgttcaagaacattacatgcttcggacatagacggagtttgtccggcggatat

SEQ ID NO: 47624 - DNA, 548 bp, Zea mays
  unsure (1)..(548): unsure at all n locations
  Clone ID: MRT4577_143440C.1
gtatgttctccgctcactcccccattccactctcatccatctctcaagctacacacatataaaaaaaaaagagtagagaaggaccgccgttagagcacttgatgcatgcgtacgtcgatccggcggaccgatctgcttttgcttgtgtgcttggtgagaaggtccctgttggagaagcagggcacgtgcagagacacgccggagcacggccgccgccgatctaccgacctcccacacctgccttgtggtgtgggggtggaggtcnnnnnncgnagcgagagctgncgntgntgnttngatgctgntngctcctcctgcncgtgctccccttctccaccacggccttctcaccaccctcctcccccggcggcggcggcggcggaccgcccttgccgcgatcaataatgaaaccaaaagccgacagtgtttgagcaggaaacacaaaaggcggatatcccactgntagcacttctgcgttgatcatggtcatctggaacaaaataatacttggggactttacagcgagtgcagcatgcttaagctagttc

SEQ ID NO: 47625 - DNA, 819 bp, Zea mays
  Clone ID: MRT4577_143441C.1
ccggccgggcttgtcgcctgctttcagctgcagaaggtgcgtgtacttcatcgggctgtgctggagcgcacctgccaagctgtggtggccactgatgagttccggcgaaagcgaaggcccaatggccatactgacatcttcttgcggtggaatcgagtcgtcatcaggttgacagatggactgcacgacatctgagctcccacactctttcctgtactccaggatgatgctgctgagctggttctgctgctggaagtgatcaggaagagtctgcatagcacagaagagatggcatggcggtcgatgaaccacggcgcgatctcgccccggacctcctccggcgtcttggacagcctcctcgtcaccttgttcatcatcacccacgtgctgcagggagatgacagaaaacctttgccttcatcatcatctgctgcatgcatctaacgttcggtcggtaggaccaggctagcttgccttgttgcgcggacgaagacgtcgccggagttgcggccacggatgagccagtcccgccgcatgccgttcttccccgacgagcccacccaggtgtcgatgtccagcacctctcccctgaaacaacgggacagaccgagataagcctgtctgtcatgaatcatgagcgcagacgatgatgcatgcatgcaatgggtccgtgccgtgaatttaatttaccagatcgggtactggtcgacttggacgtgcatcctggagacaacccagatgaggttgttcctgatcatgccgtgcgtggcgccgaagccgtcgccgagcagccctgacatccagacgtggttcagcgcg

SEQ ID NO: 47626 - DNA, 276 bp, Zea mays
  Clone ID: MRT4577_143442C.1
gagtaaggttgcagaaaatattgaaaatttcttgcatgagtgtcagtcgcaaagggctgataagataatcgattcgttcatagttccacgttcagtgacgttgggatacaacttgctcttcactgaacgtgtggtcattcgtcctctatatatcaaggatccgctggtcaactgttttgggagattcaccatgggcggtggggccattatcgactatctccaggtggccagctagccgctgcgcccgattaagtgggatggggaaagagatgagga

SEQ ID NO: 47627 - DNA, 816 bp, Zea mays
  Clone ID: MRT4577_143443C.1
gcatcatgcgctaggacggtgaattttccgcctgctgactagagcactggtgctcctctcatccccaccccgattcggcgtcgcacgccgcgccggatctatagccagtagccagtgcgatgataacccatcacccatccctgctccgcctccgcgcacccctccccgccggcctccgccacgggacttcacacgccttgcttttcaccgcggccgcctactctcctcctccgccgcccctccgcctgctacctctgcgcgtcgccgctggaggagcctcaccggtaggtcctgatggaggcaatcgcgcgacgcctcccccgctcggagccgcggcgctcgacttcgcgcggagcaacttcctcccgctagctctaattggtgggatgactttgggactcctggatccaactcttggttgccttgctcacaaatattccctgtcaaaatacagcacttttgggatattcattatatcagcaatggctttctcttgcatagggctgactctgcgcactaaggagcttggcgcagcgttacaagcttggcctgctggactctttggactaggctcaattctgttgttcacaccttttcttgcacaatttcttgtgcaaattcagctcttccctcgtgaatttattactgggttggctatgttttgttgcatgccaacaacattatcgagtggagtcacactaacacagcttgctggcggcaactacgcacttgctcttgcgatgacagtcatatccaatctactggggcattatgtttgtacctttgactcttggcaagtacattggcactggaagc

SEQ ID NO: 47628 - DNA, 915 bp, Zea mays
  Clone ID: MRT4577_143444C.1
atggatgatcaggtttacatgcagcctgaagacaacagaaagcggagactatctgaagacactcttttatgtgacagtgaagaatctttaaccaaaagaaaactcgatttttctcgacctgttggtggtgacaccggcacagctacacttactccttacccaactattaccggaaacgaggattttgttccatcgtcttctgacgttgcacaagtaggagatggtgatgatgatgtgaccaatttttgcttgacaagacgagagccaccaacttgtgacgttgcacaagtaggagatggtgatgatgatgtgaccaatttttgcttgacaagacgagagccaccaaccttgacaagacgagagccaccaacttcaccttttattgattcttgtgtcgacacaacagagttagctgaggattattcaagcttcccctgcgccctacccagtgctgttaactttagtgacattgattcttttcttgatggttgcgatcaattgttcgaaaaccaacctttgaatataatttctcctattgagatacaccctagcatggacaccgttgcaacactagaagatcttttcctcaagacagccaggcaagcgttggcaaatgttcttgatgggctaaatgcccatactttgagagatcctgttcgttgctccagtctgtgcctcgcttcgtcttgtcttacgggacaatttgctagcattgcaagaattaaagctatgctggacaaattaattaccatttctgaacagctgcagaggacgtattctaactttgaagtggcaaaaaacaagacgaagaaagcactattgaaatcaagcaggcgcttgacgttcaaagggaagctcttcgcactgttgatgaggaattggcctctgctgaaaagcagcgggcagaaaccatga

SEQ ID NO: 47629 - DNA, 502 bp, Zea mays
  Clone ID: MRT4577_143445C.1
ggacataagtggttccacactttaaatttttgccgttgctgctaacagtacaaaggcacacccgcaagtggcgctcgacggttgacgctacccaaacaacaaggctacgccgcagcaaaaatgcacaggccacaataacagtcacgaccgcatacaaaacttccggatggagtgacaaggcaggaattggaaaagcagattcaggattaacaacagggtgcatcattaatttttggctgctgacttggcaaccttggcaaccggaaaaaccttcttctccacactcttgatgactccaacagcaactgcctgccccatgtcatgggcagcagacctaccaaggggaggatactgcgataatgtctccaccaccatagggcttggggggaatcattttcaccataccagaatagcccctcttcaagaactaggactctttttcaagctccttgccataacacctgtcgatcttggggattaggtcataaaacttgacagcaat

SEQ ID NO: 47630 - DNA, 266 bp, Zea mays
  Clone ID: MRT4577_143446C.1
ctatcttgatttccttgattttaggactatcagggcggcatatactacttcaaataggacttaaaaatcgccactgctggctaatggggaccgggaacagacgaaacactcaaccaacaatgcgtggagggtctgatctaaactcacctatcacgcgattctccatggacagggggcaagaacagcttgatctgcccctacatgagagggaccagcccgatgtcaactgcgctcgcgcccaccagcccaaggtcggcgagcacccc

SEQ ID NO: 47631 - DNA, 364 bp, Zea mays
  Clone ID: MRT4577_143447C.1
tcgacctatatttatatatttttatattttatttattattttattatatttaaatgggtatttatatgaaaaagagaagaaatataaatggggcttaaaaaaaatataatagttaaagtaagaaaggagacagaaattaaaaggtatacataagaacacgaaaaggggggaaaaaaataaaaatgattttatttattatagaaaaaaattatacatagttgcagaagaaaacgaatatagaataggaatatgcttttatggaagtgtacaaaagcacaaaaataattgttgctaaatataaaaattttatttatataaaggaagtatatttcaaagagtctgaaagggattttatattgggaaa

SEQ ID NO: 47632 - DNA, 615 bp, Zea mays
  unsure (1)..(615): unsure at all n locations
  Clone ID: MRT4577_143448C.1
cgaggcaatgataacaagacgtttgagtcgaatcgttctgaaggatctttgatgaatcgttggtccgttatacaacatgatgtcaatgttttttgtggttgtctgtccaggattgaggctcgaaaccatagtggttggtcagttgatgacaagattgcaaatgcttgtgcaatgttcaaggccgaagacccgaaggagaggaagttctcatacttgcattgctggaagattctgaaggacaagcccaagtggatggataggcgcaaagaaattggcaatgcaaagaagacaagttgtaagaaacagaagacattggctacttctcctacaccatttgccgctccagatggccctgttgctgntataaatcaggatggtgaacaagcagcaagacctgagggtaagaagaaagagaaacagaagctacgacaacgttcgaccatagaagcagtggactatttaatggaaaagaagaaagaagctgatcacgataaagagttgaagaaagaagtgaggtgcaacaaagcctttgctctccaggaggaaaggatcaaattagagaaagaaaagtttgagttccaaagacaaatggaagaggagagaattcttggtttg

SEQ ID NO: 47633 - DNA, 389 bp, Zea mays
  Clone ID: MRT4577_143449C.1
ctaaaaacaccaaaaatggctacagaagagatcattgtgaacaacttcgaagatcagacaacagatgaaactgatgcaagtagcgaaaaggcgctgttgaaaacgctcaaatcctatttcaaactgtgctctcaagcggaggataagcgaatcttcttgaaagacccgatgtttggcacgatgctcttgaccttcatctcggattcccgtcctttggtggtccactatgttgcaaagatcctaatcatattgacggagaaaagcgaaaacgcaaagcttgtctataaaatcgatggaatgttggatgctattggccatgcttgcaataaatacttaccgccacgtgttctgcacaacctactcattgcccaatctcgacttaatgtgtt

SEQ ID NO: 47634 - DNA, 705 bp, Zea mays
  Clone ID: MRT4577_14344C.1
ggcacacaggggaaggggcggttatgacactgggaggccaaaccatggcacaaacgcggagaggtggaagggtggcagccatcttgaataccagccggtcggatcccaaaacaaagctggaggcgacttccagctgagtcagggcatggaagatcgaaccgaggggcctcctgcatctggacaagcgttcggggagcgtggccacagcagggggctacgcccagcaggccgctttgtccggcgaaacactgcctctacgtctaccactaattctcaccaacatgaataatcttccgcggctgccacatccgctgagctgcaggaaaaaactcgccttcgtggtggcgtttcacaacatatttggatgcacttgggtgggcggttggtgtccgtcgtcaacgacgagtctacggtggtgagcattaggatcatgtaacggtattagtctttgccccaaagggcacaccctggcccctcacgtgtcacgtgtgactagattttttccagaggaacatccacccttgtttgggatgcaacgttggaacgtgtgctaacagagttgtgtttgagaactgggtttaaatgttgttagcctgtgttgctgatgggaactgagagtgttggtttttgcccaactttcatggcatgtctttgtttgattgttggctctgttgttcatggcaatcgctttggatcctcgcgacc

SEQ ID NO: 47635 - DNA, 544 bp, Zea mays
  unsure (1)..(544): unsure at all n locations
  Clone ID: MRT4577_143450C.1
ggttccgcctggcgagtacctggtccgcgattcccgggcggggaaagtgtacaggggcagtggctcccggaaatccaagcgggtgaggttgccgtcaagaaaggtggtctcactgaatcagaggcagggacataaaaggcagttgcgtgcggctgcagggtgggttcagcatgcggtccgtatctccggacacccgatagacatggttccagtgtgctttgactatctgcacaggcggcaaaggcgaagccttgtcctggacgtgacaaactacatgacccaacggccagtccttgtacaagtctacctctacgtgcaaggaacgtacataggccacatgcgacgactcaatattgactctcattgngcttcctttatacagtgcaaaatggcaggagcaattagtggatcgcatagaaacataacaacaaagagaactaaagaagcaagataaaacatacacaccaaaaacaatcaaaggcacagacaacagtacttagctaaaacagaacaacagtgcagacgggacgagtatgagggagac

SEQ ID NO: 47636 - DNA, 269 bp, Zea mays
  Clone ID: MRT4577_143451C.1
gataacttaattagtgttcatgaatatgtctagccttactttagtggttctaaattgaaaagctttctagctggtcataatatcaccattactgatggtattgacaaaactagtgcaactttgcaatttagaaagttagcagattgcgattttctcaagagaaactttaagcagatgtctaatgttttgtgggtggctcctgaggactaggcgagtttatggtcacaacttcattatgtttcgtgtaataatctggaaatgcaagaagc

SEQ ID NO: 47637 - DNA, 3382 bp, Zea mays
  Clone ID: MRT4577_143452C.1
ccggccgggacaaattaagaacatgagaatctgcggttatagaggcctctgtttgccacactggatgatgcaaaatgattcttgttgtgcagataaactgataaagcaaaccagcatatgtcagttgctttctctaacagatatgacactagaaggatttccaaacttgaagtatatacgaggacttttggtgtttggttcgctcaagtccctgaacctgctcagaatggctaatttagaggagctgtggactacgacaaatggttctaaaattcatgggtgctgttttcctgtcctgtctgagctatgtataacaggctgcccaaaactgaatgtgaagccctacttcccaccttcattgattacgttggcttttgaagacagcaatgagcagctgttatccccaagcagtttttcccatcggcttcctctatctgccgatgagccatcgtcgtcctgcaacgtgcattcagattcagcagcccttcatctcaagaaactacggctgacaggctcatcatcgagttgggggtacctgcggcactgcactgaactggagatcttgcacattgagtgctgcaatgacatggcagaattgcttgagatccttcaaaacctaacatcacatccatgtagcagttgtctataatgggttgtcaggcccttggcaagctgcctgactggcttggcgaactgcgctctttacgatggctgagcatcatggcgaccccattaattgacaacctcccagagtcgacaaaccaacttacgttcctgtctctctgcagaatagtcgctgggacaatctgaagcagctgcctgacgtgatgcagcacctcacctcccttgagagactcaacctgatatgctgcggtgaactgactgtgctgccgaaaatgactgataatgtgttgagcactttgggggaaatgactgataactcattgttcagatatgcgttaagcaatggttgttactattatgtgtaagacctgacagaaacaatcatcggcttgagcctcgagcggctcccccggtccactcacactccttcatcgggctcggcccgcgcggtcgtgagttcgtgactgcggaggaagtagcgcaggcgaaaaggcggcagcagtggacggcggcgaaccctagcctagctccgcgagtgcgttggcggtttgattcgatggccgtggcgtcgcggctcgcggtcacgcgtgtgtcgccggcggacggcgcgcgccccgcggcggcggcggggaggaggagtgggctcgcggtggttcggctcccgccgaccgacagcagggggagaaggaggaggcgcggcggggccgtcgcggccagcccccccacggaggaggtcgtgcagatgacggagccgctcaccaaggaggacctcgtcgcctacctcttctccgggtgcaagcccaaggagaattggagaattgggacggagcacgtaacgatcgctatcgagctggacaattgcctccctttaaaaaatgatcattttcgtgtgataaatatgtggattgtgcataagttggccccgtgtattttatgtaccgaaataataagtatattgactgcgaccggaatggtcattttcgggattttactggagggcaagtcgccgttaggctcccgccgagctgcatactcttaataacttggagaaccatctaaccacaatttttcctgaggttaggctatcggggaggaaagaggtgtgagatttcttgggcttggcatggaggcgaaatgggccctgactgacataccaataatgccaaagggaagatacgaaataatgaggaattacatgcctaaagttggtactcttggccttgatatgatgttccggacatgtactgtgcaggttaatcttgacttcagttcagaacaggatatgataaggaaatttcgcgctggcctcgctttgcagcctattgcaactgcaatatttgccaattctccgttcaaagaaggaaaaccaaatggatttctcagcttaaggagccatatctggacagatactgataataatcgtgcagggatgctcccttttgtctttgacgactcatttgggtttgagcaatatgtggactatgcattagaagtccccatgtattttgtgtaccgaaataaaaagtatattgactgcaccggaatgtcgtttcgggattttatgcaaggaaagcttccacaggctcctggggagttgcctactcttaacgattgggagaaccatctaacaacaatttttcctgaggttaggctaaagaggtaccttgagatgagaggtgctgatggtggcccatggaggagattgtgtgcgttgcctgcattttgggttgggctgctgtacgacgaggaatcgttacaaagcattttagacatgacttttgattggacaaaggaggaaagagagatgctaagacggaaggtaccatcgactggtttgaagacgccgtttcgtgatggatatgtaagagatttagctgaggaagttctaaaactggccaagaatggactggaaagaagagggtacaaggaggttggtttccttagagaggtcgacgaagtagtgagaacaggagtgacgcctgcggagaggctgctgaacctgtacgagaccaagtggcaacgcaacgtcgaccatgttttcgagcatttgttatactgattactgaggatgacgccgccgaacgacgttggactgagcttgtagatgtaccccgtaccctaatacagagtctcgtcttgattcattcaatgcctgagccggaagggctcagtttcaggcacacaggagcagagctttcggttggttgttgacggggggcaaccgctgcacagcccggtgctgtgcctacaaataacttcgcctggaactggaacggatcactcatcactgtgctttgctttgacttgatctgcctgtctctccagggagatggaacaaactactgtttgtaccggcccgttttgttttgcagctatgaaaatcgccgtattgaaaataagtccgtcttctgcacgatggaactgtttgtttttcctttttttttggattgttgggacttgggatgtttgttcggggttaacatggcaaaagtgatctcatcgacgataaataaatgaactgatggtttgatccggaaaaaaaaaaaccaaaaaaaaaaaaaaaaaatggtcatatttctaggagtgccattttcagaatgacatcacttattcatttggagtactcatctgagcactgagttgctaccttaagattacctatttcatgttctttaaaaacagcttaccaatttcatggaattactctttgtacatagtacacaacagcttcaacacggatacgatatatagttgtttc

SEQ ID NO: 47638 - DNA, 608 bp, Zea mays
  Clone ID: MRT4577_143453C.1
gaactgcgctctttacgatggctgagcatcatggcgaccccattaattgacaacctcccagagtcgacaaaccaaacttacgtccctgtctctctacagattaggcgctgggacaatctgaagcagctgcctgacgtgatgcagcacctcacctcccttgagagactcaacctgatatgctgtggtgaactgactgtgctgccgaaaatgactgataatgtgttgagcactttgggggaaatgactgataactcattgttcagatatgcgttaagcaatggttgttactattttgtgtaagacctgacagaaacaatcatcggcttgtggggaagatacaaaataatgaggaattacatgcctaaagttggtactcttggccttgatatgatgttcctgacatgtactgtgcagatggtcatatttctaggagtgccattttcagaatgacatcacttattcatttggagtactcatctgagcactgagttgctaccttaagattacctatttcatgttctttaaaaacagcttaccaatttcatggaattactctttgtacatagtacacaacagcttcaacacggatacgatatatagttgtttcc

SEQ ID NO: 47639 - DNA, 1367 bp, Zea mays
  Clone ID: MRT4577_143454C.1
aaaaaaacaaaaaaaaaaaaaagcgtgcagggtattttcccttttgtctttgacgagtcatttgggtttgagcaatatgtggactatgcattagaagtccccatgtattttgtgtaccgaaataaaaagtatattgactgcaccggaatgtcgtttcgggtctatttctgcccttgatgtccttttactcatgtagttctgtattgtgaatagcggaggattttagattttttttgcaccctccatttacatgacacagtgtctggttttcattaataaaactcattccatttgatttgtatttattttgcaggattttatgcaaggaaagcttccacaggctcctggggagttgcctactcttaacgattgggagaaccatctaacaacaatttttcctgaggtttacccttttatctgtttacacgatggcatatctgtcgttgctaggtatcgcaataactcttgtcttgtgcattctgcttgcaggttaggctaaagaggtaccttgagatgagaggtgctgatggtggcccatggaggagattgtgtgcgttgcctgcattttgggttgggctgctgtacgacgaggaatcgttacaaagcattttagacatgacttttgattggacaaaggaggaaagagagatgctaagacggaaggtaccatcgactggtttgaagacgccgtttcgtgatggatatgtaagagatttcgctgagtccgctctaaagctggcccagaatggactggaaagaagagggtacaaggaggttggtttccttagagaggtcgacgaagtagtgagaacaggcaaatgctattcagcaccctctcatcttcattcgtttggtggactttctgtttctgaagatcctaattaccttcaacttgctacaggagtgacgcctgcggagaggctgctgaacctgtacgagaccaagtggcaacgcaacgtcgaccatgttttcgagcatttgttatactgattactgaggatgacgccgccgaacgacgttggactgagcttgtagatgtaccccgtaccctaatacagagtctcgtcttgattcattcaatgcctgagccggaagggctcagtttcaggcacacaggagcagagcttttggttggttgttgacgggggcaaccgctgcacagcccggtgctgtgcctacaaataacttcgcctggaactggaacggatcactcatcactgtgctttgcttttgacttgatatgcctgtctctccagggagatggaacaaactactgtttgtaccggcccattttgttttgcagctatgaaaatcgccgtattgaaaataagtccgtcttctacaaaaaaaaaaaaaaaaaagcggcc

SEQ ID NO: 47640 - DNA, 235 bp, Zea mays
  Clone ID: MRT4577_143455C.1
ggcctagctcgctacggcatccatcatttgaacgaggagcaggatacaaacaccgtgccgccatacacaggtacgcaagaacgccactaacatggctaggctgcccttgagagcataggtggttctgtgcctcctgtttgcgacgcgggtcgcagggagccatcatcgtcaaggggatggtgtcattcgacaattggatcatctgcaaggtactggacaacttgaacaagaacct

SEQ ID NO: 47641 - DNA, 752 bp, Zea mays
  Clone ID: MRT4577_143456C.1
cgacacgcaggtagtataatatgggtaaccgtaacagtcaccagcatgccaaactttccactatataagctacctgataaaacacaaacatataactactgaaaaatcaaagcacccctttccgtaagcaaacctgtaatgcgagggctaatctcctacttccataccagcataacaagcaattctcaacaccactgacatacgagaggataaaatcattgaaaaaataaaaacatatgtactgacaggtatgcaagataaactcaagatgtactaacaggtatgcaagataaactcaagatgtactgacaggtatgcgcaaaaccattgagtgaacatgtgctactagtagccacaagtaactctccatttcctcaacaaatgtaatactccatcatgactggcttcacttgttccctctgaagtacatgtacactttctgcatgcatcaagacagagatagcaaatgctatgagcgttgtattattaggacacttcaagaaagtcgtttgaaacatggagcaatgtaaaaacaaaaaaaagcagacaacattacaccagacataatggggttttgaacttgtttgggacacattcaccttaggaaaaaaacgattctgtcatcgagcagctctacacgtggatctattctgagattcaccatggaaccgtttcgcttacacaacaactacagatccatgcaagggcaatttgattggaatggcctattttacccttgggataggccccat

SEQ ID NO: 47642 - DNA, 605 bp, Zea mays
  Clone ID: MRT4577_143457C.1
ggccgcttttttttttttttttttctttttttttttttttttttttttttttttttttttttttttttttttttttttttttttttttttttttttttttttgggtttggggggccaaaagcaattcatctttcaaacgaaaagaccggattccctcaaaaaccccggggaaggggctgggtttatccaaaattcaggaaaaaccacgggtaccaccagaaatacaatcccccccagacccaaaaaacggagaaggcttaaaagggcctcattggaaaagcgaggggttaccccgctttgggggcaatacccccccaaaaaggctcacacagagacatggcccctaaccaggccccgactacaaaaaggggcctagcctaacccccaaaacccaaaaggggggggccccgggccttgggcccggaaaccacccccatggggggcacggtcttggggggcccgggcccggggtaagggacggcgccccggaaaaccctcccgaaaaaaaacttgagcccccccggggtccccccggaaaagagccccgaaaagggcttaacgccacccctcctaaccaacccccggatccccggtttggggaagcc

SEQ ID NO: 47643 - DNA, 412 bp, Zea mays
  Clone ID: MRT4577_143458C.1
tccttctcttttataattccccacccatggcatcgaataggggcgaaatttttggatagattccacacgctagacgaaaaaccctaacactggggtacgcacaacaaatttgccgaattaccaacaccaattgtgcacatggagaatacacaacatttaaactacactgctactactttcataacaaacggacctccctttgtatacagatgatatccagcacacaatacatggacaattatggacctgaagttgttgaatcggatctcacgtcgcatagagctcttttcaaagaacaaaggccactctaaaactttccatgagcgcaaattttggaggagccatactacccttcacagcctgaatgtcagcagacaacaattttctaggttccttgaagagaaagacttgg

SEQ ID NO: 47644 - DNA, 357 bp, Zea mays
  Clone ID: MRT4577_143459C.1
ggagcattggccgatattttcctgagaagcacggagctaatgaaggatgctcgagggattgcatcactggtataaacacatatatgctttttcagctgaatcgagatgaaactgaattttgcgatacacaagaccacctaatacatgtctctatgaaactgtgccggcgcaataatgcagagtggtatcgttcctcctctggttccattcgctcagacgttcgcggcagtcatcactgcagccctcacaggaaccctctactacgtcgccacaactccgaaaggtgacccagatgtcctcctgacgacgacagtcctgattcgcgtgactatgttaatttcttttggtttttttctt

SEQ ID NO: 47645 - DNA, 565 bp, Zea mays
  Clone ID: MRT4577_14345C.1
gaaccgaggggcctcctgcatctggacaagcgttcggggagcgtggccacagcagggggctacgcccagcaggccgctttgtccggcgaaacactgcctctacgtctaccactaattctcaccaacatgaataatcttccgcggctgccacatccgctgagctgcaggaaaaaactcgccttcgtggtggcgtttcacaacatgtaggtaaaatgtgccttcgtggtctgtacagggagcattcccaaatctcagccccctccatcgctaacatgttttggggtttgcagatttggatgcacttgggtgggcggttggtgtccgtcgtcaacgacgagtctacggtggtgagcattaggatcatgtaacggtattagtttttgccccaaagggcaccccctggcccctcacgtgtcacgtgtgactagattttttccagaggaacatccccccttgtttgggatgcaacgttggaacgtgtgctaacagagttgtgtttgagaactgggtttaaatgttgttagcctgtgttgctgatgggaacggaaagtgttggtttttgccc

SEQ ID NO: 47646 - DNA, 902 bp, Zea mays
  Clone ID: MRT4577_143460C.1
ccccggtgagccttgacgccgaggacatccgcaacgagaaggtgaaggtgctgaggtccatgaggcagctgaagctcgaggacgtggtggtgggccagtacaagggccactccaagggcggcaagtcgtacccgggctacgccgacgaccccaccgtgcccaagggcagcgtcacgcccaccttcgccgccgccgcgctcttcatcgacaacgcgcgctgggacggtgtgccgttcctgatgaaggcaggcaaggcgctgcacacacgacgcgcggagatccgggtgcagttccggcgcgtgccgggaaacctgtaccggcggaacatcggcgcggacctggacaaggcgaccaacgagctggtgctccgggtgcagcccgacgaggccatctacctcaaggtcaacaacaaggtgcccgggctgggcatgcgcctcgaccgcagcaacctcaacctgctctactccgagcgctaccgccgcgagatccccgacgcgtacgagcgccttctgctggacgccatggagggcgagcgccgcctcttcatccggagcgatgagctcgacgccgcctgggccatcttcacgcccgcgctcagggagctggaggacaggaaagtggcgccggagctctacccgtacggcagcaggggccccgtcggcgcgcactacctcgccgccaactacaacgtcaggtggggagacatcaacagcgatgacgacggcgccttctagctctagatagagacatgcatccatcgattcgtgacgctacgccttattgtggaagggacacgcagttgtatccaatccaatcaaatttaacaaaaatggcaagggggcttggcacagaataagaactagagattcatcatgaatacaataggacatattgtagtagcc

SEQ ID NO: 47647 - DNA, 420 bp, Zea mays
  Clone ID: MRT4577_143461C.1
ctaacaaagcacacaacacacgtttgaacacggacctacaaggcccatttctacatggcactttacaagaggggtgggcactaccaaccagggcaagagcaaccagcggtcgggtcaggggaagtccgattgagagacctccaccagtaaggcctccaccacaaatgttatgcaaacatgcttccgtgaaaagaagagcggtggcatcaacaacgtcggggttgttcaattccaaaaaatacaaattaaccacaccccccaaaaacaaaggcccctagtgccaggtgccaaagtggagcccgaaaaaccggggcccagaaacccggaacacacaaaccaggggggaataagggcgagggatatactgccccaaggagcaccgcaaaaactcccttccctcgggagcactgtggtagggca

SEQ ID NO: 47648 - DNA, 346 bp, Zea mays
  Clone ID: MRT4577_143462C.1
ggcactcatgacagtcataacttcacaacaccagcattgcctctgcacacaggtccacatggtaagaggaagcgcagtgcctcgcgggattaggtgtgacgacatattgcgcatctaatgcaacaacagacacgcagactacaaaacaacagtgtcatactaccatccaatgcgcgatgggttcataggatcacgacacgtctctttccaccaggaccaggacatcgtcgtcgtgaccacagccctctccggcgccaatatgatcgacatcaactgaaaacagcaagcagagatatctcatgtgcgactcctcagcagacgccacgtagactgatcagacattcaa

SEQ ID NO: 47649 - DNA, 437 bp, Zea mays
  unsure (1)..(437): unsure at all n locations
  Clone ID: MRT4577_143463C.1
acatatacaactccatccagttggccgtcatatatagcaggtctccttacatatacatgcntacacagatagtncaagccaatagctttccttgttggaaacatcacatttccatgccgtnngcctgagatttcatacgcgctagtctagtcactaggttaattngaaaaccataacaatcttggatacagttattagaatcccgttctctactncgctctgtcttcgccctgttcangccngctgcctctttttgcttgcttgtggctctttttcctccncagcnttggttcctggggtctcgttttcccccgcttctttttggtccnctgtctctggcgcgggcccttctcttgcttggcgccctcctggcccctcgttctggttgcctgtccctgtttgcgtgcgcccgttgcttccccttccctttttggggc

SEQ ID NO: 47650 - DNA, 142 bp, Zea mays
  Clone ID: MRT4577_143464C.1
ccaagacaccttttgctccacacgaacccacggtgcagctctagcaggcgtgcccatccgacgcaccccatatgcacggatgaaccccatgactgcgccgcggaacaataaccactgcccccacgtaccaacgcccacccta

SEQ ID NO: 47651 - DNA, 170 bp, Zea mays
  Clone ID: MRT4577_143465C.1
gcgtcgtttaaccgggcgacgatatcagtgttggagccatacgagaagctacagtcgagacctggattgacgcagcgtttgtcgacctgctcgccttcaggcagaccgagaccgcgttgtgcggcacctgcgctccgcactttcaccagacgccctacaaggatctgtca

SEQ ID NO: 47652 - DNA, 803 bp, Zea mays
  unsure (1)..(803): unsure at all n locations
  Clone ID: MRT4577_143466C.1
gccnggccgggcctgggttatccgaaagcctagcgccccatgctccatatctagaacgacgtcaatgctttcctgtgtgtcagacaccgctgagtgaatggaagagagactcgaggagggagatggcctctctatcggcatcgatatcgatacgacagactctataagtgcagctcggtggtagctcgtacctggactcgacatacattgcgcaacgaacgccattaagcagcttcgaacccttgaaggccccttcagcgactgcgatcgtgtcgtccttcaaggaggcaagaaacatcctgccctgaagcccatcaacaccggcttagatgcctgggcttcttactccctcctcaggtaagtgatgcaggagtctagagtgatattcacgttgagccattgacggcgatttgtgatcctagggacaatccaatgatagctcgtcaacaccttcgtgctcagaacgaggtagcagctcaagagatcgctgctatgggtcctatagagacgcgtgacatagttgttcgttaacttggaacaccgatcaagaatgctgtgggcacatcccctgtctacttcaatgactgacaaacgcgggccacgagggatgctgcgtggattgctggccttaatgtgtctacgtatcatcaacgagacaacagctgcagctatcgcctatggtcttgacagaaatgctaccagtgtctcatgagaagaatgccctcatctttgatcttggaggtggaccttntgatgtnctcctcctcccattgaggcaggaatctttgaggtcaagccacagc

SEQ ID NO: 47653 - DNA, 131 bp, Zea mays
  Clone ID: MRT4577_143467C.1
ccccattccgcgacccctgtagccccactctccctgggataagtgcccccattccgcgacccctgtcgggataagatagcctggaaaggaggagccaatccgcgcccgcattgcaaaagactgcctgaagc

SEQ ID NO: 47654 - DNA, 240 bp, Zea mays
  unsure (1)..(240): unsure at all n locations
  Clone ID: MRT4577_143468C.1
gcgtatcgactcctataggcgattgggtactcgagcggccgggaaagagacagcaaagaaatccaagacctctattcacatgccgaccgangacggttccgacggcggtggcggcgccggagccggagccggggagaagaagagctcgcaggcgcccgcaaagcctggagcgtgcggcgccgcaaagttcctcgcggggttgccgnnnngngnnnncttctcttccggttccgccccctc

SEQ ID NO: 47655 - DNA, 153 bp, Zea mays
  Clone ID: MRT4577_143469C.1
atggcgcaccggacagtccggtgcgccaccggtgcgccaacggtgcgccaccggtgcgccaacggaaaaacactgccgtggaccagcctggccccacctggcagagggtgcaccggacagtccggtgcacaccggacagtccggtgcccctaa

SEQ ID NO: 47656 - DNA, 623 bp, Zea mays
  unsure (1)..(623): unsure at all n locations
  Clone ID: MRT4577_14346C.1
cccctcttcgagttttttttttttttttttttttttttttttttttttttttttttttttttttttttttttttttttttaaaacaataagcggaggcctaacaggggagccttaaatttttttggttttttttttaacgaaacaactacaatcgcttttgccttggaaacagaaaccgggggcaatgacccctgccgggacgggagcaggaaaaatcctggtccttgttcaacaaatgggaggggggggacagcaaaaatgaatatccccaggtgccttttttcattagccttccaaaagaaaagaaaaaaaaaagaacaagaagagaccttttttgttgtcacccttacaagttacagccagggttgccttcactcacggccacgggttgaagtaccctgacccaccggggttgggggacaccagcaccatcacacttgttttggccgccagccacaccaaagccgtatttggggagctgtttggcacgggggatgcctccttatcacccgccgcagcgctagtagggacagggaccctgtctgggccttttggnccaatggctgcctggtcacctttttttgacgagcttcctgtttcggatgaactatgccttggaact

SEQ ID NO: 47657 - DNA, 968 bp, Zea mays
  Clone ID: MRT4577_143470C.1
gtgccggaggagggcaccgacgactacaggcgtgccgaagaagaagaggcacggcggcggcaccgtgcgcgtacggtgcgcggcgacggcgcccatgggggagaagacggagtaccgggacggcccgctggagcgcgcgttcatggggctgttcgcgcgcaagatggagaagtacgcggcgaagaagccggcggcgcaggcgaaggaggagagggcggtgtgggagtgggactacgagagcttcgtggacgtgtcgcggcgggtgatgctggggcgcacgcgcgcgcagcagcagcaggcggtgcgcgaggtgctgctgtccatgctgccccccggcgcgccggcgcagttccggcggctgttcccgccgacgcggtgggcctgcgagttcaacgcggcgctgaccgtgcccttcttccgctggctcgtcggcccctcggaggtggtggaggtggaggtcggcggcgtccggcagcgcagcggggtgcgcatcgagaagtgccggtacctggagagcagcggctgcgtggggatgtgcgtcaacatgtgcaaggtccccacgcaggacttcttcaccaacgagttcgggctccccctcaccatgaacccaaatttcgaagacatgagctgcgagatgatatacggccaggtgccgcctccgttggaagaggacccggcgtcgaagcaagcttgctacccgagcctctgttccatgtcgacgccatctgccccggcctgtccgaagcttcagtaggtccatacatgcatgtgcagagtttgccggccggacttgggatggaaaaagtatcattagtatttttttatacagaaatgtagcttgtaaactattagtaaagttacatacaatttgttctgagccaggacagagcactctgtaataaagaatacttttctcaaacccttggtatgagagggtacaatagcgcaagcgtgggcggacgagtggg

SEQ ID NO: 47658 - DNA, 284 bp, Zea mays
  Clone ID: MRT4577_143471C.1
gtgaaatcggcatcgccagcaacgcctgactgtaaaactacacgggcacggcagaggatggcacgtaatactccagccgggtaagggactgcgcaggcccctacttacaggctgactcctgggacgcactggctcgcatgggctgtatctgaggggacactggtgaggaggacggcgaggtccaaaaagaatgtttgaagtacatactgacagacttcgctagagcattgctgtaggggcgcgtaccagccataaatcttgcattcattaagtgctcacaacat

SEQ ID NO: 47659 - DNA, 309 bp, Zea mays
  Clone ID: MRT4577_143472C.1
caggaactctccctcgaggccggccgggcccttactgtgacaggatctgttctataggatcgtaccgttgcatccttgattaataaggaggcaagcacttaagcctggttgatgagtcaatgacctgtgggccagagcgtgattaacggccaggatcagctctgtgctttgtctggtgctgtagaggatcgttcctggtcaggcttgcctggctggggtggcccacaggttgtctgacaggtctttttaaaaaaaaaaaaaaaaaaaaaaaaaaaaataaggccaaaaaaaaaaaaaattcagaacaaa

SEQ ID NO: 47660 - DNA, 492 bp, Zea mays
  Clone ID: MRT4577_143473C.1
tccaccgcggtggcggccgcccttttttttttttttgacgctgacactactcacgcttaaattccaaaggatgcacatgcgatcttttacactacactatgcggtgtcacacgaagacagtggaagcactgcagagagggcttggatcttaaggccacaagagggaaattctgtgcttataaatttaaggttgatccgaatagtactctctattaatgcattgtagaaagcaccacaaaaatgtgaatctagctcagaagtatgcgtgaacatgtatagaatagcaccctgacatatactacatctgcttactacgtatttttcttttaaagttcgaatggaatggttgagccctttgttctcttgagctaaccagtaatgtggatttcttttgactctgatttatcgttgacatcttgcacatctcctccatagcaacgactccttgcaccttgaatgcgcttcctatgaagctttatgtgcaccagatga

SEQ ID NO: 47661 - DNA, 288 bp, Zea mays
  Clone ID: MRT4577_143474C.1
tgcagaagagaggagcacgtcttgtttcctttcagacgatttcatctttgccactcgtgcttataaagaccgcagttcgggccttgccatacatacacttaagcaacagatatacaggacaggagtatcaaggaggaagacgaggaaacgttgatggccggcggtgaagagctgaagctgctggggtggtggacgcccggggagccccccggaccagcagcgacacaacgttgctggcaagcagctcgaggatggccgcacccttgcgcactacaacatccagaagga

SEQ ID NO: 47662 - DNA, 293 bp, Zea mays
  Clone ID: MRT4577_143475C.1
ggatatattaccacacattttttgaataattgtacaggggaatttaataccggaagcccccgagctgtcaccaagtggggcgaggaaaaaagaccctgatacggtgacccatgcgaaccggggcacacgccaattcagctctacagattgtccagggaggtcgttaaccaaaagcccaacgccacggagtcccaaagcttttcccaggaaggagagggcgaaccaacaaataaaaggcagggccaagaaaaaaacaacaagggcgagctcccaaatctagcaaacccaagggg

SEQ ID NO: 47663 - DNA, 914 bp, Zea mays
  unsure (1)..(914): unsure at all n locations
  Clone ID: MRT4577_143476C.1
aaacctaaaattccattatatcattatttttacttcacagccctactaaatctcacccacaacatcatattgtttcattttttggcaggcttattggtcaaaacaacatcaagccccctccatacaacacaaaatagtcctaactagggtttggttcgatgtcaaccaaagatgggacgggatcaaccctaggctaactttgtcccttattttttgaaaaatgacctcatccaccatttttgaaaaattttttttgatccccttttttttttttttttttaccaattttttttcaagttagattgatctcatcccattcctcttcatccttcttcataccttcatccaaacactaccacaagccacgctcgacttatcttgggtcatggatcataaatagcacaaatccatgcccgttcagttttttaacctagctagaattgtactcctcagcgcggcacatgttcgcgaacgatccaccagccatcagaccgccatcgtcgtcaacattgacactcgcactggcaagctcccatgcctcgagcttggacaccttcactgcagctgacccattgttgaacacgtataggtggctgctgctgcctgctgcaacgtgctcggggtacactctagccgtcatgcacgtcctcccgccgccgccgaagctctccacgatcgagtgatcgatcaatgttcttaacgatatgctcatgtctttctcgatgtccacgtcgacgaaccctccatgcgttggcttgtacacgcctgccttcgtggaggacctgctgaggtccgtgcacatgagaacagcgtactcgtgcaggatcctgaaaaccctgaagaaccggcggtgtgctcgcgcatgtctccggaggccatcaccagcagcccgaacgggccgactccgnctgtca

SEQ ID NO: 47664 - DNA, 258 bp, Zea mays
  Clone ID: MRT4577_143477C.1
ttttggttttttgttaaagagaacggtcttaattaacataacacgtgggggatataagcgcttcaccaatactaaaagctggtaaatattcagggctaaatgactgaaagggtatttacagcctgaaattaccatgggacgactgttccagtgcgagtgtgcataggtctatgtcctaaagcatgcaccttgtgctatagaattacaagtgtcgtctgctgtgagcagagctgtggcccactaaaacttatggatctg

SEQ ID NO: 47665 - DNA, 407 bp, Zea mays
  unsure (1)..(407): unsure at all n locations
  Clone ID: MRT4577_143478C.1
cccgtcctcctcccaggcgcgaccgcgcgagacgcctgcccgagtgtaaccgtcgccgtcgagcccccatccgcattgcgtttttcgggcgcgttcaggcgggacgcatgatgcgctgctagcgtgttcaggccttcaaaacgcagcacacaccggtccgttgcttgccggcccaccgctggcggcgcgcggatcctctcccaccgcgtatctttccgtttggatccccgagtcggagctcgatcagatcggtgcctctgcctgcgtgcgtctgctctggtctactatatatgaccacgggcgcgggctgacgctccatcgcccacacgtcgaagcangtgattggcgatccttgtccgtcctcgctcgctagctgatcgacatggccgacgacgacccaagaacga

SEQ ID NO: 47666 - DNA, 286 bp, Zea mays
  Clone ID: MRT4577_143479C.1
ataaatccccggaatttagtgccctgacaagaatctgtgagtcggactcgaaaatacattacccatgatttttgataagcaataaagctaaccggatacatggcacgcccaaaagaaaataaaacacgtctcacaatactctcgtccgggtccgggcgcgtatcagttatcacgcggtggcgatgggcgcggcgtctgccttcatggccttgaaccgtggctccttggcctcgaacttgtggcgcacgtacaggttcatgtagtcctcgaacacgaaccttgggta

SEQ ID NO: 47667 - DNA, 626 bp, Zea mays
  unsure (1)..(626): unsure at all n locations
  Clone ID: MRT4577_14347C.1
gacaacggtccgcgacaaagtgacaatattggttgtgaagcagataaatattatagtatacatcacagtacaaacctaagatgagtctgccatgatgactatcaccgttacagtttagttgtagagcaaacttacacgataagacacatagtctccatttaacataagatagagcttactgatatgggtggtagaaacatatacgaaattggatggcctttatcagtttggtcctctgtacacaaaagcagactcgttctagcaacgtggacgacctttgcaagcctcggtgcaacttacgatataatataactgccatggtcaccagattatatagaatcagattagagtatgcgaagttggctagtcctgatcttagggtggcgagggcagtctgtccttgtcatgttgccgtgcagagttcatgatcctgtgatcaagctcgttggtgtagtccttaaggagtagaggtactgcccagcgttgttccaaaaacaaagctgccacgaaggattcaaaacacaaaatccaatcctttatgtatcgttaatacactgaatntacaagacatattggagctgaagccttgagaaagtgtacaatttgattcttgaaatctcaccttt

SEQ ID NO: 47668 - DNA, 734 bp, Zea mays
  unsure (1)..(734): unsure at all n locations
  Clone ID: MRT4577_143480C.1
cggtattcctccccgagctcgccccagccccctgtatcccccatggccgaagcttcttctagctccagctcggctccctctcccatcgtcttcttccccgctggcaagctctgcgaacgccaccatgcatctctggtgctcgcctcctcccagctcggactgcgtccccctctgctcgttccccatggcgctcgccctccagctgcggtgcgccctgctcgtgttctgggttggtccggccgtcgcaggcttcgtccagtgtcgttccctggcccgccgcggtgtccgtttccctgcgcgtgcgcccgggttcctgctctctgattgccgcgcgcccagctcgcctagtctgcacgccgagctccttcatcacggcttcctgcttcctcgtcagcgcgtctctttctctggtctcttgtgtcgcgctcgcccagatcgtcgccgttgagtttcctgtcacgctccctcagctcacttgccgcgctcgcctcggctcctagttcgacgcgcaattttggagctctgcgcgaacggcgcatggtctggtgctctgcggcaagcgcttcgtgtgggtggtggtggtttccaaaccacatgatgcgctggctcgatgcccagaccccggcctccgtcgtgctcgtctgcctcagcagcaagaactgctgctcggagcagcggcagcgacgccctnctttntgtcgtgctcaccagatcgggccctatgtcgtcgatct

SEQ ID NO: 47669 - DNA, 241 bp, Zea mays
  Clone ID: MRT4577_143481C.1
ctcatcgataaggtcagcagaagctatgataagtttttcttcggagatgctgctagagagaaatgtgattactttctgggggggattttgctgattggtatattgaagctagcaaaacacggctttaccactcgagtgacaagatcgctgctgctacagcccagagtgttctggtgtatgtgtttgaaaacatactgaagttattgcatcccttcatgccattcgtcactgaagaaattat

SEQ ID NO: 47670 - DNA, 304 bp, Zea mays
  Clone ID: MRT4577_143482C.1
ggaagcccgggggaatttttaaccccctcaatacaaaagtttagttccataaagcggaaaaaggccaccaaaaaaaagggggggggcaggtaaagaaaaaaattactgggggaaacaactttgggggtttaaaccccaggggggcccggagctgggtaatttttatgaaccaaggggatttgggggccggagaatttccttaaccctttttttttttttccttctccctcaaagggccctttttggggcccccgttttaaacatgttttgagggaattaaattggcaaaaacaccccttttggg

SEQ ID NO: 47671 - DNA, 1340 bp, Zea mays
  Clone ID: MRT4577_143483C.1
ggctctttcgctgcggagatggcagcggcggcggggccgtacaaagagatgctggaagtggtgaacgcgtgcgcggcccggatccggtggcgccttcgtccagcttccaagcgccgcctcctcaacgatatcctgtttctctgcactgggttgcggcctgtggtactggtcgactatggtggcacaatgcctcagctacaagaaaatctttgtggcctgctatatcatgcccggcaggaaacaagcatattgaatccactccgcgtgatgattattagagatatgctttacttgatccatgttaaaggacttgcggaacatgcatcaccaaacgcaaggtcgcagcaagggctagctttcgtggacctagagaaaagatgttgcaatctgcttacaaccatagaagagaatgacactgtgctggagcttgtatccatacaagatcaattcgcagccaaatttcctgtagatctctctgatgttcgacctggaataacaaagcaaatgtcaggaaatccacagagtactgttgttgcagagtgcactgacaatcacgttgaggacaggaccctattggtcgttgatctgagtagcttcctcgagaacacccagattgccttgccttctctgaatgggtggcttttaggttatccggtaacatatttgttccgcaatgcaagttctgaggcagcgatacagaacctctcaaggcagtctctgcatatctaccgagtatatgtgtgcggaagttatcggtcagctggcgaacgaacagaagaggaactgatgagtttttcagttccatgtggcgcgagcacgaagcgtgatgaagaagtatgggctagatcgttcatagctcgcatgaatgagaagctcaggcgatgcagccaagtctgggcatccataaggctagaagtcgaggttttccagagccagtcgcaggtcattgtgttgtagttcaggtcagtatggctgttattacgggctgatggcataaaccccttatacaaagcgacgtgtctcagaagtatcactgccctgggcacaaattgctgcagccatcgggtacagaaataaacgagctggatacatgcaagtcatggatgcagaggccggaggtatatcccttatatattttataaaattaactaaaaaagcccatccatgttgctcgaattattgagcagtttatgtccctataaattcaaattcgttttagtcgtttctgttgactttggataacctaatccttgacgccgacatgtcttttatgtttacatcaaaatccccaagggtgaaaaaaaaaaaaaaaaaaaaaaaaaggataaaaaaaaaaaaaa

SEQ ID NO: 47672 - DNA, 543 bp, Zea mays
  unsure (1)..(543): unsure at all n locations
  Clone ID: MRT4577_143484C.1
ggcccatgccgcgagggaagctgcttgcgccgnactgctctcgccgcaggctttcatatttcattcctccgctcggctcctcccggaggccggggcctgcgcggctaaaaaggccatacatcgacagagcgtgctctgttgtgttccgtcctcctcggtaatgggggggggcttacacaacgcgcacagggtgttcgacggaacgcccacgcggagcttgccggcatggacatcgatcatctccggctgcgcgcgtgaaggcaggcacgcggacggcatgcgcgcgttcgcggagatgctggacgaatgcggcgcgaccgcgccgaacgccttcgtgctcgcaggcgtcctccggtgctgcgcggggctcggcgacgtcnagtctggcaggcgcatccacgggtggatcctgcggagcggcgtgtgtccggacgtggtgctctgcantgcagtcctcgacatgtaccccaagtgcggcgaccatgggccccctnggagggccttcggggcgttggcccccaaggaccccccatcctggaacat

SEQ ID NO: 47673 - DNA, 657 bp, Zea mays
  Clone ID: MRT4577_143485C.1
gcaatgcaagttctgaggcagcgatacagaacctctcaaggcagtctctgcatatctaccgagtatatgtgtgcggaagttatcggtcagctggcgaacgaagagaagaggaactgatgagtttttcagttccatgtggcgcgagcacgaagcgtgatgaagaagtatgggctagatcgttcatagctcgcatgaatgagaagctcaggcgatgcagccaagtctgggcatccataaggctagaagtcgaggttttccagagccagtcgcaggtcattgtgttgtagttgagatcagtatggctgttattacgggctgatggcataaactccttatacaaagcgacgtgtctcagaagtatcactgccctgggccaaataaacgagttggatacaagtcatgcatgcagaggccggaggtcatatccattatatattttatatatttatctaaaaaagccattatattatgctcgaattattgagcagtttatgtcactataaattcaaattcgttttagtcgtttctgttgactttgtataacctaatccttgacgccgacatgtcttttatatttacatcaaaatcacaaaggatgaatgctcgagttacaatttgacaaaaaaaaaaaaaaaaaaaaaaaaaaaaacagaagaa

SEQ ID NO: 47674 - DNA, 712 bp, Zea mays
  Clone ID: MRT4577_143486C.1
ctcgaggccggccgggaccggtcttcagtgaatcccgcgccgacgcggagatatcctcaatgtctccgttcccctggcaaccatctccaccacactgccggcgcgctcgcagctagtatgtcggacgcgaagctaggcaccaccgtgtcaggctgccggagtcacctgatttgggtaaggacaaatcgcatcgattggtttcctaaacttctgcaaggagaacctgttctggggcggcgagggcgacggcgagggcggctgcgagggcgaggagatggtggtggtgccgcaggagaagatcctgcaccgcatcaactccaagatgagcctgcactggtaccagctcgggaaccagctctcgttccgctggaccaccggcgccggcggcggatgtcgtgggcgccacagagcaccgacgaacaactacactagcctttcataccaaggttgcaataacaaaaactcatctgctggttcgttctgacctccaagcatcctcctccttcgatttggtagtctgccctggaccctagtcgtttaaggagcaagaatcgtcctccttcccctttgaatggttgctagcttctcagaaacttccatgtatttcataccctatttggttagatctgctcatggtttatttgttgatgatctctcctatttgtatgtggatctgttcagttatagctaatacaattgaaagatttttgca

SEQ ID NO: 47675 - DNA, 119 bp, Zea mays
  Clone ID: MRT4577_143487C.1
cccacgcgtccgatcagagtgcgctatatgttctaactcgaaaaagcttccctatactctgcgcatgatccaagcccgaaagactgtttcaactacaatcttatgatcagacactccat

SEQ ID NO: 47676 - DNA, 988 bp, Zea mays
  Clone ID: MRT4577_143489C.1
ggccgcttttttttttttttttttaacaaataaaccatgagcagatctaaccaaatagggtatgaaatacatggaagtttctgagaagctagcaaccattcaaaggggaaggaggacgattcttgctccttaaacgactagggtccagggcagactaccaaatcgaaggaggaggatgcttggaggtcagaacgaaccagcagatgagttttggtgatagcaaccttgggatgaaaggctagtgtagttgttcgtcgatgctctatggcgcccacgacatccgccaccggcggctggtttctgctttgcgtacgtgccagagctctaggcagcaccgtgttgcagccgcggcgaaggtgtccccgccccaccgtgaccgtacagcggcgacacggggcctccgggcgttgatggcaccagcggtgcgcacgggctctggcggggaggtgtgccgccgaacctagggtgctcggcgccaccgcgcggcgacaggctgacctgctccatcgaccggaactgcagctccggcgggtagtcccggacgcacccgatcctgggcccggcgccagtggtccagcggaacgagagctggttcccgagctggtaccagtgcaggctcatcttggagttgatgcggtgcaggatcttctcctgcggcaccaccaccatctcctcgccctcgcagccgccctcgccgtcgccctcgccgccccagaacaggttctccttgcagaagtttaggaaaccaatcgatgcgatttgtccttacccaaattaggtgactccggcagcctggtgcggtggtgcctagcttcgcgtccgacatactagccgcgagcgcgccggcagtgtggtgagatggttgccaggggaacggagacagagaggatatctccgcgtcggcgcgggattcactggcgaccggtgtatagcggacgtctagagttcgccacaattagaggatgatcataataaaatagattgtagg

SEQ ID NO: 47677 - DNA, 725 bp, Zea mays
  Clone ID: MRT4577_14348C.1
ccggccggggacgtgcgtaccttctagtctcgtctcgtcccctctgcctcgcttccgccgctttccgacacgagaccgaacgtcacctcgagcgatgccgccggtggtcccgagatccggcaggatagttcgtcggacggcgatgatcggcgcagccaccgccgcctacctgctcttcaccgccgactacggacccgactacctggatcctgtacgaaccgtactcctttagttctttacctttactagtgttaaagatagaaaccccgatcctggtcggttgcgtgaatcacgcttataatcctaccaaacttgtaatttatgatgctatttaagatgaccacagttgcttttgcctggcaggctattcacgccgactaacatggtattagaacaaggattttttttcttgaccaatgtccaccgattcttcctactccaccaccttctcctccatctcctctctcctattgtcatccatggcgacctcttttgccccaattaccctccaccatgctgttactcttcgtctaaagaagaccaactatttgatttagcgtggccaactgctgcctcatcttcgtagcaatcaattgctgggatttcttgatggcacaatctcagcacccgccaagcagatcacatcttcatctactgatggcgtccaactggtgcttgtgaggtaaaggttagagatcatggctaggactaggatcatcatacct

SEQ ID NO: 47678 - DNA, 281 bp, Zea mays
  Clone ID: MRT4577_143490C.1
tttcgggcctggggaaatggttgccaccgccggcgggacagaatctcgggggagacctgatgtgctgtacggcggggccagaaatctaccaccaggtctccatgatccagctcggcaagctatctcggcgctcggaggctgcccagaacaatcgtcgttgatgagccgtccttaaacactgactccacggggcctttcctcgccggcgtctacagggccaacccgtgcattttcttacaccgtctgcctaaggtggaacgcctacctcctgtcagtactca

SEQ ID NO: 47679 - DNA, 264 bp, Zea mays
  Clone ID: MRT4577_143491C.1
ggagtgggacagcgactgcaccgaggtcggcatgaactcgtccctgaccgcaccgtccagctcatcccgtcatactcaacaacgcccccacgtgccgcctgcgcctcatactgccgccctacccgactgcgtcccctactacccgcgctcttcttcccgcggaacgccttaaaacccgccaggggcgccccagactaaatcatcagcccgatggtggcctccgtcacgcgcctcaaggagctggatatctactgccccttattc

SEQ ID NO: 47680 - DNA, 483 bp, Zea mays
  unsure (1)..(483): unsure at all n locations
  Clone ID: MRT4577_143492C.1
ccggccggnaactccccggcgtcgggcccccaacgttgggatcacggccgatggcccagacgttgacgagcacgcgcgtgcccgcggggacgtcgtacccggccaccgtcgtgtgctcgcgggccacccgcgggatcaggagcggcaccacggggtgcagccgcatggactccttgacgacggcgtccaggtacggcaggccatgaatgttgctttcgatgatcaaggggccagggccacccacgtggtcctgctccttggtgaccattaacacgatgctggtgttcacgggcaccttcgtcctggtgaagtccaccgtcctcggccaggtttccgtgcgacaggtgacaagataacgaaaagacgccttgaggccttggcggtggaccgggatctggaggatgaaccttgtgtgggcgttgccgtactggtcgatcctctagctctcgtggaggatgtgcccggtcatgtacgttgggtttt

SEQ ID NO: 47681 - DNA, 164 bp, Zea mays
  unsure (1)..(164): unsure at all n locations
  Clone ID: MRT4577_143493C.1
aaacacattcaatattacagnatcaaggttcagatattgtgtctgattcggtaatggcactgattgatacaggcatcagaaccacaccctgacaagtcaagaacagatatgcacatactggcaactcaatacaatactgtaatgaaattcagacaataacgctc

SEQ ID NO: 47682 - DNA, 1527 bp, Zea mays
  Clone ID: MRT4577_143494C.1
gaaaaaaaaaaaaaaaaaaagaacgttagtcgtcgtctgggaaaatccaaaccgctcgctcctcaccgaagacgccattagccatgagcagcttggcttatccgctcctccggctcccgtgccgctgctctatcgcgccggcgccggcgccggcgtctcagctccccgcaccggtgtgtctatctgcttcggcttccgcaaatgcagggggcgatctgacggcgcgggaaaagcgagcgcagcgtcgggaacggcgggagctgcgtgcgacggactggaaggaggaggtgcaggaccggctgatccacgagccagcgcggcggcggaagaagcctcctaagcgttcgtggagggaggagctcaacctcgacctcctcgccgagctggggccgcagtggtggctcgtgcgcgtctccatggcgcccggcaccgactacgtcgacctcctcaccaaggctatctcacggcgctactcggaagtccccttcaagatttacaatccatcaatccaagtaaagaggagattaaaaagtggtgcaatcagtgttaaatcgaagcctctgcatgccgggttggtctttctgcattgtaccttaaacaaggagcttcatgactttatcagagacacagagggttgttatggctttattggagctacagttggttcaatcaagaggcagattaaaaagccaaaacctattccagttgatgaagttgaatcaattattagagaagagaaggaggaacaagagagagttgacagagaatttgaagaaatggagaatatgggaaacattgagcctttcagtaaacccgttgaagaatctgaacttatgttaatgaataagatcaagaagcagtttaagaaatcgtcctcacagggtggcactagacacagtgctttttcgcctggtgcaactgttcatgttctctccgggccttttgcagacttcactggttccatcctggaagtgaatcgcaaaaacaagaaggccactgtacagttgtcactttttgggaaagagagttttgtggatcttgattttgatcaaattgaggcagttgaagtggacgacgatgatagtaaactatgaggaatcttgtgtttatgtatcacagtagccgataactttttatcaacaacccagatctccagctggggctgctggggctgagtgaatgaagcaggaacttcagtgggtgggcagtggaccgttgaagacccagctatcagcaagagatacagttagcacacctgcgcatgagctaccgtcaaaattaaccagtaagttctgactgagttcgccagcacgtgttctataaccttattccattgaaattgatttcccctcttcttctttcctgtttgtcgggggttactgaaatgcaagtttataaacaatgaggatgctgaagttagaaagctcgctgatttccactaggctgttcacattatttccctgtgctcgaatgcagaaagcagtcccttaggccattcattccaaaaaaaaaaaaaaaaaagcggcc

SEQ ID NO: 47683 - DNA, 171 bp, Zea mays
  Clone ID: MRT4577_143495C.1
tggagactctgctcatctcggaggagcgcaaccaccagctccaccacttcacgggtcacggaagaaggcgttagcacgtacgcctacagtaccacgacgcagtaacacatgacgtggcacactgaccagagacgttaccactaccggacatacaccgtacggacatacctg

SEQ ID NO: 47684 - DNA, 427 bp, Zea mays
  Clone ID: MRT4577_143496C.1
tggctctggacctttgggctgatttatgtgcttgccgctgcgttcataagagtagggcgggttcagctccacggaatactcttattcgtccatcgtcaaagtcccgttcacaaaaccgcaatgttataaatatcccataaggtcctcttccggcgaatcattatattcgggaaacgtcccaccctccccgcattgcggagcggtccgtactcacgccacacatcggcgttacagcaacccctagaagtatagcgaagagcccccaccacccctacccccgccgcatctcgatacgcgagtttcacaagcacggtaaccccggtatggccccgtagcagaaaaaaaaaaaatcgaaaaaaaaaaagggtggttgtctcagaggacttaagtccatgcatgtgcgtacgtgatgctacagtctcctcac

SEQ ID NO: 47685 - DNA, 1189 bp, Zea mays
  Clone ID: MRT4577_143497C.1
ctgggaaaaagtacgactcgctatccgtttttccttgccaactcgtggaagcttagaaattcggcgagaaatctgtagcacgcaaatgttgaattcttcacactaccacagctatatagacatcactactcgccagcaagacagagaagacagttggagggggtaattcggagcagctagtagacactagacagacagaaatggcttccgttctccaccacctcttcccgctcgtcgtcgtcctcctcctcgcggccgctgccgacgcggccaccttcaccgtgaccaacaactgcccgtacaccgtgtgggcggccgccgtgccgggcggcgggcagcagctggacaacgggcagacgtggagcatcgacgtgccggcgggcacgacgggcgggcgcgtgtgggcgcgcacgggctgctccttcgacggcagcggcaacgggcagtgccagacgggcgactgcggcggcgtgctgcagtgcgcgcagtacgggcaggcgcccaacacgctggccgagttcgggctcaacaagttcgacggcctcgacttcttcgacatctccctggtggacggcttcaacgtgcccatggacttcctgcccgccggcgacgcctccgggtgccccaagggcgggccgcgctgcgacgccgacgtcacgtcgcagtgccccgccgcgctgcaggcccccggcggctgcgacaacccctgcaccgtgttcaagacggaccagtactgctgcaccggctcggcggcgaacaactgcgggcctaccgactactccaagttcttcaaggggctctgcccggacgcctacagctatcccaaggacgacgccaccagcacctacacttgccccggcggcaccaactacaacgtcgtcttctgcccatgagctccatcgagctgctcaaacatacgtacctatatagttgatccaggagacacgtacgtgagaaacaaataaactaaactagcacacaaatgatgaaatgaataagttattatgaataacttgtgcaagaacacattacattattgttcttctagcttcaaggttgggaattgaattctgtgaaataatgatatgagatacgttgtgtaccataaaaaaaaaaaaaaaaaaaacccgcggccaaaaaaaaaaaaaaaaaaaaaaaaaaaaaaaaaaaaaaaaaaaaaaaagcccgg

SEQ ID NO: 47686 - DNA, 1444 bp, Zea mays
  Clone ID: MRT4577_143498C.1
ccggccgggtctttgtcctctccccaccgccagaaaggaaacggacccaacgcgatcgaagtccattgccgtcggcacgagctgccaggcgccagccacggcccacggccaatgcaattgcagttgcagttgcaattgcacggcacccatttccagagccgtcctcaattagctagtcaaatctcgctatcctttccccaccatccagatcttccctttcatggacgccgccgtctccaccctcaccgctctcgccatcttcgcgagcaccgtcgagcacgccgcctacaggagcgtgcaggggtatagggtggtcgggaggaaaggcggcgggtgggtccgttgggagaggtgggtggagcggcagttcgtcctctccctctccttcccacggtgcgtcgaggttgccctgcccgccgccgcgccgcggatactgccagcggggtggcgcagccggccggtgttccgcgagggacagaccgtcgacacttggcgttgcattgtggcattcgactccgtcgccgccgtcgctccgtcctccccgccgccgcccgtgctctcccccttcgtgaacccacagctgcagtatctgtctaatctgtacaatgacctgctgatggtgtttcggtttcgagaagagaaaacggtcccacaactcgttaattcaaagcaacccatccgttgtggtgaacaggggaaaacttctgatttgggtgatgcatcggagtccgattcggatggggattgtcaatctggcaaagaacttgcaccaccagttcagaagcatacaagagccaaccggaagcatatagatagcattactttagttgatatagctcagtacttccatcttccaatccgagatgcatcaaagacactcaagattggggtcagcatattgaagaggaaatgccgacagtatgggatacctcgttggcctcaccggaagatcaagtcacttgactctctcattcatgaccttgagttcgtgctagcaagagaggatgaggatgaggaggaggagaagcagctgcagaaggacaggctggctgctgcgataaacgccctcacaaaacggaagagcatgctggagagcgagaaggaaaccatacagcagaaaccggccatggacctgatggctgaaaccaagctattcagggaagatgttttcaagaggagatatagggccaaaagttcagtcatggatatggattagcatttctctttagctgataatacctggtgtaaaaagatatggctgatcgaacctgtttgtaaagagataatcgatccatgtgtaccgccagttatatggtagctggtagctgctctcgtcataaccttcattttgttctgatggtgtctgttaattgtactcttcttgggtgaactgaactgctggagaactgaacatagccatggttggatggtgctaaaaaaaaaa

SEQ ID NO: 47687 - DNA, 1468 bp, Zea mays
  unsure (1)..(1468): unsure at all n locations
  Clone ID: MRT4577_143499C.1
ctcatctctcctgccccgccaccccaccagcgatggccctgtgcgccgccgctgcctccacggccaccgcctccgcgtcggcccgtctatcggcctccaccgctcgcccgcggggcccctcctcgacgtcgctgccgtcgtccttcgtcggcgcgttcccgtgcgcggtcgctgtgaggacgaggaggaggcgcgcggcggcggcggcggcccgcgccaccgtcacggtgcgcgcggaggccaggaagagcgtgctgatcgtgaacaccaacggcggcgggcacgccgtcatcgggttctacttcgccaaggagctgctcgccgccgggcacgccgtcaccgtgctcaccgtcggcgacgaggcctccgacaagatgaagaaacccccgttctcccgcttctcggagctgacgagcgccggcgggaggacggtgtggggtgacccggcggacgtcggcgcggccgtgggaggcgcgtcgttcgacgtcgtcctcgacaacaacggcaaggacctcgacgccgtcaagccggtggcggactgggccaagacggccggcgtggggcagttcctgttcatcagcagcgcgggcatctataagccgacggaggagccgccgcacgtggagggggacgccgtgaaggagagcgccggccacgtgggcgtggagaagtacatcgcggagcagttcggcagctgctgggcgtcgttccggccgcagtacatgatcggctccggcaacaacaaggactgcgaggagtggttcttcgacaggatcgtgcggaaccggccggtgccgatcccggggaacgggatgcagctgaccaacgtggcgcacgtccgggacctgtccagcatgctgtcgctggccgtggagaagcccggcgcggcggccggcagggtcttcaactgcgtgtcggaccgcgccgtgacgctggccggcatggccaagctgtgcgcggcggccgccgactagaaagctctggatatcgtgctctacgacccccgccgccgtcggcgtcgacgccaagaaggccttcccgttccgcaacatgcatttctactcggagccccgggcggcgaaggcggcgctggggtggacgagcacgaccagcgtgcccgtcgacctcaaggagaggtacgccgagtacgcagccagcggccgcggccacaagtccatggccttcgacctcgacgacgtgatcctcgctgccatcggcaaggcgccggcgagcgtcgccgtatagtatagtataataacacccggcgtgcaccgacagcgccgcaccatcgtctatactctagactcccgtggcgtccggtttagagatttctcntcgtaaaaactacgtacgcccgacatgcacgacgtcgcaaacgaacgttacaaaatacgacaaacattttttgttttttcgctttggttttggtaccttgatgaagagaggaaaacatgtttgtccacaactg

SEQ ID NO: 47688 - DNA, 296 bp, Zea mays
  unsure (1)..(296): unsure at all n locations
  Clone ID: MRT4577_14349C.1
aatttcacagcggagtgaggatagcgataaacaggaaaaatgatgcaaggtgggtgaactaataaagggctgggaaagtttgatggtgggggagataaactaattataatattttatccatgaacgtcaccatcaatggttgtcaagtccaagttctttcattggtggtgttgctcatgggcgtgccaatggaaatctttattagctaaagaataagcatggttttcataggaacaactgtttgaactnttactgcatgtttttggacgtcttctattccagctgtgtcatggtaa

SEQ ID NO: 47689 - DNA, 932 bp, Zea mays
  Clone ID: MRT4577_1434C.1
cgcgtgcatgccccctccgggtcataggggggcaccggtaccaggccgcggccgggtggacgcggccatcttatacctggaagctcttttcatgtttagtgaaggtctatgacatgtctgatagtcaaatgaagctaaatgattttatttcaagccttgttcttgagaggatggtcaagattaatttgagtagggtgacttcataatggacgacgaggaagaagtggaaggaaagaaaaaggaacaaaagagtgatgaccagaagcgaagaatcggaactaataagataaggaaaagtgctatagaggagcaacggtaccaggacgcgtcaaggttgacaaagctatctgggaccacttttgtaattgccaactcttcactgattattttcctatatgttgctccagaataaatggatcatagtgcggtggtcatgggattgggatctgctccgtatttgcagggtgaagccttcgtgtctcctcgagggaaagtcactgacctttcttgggacgtggaccactgacggcccccgtcatcccccatgacggtgatcctagggtgaagccttcgtgtttcctcgagggaaatctaccagtgcgggattgatttagtcagcaccattggacacagggtttagttccattgcctggacccatcaatgaatcatggtgccaaggtcttgatggttcgacttcaaggtactgatattctccaggactattgttagcatcccttgtggtccatctgcattagcagtgaagaaagtcgcatggggacttgcttgatatgttgttattgctcagacatggctgtcgtactggcaccacagggtcgctgtggcgcctgccacacacgttatgacaaggatatgatcgtcaagatggccgccacttgtgacaggacagtggcagataaaaatgcggagaaga

SEQ ID NO: 47690 - DNA, 439 bp, Zea mays
  Clone ID: MRT4577_143500C.1
tacgacggccgggccgacgtacacccttttttttttttttgcttgttggacaaagggcatcaattgttgtagttgcaagagggctgcggggttagccgcaaactgctggttgaaaggcagcaactgttgctgtgtcatgaatgaagcacgctttgctgcgggggtgtgggcgaatggtcctagcttttcctgcttcatatttgccgcggggttcagctcctaccatttgtccagttggctacgtggatccttgcttccttcttggcacctcgctggttgcttgctttttgccgctggttcgcggctgcccccgggtcccttttacaccgtcggctgtttgggcgctttgcccaccttgctttgacagaccctggggcccctgccgggtccgcgctttgggcggggtcgtgccgttttgtttttcttttcagtgcgggcc

SEQ ID NO: 47691 - DNA, 357 bp, Zea mays
  Clone ID: MRT4577_143501C.1
caactccactttttttttttttttggtttagctttttttgggattttttttttttttggcaaacaaaaatgcaactttctcaaatacttcctttacatataacagatcgggggatacagttccaacagttacaaaaatgtttacaactgcaagagcaaaaccccctgctcccggggtaaacaggcacaaaatttctgagttgccataaccggggaggggcaacaaattgcccaattttttttttttacaaacttttctactagggtccacaaaattttttttccccggctttaataatcaggacccaccttttttgaacggtgtgccaaaaccacattttattttgaaaaatttttt

SEQ ID NO: 47692 - DNA, 319 bp, Zea mays
  Clone ID: MRT4577_143502C.1
ttctttatttgtctttcacagaccggaacacactggcgggaatctttcctcgcccctggggtccacatcacacaaccatctgataccacgttcgcctcattatatctgcatagctttgggctcgttgcaataaaaaagaggtgactctcaaaaatcgaagtaaccgccaattccagcgtcatcaaagagaacctatgtttcaatgtgagaggaaccagatagcttttcatagtcctagaatgtaagggcatggtcatctactcacaatgctcccgtccatgccatcattgaactcagcataatctttgggccttaggga

SEQ ID NO: 47693 - DNA, 488 bp, Zea mays
  unsure (1)..(488): unsure at all n locations
  Clone ID: MRT4577_143503C.1
cggccgcgtgggttngatggaggatgttggttgtttcttaacattctggacatgttgttcatttgtttctttggctatgtatgttttagcagtccagcgttccccttacaaaatatggcgtgctttgttgactacaaaaaaaaaaaaaaaaaaaaaaaaaaaaaaaaaaaaaaaaaaaaaaaaaaaaaaaaaaaaaaaaaaaattaaaaaaaaaaaaaaaaaaaaaaaaaaaaaaaaaaaaaaaaaaaaaaaaaaaaaaaaaaaaaaaaaaaaaaaaaaaaaaaaaaaaaaaaaaaaaaaaaaaaaaaaaaaaggggggngggggtttaaaaaaaaaaaaattttaagtagggtgggattgaaagaaaaagttttttttttggggaaaaaaaattaaattaaagggnggggtttttaaaaaaggtngggaatggaaaaaaagttgggggtntaaaaaataaaaattttttgaaaaaaaattatttttt

SEQ ID NO: 47694 - DNA, 552 bp, Zea mays
  unsure (1)..(552): unsure at all n locations
  Clone ID: MRT4577_143504C.1
atatatattaacgaaattacaaattatccatacttcctttttgctttttaatatatcatttctattttttctcacaagacaaggcatgcatctcatagaatgcaagaaaacaaagaatagtgaaaaatacagatgagtacaccacctaacattttaaattttatttcctattaagtgtcaaactttctatcaaacaatagacactgcatagagcttcatgcaaaattcaactcccatgtaaacagatcctgaaatgcaggccaaacaatcatgatacaataaatttcaaacattccaattcatttgttatcctaaaatatggaacaatagagggtagtgctagatgaaatgaaaagttgatagaagaatcaacaaataatcttctacgaagacccagaacttctaggagattctttcacatgtgcactaggaaaaactctagtacttgtaaacaatgaaaataggatgnggcatttttatggacaaccacaatgttcaactatctatatattatatagggaaaagcataataagtaaagtaacagaaaattt

SEQ ID NO: 47695 - DNA, 1358 bp, Zea mays
  Clone ID: MRT4577_143505C.1
ggctcgaggcttggcccagggagttgcaacctgcagcagctgctccttattactttggtgagttggaggaggcccttatccatggcacccgtacatctgttgatcacggcatgatcggaagtgatgtggacacagagcgtaagacagctggataccttgcagctaggccccccacactggagatcttcccttcatggccaatgagtcatctacagcagccatacagtggtaactcgcactcagtagggagcaccactgagtcgagctcaggtcagaacagtatgccacagaccgagctggtgtccccagggagcatgagggccgactctggacagcgtcaggagcttttgatggtgactgttgatgattacaactacgagcaaggactcggagccgcagcaaccacagctccaatctttcagcagcatgcagcaggccaagacaagggaaagcatggatccacaaggaaagacggcaggctgttagacgccaagaccgagaggcgattggcccagaacagagaagctgcgaggaagagcaggctgagaaaaaaggcctacgtacagcagctagagacgagtcggatcaggcttcagcaaatcgagcaggagctgcatggagcacgctcacagggtctgttcccgggaggaggtggtgcggctggagacttgagttcaggcgctgtgattttcgacatggagtacgcccggtggctagaagacgacgcctcgcgcatgacggagctccaggccgtgctgcagccccagatcatcgacgcgaacctgggggccatcgtcgaggactgcatgcggcactacgacgagctgttccacctgagggccatgctcgcaagatccgacgtgttccacctgatgaccggcctgtgggcgaccacggccgagcgatgcttcctctggatgggagggttccgtccttctgaaatcctcaagatgctgataccgcagctcgaccctctcgcggagccgcagctgctagggatgtacaatctgcaacggtcgtcggagcagaccgaggaggcgctcgtgcaggggcttcagcagctgcaccagtcgctggcggacgccgtgggcgctagtcctctcagcgacggcgcgaatgtcgccaactacaccgctctcatggccctggcacttgacaggctcgacaccctcgagagcttttaccgccaggcggacagcctgaggcagcagaccttgcaccagatgcggcggatcctgacgacccgccagacggctcggtgcttcgtctccatcagcgagtaccaccgccgcctccgcgccctcagctccgtctgggcatcgtcccgccctccaactcctccaagcgagggcgtcgtt

SEQ ID NO: 47696 - DNA, 278 bp, Zea mays
  Clone ID: MRT4577_143506C.1
gcacacgttgagatggttgtggctttggtgttcttggtcctatgcttcatggtgcggtcctccgactctcgccccatgcatgtccatcactgtcacttagtgcacagggggtgctggtcgctaatctgatatctgtatggcgggcctaccggctgcctgtcgcgactatattcgtgtgctgctgcgggtacaccgacgttaacaatccccccttcaagagcatgggcgcatgtggcaatatccgcaatcttcaaggattgtctgggttgtgggtcctg

SEQ ID NO: 47697 - DNA, 137 bp, Zea mays
  unsure (1)..(137): unsure at all n locations
  Clone ID: MRT4577_143507C.1
caacatagaaagtggantacagtagcanacaataggagcaacaatgggcggnccaaagaanaatttgncaatncntgaatggctcatngnncttnnngcnatgnggtnggcnaacgggaaccattttttcctcaaan

SEQ ID NO: 47698 - DNA, 357 bp, Zea mays
  Clone ID: MRT4577_143508C.1
ggaggcagcggtcatttcaaaatcagaaggaaaggggggggcccccctttcgaaaattaacccccgggggcattgcaaatttttaaaaccctaaaaaacagttttttatcccggaaaaaaaaaaaacgggttgcaaaagcccatgacttggctttgttcggggggggggggcccccccttacagggtaggggtccttttgggggccccgaaaaaaacgggaaacaggttgttcccaaaggggtccttgagcggccatttagggggaggttttccacggggccttccccgggaaccaaggcctggataaaaaaggcaaacatggaaaacatggccagccggccgtttttgatctcctt

SEQ ID NO: 47699 - DNA, 385 bp, Zea mays
  Clone ID: MRT4577_143509C.1
aatcaaataggatgtacatttcattctcaagaaatgacatgagagttacagtagttcactacaacagtgatctgagcaccgcatcctgctataaatttacaaggttcgttcttgaatacattcatagagttcctgttgcaagggtgtaatctaactttccataaaaaaatggcagacctagtgccgaaggctcccacataagtgagggctatgaaagcgataaaccgaggcaaggcttccccccgcaaatgcggagaggctgctttaaacccgtgacctggtgactcaacaccactataccaggcctggccttctgtgatgtgactttccatatcaagtggaaaatgcctaacatgaacaccccacggggaaaaaaatttgatac

SEQ ID NO: 47700 - DNA, 875 bp, Zea mays
  Clone ID: MRT4577_14350C.1
aaagtgacaatattggttgtgaagcagataaatattatagtatacatcacagtacaaacctaagatgagtctgccatgatgactatcaccgttacagtttagttgtagagcaaacttacacgataagacacatagtctccatttaacataagatagagcttactgatatgggtggtagaaacatatacgaaattggatggcctttatcagtttggtcctctgtacacaaaagcagactcgttctagcaacgtggacgacctttgcaagcctcggtgcaacttacgatataatataactgccatggtcaccagattatatagaatcagattagagtatgcgaagttggctagtcctgatcttagggtggcgagggcagtctgtccttgtcatgttgccgtgcagagttcatgatcctcagtatcgcgtagcgtgtgggaatatgcgagtttgtcgcgtcgtccagttttttgattggtggacgtgaagaatatataccaaacgatattgctggagaatcttgtgtacttggaaggctaaatgcatcatcttgagtaagcaattcttgtgcataattatgtgttccataatttgttagaacagagagaactggaatgactttatagtctgagttgtgaacctcgttggtgtagtccttaaggagtagaggtactgcccagcgttgttccaaaaacaaagctgccacgaaggattcaaaacacaaaatccaatcctttatgtatcgttaatacactgaatttacaagacatattggagctgaagccttgagaaagtgtacaatttgattcttgaaatctcactttgtttgctaatgagttgtttgcatattcttttctggtattttttatgtggaact

SEQ ID NO: 47701 - DNA, 457 bp, Zea mays
  Clone ID: MRT4577_143510C.1
aataaaggatgtttgttgtttctttctggagacccaaaaaattttacaggcaagcatccggaacaagaaatctcgaaatgaaacccctgaagcagagtgggggcacaaataaaaaccaattacttgaaaaaaaatcatgaatgggggcagagacgggctttgttttgcaccatcttctaaatatcataataaacgctgacgcaacccccaaaggacggaattggtaaaggatcccgggcaaatttgaacggaaaacaacgataggccagggtagcctaataccgatcaacctctggaacaaacaggtccactataaaacgagagggcgtggcgggcgaggggtaatgtttatccaccccatcccttttggggggtggattgaggggcgacgggggggacttcaaatatgtctactgttacggaagcctttcccacaaacccgggagcacccgggggt

SEQ ID NO: 47702 - DNA, 759 bp, Zea mays
  Clone ID: MRT4577_143511C.1
atgcttccattgtggggaacaagaccactgggcaaagcattgcccaaagaaggccactcagtagcctccagctttcaacaccttagcaagacaaggatcgccacaacaagcaccaggaggccctggtcaggcctacaaccatggaaaggtgaaccacttggaggccaaatcaatccagaatgctcaggacgtggcaatagatctttgaatgaagtcactgttaagaacaagtaccccctgccccaaattgaagatgtattcgatcagtgtgttctcgaagatagatctgaggtcagtgtgttcatggactgcctcgacaagttcgtagtggtgttcactgatgatatcctcatatattctcagaatgagcaagatcatgaggagcacttgaggaaagtactacagaggctacgagattgttatttatatgccaagcttagcaagtgcaagttctggatcagcgaagttttgttcttgggtcatattataaaccaagatggacttgttgtggacccaaagaaggtagcagcgattctggactggaaagcaccaaaagatgtccgaggaatcaagagtttcattcggatggccggttactattggcattttattgagggtttctccaagattgaagggagagtagtggcatactcgtcccgccagttgaagattcatgagaaaaattaccccactcatgatctggagttagcagcagtggttcatgcactgaagacctggagacactatttgtatgggtag

SEQ ID NO: 47703 - DNA, 242 bp, Zea mays
  Clone ID: MRT4577_143512C.1
cccacgccgtccgaaaaaaaaaaaaaaaaaaaaaaaaaaaaaaaaaaaaaaaaaaaaaaaaaaaaaaaaaaaaaaaaaagggcggacgaattaaaaagaaccaaaaataggggcgcgccggcttgcgagagatccaagcttcctttctgcgggcatgctaaattcatatctctggtctggggtcacacaaaatccaatacaggggaccaccgttttacaacccaacttattgggaaaaaccc

SEQ ID NO: 47704 - DNA, 224 bp, Zea mays
  Clone ID: MRT4577_143513C.1
tttcttatccactccattcctccaggaccaggggctacattgaataccccgtggtttgccacacggcattggagtcatcagcgacaagaaagtaaaattcctgatgtactgaatctcaaagatagcctcgtgatttcttacattctatacacatactggaccgttaaaggcatatgattctctagcctatagagacacggggggggaaatacaagagagccatc

SEQ ID NO: 47705 - DNA, 499 bp, Zea mays
  unsure (1)..(499): unsure at all n locations
  Clone ID: MRT4577_143514C.1
taccggaatcggccgggtccgagcccacgcccgtccgtcccacgcccgtccgtattgggagaccaacttatgcatcttatagaaagggcacaatnnagtgtacccagaccaatgtgcatgtccccaaaatnaattttggcccttcccttatngncctccttgnnngtctttcnntgcaagtgcctgctttacggcngnnaccaattttcnnccgcaatggctttcgcaaggctctctattagctnnntcccttctnnntcccccgtacccttctcactcanngcggtgtcttttcggtatttgtgaataacctnncaattcttcaaaccctacatggtatctcaacaggcaattcgcagcttggcatttcttacctttatcancccttgttctctccaactnaatcatcagccctattacaacagttactctatggtgcatttattggcacaaaacatcagggcacaacaactacaacaacttgtgctagcaaaccttg

SEQ ID NO: 47706 - DNA, 343 bp, Zea mays
  Clone ID: MRT4577_143515C.1
gccggatcgggaagccacagaacgctccgggcctctctctgtttgctctcgcgtccgccgcggccgtaccgtcacgcgcctgctcccgctggtgtggacgctcaccgcctccgatccaccgggccgccaccgcgggcgttgtgatgagggatgagctcaccagacgagcatgatcagctagttcaaggaggccttcagtctcttccaccaagacaggtgatggatgtgtcaccgccagagagtgtgggagcagtgatgcaattcgctgggacagaacccgacggagtgctgaactccatgacatgatcgatgagagcgaggtggatgggaatggcaccattgt

SEQ ID NO: 47707 - DNA, 255 bp, Zea mays
  Clone ID: MRT4577_143516C.1
tccacgcgttctgaaacggcttccacattcaaggacggctgcggtctagggatacgcgaaggcgaaacggagtatcgtattcaaaagcgtctgccatgtctgcgatgtgagaagctcaatatctttgtcgttaaggagcccgtattctcggcctcctgccttatcgctggattcggtctttttattccagcagttgttcggccaatcctggtttcatggctatccactgttcaagttactccaccttttttaaat

SEQ ID NO: 47708 - DNA, 633 bp, Zea mays
  Clone ID: MRT4577_143517C.1
gccggccggttctgcaaggagagatcgatatccctcacattggtgcattagacatggatatgagacggcggacgctgtagcggaactgatgattggggatgcggcacgttgttacggccgacgatgacgaggacgagcccgagctacaagctcaaggagatgtgctagctcctgcgcgcctccgaggtgaggatcgtcaaggaggtcgacggtttcatcctcaagcgcctggagaacaagagcccacgtcttcaagctcaatgctttcaagggtgatcacaacatcacccatgaaaaatctggtactgatttcctgagggagatgcgaaggcactctcccgcattatgcgccaactagtttattacaaaggtcaccgctgatcctcttgaagagggcatgccctataataaggttgcctcgcgatactgttaatgaggctatagctgcaattgtctccacagaggaccctaaacctggtgtagcaatcgaaagtcttggcaagcgcatacaaggttttgtaaagactaattaccagccatctacagatgacaagaagtctttccttatcgagcttattgaggtatcgggtattgcaagtgcatacattaagtagggcctgagcaactttgctg

SEQ ID NO: 47709 - DNA, 1253 bp, Zea mays
  Clone ID: MRT4577_143518C.1
tataaaaattgtacttgtacactataatttgggacgatagccctgaaccatatagagcttccaaagttaacaacacatcatcatgcaagttgtacacgatattttgggccaagacgacatcctgttcctgtacggatatagtgaaattgttgtagaggtctttaacgcctaaacctactcgaccatagtcagaattagttatatttactaaatctagaatgttgggtagtaaaagggaggcaaccggagctatccagcaatgatttacagatttacatgtaccgcagtctccgccttttccccccgtgttcagaaagaaacgactacattagcaccacggattcgaacgggagcagccagttgtcaatgagtcacctgccccacctaagctcggatgatggcgtttcagcagaagctgtgataatcgacagcggctctggtctgaaatctccaggagtctgggtcctggtatggttacctctcagcatccaattccaaatgacggttagctggttcttgtaagcgtttatttcaggcagcgtgagtcaaaagaggctggtatttggtgtaatctatcccattcaacctaacacagcataagatctgctcgggcagctcttcagctttatttccctgaattgtcagcccaacatctaaaacgcatgcttttagcctgtccaaaaatgtttcaaaacctttccttgagatgtagctaaatctgtgcatgtcaatgtcgatctcgaagtagttatcactctgcacagaagaaagggatgcttcaatgttccctccattaagcaatcagagttcggagtacgtcaggtaaaactcatgctgtggtctagaaaggacaggcttctcattataggcatgcattagcttcctctccggtgcactcaaaggaagatcctccagattagccacccggccaagtatcttcagccgctctcggaatggtatagttgtttccattggaaatgcttttatcttctctacatgatcgtcaatcaaccttctaatactttcaatgaatgaaggtggaagctctttcgagtaaccatcagaaagcctaaagtacaaaacaaagctcatcccttccccatcagtctcattctgaaataatgaagctggatacaatggcacctgagaaaagtatacaaaatgtcaatacactaaatgaatactggcaagagcataaaaatcacagtaaaatactgaaatccaagttatagtaactatttctaaatcccgaa

SEQ ID NO: 47710 - DNA, 421 bp, Zea mays
  Clone ID: MRT4577_143519C.1
attcggctcgaggccgcccgtagtgtctacagctgcacggcgcggacggctgacttcattaacaagcctgaagatgccgccaagctaattaacatgtgggtcaaacaatccacaaaagatactgttacctcgctccttccggatggactaattgacaagaatacaggacttgttattggcagcgcactgtattttaggggaagatggcttgacaggactgatacgaggagtgacgcggtacaaaaattctgctgtctggatcgaacttgtgttgacgttccttttgtggaatatgatagaactcgacctttcgcagtccacgatggatttaaagtgattaaactttcttaccagcaaggaaataatgaacggaagttctccatgtacatcttcctgcctgatgctcatgatggcttgtttg

SEQ ID NO: 47711 - DNA, 760 bp, Zea mays
  Clone ID: MRT4577_14351C.1
gtacgcctgcaggtttcggtccggaattcccgggtcgacccacgcgtccgcaggcgctgagccggcggagcgcggagcgggcgaaggagacgggcggcgcgagcccgcacccttccgcgcggtgcgccgcgacaccatggagcccgccgtgtcgctggccgtgtgcgcgctgctctttctgctctgggtgcgagtgaaggggttggagttcgttctcatccaccagcgctgggtgttcgtgtgcctcttcttgctgccgctctcgctcatcttcgatatctactactacgtgcgcgcctgggtggtgttcaagctgagcagtgcgccgcgcctgcacgagcagcgcgtgcgggacatccagaaacaggtccgggaatggaaggaacagggcagtaagaccttcatgtgcacggggcgcccaggctggctcactgtctcgctgcgagtcggaaagtacaagaagacccataagaacatcatgatcaacctgatggacatcctggaggtggacaccaagaaacagattgttcgagtggagcccttggtgtctatgggtcaggtgacagctttgctgaactccattggctggaccctgcctgtgttgcctgagcttgatgacctcacagtggggggccctgatcatgggcacaggcatcgagtcatcgtcccacaagtatgggcctgttccaacacatttgcactgcctacgagctgatcctggcagacggcagctttgtgcgctgcacaccgtctgaaactc

SEQ ID NO: 47712 - DNA, 1523 bp, Zea mays
  Clone ID: MRT4577_143520C.1
catgcattgcctctgctgttggggtgaacgagaagaagagaactccctcgagccgtactcattcaataagatgcctctttgaagctttcctcaagaagaagtcaggggaagctcatccatcttccacactactatcaacgaaggatttcctggaaaggcctctagcaggttctcaagtacagttatgcttgctggaaacaaatacgctcaacagttggtctcgtattgatcctggtacattccgggtccgtggagcaaactattttagggataagaagaaagagcttgctccaaattatgctgcatattatccatttggagtcgatgtgtacttatcaccacagaaactcaatcatatatctcgatttgtccaacttcctgacattcaactctccagcaagctcccacctcttttggtggtcaatgtacaggtgccattgtatccggcttcattatttcagaatgagacagatggggaagggatgagctttgttttgtactttaggctttctgatggttactcgaaagagcttccacattcattcattgaaagtatcagaaggctggttgatgatcatgtagagaagataaaagcattcccaatggaaacaactataccattccgagagcggctgaagatacttggccgggtggctaatctggaggatcttcctttgagtgcagcggagaggaagctaatgcatgcgtataatgagaagcctgtcctttctagaccacagcatgagttttacctgagtgataactacttcgagatcgacattgacatgcacagatttagctacatctcaaggaaaggttttgaaacatttttggacaggctaaaagcatgcgttttagatgttgggctgacaattcagggaaataaagctgaagagctgcccgagcagatcttatgctgtgttaggttaaatgggatagattacaccaaatatcagcctcttttgactcacggtgcctgaaatcaaggcttacaggaatcacctaacctttaatttggatgctgtgaggtaaccataactggaccagactcctggaaatttcagaccagagccgctgtcgactatcacagcttctgccgaaacgccatcgtccgagcttagttcacacaggtaacattaacagagggtcaattactcagtgaccattggctaatatagttgaatccgtggtgctgtgctagtatagccgtttctttctgcaaacgtggagaaaaaaaggtgggagactgcggtacatgtaaatgtgtaaatcattgctggatagcttcggttgcctccggcggcaaattcagggaaaaaattaggagctgaacaaaaacagtacagcgtgattgatcgctttgctcggctgcgatgtggagccaggacacattgatttggtacaagcatatgtgattgactgattggtttggccgtatgcgataagccagactgacagggaacgatgtgatgtttggttgactggattaataagatgaaaaaatataaaaaatgttatatagc

SEQ ID NO: 47713 - DNA, 402 bp, Zea mays
  unsure (1)..(402): unsure at all n locations
  Clone ID: MRT4577_143521C.1
gagtcttcatttttttttgtcttagcgatcttcttttttctctttttggttgttgacacatataaatttgtgaatcggcaagcataccagcaaagttgtaagtttgtataggtgttacggcagatggatcactgacgtnaaaaaaaaaaaaaaaaaaaaaaaaaaaaaaaaaaaaaaaaaaaaaaaaaaaaaaaaaaaaaaaaaaaaaaaaaaaaaaaaaaaaaaaaaaaaaaaaaaaaaaaaaaaaaaaaaaaaaaaaaaaaaggggggggcggttttaaaggatcaaagtttacttccggtggtttgggaagaaatagtttttttttggggcccccaaaatcaaatcaatgggccgtgtttttaaaacgtgggaactggaaaaaccttggggttcccaaa

SEQ ID NO: 47714 - DNA, 1167 bp, Zea mays
  unsure (1)..(1167): unsure at all n locations
  Clone ID: MRT4577_143522C.1
acgcccacgcgtncgcccacgcgtccgccggtggtactcctcctgtccgccctccctccgccggcaaacggtcccaccccacccggagaaaacgaaacaaaccaaatctcgctgcgagctgggcggcgagggcgcgcggcgccatggcgaggagcaggacgtcgggcggcggcgagtacgagagcggcagcgaccacgacggcgcgctgcagaagccgctgctgcccaacagcgggagctggtaccggatggggatggggtcgcgccagtccagcctcaacgccgccggcacctcctccatggccgtcctgcgcgagtcccacgtctccgccttcctctgcacgctcatcgtcgcgctcggccccatccagttcggcttcaccggcggctactcctccccgacgcaggccagcatcatccgggacctcaacctctccatctccgagttctcggtgttcggctcgctgtccaacgtgggcgccatggtcggggcgatcgccagcggccagatggccgagtacgttggccgcaaagggtcgttgatgattgcagcaattccaaacgtcattggttggcttgcgatctcctttgcaaaagactcttcatttctgtatatgggacgcttgcttgaaggattcggtgtcggtatcatttcctatgtggtaccggtatacatagcagagatatctccacagaacatgagaggggctcttggctctgtgaaccagttgtctgtaacccttggtatcatgtttgcctatttgctcggcttgtttgttccttggaggcttcttgcagtaataggaaccttgccctgcatagtgttgatacctggccttttcttcattccggaatctccaagatggctggcaaggatgaatatgatggatgattgcgagacttctctacaagttctgagaggattcgatgctgacatcactgcagaattgaatgatataaagagagcagtaatgtcagcaaacaaaagggctacaattcgtttccaagagttgaaccaaaaaaaaaaaaaaaaaagcggccgtacgcccctaattctaggaatgggcctacttgtgttgcagcagctgagtgggataaacggtataatcttttatgcaggtagcatcttaaagctgcaaggctcaagaacagtaacctggacacatg

SEQ ID NO: 47715 - DNA, 1105 bp, Zea mays
  Clone ID: MRT4577_143523C.1
ggctacaaaataaagtatatcacaagtatagatgaagagacaggagaacgaaaaagggttagagtcctcgagctcacctgccagcctaggtgcctgacaggtggggccacacagaacttcagacgtcagaacttagaagacaaccccctcttgcttatttcaacccggccgggaaaaaaaaaaaaaaaaatcgattgttgtccgctgttctccttcctcctcgtcctccttcaggccagcgggcaagaagaagaagaaaaaatcaaggcttgcggcgagaggctgtgcccggccgaccggcgagcgaacttcgtacgcgcgtcatgggtggcggcagcaacagaggcggcgccggcgccggcgaggagagcggcagcgaccacgacggtgtgctgcggaggccgctgctcaacacggggagctggtaccggatgagctcgcggcagtccagctttgccccggggacctcctccaggccgtcctgcgcgagtcccacgtctccgccttcctctgcacgctcatcgtcgcgctcggccccatccagttcggcttcaccagcggcttctcctccccgacccaggacgccatggttcgggacctcaacctctctatctccgagttctcggcgttcggatcgctgtccaacgtcggcggcatggtcggggcgatcgccagcgggcagatggccgagtacattggccgtaaagggtcgttgatgattgctgcaatcccaaatatcatcggttggcttgcgatctcctttgcaaaagatgcctcatttctgtatatgggacgcttgcttgaaggattcggtgtcggtatcatttcctatgtggtaccggtatacatagcagagatatctccacaaaacatgagaggggctcttggctctgtgaaccaggtttgcctatacttgcaagcatctcatctatttgtgagttatctgtaacccttggtatcatgtttgcctatttgctcggcttgtttgttccttggaggcttcttgcagtaataggaaccttgccctgcatagtgttgatacctggccttttcttcattccggaatctccaagatggctggcaaagatgaatatgatggatgatt

SEQ ID NO: 47716 - DNA, 177 bp, Zea mays
  Clone ID: MRT4577_143524C.1
cccactctttcgaagacgcgtccgtctgcatgccacaggggacactctctgggcacggggcaagaaggacctaatctctttcacccgttaccccctacgaactacaggatacactcgcctgcttcaagctgagatagtgcagatattcttacgcaagagccatcaccatttgaccaa

SEQ ID NO: 47717 - DNA, 254 bp, Zea mays
  Clone ID: MRT4577_143525C.1
acccaaacgtccagcctgccgcgacgcgtgccagcaggctccaaacgcgcacaccacatcaaactgcaagaggtcgagcacacccctaacgccggccaactgacgaccttcaaacgcgccaaccctacagacatgtgtagatgattgcgacgatcgtcacctccactctaccccatgtcctcatctaggctacagcagtgtcggccaccactgacgacgcagccgacggcgatctaacatcgtccgagtcatct

SEQ ID NO: 47718 - DNA, 412 bp, Zea mays
  Clone ID: MRT4577_143526C.1
gctctcggtcgccatggccgggggatacacatgcgtaacgctcgtcatgctaacatgatgaagtaccttaaaataatgaccgagagacatgtagaggggctattaaggcatgatccacacgaatatcatctgccatcaaaagctgcatggtgcagacatacacagcaagctgcaaaccctttgctaggctactctactgtggaactcactggctaattacctggatcggctcttactagccagctcacatccatccgtatgcactctgataattgacaactgccatcataccctactatcatatgaaccacacgcatcatttgcacacgtcgttcccattctagaaccagcagttctagatgtatgagcttatcctggacaacctgcatcgtctgatccatcagcactatct

SEQ ID NO: 47719 - DNA, 1424 bp, Zea mays
  Clone ID: MRT4577_143527C.1
gacaaagcaacatgccagccttttggttttattttttttgccatttcacatcatccccctcttccatcccagtatgttcatccaccgtcctcaccttccaaagcaccgccgcaaaaattaccataactaggctaaaataaggacatgctaggaaaaaggaacactagtaaatgacagccaccaccaccactcctcgtcactttacctcgagagcattaaagtagaaggaaagaattgggaaaagaaaaagggtaaaaacaatttggaaaaaaaggagcagggctgcagtaaaatctccgactcttcgatccagctgcgacaatacccgcttgactcggcctgcggcctgccgcctacccccattgcgatggtgggcccatgcagcgtttcttcgcgtcgccgccgttaatccagtcggtctccgaggcggagctggcgctgcgctggtgaccgagcaccgtcacaggcgtgtccgcgctcggagcggctcgcccccgcccgacgccgcccgccgctgccagcacctcaccgcactcccgcagcttctcgctatttacaaagggacaggcggccaagctggcttggaacgcgtggaggttcgcggcggcgacctctccggcggcggccagcagcgctgccgccgccaccacggagggtgagaactccgccatcttcacctcaggctgagcgtggagaaggaggtcgacggcgcgcgccttgacagcggctacctgtggggggtgctgcggcggcggatagcacgcggagaggaagaagccgaggaaggcgagcggcgtgacggagcgcgcgcgccactcaagcgcgccaagcaccacgcgctccatccgacggatggtcaccgcgtcgaacatgaagtcttcgtccctctggatgtcggcggtggagaatgttgcgacgcgctgcatcttggcggcgagggagaggcagctgatggcaagcaggcgcggcgcccacggctgctgctcgcacgccaattgcctcttggagaggaagcgatccacgtagttgagcgcgaggtaggcgacgcgcgggtgcacggcgagctcgccgccgaaacgcaccttggagatgaaggcggcggcggcgcggcgggtggccgaggccgcggcggagatagagggcgcgtggtggccctcggcgtcgaggagactggcgatcggctcgtcggcggggctggtgaaggggttctcaaggtcgaactcgaactcgtaggcgtaggcgtcctcctcccgcagctcccactcctccgtcgccatgaccacggcgccgcggcggcacccgcgctcacgcgagggctggagatcgaagcccaggcgagcggaggaacacgccaagaagcgcgaccggtgagatttattcggcgagggaaaccaccattgctgcggcgcagcccacgcgtccgt

SEQ ID NO: 47720 - DNA, 216 bp, Zea mays
  Clone ID: MRT4577_143528C.1
agcagtggtaacaacgcagagtacttttttttttttttttttttttttttttagattcagtacatataggcttactttgcttggacagtttttttagattcagtaaggccagctttctttgcttaatgagtggttgatgttcagtcatgccacctttctttgcttaatgagtgatcgatcttgacatgtttttcagattcatcatagtttttgtac

SEQ ID NO: 47721 - DNA, 1163 bp, Zea mays
  Clone ID: MRT4577_143529C.1
aaaaaaaaaaatacctttctcggccttttggctaagatcaagtgtagtatctgttcttatcagtttaatatctgatatgtggaccatgtgtttacttcgatattaaatttattttttgtgggggagggctcactacagtagcttgctactggggtcctcacgtgttgtttgggcgttgcactatagctcaagcctggcgcaccccaagcaccaacagccaatccacacctcgcttgcgttgtcctcgccgcggcctcgccctgattcggttcccccgttcctcgcctctgtcatcgtctcctctgacccaaattgagccaagcgaagccgtggccgtgatccggtccatgcgcggagcgtggtagccggattctatcgccgtcgcctccccttcgccgctattttccagtcgccgggatcagccgagttggatctcgaggcataaagcgttgcgggcgcccggcgaggatacgatgcctgcggtgctcgccgcattcgctacccttcgagccgccgctgccatcgcctccggggactcctccttcccctgttcccatcgtctcaagcatcgttttagtagtagtaattttagtagtagtaattgtcattaacctttgcgttccctccgtcgcgcacgctcctcggctcggtcctcaccttcgcatttcggttttggtctggttgtgctcgatccgaggcttactttggttttgcggcttctctccttgtcgaagcttggtgtctggattcgacctgcagatcggaaggaaacaaggtggtcattatcacctacaagataagagaaatttctctttgtaatttgggatcaagcttgtggatggacgaaccctcgggacttcagtgctgtttaaatcctggttgtaagcatgaccgtgcttgctgggaagatgattatgtcaaggctgtaatatctcaatttggctcgatgaattggattggctcttactggtgatgcatgggtgtagagattccaagcattttaaaaatagtcacaccaaaaaaaacatggctaagacgatacctttttatggatctcatcatcttctggtagctgtgctcctaggttgaaaaacaaatatgcttgaaggctcaaatttcagcaaaatatgttaatgcatatgggttgtgacatcatctatttc

SEQ ID NO: 47722 - DNA, 252 bp, Zea mays
  Clone ID: MRT4577_14352C.1
cctaggggggaattctacatgaacgcccaggacctggacgcatttggtttaggcacgggccgactctttgcaagatattggttcgggcgaaatggacgttcacccgttcaggcaaaaggaaaaaggggcccttatttgtggtccacagtactcatggccagcattcgtgggtcattgaatggcaatggctgtgtgataggaacaatcattctttagggtgggtaaatttgggtgtcacaccactccaagttg

SEQ ID NO: 47723 - DNA, 712 bp, Zea mays
  Clone ID: MRT4577_143530C.1
ccaggcgtacgtgtagatcgcgagcggctgcccttttttttttttttttttttttttttttttttttttgggacagcgacagcagaatttattaagcattcagtcgcatcacacttatggcacacacagtagcgctgacagtatagttcctgctgagcaattaacgcggcaagagcctgcactgcgcgccagagagagaggcacagcccaataatcacctacagtgatcaacctttttaccatgtaagtgatcagtagtaatattgtacatgcacttgggcacacacttggaaacacaggagcccgaccagacacacgcatgatgcgtacatacactacatacaaagacggaagccatgtccacgccacgtacaggcacagggctcgccggtcacactcgcaggaggtagatgctgagctccgggccgccgctgccgtcggggttcatcatgtagaacgcctccgagtccctggagcccaccacgcgctcgaacctcgcccgcatgtacatcaggtcgccctccgccgcgccggagccggagacggagccggcgacgtcgtcgtccgggagcacgccggcgcccacggacaccggctccaccgcgcccagcacccgccactcgtccgcgccgcagtcccggcgcaccgcgaacccgcacttgcggccgttgcagtacgcgcgccacgtggctcctccaacaggccccgccgc

SEQ ID NO: 47724 - DNA, 885 bp, Zea mays
  unsure (1)..(885): unsure at all n locations
  Clone ID: MRT4577_143531C.1
ccggccgggagcgtgatcgtcgtgacaggtcgagggatcgtggtcgggacatggtagagacacctcgcttgcgttgtcctcgccgcggcctcgccctgattcggttcccccgttcctcgcctctgtcatcgtctcctctgacccaaattgagccaagcgaagccgtggccgtgatccggtccatgcgcggagcgtggtagccggattctatcgccgtcgcctccccttcgccgctattttccagtcgccgggatcagccgagttggatctcgaggcataaagcgttgcgggcgcccggcgaggatacgatgcctgcggtgctcgccgcattcgctacccttcgagccgccgctgccatcgcctccggggactcctccttcccctgttcccatcgtctcaagcatcgttttagtagtagtaattttagtagtagtaattgtcattaacctttgcgttccctccgtcgcgcacgctcctcggctcggtcctcaccttcgcatttcggttttggtctggttgtgctcgatccgaggcttactttggttttgcggcttctctccttgtcgaagcttggtgtctggattcgacctgcagatcggaaggaaacaaggtggtcattatcacctacaagataagaggtatcaaaatcactctgctgttgccatggaaccatttattaggttacaatcgtgaatcgtgggaactggttccgaattctgatgtttagatcattgtataggtgacatttctgtgtgatcctgtcagtacgtaaattggtatatgcaatttcctagatctttcatcnaacaaaataagaaatagttgtctgaaaccagcctatttttctgtgtcccatgatgtccctctgatcacatcccactactt

SEQ ID NO: 47725 - DNA, 1727 bp, Zea mays
  Clone ID: MRT4577_143532C.1
cattgggtacctcgatgccggccgggattttcttcccgtccggagctcacatcgctcccccgaacccaaacccaaatcccaagcaaccacttcgtcgaccatggggcagggcactccgggagggatgggcaagcagggcggcgccggcgaccgcaagccgggggacgccggcgaaaagaaggacaagaagttcgagccgccggccgcgccctcccgcgtcggcaggaagcagcgcaagcagaagggcgccgaggccgccgcgcgcctccccaacgtcgcgccgctctccaagtgccgactccgcctcctcaagctcgaccgggtcaaggactacctcctcatggaggaggagttcgtcgccgctcaggagcgcctccgcccccaggaggacaaggccgaggaggaccgatccaaggtcgacgacctccgaggcacccccatgagcgtcggatccctcgaggagatcatcgacgagagccacgccatcgtctcctcatccgtcggacccgagtactatgtcggcatcctctccttcgtcgacaaggaccagctcgagccggggtgctccatcctcatgcacaacaaggttctctctgtggttggtatattgcaagatgaagttgatcctatggtatctgtgatgaaagttgagaaagcgcctttggaatcttatgctgacattggtggactggatgctcagattcaagaaattaaagaggcagttgagcttcccttgactcaccctgagctgtatgaagacattggtattaggcctcccaagggagtcatattatatggagaacctggaacaggaaaaactcttcttgccaaggctgtggctaactcaacatctgcgactttcttgcgtgttgttggtagtgaactcattcaaaagtaccttggggatggtcccaaactagtccgagaattgtttagggtggctgatgaactttctccctcaattgtctttattgatgagattgacgctgttggaacaaagaggtatgatgctcattcaggaggagagcgtgagattcaaagaactatgttggagctgctgaatcagctagatggttttgactcgcgtggagatgttaaagttattctagcaacaaaccgcattgaaagtcttgatcctgctttgcttcggccaggccgtatagaccggaagattgaattccctctcccagatattaaaactagaagacgcatcttccagattcacacatcaaaaatgacattagctgacgatgtgaacttggaagagtttgttatgaccaaagatgagttctcgggcgctgatattaaggccatctgcacggaggctggattgctcgccttaagagaacgtagaatgaaagtgacccatgcagatttcaagaaagcaaaggagaaggtgatgtacaagaagaaggaaggtgttccggatggtctctacatgtagtagacgtctcctgccttgtcagaacaagttatcctcgtctctctcgtcatgggagatttgattgccacggcacttgttgcacacctataagtggtctgagaacgtgtattatgctttgattgtttcaagtaaaatttctcttgcgaaaaaaaaaaaaaaaaaaattaaaaaaaaaataaaaaaaataaaaaaatatatatataaaaaataatatttaaaaaattttacatttgtttataaataattaattgtcaattttttttatatttttcttggggggggg

SEQ ID NO: 47726 - DNA, 1809 bp, Zea mays
  Clone ID: MRT4577_143533C.1
ggagggtcgtctggggaggagacgcgccgtgcggtgctcgccgcatacgctacccttcgcgacacctctaccatcacctctaccactacctcgtaaacctgttcgcagcgtcccaagcatcgttttagtagtagtaattttagtagtagtaattatcattaacctttgcgttccttccgtcgcgcacgctcctcggctcggtcctcaccttcgcatttcggttttggtctggttgtgctcgatccgaggcttactttggctttgcggcttctctccttgtcgaagcttgttgtctggattcgacctgcagatcggaaggaaacaaggtggtcattatcacctacaagataagagaaatttctctttgtaatttgggatcaagcttgtggatggacgaaccctcggtggacttcagtgctgaaggtgttagcagcagatcaggtctctgccaaagcacctgtttaaatcctggttgtaagcatgaccgtgcttgctgggaagatgattatgtcaaggctgtaatatctcatgggcaagatgatttggcggtcgatgaaattggattggctcttactgaagtgatgcatgcatatgatgatgacaaatggtcaagtctgtatgaagattttgacgacggtgtcggcgatgaaccaattcttcctctggaatctgattcaactggtgattttgtggacattgactccgcatcacctacctttcctagtgacgatgcaatggaatcatcaattaccaattcatttgctcggaattgttcaattaatggcactccaagtttagtttctgcaatgaaaggaacacgtgtgaagaagggaatcacgacaaagttgagcgtttcttgggcccctgatgtatacgaccctcctattacttctgactcgcacacggtgaaagggcaccatacgagttcaactaagggtaactacaaatacaagacctccaagagcagcagtaccactagaaggaaaaaggacaagaagcattctaggcacagtagtagcaatggaggtggcagcaaaagagacaagaagcattcttaccgcagtagtgccagcagcagcagagctattaccagtggttctcaatattgtgacgcatacagtggtggtggcatcaacagcagaactgttcctgaatctgccaagatatctccattggtggtagctgaaaatgtcacaccgcaagagatggttcctgtactgaagacactggaaccaatcaaatgtactaccagctgcggcaaagagaagccatttgccttgctgtcgcgccagttttcccctgcaaggtacaaggggatgttcaccttttggaaccaaaaccaactggcttcttgacaatttgctatgcggaagctcacctgaaagtttccttgccaagggctgttcggatcccctccaaactttagagcttcaaaaattttagagcattttagctcacttttgaactctaaagctctaatctaaggttgaccaaagtttagatctaactgagctttacctctaaagtttagagaaggaaatctaaacatgctctaatttgattgtatcaaagattgttgctattgttctcttcgttaccatgtttgtttcgcctgtctgaaacttcagagatcatgttttggaaaattgcttggcaaagtgcttgtgttgtattatatcctcaccgaaattcgcggggccgcccccctcctgggggaaaattttttatcaatttcatcatgtgttttgtattacaaacaacatccaataaccctaaaaaaaaaacaccacgcgtccgcggacgcgtgtt

SEQ ID NO: 47727 - DNA, 469 bp, Zea mays
  Clone ID: MRT4577_143534C.1
aaatattcttttttttttttttttttttttttttttttgccccaagctgttatcaaaattgcattacaggtgatctattcccgagggcaaaaaacttaggaaccatctaggctcatttgaatgaaactgattggaacttgggggaaagcacgcgcggaaagaaaaattctaggcttccttatcaatttatgggaccatccggtttcctggcgctcttttgacttattctgcgcttgtctgattgaaaccttccccggatgtacttttgattgagctgtaggctactctgtcaggaaagcttttctctcaagggagggaaaccattgccccggcatgttaaaaggggaagggcttacaccatttatttccttgatctcaatctcacaattcagaggtgcttcataagcggcatatattccgtgaaaaccctttattttcccaacccgagcagatttataaaggccctttg

SEQ ID NO: 47728 - DNA, 476 bp, Zea mays
  unsure (1)..(476): unsure at all n locations
  Clone ID: MRT4577_143535C.1
ttggtgtttttaatatataatagtcacatctgggggtgttattaatccatgaaaaactcaaacggtagcctagatgctattagtaatattgatgccgttggccaacctttgcgtacaacgctgacattattttttttttccgaacgctgtttgctgntcanctcacccaccanctaaacacatattagctcacctaccanccaaacancacatcacattcctntctcaagtctacacaactcnncttattttccttataattcncaccanattacanttcaaaancctccaccaattccaaacaanancaaataaaanataannnntcnncctcaacatcaaaacttcctatcncccacctnncncctnatnntttnnnnatcaaaaaaaaacaaccatcacntcanaccccctnaccaccatttactcaccnnnctcncccttnaactcactccccncatactnnnaatacatta

SEQ ID NO: 47729 - DNA, 294 bp, Zea mays
  Clone ID: MRT4577_143536C.1
ggagcatattcatggatcctttctactagttcctgagagacgatcatcttatatatgcccttcagcagttaattcctttgtgtggcagtgcggcagactacgaagctatgatttatggactaaacatccccacatcactggacatcaagagactgcaggcatatctgagatcgtctgggggtcatgagcctgattaataaagatagggattgagcggactatcccatgataaaatactgcactgcctacctgagactagcagacaaattcagaggcccggaatttcaccatgta

SEQ ID NO: 47730 - DNA, 423 bp, Zea mays
  Clone ID: MRT4577_143537C.1
agacttcttacgttttctatttgaactggacattgttgatgaaacaacccagttaaaagatattagagcagaaagtcactctataaataatgatggaacgaatgttgctgatgatggcttaggaaaatcaaattcaacgagtccgatgtcttcatctcaaagtgtgaaacagcttgataaaggaagtcctaatggccttgtgcgcagtgaatcatttgaaattcattccatatcacccgctaagcaactgacaacagcagtttctacgtgcaacgatgttgatgaatatttagagaaaacagcttttcagaagggtcgttttaaggtgatacatgattatagcaagcttgaaggagcaacgccaagagagaaggaattattagatcgtataagtagtttagagcaaatgcttcttgctaccca

SEQ ID NO: 47731 - DNA, 384 bp, Zea mays
  unsure (1)..(384): unsure at all n locations
  Clone ID: MRT4577_143538C.1
aaatataantgnggngctnnaaaaaaaaagggaaaaaaaaaaaaaaaaaaaaaaaaagaaaaaaaaaaaaaaaaaaaaaaaaaaaaaaaaccgcggaccacccggagccacaacagaaaagcggccgcggcgcacacccaggccactacaaacaaccggggagccgaaacaacccgaacggccgaaggggggaggggcgcgccaaaccagccgcccaggaggaccagggggacccgagccggggccgcggccgcacggcggggccacgaccgccgccccggacccaccaagacccgccccgccaccacgagggcggccaccgccaagcaccacgcggaccacagaagggccaggggcaggcgcccccggggaaacaacgagccg

SEQ ID NO: 47732 - DNA, 1163 bp, Zea mays
  Clone ID: MRT4577_143539C.1
ccggggcgagccattcagaaggcagcaaatctagctatctcctctgcctcctgctggcggtcctgctgcgccatggcgctacagctgcgggccgccgctctctgtccgcccctgccactcaccgccttccatggccgcctcgttgcaccttggcctccgcctcccttggtcagcatagctgtcgccgccgcctccagcccgggcccctccgcgcccctctcctgccgcggcccggcgcctcgctggcgacgttcgagcgtgagggcgcgcaccggggccggcggcggcgggcagagggagtccccgtacgaggtgctcggcgtgtcgccgtcggcggcgcccaacgagatcaagcgcgcgtaccggcgcctcgcgctcaagtaccacccggacgtgaacaaggagcccaatgctcaggagaagtttctgcggatcaagcacgcttacaacactctgatgaactcagagtcacgatccaagtacgcgagcagcagttcggattcgtcctggtcctccagctcccgggagaggaaatcagctgctgcagaagagccgttctatggatttgcggacttccttaaagatttgcaagcagaatttcagaactgggaagctgggttgaattcggatcagaaacctaaaagcctttgggaagagttggcagcaattggcgaggaatttgtagagtttctggagaatgagttgaagattgatgactccagaccagaggacgtcactggagatgacccatacacccagtttggacagcaggcaaaaagcgctaaggatgacaagacgtcaacgaacagctttgatgatggtctttctgaaatagaggccgctcttgagaatctgaagaaggaactcggactgggctaaaccgttgatgtggcgactagagctgctgctgctgctactgactttcttgttcatacaaaggtattccttgtattgtatgtaacgattggtgataacaattagcagttgtgatctatcacattcgtttctgttttaaaaaaaaaaaaaacaggggctggcatatacctagatggctagcaaaagctaagtgccagaaagccaaaacgagcctataatttgggatggagaggattatcaatagctcaagagcttctttctgaattctaattgtcaggcgtgttcgg

SEQ ID NO: 47733 - DNA, 261 bp, Zea mays
  unsure (1)..(261): unsure at all n locations
  Clone ID: MRT4577_14353C.1
gaggagaaaatggatgggcagntctgtggaaagctgggagagattttgatcagggggaacaaacgttatgtatcttcgaggaggtccagaggatggagagatagaggatgcagagcgagaagatgggaaagaaaattgattctgacatgtatgtttgaatatgccgggggaaactagaactatcggatctttatgttggcattctatagaaggggagggaaatatagaattcctttgaaaaaggattctatgtggcgcgac

SEQ ID NO: 47734 - DNA, 564 bp, Zea mays
  Clone ID: MRT4577_143540C.1
ctttgctgcaacactagttggtcttattccagcatcttatattactgtaaaggtaatcttcttctttaacaacagatttggtatgattgtttaactcatttttagattatattgaatcattaatctgaaccgaagtccatgttgtatgttaagaaatcacttgaaacatggacttgggtgcttaaacatcaagagtatcaaatatgcgtcattgtttagtgttctaaatgtatgacattattcttgttttgaagtttgatcagtgaagatgaaagataacatgtgtcatgaactgcctaagcatgtctttgctgatggcttcaagcctctaacatatccttgaagttttctgtgtttagtactttagtagaagatggatgagcaaacatcatcatgggtgtctgggcctggggactgcttacctttaactgttgttaattccaattaaccagtaggaaccttgttagatccgtactgtccatccccgtgcaacctctaagactatactttgtgaagagttaccttttttaccgctaaaggctacttccttgacctagaaaccac

SEQ ID NO: 47735 - DNA, 936 bp, Zea mays
  Clone ID: MRT4577_143541C.1
gtgcaaccaatctgatcacccagtcgtcccttccaatacccggtgcggtgatgatgatggctcggggaagaggtggtgcgatcggcggcggcggcgtcatcgcgttggtgctcctggtcggcctcttcgtggcgacgagtgccccgccggtcgccgaggcggcggcgtcgtacatggtcggcgactacggcgggtggaagttcaacgtcgacaggtgggccaaggggaggaccttccgcgccggcgacgtgctcgtgttcagctacaaccgtgcggtgcacgacgtggcggtggtgaacgcggcggcgtaccggagctgcgcggtgcccaacaagggcgcgagggtgctgcggagcgggcgcgacaaggtgaggctcggcagaggcacgcactacttcgcctgcaccgtgcggggacactgccaagccggcatgaagctcgccgtcagggccgtgtagtagtcccgcctggcaacggcggccacgcccaacttccagagtccagatccatcgatccatgcctcaggtcggctgcgtgtgggatcctgaaaaatctagacctcctagctattttgcgttgcttagttaatctaatggcgagctatcttgtcgtgtgttgtgtgtacgttcatggcacgtttgttgatgttattgggttatgctatgcacgagtacacatgtccaaatgggccggcccggcagtgggcctgtgatccggcacggtcgtgacccggcatgagcatggcccgacccaactaaaacggtgctcggactggcctagcccgatagccttgtcgggcttgggctgaccgtctggcccacagtacagtcatgggtccggtccggttaaagagtaggcatggtaacggcccgcttgaggaattgattttgtaacgaccaatatatttttatctataatactaatgattctgttatt

SEQ ID NO: 47736 - DNA, 289 bp, Zea mays
  Clone ID: MRT4577_143542C.1
caccaaaactacccaatatcattaaccgtttcgatgatgtagcacggacttcacgataactgctggcctgtacgcaaaagctcagcacgctaattgtccacgccatgtcacacatcattgccgccgaacaggataatcactaacacaaagcagtctagtaccctttgtcgaggtaatcctagaaatcactctgcggggaacttttcaccacatacaacgcacttgcaggagatgcactcgttatccagacgacaacctggcgatgctgccatcggcccctttgtaggca

SEQ ID NO: 47737 - DNA, 350 bp, Zea mays
  unsure (1)..(350): unsure at all n locations
  Clone ID: MRT4577_143543C.1
gctcaanncctctccttcccaccgtctctcagtgtctcactctgagcgctgctctctgccctcggcgtctctctctacacatatatgatcagtctagggatgggatgtgcaaacctgagctgtgctgccgcctgttctagctgcagaactgcagctgtacgctgtgtggggcggggtttccctcctccgctcttctatctcctcctctcttggctgctggtctgccgggcagctgcgtatcgatccgagagcactgctcgctgttacgtgcgggccggcgcgccggcggcgcgcggtctgtgggcggtagacgacgaccgcatcggtcagaaggaatgtcgttcggacca

SEQ ID NO: 47738 - DNA, 542 bp, Zea mays
  Clone ID: MRT4577_143544C.1
ttttttttttttttttttttttttttttttttttttttttttttttttttttttgggttttttttttttttttttttttttttttttttttttgggcaaaaaaccttcggggttttttttttttttcccagggctttcccggtttttgggggcccaattggacccttaaaggggtccaaatcccggggaaaaaaattggtggggggcgggggatttttcccccccaataaccccccccttttttctgggggggaaaaaaattttggccctcccggtggggggtttttttttttgttttttggcccttccccaaaggaccccgggggggtgttgcccaaaaaaaaaaagccccccgggggggcccctgctttttaaggggggggggttttttccccaaggaggggctgcttttccttttgagaaccctttaaaccctggccctggggggccccttacagcaggggtttttttagggtttttaagggggactggccccccaattgggttgggggcagctcctttttgttccatggggctttccc

SEQ ID NO: 47739 - DNA, 822 bp, Zea mays
  Clone ID: MRT4577_143545C.1
gccggccggttccggaaataacatcgaaggtctagtccactccagccgttcccctttgccgctacgccgcgtcggcgccgctcgctcgctcgtgttcccaaacatacttcgcagagtcgcacgacgctaccactgcccccaggatctgcgtcatgctccagccacagccccttgatgccggcctcggcccccaatcttaacccccatcgatgccagtttggccttcatctccttggccccgccgtcttcaccgtcggtttcttggacggcgtgtcgtcgaactcctgcttgggtcggcgctatgaggcagagcagaatgtctcagatgctggcagtccaagggcagcctcctccttgcaagcgagagcgccgctgggcacgagctccatatgttcgacaaaatgccactacggcagcagctgcgtcggttgccctgtgcctctcgcctctcggctctagtgtgccccacaggctcgcgtttagctactccagcgcgtgcgcgacagcgcccctcttcgcctcggagcaccgccacgcaacgcctcaagtggcttggcgtcgactttatcgtcctctacggctagactgcatcgacaagaaggtggctgtagaggtcacggtgagcgcagtgtaccttctccatttgattcctttgttcgatagtagtgtacctaaatgatggcgccttgtgccattctgtcttccatgcttcaaaagcaatatgtcttctagagaaattgtatttagttttgggtgtccgtgtaaataattgtccttggtggtatcttcaatttcgattatttccctagctagttttgcatt

SEQ ID NO: 47740 - DNA, 322 bp, Zea mays
  Clone ID: MRT4577_143546C.1
tgtactatgtgcgaccagccgtacgctcacgaggaggcatactaatatgtacagctgcagacactgcactgatccaactaaagccactacgtccagactaacaagcgctagacaggcgcctgcattctggtgctgcgtgcacaacgagaactagaaagggagcagttgggggtgaaacagctttgtttaacccttttagagatgacggaatactccgagaagccatgaaaccaccagcagcaactattggagatgtacatgcaggtcttttgaggcatgagctaaaagctgatccactgaatgaatagagaagtcacacagc

SEQ ID NO: 47741 - DNA, 270 bp, Zea mays
  unsure (1)..(270): unsure at all n locations
  Clone ID: MRT4577_143547C.1
gcgtccacgttttttcactngaactactagataggatgctaccgagtttattcatcaactgccaaaggagcgcggtgaatacattccatctgcaacatgccctgatgccgcacgaatgaataatggagtgtgctgctatacttgctggtgcctggtgaaggaattcaagaaagatgacaaggtgacacgatagaacatgtaacactggacgggcaccaaaccgaagactggtgcgaaccacacacgttacattggatatgagcgatttct

SEQ ID NO: 47742 - DNA, 393 bp, Zea mays
  unsure (1)..(393): unsure at all n locations
  Clone ID: MRT4577_143548C.1
ggggggggggtttgtttttaaaaaaacgaaaaatgtgaccacgaccactttgccttgactccagccctacccaatcaaaggttcaggaacttaaccaggtcgtcaaaaaatcccaactggaaaaagggaaaaccaataactctttacaccaaaaaccgggggggagggggggaactannaaaacattctcaattaagtannctcaaaagaacatttttggtactatgaacgggcagagtttggcaaaggaacggagcactgtgngtcatatggccgcggccatctaatcatttggaaccggaacatccctggttagacatnnaggggcaacacgatcaaaatcgcaacggggggggagggcacccctcaccaagataatttcatacccgggaa

SEQ ID NO: 47743 - DNA, 499 bp, Zea mays
  Clone ID: MRT4577_143549C.1
cccacgcgtccggccacttccaggggctgggcgcccccccttcttccatcttccggcctccctcggccgctcgcgagcaccgaaggtgcccagctcttcgtcgggcctgcccctgcttccttgaactccccaccaggcgatcctctagactgcattgaatgggctcttttgtcaccggactgggggactcccttggctccactccagcatcggtggtcccatgctcgcacggctctcactaggggagccgaacccatgcacctaccccttcctggtggcctcggtatcacgactgggatctttcccgtttgtgggacaaatcctattctcgccgctgtcgctgtcgccttgttgtgaagacgccgctctgtatggactgtgctcgttcttacctgggccaccactctgatggaccacagctggtgcgtccatttgttccatctgtgactaaccttcgctggccaagacgctcctgccctcgtcgcacaactacttgcat

SEQ ID NO: 47744 - DNA, 466 bp, Zea mays
  Clone ID: MRT4577_14354C.1
ccatacctgattttttttttttcagaccccagttcaaagggttcttgtttcataagatttagggggggggaaaaaggacaccaaagtcgccccatttcaaaataaccagccctgtaaaccaggctagggccccccgttccttgcctccaacgcaggtgggcgtaaacccccgggggccattattcttccttccttttttagccccccaaaaaactcctttgggtgttaaatcgaacccccttgtttaacacaacagggttagccttgatgtcccatttttccttggcttactgggcaatggtccaatcgttcctgattttgccactcccacttgtgttaaaaatggacattttggcccactttttcttatccttgtaggctgcatccacccaatcctgtccttcgatgtacctgggaaagtcttacccaccagggaaataatcaccacccccaattccaaatttcc

SEQ ID NO: 47745 - DNA, 664 bp, Zea mays
  unsure (1)..(664): unsure at all n locations
  Clone ID: MRT4577_143550C.1
cattgggaccctcgaggccggccggacccaccagtgcaccaccaggtcaccaaccacgcacccgcctccgccagcccgcttctcccgccatgaagcagctccacaagtcttcccctacccacgcgccatcgccggcgcacgcaccggctcccaaggccgccaagacggcgcgcccaggtccgcgctcctggatcggctacgtcctccaccttcttcctcctccggccctacctctcgctctccccgtcttcccacctccccgacgcccgcccgctcttctccttcgccacccgctccggtgttcccgccggcttccgcccgccgcagcgccgcgtcgtcgtaacaggcggggcagggttcgtcggcagccatctcgtcgaccggcttctggagcagggggacagcgtgatcgtggtcgacaacttcttcaccggcaggaaggagaacgtcgcgcaccacctccggaaccccaggttcgagctgctccgccacgatgtagtcgagccaatcctcctcgaggtggaccggatctaccacctcgcgtgccccgcgtcgcctgtgcactacaagtacaacccaatcaagacgatcaagacaaatgtcatgggaactttgaatatgntgggtctggcgaagcgaattggtgccaggttttttgtgacta

SEQ ID NO: 47746 - DNA, 445 bp, Zea mays
  Clone ID: MRT4577_143551C.1
cccacgcgtccgaaccgacacaaacatacacacctgatacctaagcctgttgttataggcaatgcatgcaacgaagacaaagcaggggggcatggaggcagctgatatggaccaacagtctgcctgcttggtgcgagcctgcacggacgttgcccttgcccgggcgatggggcactagttcatcgcgctctactaacacgaggacctcgcggactgcgacatcctggaccgcctgcctgagcactggctgggctggcaccacagggccaacgcgaacctgaatgataagcttaatgaagtgaagacccacatggacaatttgcacaacgatctacaagaccatacctacaagagagcaggtactggctgccaataaacgaggtgggctactcagactgcactagagataaaagccccatacctggagctacggagcaatgacaac

SEQ ID NO: 47747 - DNA, 293 bp, Zea mays
  Clone ID: MRT4577_143552C.1
attgcgcacacaggacgttcgcacgctatcaacacattttgaggaaccttggacaacttaacctccagtttgacgacggattcctacatatcattaatgaccaaactggtgtctccacacactctcatggaaccctctcccgggggtccagcttgaagccaagccaagccgaattccaaggcccggttgcttttgggcacgttgtcgcttagcaccgcaccatccagtgtagggacggctctgctcatacctccccgtccttttggtatacctgcacccctgcgtacaaaccg

SEQ ID NO: 47748 - DNA, 1863 bp, Zea mays
  Clone ID: MRT4577_143553C.1
gtacctccacactagcccacagtcccacaccataccaggtcaccatacccgccggcgcctccgccgcctggccgctctcccgccatggagcagctccacaagtcttcccccacccaagcgccatcgccggcgcacgcaccggctcccaaggcagccaagccggcgcgccctggcccgcgctcctggatcgggtatatcctccgcgagcagcgcctcctcttcgtcctcctcggcgcgctcatcgccaccaccttcttcctcctccgtccctacctctcgctctccccgtcctcccacctccccgacgtccgcccgctcttctccttcgccgcccgctccgctgtccccgccggtttccgcccgcccccgcgccgcgtcgtcgtcacaggcggggcagggtttgtcggcagccacctcgtcgaccggctcctagagcagggggacagcgtgatcgtggtcgacaaattcggcacgaggacgtcgcgcaccacctccggaacccccggttcgagctgctccgccacgatgtagtcgagccaatcctcctcgaggtggaccggatctaccacctcgcgtgccccgcgtcgcctgtgcactacaagtacaacccaatcaagacgatcatatccttcacgactggatctcgccggttgattttgcttacattgaaagcgactcgttctgatcccatcgtcctcttctcttttttgtatttctggtggcgggtggcggctggcgggtgggttagtgtcagataggaatggaggaaaattggggatccgtagggaagaataatgttttgttaaatgcgatcacccagactgcatcatctgtatgttttcaaactggatttctttctttcttaaagcacccaaaaagttaaaacgattatggctagagatccgtttagataaacatcatttgcttgctctggtattgaacaactttagagatcagttgatgctttgctcaagatacttgaaataattacttctcagtatatgagttcaggggcgggggggggccgctcgcgatctagaactagtgtggtgttgaggtgcgtattgcccgtattttcaatacatatgctgtatgtgcctgtgtggagcaattttgttgcacaggcacgaatatgaggggagtttatggtgacggaaaacaaactcgaagtttccaatatgttgctgatcggttgctggactgatggctctaatggagagtgatcatattggtcctttcaacttgggaaacccaggcgagtttaccatgttggagctagcacaggttgtgaaggaaacaattgacccaatggcaaccattgaattcaaacccaacacagctgatgatccccatatgagaaagccggatatcaccaaggctaagcaactgctacattgggagccaaagggcgctctcagagaaggccttccgctaatggtaaaagacttccgtcaaaggatctcggatgagtaatcgaggcaatcctacgatactggtgaccggtttgattctgaactatgctggaaatacagtcagaagctctttaccgattggagccatgcagtacagtgtactgtgtacacagagactgtagaatcacccaggccccacttggaatgtggggatccatacaatttccactggatagtactgtttctgtgaaatagctgaaaagttcatgggaaaaaaaaaaaaaaaaattttacctactaggagagtgcccgtgcgttgcaacgggaacggtataaaacccccgataaactagtgtacaaagtgtgtgttatacttttataggttagtgctcgtgcgttgcaacggagacatataatatatcgatatcttatatatgcatgtgtgttatat

SEQ ID NO: 47749 - DNA, 805 bp, Zea mays
  Clone ID: MRT4577_143554C.1
gggaccctcgaggccggccgggccggatcgtttcttcttcccccctgtctccctcggggccggtacctcccacactagcccacagtcccacaccataccaggtcaccatacccgccgctccgccgcctggccgcgctctcccgccatgaagcagctccacaagtcttcccccacccaagcgccatcgccggcgcacgcaccggctcccaaggcagccaagccggcgcgccctggcccgcgctcctggatcgggtatatcctccgcgagcagcgcctcctcttcgtcctcctcggcgcgctcatcgccaccaccttcttcctcatccgtccctacttctcgctctccccgtcctcccacctccccgacgtccgcccgctcttctccttcgccgcccgctccgctgtcccgcccggcttccgcccgcccccgcgccgcgtcgtcgtcacaggcggggcagggttcgtcggcagccacctcgtcgaccggctcctagagcagggggacagcgtgatcgtggtcgacaacttcttcaccggcaggaaggagaacgtcgcgcaccacctccggaacccccggttcgagctgctccgccacgatgtagtcgaaccaatcctcctcgaggtcgaccggatctaccacctcgcatgccccgcgtcgcccgttcattacaagtataacccaatcaagacgatcaagacaaatgtcatgggaactttgaatatgttgggtctggcaaagcgagttggtgcaaggtttttgttgactagcacaagtgaagcttatggtgatgcacttgagcatgca

SEQ ID NO: 47750 - DNA, 513 bp, Zea mays
  Clone ID: MRT4577_143555C.1
tacgtaagctcggaattcggctcgagcgatcgtctggcagcagttccggtggccacagaccttagggttcaacctcaccttgtggagccacctgcgctgctgcttgccgaccacgatcatcatcacggccatcgtcctggtcatcgccgccagttactgaaccccacacctgctaggggctcggcctcgcacaaacggcggtgtgtgtagccagatggcaggcatgaacgcttcacaaaacagcttgcaccactgcctacatcgaaggagatgtcgtactgatgggcctttgctggtacgttgcaacagcatttatagccaccgggcaagtgtggacatttcgcgcaaccgatcccgcaaggcgcccagttgcccatctgctcaggcaaataatgcgcaagactagtagatggcatggagcttagaaagccggcaccactgcactaggatggcaaacacgtgctctagctagttcaggctggagagccggccaaaacgcatggtgtgcttctc

SEQ ID NO: 47751 - DNA, 1521 bp, Zea mays
  Clone ID: MRT4577_143556C.1
ccgccgcctggccgcgctctcccgccatgaagcagctccacaagtcttcccccacccaagcgccatcgccggcgcacgcaccggctcccaaggcagccaagccggcgcgccctggcccgcgctcctggatcgggtatatcctccgcgagcagcgcctcctcttcgtcctcctcggcgcgctcatcgccaccaccttcttcctcctccgtccctacctctcgctctccccgtcctcccacctccccgacgtccgcccgctcttctccttcgccgcccgctccgctgtccccgccggcttccgcccgcccccgcgccgcgtcgtcgtcacaggcggggcagggttcgtcggcagccacctcgtcgaccggctcctagagcagggggacagcgtgatcgtggtcgacaacttcttcaccggcaggaaggagaacgtcgcgcaccacctccggaacccccggttcgagctgctccgccacgatgtagtcgaaccaatcctcctcgaggtcgaccggatcgaccctcgaggccgacctcccaaccctagccacagtcccacaccatctgcggccgtgcccggcacccaccaggccaccaccaggtcaccaaccacgcacccgcctccgcctgcccgctctcccgccatgaagcagctccacaagtcttcccctacccctcgagcattcggcggcgcaccgggaggccaccaccaggtcaccaaccacgcacccgcctccgcgctcctggatcggctacgtcctccgcgagcagcgcctcctcttcgtcctgctcggtgcgctcatcgcctccaccttcttcctcctccggccctacctctcgctctccccgtcttcccacctccccgacgcccgcccgctcttctccttcgccacccgctccggtgttcccgccggcttccgcccgccgcagcgccgcgtcgtcgtaacaggcggggcagggttcgtcggcagccatctcgtcgaccggcttctggagcagggggacagcgtgatcgtggtcgacaacttcttcaccggcaggaaggagaacgtcgcgcaccacctccggaaccccaggttcgagctgctccgccacgatgtagtcgagccaatcctcctcgaggtggaccggatctaccacctcgcgtgccccgcgtcgcctgtgcactacaagtacaacccaatcaagacgatcaagacaaatgtcatgggaactttgaatatgttgggtctggcgaagcgaattggtgcaaggtttttgttgactagcacaagtgaagtttatggtgatccgcttgagcatccacagaaggagtcatactgggggcacgttaatcctataggtgttaggagctgttacgatgaggggaagagaacagcagagactttaactatggactatcatcgaggtgcgtattgcccgtacacatatggcgttgtttatttattctatatgtattgcaactttttcatcatcgccgacggctccttcgcgcagaggctcccctattacttctcccccccc

SEQ ID NO: 47752 - DNA, 826 bp, Zea mays
  Clone ID: MRT4577_143557C.1
cattgggtacctcgaggccggccgggatagctctggtcccgggccccatcgcatatgcacccttcgaccccggccgtagacacatgcgatgcacctgcaggcaggcggcgccgcgcacctccacctccagtatttcatgccccagcaccaaccgcaggaaccagccaccgacctagaggcgcaggagtcgtcggccgtgtgcaggcgcagctcgtccacttcgccgccggcgcctactaccatgtgggagtatcaccaggcggcgcatgcggcggccttgcagacgacctcgtcgccggcgtcttctttcccttcctggagcccttacgccgggactacggcggcgctcctcggcgccagctcggcctttatttccaccgacgccgccggcgccgactcgtcgtcgcccggcatgcgccttctgccagcgggggagcacggcggcggccatgcatacggcgaacaaagcaacatcgcatgctacaaggagaacttcctcgacctgctcgcgtcgaagaacgtgacacaggagatgttcgacgacgtccccgccggtcactacaccgcgcaggcgctgctgtcaggaaggttcgcggcaggctctgatgttgcaccgccggtcaagtacgaggtcaccggcggctcgccgctgttcttcgggagtgctgcagcagctgcaggtggtatgcaccagcaggggatggacatggcgggttgcacgacgccgcggtacacctacggcgccgaccaccaccagatgaaggaaggcggtgaccagcagcaagagcttgcgtccccggccatggcttcctttcttcagcagctg

SEQ ID NO: 47753 - DNA, 243 bp, Zea mays
  Clone ID: MRT4577_143558C.1
caagattgttgggtacgcagtaagttatcaccttaattagaataaaattggaaccttttagggtggccaacttgtacttaccacctgaaggtaaaggagtggtttttattggttctatttggcctatggttcctttccaattaatacttaatggatttttggattatttacttggccggcttaagccttggcctaaccttcttcaaaggattccaaatggtaaccagggctcccaaaaattac

SEQ ID NO: 47754 - DNA, 1630 bp, Zea mays
  unsure (1)..(1630): unsure at all n locations
  Clone ID: MRT4577_143559C.1
ctgacgcgtgggccggggtgtctgggtctgggtctgggtctaggcgagagcaagatgggcaacctggtctcgggtgccgcggcggcgagcggcggcgggaaggtggtgatggcggacggcagcgtgcgggcgctcagcgagccggtgtccgtggcggagctcatgatggaccacccgcgccacttcgtcgtcgacgcgcgcgtgctcaagaagctgggccaccacaaccaccaccaccaccagcagcagcagcagcagcagagcggggccaaggtcgcgccgctgccggccgaccacgtgctcggcgccggcggggtgtacgtgctgctgccggccacgcggggcaaggtgtcggccgaggaggcgcggcgcgcgctgtcggcggcgcgctccctggcgcggtcgcggtcgatgcccggcctcaggcggaagctttcgtcgtcgtcgtcgtccaacaagggccgggggcagcctggcgccgaagagccagcgcaagcgcaccgagaggaggacgaggacgaggcggaggcggaggcggcgaggccggacgggttcgaggagcaccggccggagttcctcagccgggagctgtccagcagggggtggaagcccagcttgcggaccatcgaggagcgcgtcctgcccaagaagacaccccattggctcttctgataagctgcacgcatctccattgcctccctctgatccaccagccgatgatcaagaaggtgctctgatcaacctaatcgtcttcgttttctcctcctcctcttcttcttaataatccattttccttctctgtcccaatgcaacgaatgcctgctgtgatcatgtaccctgtcaaactgcatgtacggatggcatgacgtgacctccatgtcacaagctgatatatagcgcgaccggaatttgccgtgtaaaattactctacttattaaatagaatcagaacaggtgtttcataaaaaaaaaaaaaaacatgctgccgctggcattatcgcacctttttcaccgcgcctgttcttcagacttttacggccgattgtacgatcatgaacggtactagatgtattcagacctttttctttctttctttctttctttctttctttctttctttctttctttgtgacgagcagggaaatgccaggctcacttgcgccccaattcagcctcgcacgtcagttgcttccggagtccagtgcaggtttgcttggtcctgaatgcaaggctgatgcaaccgccatgactctgcagcgaacacggacggagcagtgtgtatgcggaaagagacaggcgcagagctttagcgcttttgctttgtctatatacgaaaaaaaatgggagcctgggagtgataagattagagactcacaataaagccttgtttctgaagtttttacacaagtttttcaacaatcatgatattcctgngttaacttggtttggagcaactattacaggacagccaggctgcctggttgctcaaaaattagctccttttggtggaaaagcttgcttacgcttgtccaagattacaagggactgactgccccaaatatcggagatggaagaaccttcttttctgggagatatgtggaattcggacatcccggctaatcatacccctg

SEQ ID NO: 47755 - DNA, 341 bp, Zea mays
  Clone ID: MRT4577_14355C.1
aatatcttccctcatgttacatatgatgggatggtggacattgataaaatcactgatccagtgcaacggcgaagtgtacaaaatcaaatatgttattttggacagacaccatctcaattgctgacagttccacacataagaaggcggtcgttgacacaaatattacaattgcagacaatattccggaacccaagtgaggttagatcttatgtgcttccaagtccagagcactgcaatgttcctgctagcacgatgcttgtatccaatgattgtcttgtagtcatagattctaatgttcccacagcacatgtggcattgcaccattggcagccaaatacccc

SEQ ID NO: 47756 - DNA, 188 bp, Zea mays
  Clone ID: MRT4577_143560C.1
tttgggggcatatgagtagaatgcctgcttagactcattatgggacgtgtctccttccgcggctcttcttttgcattactcttattcaaataccacctggaaaccgctggtggtgggtatccaaacgtgctggagggccttaccttacctgctgaggtggaaggaacccgccataactatctgagtct

SEQ ID NO: 47757 - DNA, 143 bp, Zea mays
  Clone ID: MRT4577_143561C.1
gtttttttttttaaaaaaaggggggggaactaactattttccatatactactatgagcagttataagaactatgagaccctacacctaggaaccatttttaccaaaacatctcaaactcatcacttctcacctaatcaacttt

SEQ ID NO: 47758 - DNA, 403 bp, Zea mays
  Clone ID: MRT4577_143562C.1
acatgaaagattttgttatccaaactattctagtgactcggtaacatgcgcggttgcaaaacatagttcaggctaacacacaagggtagctactctaggtaacaaagatcatgatcgtttcagcactctaacactgacaacagcttaacggccgttggtttcacaaaacaattgtttgcattggcacacagaatgttatcgcatggtctcacatatgaccggatcattataaagatgtaaaggcatgcaggtgataggcggaaccctggaatagatttcccttggatatgttgattgtaaaatgggaagctgacttaatgcttcatttggtgcgctttagataatacaccacgcatgcgttcggaggagtttaaatgtggatgacatatggggcttgcttaac

SEQ ID NO: 47759 - DNA, 377 bp, Zea mays
  Clone ID: MRT4577_143563C.1
ttttttttttttttttttttttttttttttttttttttttttttttttttttttaaatggggaactcgcatttttccttttttaaacgacctcggtttttacattttggaaaaaagaaaaaaattgagaagcgagatcctggttgggggcatcagccacccttttttattccttttcttttttcgtttcacattcttgctcctaaatatcctttttagcttggggtggtggttttccaaacgactaaccctacctccaccacgtactccaactgagtgttggcgggggttattttggatcattcaaaagaaaaaaaaagggaagggaaaatgccgttaattgggctggctttagcttttcgatctcggacaataata

SEQ ID NO: 47760 - DNA, 391 bp, Zea mays
  Clone ID: MRT4577_143564C.1
aatagttataggaaacacttttataattgtgccaaaatggtacatgtaggtctacatagtgtaggcacaaaccacacaaagtttggctggaaaaggaaaaaaataaaaatatactttgccgagtgtccaaaggtgacactcgacaaagcgtactgtgccgagtgtcagcctaggtaacactcggtaaagtttgttttgccgagtgtcttacagggacactcggcaaaatatattttaaaattattttgcgcacaggcggttttagacttttactatctaataactcaagaattgactacaactttattctctatttactaatttatgatattatgttttttcttttccaggtgacaaaggagaagcgactctgatcttttcggtgtgagtt

SEQ ID NO: 47761 - DNA, 365 bp, Zea mays
  unsure (1)..(365): unsure at all n locations
  Clone ID: MRT4577_143565C.1
gagtaaaaatctagactataaatttaatatgtatggaggcgaattcctgtttttgacatataagaatggtggtaggggatgcgtcaatgtgatatggtttaaagtagcagaatacatgacgccaccaaccgggaagaggagttagtgttgcttcatccatccaatgcaaaccataagaagctcccaaccccacctcccaagaggcgcctgggaattaacatggttgatgggaggaccaagctagtagagtacaggctaagagttggactgcacaattagaaagctcactgggagtggaggtggggaggtggngagcaacataaaggagatactgctgcattgcatctcctcgtggattgtgggtc

SEQ ID NO: 47762 - DNA, 315 bp, Zea mays
  unsure (1)..(315): unsure at all n locations
  Clone ID: MRT4577_143566C.1
tcctaatcatnacataccttactcatgaacatttttactctcacatattcaaccacaatccactctacgtttcttcactaaaaccggatgcctctcttctttttaaaaaaaataatatataccattttacaccttctccctaaaatttctttcctaactacaaacaaatgtatcattttctttatttttaactctaaaattattccaatcttaaaataatcctccaacaactacactctttattaaattcaatcacaccattttcaacaattataacaatttctaattctataactattacttatcatttagaat

SEQ ID NO: 47763 - DNA, 781 bp, Zea mays
  Clone ID: MRT4577_143567C.1
tggtacgggaaagagagagaaggtgggagtggaatcgacaggggaaaattcggcacaagcctgtgtttcagagacaactcaggcgacgcgatggcgatggcggcgctgcgacgcgaggggaggcgcctcctcctcgcccccaccgtccccaacccgtcttcggcggccgcttccgctgcggtgacgcgatcctccgccatgtcgcaaccggagatggctccacttggtgcacgttctatttcaactcaagttgtgaggaaccggatgaagagtatcaaaaacatccagaagatcacaaaggctatgaagatggttgcagcatcaaagcttcgggctgttcagacgaggactgaaaattcacgcggcttgtggcagccgttcaccgcccttcttggggacgctcctagtgttgacgtcaagaagaatgtgattgtggccattacctctgataagggactctgtggtggtatcaattcaacctcggtgaaagttagcagggcccttcacaaactgacatctggtccagaaaaagaaagcaagtatgttatattaggagaaaaaggcaaagttcagctgttgcgtgactcgaagaacagcattgaaatgaccgcaagtgaactacagaagaaccctatcaactatacacagattgctgtgctcgcggatgacatattgaaaaatgtggaatatgatgctctaagggttattttcaacaagttccattctgtcatatcgtttaagcccacatggtaacgatactgtcccctgaggttgcagaaaa

SEQ ID NO: 47764 - DNA, 1968 bp, Zea mays
  Clone ID: MRT4577_143568C.1
cattgggtacctcgaggccggccgggaagatgaatggtgaacaaagagagatattgacaatctagctgagtctccagttttctatagtgccatggacaatagccgacgctagacaatgcatgtcctcgagcttgcgagcccgtatggctgccatgcacggatctagcagaaatgatggcgatatgcttgatcgtctcacgcttacttacaacaggacacgcccagcatccatcaccacagagcttactgagatatatctggcgcatcagcccttgaatgatacgtgaatagactatgggcacttctccatttttccccatctgtgttcctcacacacgagggcgtgggcttccgcgtgggcagacgagtgggcggaggcgtgggcggacgcgtgggcggacgggcctcggaccaggctgcgtcccggaaagagagagaaggtgagtgctttgacaagggaaaaaaaaccagggtgtgtgtgtgtgtgtgagagagagagaggcgaaggcaactcaggcgacgggatggcgatggcggcgcttcgacgcgaggggaggcgcgtcatcctctcctccaccgtccccaacccgtctctggcggccgcttcctctgcggtgacgcgatcctccgccgtctcgcaaccggagatggctccacttggtgcacggtctatttcaactcaaatcgtgaggaaccggatgaagagtgtcaggaatatccagaagatcacaaaggctatgaagatggttgcagcatcaaagctccgggcagttcagacaaggactgaaaattcacgtggcttgtggcaaccgttcaccgcccttcttggggatgctcctagtgttgacgtcaagaagaatgtgattgtggccattacctctgataagggactctgtggtggtattaattcaacatcagtgaaagttagcagggcccttcacaaattgacatctggtccagaaaaagaaaccaagtatgttatattaggagaaaagggcaaagttcagctgttgcgtgactcaaaggacagcattgaaatgactgcaactgaactgcagaagaaccctatcaactacacacaggttgccgtgctcgcggatgacatattgaaaaatgtggaatatgatgctctgagggttattttcaacaagttccaatctgtcatatcgtttaagcccacaatggtaacaatactttcccccgaggttgcagaaaaagaatcagaagctggtgggaagatgggtgacctagattcttatgagattgaaggcggcgagacaaaatcagagattttgcagaatctagctgagttccagttttcttgtgtcctgtacaatggtgccctagagaatgcatgcagtgagcttggagcccgtatgtctgccatggacagctctagcagaaatgctggcgatatgcttgatcgtctcactctcacttacaacaggacacgccaagcatccatcaccacagagcttactgagattatatctggtgcatcggcccttgaggggtagtgaagagactgcggacttcttccttttgccgtttgtgttcctctcccatgaaggcttttttcctcgggagtctcagtttcagctcctttcatttcacttttccttgagaaacttgctctcatgctttgttgcaataatcaggccaacgacaatgatagtgccgtgcacccttggcacattgcagaaagagtgtaaacagctatggttaatgggtggttttcatgaatggtgatgatcaatatatgtattgttgcacatgatcagcaatgttgtattggtggggtgactaatgcctgccgccaaactgagcgatataacgcgtcattaatgacatttgttcaatctggactttaaacatttttccaaaagaagaatctattttgaattttggtataaaaaaaaaaaggaaaaaaaaaaaaaaaaaaaaaaagggccggacgcgtgggcatag

SEQ ID NO: 47765 - DNA, 486 bp, Zea mays
  Clone ID: MRT4577_143569C.1
agcaatcaatggtagccactaaacagtttttccatttgagacgtcctccttgggcggtggtactactaggaagctacagacatcgctaactggcaacagattgtgctgtcaaaaaggttcgggggaggggtgaaactcaagctcatcacaacattgcattgcatgcagtttaaacgcatagagttgtttcttctccctcttcaagccgaagaccatttttttttatcagtacgtacgtcgcacgttttgcctctcatctccttggcaagctcgagctctggggcctggtcatggacctgctcctgctgcccctgcggctgccgttgccgttgccgtccctgccccggccgcccttccccgccgacccggggctctggctgaggcgccgcgtgagccgcctccgcgagttccagccggcgttcccgagcgccgtctgggcgacgctgtccttgggcacttcccgcgcgcgctgcggtttgacggcct

SEQ ID NO: 47766 - DNA, 177 bp, Zea mays
  unsure (1)..(177): unsure at all n locations
  Clone ID: MRT4577_14356C.1
caggcgccgatctatagactatggccgccgcgggctcctcgcgggccttgtgctacatagagtaagggactggaaaanaacatctccctcntcactggtggcgccaccggcatcggcaaggccatcgttcgcctcttcatggatcacggcgccaaagtctgcatcgcggaccattca

SEQ ID NO: 47767 - DNA, 346 bp, Zea mays
  unsure (1)..(346): unsure at all n locations
  Clone ID: MRT4577_143570C.1
cgggnaccgcacagcctcccacatgtcactgcctctacagtgtctgcgtcgcgcaacggttccttgggcgcaccagctccggcccgacgcaccggcgacaaggaggtcctcaacaatgcgcacatctgtccgcaaggccaccggcaccgccgctgcggctctggctgcttgcgccccggttgccggctggtgcaggggccaggaggtgctcgtgcgcccttgggcgggcgcggctgggctggttcccacccggcgcaccggttccgccgccgcccccctccgatcgcgggatcaacggcaggcttcccggcgacgtcggcttcngtccctgcggcgtgccgtgcgg

SEQ ID NO: 47768 - DNA, 414 bp, Zea mays
  unsure (1)..(414): unsure at all n locations
  Clone ID: MRT4577_143571C.1
atcaacgaaaatcttttttactaaaaactttttagtctgtttatcaaaagcttaggtttataatttaatcttgtttctgccctatgatttaaatggccgtggtattttaactacgcgaaggtagcataataattagttttttaattgaaaactagaatgaatggatttactaaaaaagtttttgatgattttcgtttattgaatttttaatatcagtgaaaatactgatttttttttattagacgagaagaccctaggatcttaatattttaaattattaaaatattttaattggggtaattatttttttataaaaatagatttttattatagaactttttttcttagtttttgataagataccctagggantaacagcgcaattatttttattagttcctatataaaaattag

SEQ ID NO: 47769 - DNA, 624 bp, Zea mays
  Clone ID: MRT4577_143572C.1
gcgggtctacaggccttcgggctcctcgacgccgccgcgtcccgccgacgtcgacgccttctgcgcgcgcctcgacgcgccgcccaaagtcaggttggtcacgctcacgcacgcgcacgtgcccgcgcaaaaaaaacgcgccttttcctagtcctttgctcccctttcctcccgaggatcggagcaaatactccggtagtaacgcaatcccgcgcgcagggagaccgtcaagacctacgcggagaagatgcacgacgtgatcgtcggcgtcgccggcgagctggccaccagcctggggctgggcctggaggagcactcgttccaggactggccgtgccagttccgcatcaacaggtacaactacacgcaggagacggtgggctcctccggcgtgcagacccacacggactcgggcttcctcaccgtgctccaggaggacgagtgcgtcggcggcctcgaggtgctggaccccgccaccggtgagttcgtgcccgtggaccccgtcgccggttccttcctcgtcaacatcggcgacgtcggcacggcgtggagcaacgggaggcttccacacgtgaagcaccgggtgcggtgcgtcgcgcccgtgccgcgcatctccatcggcat

SEQ ID NO: 47770 - DNA, 1257 bp, Zea mays
  Clone ID: MRT4577_143573C.1
gttttctttttgaacgtaactgacagaagctatctgcctagctacggcgtgtcggttgcttgtctcaccaaagcagcgacatggaagcctgacagctcgtcgcgtcgcgccatttccacccaacaaagcggcggcgccaccgcgccagcacgcactgcttctgcttgtgcgtgctcctccgttccgggcacgcctctaaagtctatacagcctcgaatccatcccggccgccgctcctgggggatactacagcgagccgaccgaagcggggatggcggagatccctgtgatcgacctgcgcgtcgcccgctcggcggccgaggagtccgcgcggctgcgagccgcgtgcgagcgcctgggctgcttccgggtgaccggccacggcgtgccctcggtgctcctggcagagatgaaggccgccgtgagcgcgctcttcgacctccccgacgacgccaagcgccgcaacgccgacgtcatcaccggcagcggctacgtcgcccccagcccgaccaacccgctctacgaggccttcgggctcctcgacgccgccgtgcccaccgacgtcgacgccttttgcgcgctcctcgacgcgccgcccaacatcagggagaccgtcaaggcctacgcggagaagatgcacgatgtgatcgttggcgtcgccggcgagctggcgtctagcctggggctagtcgaggagcactcgttccaggactggccgtgccagttccgcatcaacaggtacaactacacgcgggagacggtgggctcctccggcgtgcagacccacacggactcgggcttcctcaccgtgctccatgaggacgagtgtgtcggcggcctcgaggtcctggacccgggcaccggcgagttcgtgcccgtggaccccgtcgcgggctccttcctagtaaacatcggcgacgtcggcacggcgtggagcaacgggaggctgcacaacgtgaagcaccgggtgcggtgcgtcgcacccgtgccgcgcatctccatcgccatgttcctgctcgcacccaaggacgacagcgtgagcgcaccggcggcgttcgtggacgcggaccacccgcgcaggtacaaggtgttcaactacaacgactatcggaggctcagactgtccaccggcgagcacgcaggcgaggcgctcgcacggatggcggcgtgacgtggctggagctgcaaattggattggaagccgagacaagccgttagttatttaccatgcccgtgcgttcacccgcacatcatatt

SEQ ID NO: 47771 - DNA, 332 bp, Zea mays
  Clone ID: MRT4577_143574C.1
ataaagggcggccgggatccagctttcacacgtactagcttgctcctctatactcgattgtttgaggcatgatatacgatcactggagcaccatgtgcatatacaaagaaggaaacaagcatgtgaaggatggccatgctatccgtccaggttatgagccaccagttggcaacagggcccaagaagtttcgagcacacccgaggaaatggttgccatgcctgatatgatcaaataagaggctgttgaccaatgatctcctgatgtgacccaccaggtgtcccacccaacagaaaggcgacacatattactcgcctgctgcaaaccgcaaccg

SEQ ID NO: 47772 - DNA, 1411 bp, Zea mays
  Clone ID: MRT4577_143575C.1
ccggccgggctcttgtctcaccaaaccggcgacatggtacatggaggccagcccgtcgcttggcgccacagtctcggtgccgtccgtccgacaagcggcgccagcgcacgctggctgctcgtgcacgcctctaaatacggcccctggcccgcccccgcccggaggccaatcccgtccgccgccccccaccaaccacgaaccacgcaagcgaacccggccggcgcggggcagcggcgatggcggagatcccggtgatcgacctgcgcctcgccggctcgtcgcccgacgagtcggcgcggctgcgcgacgcgtgcgagcgcctgggctgctttcgggtgaccggccacggcgcgcccgcggggctcctggccgacatgaaggccgccgtgcgcgcgctcttcgacctccccgacgacgccaagcgccgcaacgccgacgtcatccccggcagcggctacgtcgcgccctgccccgccaacccgctctacgaggccttcgggctcctcgacgccgccgcgcccgccgacgtcgacgccttctgcgcgcgcctcgacgcgccgcccaaagtcagggagaccgtcaagacctacgcggagaagatgcacgacgtgatcgtcggcgtcgccggcgagctggccaccagcctggggctgggcctggaggagcactcgttccaggactggccgtgccagttccgcatcaacaggtacaactacacgcaaggagacggtggggctcctccggcgtgcagacccacacggactcgggcttcctcaccgtgctccaggaggacgagtgcgtcggcggcctcgaggtgctggaccccgccgccggtgagttcgtgcccgtggaccccgtcgccggctccttcctcgtcaacatcggcgacgtcggcacggcgtggagcaacgggaggctccacaacgtgaagcaccgggtgcggtgcgtcgcgcccgtgccgcgcatctccatcgccatgttcctgctggcgcccaaggacgaccgcgtgagcgccccggaggcgttggtcgacgcgggccacccgcgtcggtacaagccgttcaactacgacgactaccggaggctccggctgtccaccggcgagcgcgcaggcgaggcgctcgcgcggatggcggcgtgatgtcgtcacgcacgtgcaagccgttaattataggctcgcgcatgcatacgcctacacgagaggttgtctcgttaagccgttctattaaaatgtgtgggggagaaagatgactaccgtggtgccatgtggattgctatcgggtctgatcaataaaatcttgcaacacttgcaactgcgaataagtgggggagaaagatgactaccgtggtgccatgtggattgctatcgggtctgatcaataaaatcttgcaacacttgcacgtgcgattc

SEQ ID NO: 47773 - DNA, 835 bp, Zea mays
  unsure (1)..(835): unsure at all n locations
  Clone ID: MRT4577_143576C.1
agtgacgtttccaagtgcattccatctgcccaactcgcagcaagccgccgccaggtcgtcaagaagctgctggtcgtcggggtcccagaatgctccataattccaattgagggtgccagagaagatcgagtgagaagttgcgcgtgtgaagccatcacaccaattaaagatcgagatcatccatggctagttctctacttcagcagctgctgtctctgctgctgctcctgctgccctctcctcttcgtctccgggagcatctatcaggaaaccatgctgtcagcgccaacaacttccaccccatctttctggtagctggggtgagctgcagcgacctggaggcacgcctcaccgaggagtaccggccgtcggtgccgcactgcggcgccatgaaggggaagggngtggttcggtctgtggaagaacagttcggagctgctgtctcgtgactacgtgcagtgcttcgaggagcagatgagcctcgtctacgaccctgccatcaacgagtaccggaacctcgccggcgtcgagacgcgagtgcccaacttcggctccacaagagccttcagccacaagaaccccctcaagtcagactggtgcctcggaaagctgagagccgcactggaagacatgggataccgagacggagacaccatgttcggagccccctacgacttccgctacgcgccgccgtcccccggccagacgtccgaggtgtactcccgctacttcaaggagctgatggagctggtcgaggccgcgagcgagaggaccccggagaaggccgtcatcctcggncacagcttcggcggcatggtcgcgctcgagttcgtcc

SEQ ID NO: 47774 - DNA, 257 bp, Zea mays
  Clone ID: MRT4577_143577C.1
gccgccatgaactccctcgccgccgtctccgtgtaccccgtggccatcaagggtagggtcggtcggtccgtctccgtaaggaagctcgccggcgcctggccctcgccccgctccatccgcaggtcccgcgttgcgcgccgtggtggtcaagtactgactgctagagggtgtactttgacttcgaagacatagattagagcaccggacagtgggacctgcacggctctgacgcgcccccgccctaccacccgctacag

SEQ ID NO: 47775 - DNA, 1933 bp, Zea mays
  Clone ID: MRT4577_143578C.1
gaggctcggccggggtgaacagtgacgtttccaagtgcattccatctgcccaactcgcagcaagccgccgccaggtcgtcaagaagctgctggtcgtcggggtcccagaatgcgccataatgccggctgagatcgacagtgtccctttggccctgtctcgcgtctatatatgacaacccggcggctctaaaactaatcgatgagatttatcttgggatcggctagagaagatcgagtgagaagttgcgcgtgtgaagccatcacaccaattaaagatcgagatcatccatggctagttctctacttcagcagctgctgtctctgctgctgctcctgctgccctctcctcttcgtctccgggagcatctatcaggaaaccatgctgtcagcgccaacaacttccaccccatctttctggtagctggggtgagctgcagcgacctggaggcacgcctcaccgaggagtaccggccgtcggtgccgcactgcggcgccatgaaggggaaggggtggttcggtctgtggaagaacagttcggagctgctgtctcgtgactacgtgcagtgcttcgaggagcagatgagcctcgtctacgaccctgccatcaacgagtaccggaacctcgccggcgtcgagacgcgagtgcccaacttcggctccacaagagccttcagccacaagaaccccctcaagtcagactggtgcctcggaaagctgagagccgcactggaagacatgggataccgagacggagacaccatgttcggagccccctacgacttccgctacgcgccgccgtcccccggccagaacgtccgaggtgtactcccgctacttcaaggagctgatggagctggtcgaggccgcaagcgagaggacccggaagaaggccgtcatcctcggccacagcttcggcggcatggtcgcgctcgagttcgtccggaacactccgccggcgtggcggcgcgagcacatcgagcgcctcgtcctggtcgcgccgacgctccccggcgggttcctggagccggtgcgcaacttcgcgtccgggacggacatcctctacgtgccagcgacgacgccgctggccacgcgagccatgtggaggagcttcgagagcgccatcgtgaacttcccgtcgccggccgtgttcgggcgcctgcaggcgccgctcgtggtcaccagggagcggaactactccgcgtccgcgcacgacatggagcgcttcctcgccgccgtcggctccggcgaggccgcggagcccttcaggagacgggccgtccccaagatgggcagcttcgcggcgccgatggtgcccatgacgtacatcagcggggtcggcaacaggacgccgctgcggctggtgttctggggcgaagacttcgacgcggccccggaggtggcggcgtacggggacggagatggcaagatcaatttgatcagcgtcttggcgtttgagaaggagatgcgtcggcagccggagcagaagaagcagttcaaatccatcaagatcaataaggcccagcattctacgatcgtcacggatgattttgccctgcacagggtcattcaagaaattgttgaggccaataatcagaagattccatcctaaattattcatgtcatgtatgcattaccgagctgtgggggccaatagtgggttgggagttgggacatcggttccgtgcttaaaacggtcgtggtgtggtcgcaattcaatcgattagttatttgttaacgtcaattgcttgcctcatgaacttgctgtgataaggaaagaccacaattattttccgcttgtcgtgtgcgttgtaccgtataatgttaataaaaacaagagtaaaatatagtagcagtcatcaaacgaaaaaaaaaaaaaaaaaagcggcccatttctattctggggatataacttttaaacaagctcaaatggggc

SEQ ID NO: 47776 - DNA, 430 bp, Zea mays
  unsure (1)..(430): unsure at all n locations
  Clone ID: MRT4577_143579C.1
cggcccggaaccaaaccccgggacgacgagccctcccctcggcggccgccccgaaaaacagggnaggctgaggaacggaccggaccaacccccgcctactccaaggagaggcgacccaacggacgaggggtgcaaacaagcccccccaagcgggccaaagacccacccgaataccacgggggcacgcaacgcgacccacaaacccggaagcaaggaaaccccacaacctggagccccccgcccccacacgggaagaccacaaagaagcacggagcaagggagggatgagcaacgcacacaagacacgaaaccagaatggcaacacgcacacaaggcacaacaagagcccgcaacacaacccgacgagggcacaacccaacaagagcccctgacgcaagcacgaagaaacaaaagcgcggaaccgaaggcc

SEQ ID NO: 47777 - DNA, 756 bp, Zea mays
  Clone ID: MRT4577_14357C.1
acctcgaggccggccgggactatgacccctgctgccttcccaccttcctcgatctccctagctcgctctccaatctcccatcgatcttcgccatccatccatcccgtcgtcgtgatagatggcggcagtccagccgtccgtggagatgacgacgcagcaagggccgccagccgccagctattctccggccagggatggcggcggcggcaggagcgccgaggatgaggagaaggagaaggcggcggcgatcgacaactggcttcccatcagcgcgacgcggaatgccaagtggtggtactccgccttccacaacgtcacggccatggtcggcgccggcgtgctcggcctcccctacgccatgtcccagctcggctggggtgccggcatcacgatcatgctcctgtcgtgggtgatcacgctgtacacgctgtggcagatggtggagatgcacgagatggtgccggggaagcggttcgaccggtaccacgagctggggcagcacgcgttcggggagcggctgggcctgtggatcgtggtgccgcagcagctggtggtggaggtgggggtgaacatcgtgtacatggtgaccggcggcacgtcgctgcagaagttccacgacgtgctggtgtgcggcgacgcggcgtgcgagggcgggcgcaagatcaggctcacctacttcatcatgatcttcgcgtcctgccacttcgtgctggcgcagctgcccaacttcgactccatctcccggcgtgtccctgg

SEQ ID NO: 47778 - DNA, 436 bp, Zea mays
  unsure (1)..(436): unsure at all n locations
  Clone ID: MRT4577_143580C.1
gggggccttnctnttcctgcttgagcactggttntcctttgttggtttcgttctgttggcggtcgttttttacagttgctgggtcgttctgtatctttgggggcatttgtgggtgcggcttctgtttcatcattatgatttagagagggggcggcaatcctttagggctttgcgtgtttttcgtccgcccgttctatccactaatgtgacatggtgtgctggtcatctgttttctttttaattgttattcttttttatttggcttttttttttttgtctttttttgttttttattttttcttttgtaattggcgttgcctgtagaatttttttttttttttttgttcccttgcctttttgggtcctttacttatttgtattggtgataaatgatattcttcaatttttttttttgtgcattgtttttgattttgtg

SEQ ID NO: 47779 - DNA, 350 bp, Zea mays
  Clone ID: MRT4577_143581C.1
ggaaccccaaggtcccttttttttgggggaccggaataggccctttttccaccggccctccggtggggccttccgaggggggtcctgggtttttggcccaatcccgcccgggggaaacccccctttccgggacggggcgggggaaccccaaccaattggggggacgcccgtccgtccttttttaaaacagaactaaaggggaaatcctgttggaaatcccctgggggggaatcccgggggcctcccctttttggtcgggggggtgggggaaaaccaccgtgtgggggacctcggccggcccgtttcggtttttggggggggggtcccctttaagggggacgacccttttt

SEQ ID NO: 47780 - DNA, 504 bp, Zea mays
  unsure (1)..(504): unsure at all n locations
  Clone ID: MRT4577_143582C.1
gcccgagcctgtatactgtacagcctncgccctttttttctttttttctttttttttgcaccggacccccnacaaccgcgagacagtgataacaacagacaacaaatatcccgaaactaacattattcaatgtattactaaatctagaaactaaaatcctgtcgctgggatggaaccaaaggcaggtaaacaatttaaaatcaaaggcctgagccaccacccattgacattggaattgcacgagatgatggggcttggtgagtcaccttggcgtcaacaacaactgtattaaaggtgaagaaggatttccccaccgatgcagaaaaatccaagtagaaccttacaaccttggcgggaggaatgataccattagccatgaagttcttatactccccttgagccaaattgtacccatacctgaaggtctcataggctagaaccttctcagtaaccacactgtcattaacgcctgcattttttagcatcaatttaagtggatagctt

SEQ ID NO: 47781 - DNA, 292 bp, Zea mays
  Clone ID: MRT4577_143583C.1
cacgcatacgagaccgctgccatcaatcacttgttcaagtttgggttccatgacaacattacgtggctgagctaactctccaaactgaccaagcttcaccacgagaacatcgctacatcattatctactacgccgacggaaaccatcggactcttgcttacgattccgtgccttgccgcaccttagaacatcacctgctcgatctaccggcagacaagaaaccaatagactcgtgcactatgatcaaagtggctcacggcgcaacacatgagctacagtacctgcacgagac

SEQ ID NO: 47782 - DNA, 223 bp, Zea mays
  Clone ID: MRT4577_143584C.1
cgacatcctccacgacgccaccatgagggatgctcgcgtaggctgatcctgatgagctccggcttcggcacctgctgactgctgcttcatcctcgattgtaccaagcatgcatatacagactatgctatacaaactcatcaacctagttcactggcacttgcctgacataattattccacgagacatgatcaccaccattacctgatatatcactgtcatatc

SEQ ID NO: 47783 - DNA, 504 bp, Zea mays
  Clone ID: MRT4577_143585C.1
tgggtacacggccccccccctcgagtttttttttttttttttttttttttttttttttttttttttttttttttttttttttttttttttttttttttttttttaacaaaaacccacggttactgattttatgggggtttatgtactcaaaaaaaccaaatgctgacattaacctcccccaaaggggataaacaaaattggccaccaaaatggaaaaatgcccaaccgatcaattaaagcccacataaaaacatcacctatttgggaaaaaggatcacggatcaccataaagggagcttttgcccggccacaaacggaaacggagctggacccctggaccccaaagggaaaacactggggcaagggggggggccaaaaaaacttgaaaaaaaccggcccaaacagggtaaaaaaaaaacaggaggatcccctatgaatttcaacacaccattgcccttcctgaaggggttcctaaatccacctaaccccttgatgggcttttgg

SEQ ID NO: 47784 - DNA, 170 bp, Zea mays
  Clone ID: MRT4577_143586C.1
caggaagctaccctctctctctctctccccgcacgtcagtctcatcagtcgcacccacagcagtgataaaaggctcgagacgaggcgacaagaatctctcacaagaacacctctgctctgctcgtatcctccttgctatctccttgccttgccttgcctttgccttccct

SEQ ID NO: 47785 - DNA, 475 bp, Zea mays
  Clone ID: MRT4577_143587C.1
gaccggtgtgttcgtactggactatgtacgagactgaaagccttcttccattttctacctgacgccgctgcagctacaccccattccgttgataccatgagggagtgcatctggattcacgtgggtcaagtcggtatgcacacccgaaacgcgcgctgagagctgtactgcctagatcatggcatataggttgttggctagatgcccggggacaagaccattgctggcggggtttgtgatcagaacacatttttcagtgttactgctggtgctgatgacgaccctggcactgaggttgttggccttgaaccaactgagatcaacaaggtgatgactgttgcctacagccagatcttggaccctgtgcacttcatcaagggtgtggaggatacctgccacaacattggccgtgggcactacgacattgggcttgagatcgacgacctgaaggtggttcggatcatggagcttgacg

SEQ ID NO: 47786 - DNA, 307 bp, Zea mays
  Clone ID: MRT4577_143588C.1
ctccagattcacaggtcttaccagcctaccagctactgcagtgcagattaatcttcattttgatctctgataccttgaagcaatttttttttaacctctgaagacagtaccagtcctatgttggtggcctacctatttgactaggacttaatgtgagtgaggcctacgttttgggtatactttttgttgttgtattgagttgtaccatttatgcagaactacttacagtgtttgggagtgaaattttcacatttcagagataacctggaagccatacaacgtacaaaccctgagtcgacgcggccgc

SEQ ID NO: 47787 - DNA, 362 bp, Zea mays
  Clone ID: MRT4577_143589C.1
aaagcagagagagagagagagagagagaggcaggctaggttaggaagacgcagccaatggcggggcttcacttcgtgctcgtgccgctactggcgcagggccacataatcccgatggtggacctggcgcgcctcctcgccggccgcggcgcgcgcgtcagcgtggtcaccacgcccgtcaacgccgcgcgcaacggggccgtcgtcgagagcgcgcggcgagcggggctcgacgtcgagctggcggaggtcgcgttccccggcccggggctcgggctgccagaggggatggagaacgtcgacatggtggcggaaaaggagcacttcatgcccttcttccaggccacgtggaagaaggacgcg

SEQ ID NO: 47788 - DNA, 808 bp, Zea mays
  Clone ID: MRT4577_14358C.1
ccggccgggactatgacccctgctgcctttccatcttcctcgatctccctagctcgctctccaatctcccatttctctctctctctctcgtcttcgccatccatccatccatcccgttcgtcgtgatagatggcggcagtccagccgtccgtggagatgacgacgcagcaagggccgccagctgccagctattctccggccagggatggcggcggcggcaggagcgccgaggatgaggagaaggagaaggcggcggcgatcgacaactggcttcccatcagcgcgacgcggaatgccaagtggtggtactccgccttccacaacgtcacggccatggtcggcgccggcgtgctcggcctcccctacgccatgtcccagctcggctggggtgccggcatcacgatcatgctcctgtcgtgggtgatcacgctgtacacgctgtggcagatggtggagatgcacgagatggtgccggggaagcggttcgaccggtaccacgagctggggcagcacgcgttcggggagcggctgggcctgtggatcgtggtgccgcagcagctggtggtggaggtgggggggtgaacatcgtgtacatggtgaccggcggcacgtcgctgccagaagttcccacgacgtgctggtgtgcggcgacccggcgtgcgagggcgggccgcaagatcaggctcacctacttcatcatggatcttcgcgtcctgccacttcgtgctggcgcagctgcccaacttcgactccaatctccggcgtgtccttgggcgccgccgtcatgtcgctcagctacttcaccatc

SEQ ID NO: 47789 - DNA, 389 bp, Zea mays
  Clone ID: MRT4577_143590C.1
agactgcacaaccagattagctgcatggctggcggacaatgtgcaagccgcggaagagttgtgccaagcctcaatggtgttatagcgagacgtcgttgcacaagctcctgagccaacagttggaaatgcataaagcccggatgttgaagcagaaagtgttaacttggccgtgaggcagacaactcctatttgtaatgcaatttgacagtgacgaggatgcgtgttcaaagaagaaatgtgaaataggatggttcttctccttgatactggatactacttatgtcgaagtgaagctgttttccattagacccgaatcgtcgacgagatctacaatgcatcaaacaattaacttgtgaggacacaaacccttgtgatgagtgccattgggc

SEQ ID NO: 47790 - DNA, 768 bp, Zea mays
  unsure (1)..(768): unsure at all n locations
  Clone ID: MRT4577_143591C.1
gtaccctcccggtttgnccgggtcagagtaatangtctcaaataaatgtttatcgttatcctgtttatcgtggtccaaattatttagaggtaagcaacatcgtttggtccgcttcatttaaaatatgaaagctacttaatggatattttctattagtgttttaagtctttaggatttaagttgtgatcgtataaaggtctatagtccttgataatgctctaccaacaagactatagaatagtgtaatgttcatataattagcgtattgtgcacattagtccggatgagaatttacaaaggtagttactgtgcctctatctttgttttgcacttagatgtctaaaactaataagtctaagtttgttagtcttagggtgttgagctttaactaaggagggtagagcgtgtgtatagtttatcggttccgtgatgtggcagctagatctaattagactgaaagaacgcgatcgttgtacttagtaatatcccggcatctggtaattgcttttaaatgttttttgtgcctcgtcactaggaattcgattcattatcgtgtagccaaaattaggctaattatgtttaaagtatatgatttgttgtttgtgatgtttgtgttatgttcgtttaatttaaagaagcgtaattattacgcgtagtcgcaacgcctcgccgcttaggtgttccgctatcgcgtaacactatttagatttataatattttcgtcgatatgcattcatgtgcataatgcatttcattcaggtacgttaa

SEQ ID NO: 47791 - DNA, 521 bp, Zea mays
  unsure (1)..(521): unsure at all n locations
  Clone ID: MRT4577_143592C.1
cnttccacaaacccagcgccatgccaatgccgttgcccgccgtgggcacgggccccgcgtcggcgatagctccggtcaccgccgcggcgccccttagatatcgtcccatacgactccgcgcatctccgtcgacggtttcctccccttcaacctctgcgatctccagcccgccgctcccgccgtctgcgaggcattcccgcaaacacctggcgggcagaggccacgccccggcgaggccctccaaggaccgtgtcttcttcctcgacgtcaacccgatatgcttccgcggctcccagcgtagcctcggcgccttcgcgcgctggctcgcgctcttcttcacgcacgtcagcctccgggaccccgttgtggccgtcttcgacggggcaggtgggaacgagtaccggaggcggctgctgccgtcctacaaagcgcaccggactcgcggcgtaggcaccggtgccgattcccgcgtggttgacgtgctctgcgagtgcaatgttccgattgtgcaagtcgatgga

SEQ ID NO: 47792 - DNA, 611 bp, Zea mays
  Clone ID: MRT4577_143593C.1
gtaagctcggaattcggctcgaggcaccaactcggcacgaggcaactcctcctcctcaatccaactcggcaactcctccaggcagcccggtgggtgggtcatcctctccccacgtccaccacggcgatggcgctcgcgcccccgcattgctgacccactcccaccgcggactctccctccctccccgtggtttggttttggtaggtgggggaggttggtaggcgccggggcgtgcctgtcggctggcggtttcgggaagcgctgccgcgatccttgcccggatctgggcgccacgatggaggacgccggccgcgagggcggcactgccgcggagaatgggaccgagggggagggctacgtcctcgtcaaggccgcccccgagggggagggggaccccaccgccgccgccgccggaggcgatcgcgaggatctcgctgcctccgccccggcgatggcgatggcggtggcggctgcggacgaggccgcggcaccggccaagaagggtggatccggggccacgaaggcgaggctgcagaacggcagggtccccgccggaacttccgccgccgccgccgccgccgggccgagggtgaagaagcccggggtcctct

SEQ ID NO: 47793 - DNA, 810 bp, Zea mays
  Clone ID: MRT4577_143594C.1
taccctttccccccgtaagcgttgccgccaacgccctgccccacggaccagcgagacagagatctcagttccttctcccgctccggttcttcttcctgccgcgccgtgggccccgcccttgtcccctttcttctccgtctcctccctgcctatcccatcccatcatcgtcgtctccctaccgcaatcgaagaaagggccgggggggaccgagcctttccttcgccgcatcgcgcccctagctctctccgtctccctcatcctgacctcgattcgagctagtttcgggaagcaaaggtaccggatcaacccccttgatcacccatggtgcccagggatagggcgcacagtgccgctgctgccaccgcgcccccgacggagaagcccgttcaaggaacctgatagacagaacaatggaaaggcatgcatattaagtgacactacacgaatacttaaagatctactttcacaagtagaatctcttcgaaaggagaacaacacgctgaagaatgagtctcattatgtcgctttggagagaaatgaactactggatgaaaccaatatgatccgtggcgaaatatcagaccttcaaaacgagatgaggatgcggctagaagacaactctatctggagtcatgacacttctagaccaaatcttacagcaccccatccagcgaccacagtatttacattgcagcattcaccacatccacaagtcattgcaacaatgacacttcctctgcaacagccagcagtcgttgagcaatcttacgctgccccacggcgggagctacagctattccctgaagctg

SEQ ID NO: 47794 - DNA, 316 bp, Zea mays
  unsure (1)..(316): unsure at all n locations
  Clone ID: MRT4577_143595C.1
ctaggggttaactgctcgaggnatggcgtctgtgcaggtctccggcgcgggggacggtaccgcggctttctctgtgaaggggaaggcctccaccggtgcgctccggctgcgctatacgatgaccttcggcgaggtctgcccggcgcgagggtcgttccgcggccggagaggtgntgttgtgttaggtgtttgaggccaggaagtatggaagacctangccgttggctgaaagagagcacgtaaagattaacttcttcctacgagaagacaacggctggaaacacgctcccttcgactgctcagaccagacctcaag

SEQ ID NO: 47795 - DNA, 1176 bp, Zea mays
  Clone ID: MRT4577_143596C.1
attgggtacctcgctcgagccgcatcatcgtcgtctccctaccgcaatcgaagaaagggccgggctcaaccgagccctcaaatcgccgcatcgcgcccctagctctctccgtctccctcatcctgacctcgattcgagctagtttcgggaagcaaaggtatcggatcaacccccttgatcacccatggtgcccagggatagggcgcacagcgccgctgctgccaccgcgcccccgacggagaagcccgttcaagggcctatccagaacaacaagtgcgaaaagaaggctccaaagaaggtgcataaatctgagagagagaaacgtaagcgggacaagcagaatgatctctttggtgagctgggaaacatgctagaacctgatagacagaacaatggaaaggcatgcatattaagtgacactacacgaatacttaaagatctactttcacaagtagaatctcttcgaaaggagaacaacacgctgaagaatgagtctcattatgtcgctttggagagaaatgaactactggatgaaaccaatatgatccgtggcgaaatatcagaccttcaaaacgagatgaggatgcggctagaagacaactctatctggagtcatgacacttctagaccaaatcttacagcaccccatccagcgaccacagtatttacattgcagcattcaccacatccacaagtcattgcaacaatgacacttcctctgcaacagccagcagtcgttgagcaatcttacgctgccccacggcgggagctacagctattccctgaagctgcacccactgaagatactgagccaccacaaaacgaggggacctctaatcatgtgatgcggccgcaggccaggagcccaccagcaatgaccactttgcctgggcatgtatatccagtccttccaagagtggaagatgagcaacgcagcagcggcactactggtagcagaaaggaaggcggggtaggcaaccgttaacagctcgagtacaaaacgagagatctggctcacagtttgaaaagttctcgtagtttcaactttaatgtttccattctagctgatgtgctaaagaaaccttaaaacctatgcggctgtgcctgcacatgtaaatatcattccactctgtattacccgaacttaatcttcaactagttacttcgatgggtgcc

SEQ ID NO: 47796 - DNA, 197 bp, Zea mays
  Clone ID: MRT4577_143597C.1
cggaactggctggaccgacccacgcgtttcgttacaaccgacaccacgcgctatgaagggcggatgtttgggaaggcagaagcagtttatatcgcgaccgacggacaggacagaatgagctaagaaaagactactagatagttaaacaaaatatgaaaacaagtactaagatggaggtactaactcttcctagaaga

SEQ ID NO: 47797 - DNA, 679 bp, Zea mays
  Clone ID: MRT4577_143598C.1
aagcagtggtaacaacgcagagtactttttttttttttttttttttttttttttttgggtttactaccttgacatcatgcaaagtggcgttgcgctgcctggggtgacacctcgatggagtgtcttcaccagaaatataataaaacacattgttgatctccacaaaatatctgatagggatggaaagaactatggcaaccttccggttccggtaagtagacaactgtaatcaataacaatagatatgatatacattgattggtcagtaacaatattatttttcattcagtaagaattgcagtaataagtgtaccatcatgtaattacccattttatagcaatttttatatggctcactaaccattattacatcgttcagtaattatctacgtttaagaattcagtaatttttctttatgttatagcctgtaagtttatacaactgctggatttatcagatcagtaaattatagctaaagcatcaggttaatgcataataacattttttaccctgaatgcatgataacattttgacaaagacaaacaaaatgcatgataacattctgacaaggacaaacaggtgtacacatcatccggtatccctcagaaattacaccatatccaatgaatatattaatctaacaccacaagcctaattttaaataagcatatgccgcca

SEQ ID NO: 47798 - DNA, 272 bp, Zea mays
  Clone ID: MRT4577_143599C.1
cctcgaggccggccgggatcacggtgcagctcctaaactcgctggagaactacgcctactctcgcgcatctccatctcgacgagaagatcgcgtcccctgctcgcgactacacaacaaatcaggacgacatcgacgcgctcatccgctggatgtacgccacactcatctcgccgaggcgcacgaggtcgatgacaacatgaacgatatgtagagcctttgcgaccccatcatcgccattatgtaccactgcagcggatgccgacatgatcgg

SEQ ID NO: 47799 - DNA, 278 bp, Zea mays
  unsure (1)..(278): unsure at all n locations
  Clone ID: MRT4577_14359C.1
gttttagttgagggtggggggtgtgttgtgagggaaaggattaggaagttgagtgttcctattgagttttggattgaaatgagggcaattaagagtgggatggagccaattagtgtataaaacaggaaataaattcctgcatttagcgttctgttccncttgcctcatcgtgtaatgataattagtgttgggattagagtggcttcgaacaggatataaaataaaattagttctgttgcggagaatgttatgatgagtaaaatttggaggctaataag

SEQ ID NO: 47800 - DNA, 506 bp, Zea mays
  unsure (1)..(506): unsure at all n locations
  Clone ID: MRT4577_1435C.1
cggtccgnattcccgggccttcccatcctcttctcgcccgtccgtnagcctatgttgcttggtgagccagccanaagtcgtcggccgatttgggaggaanaacatggccccgccgctcgtcctcgcgctggtgaccatcatcgccatcgcggcggccgtaggggacgatggtgagtgtggcgggtgctctccgtgcggcggcgccggctgcccggtgctgtacccgtcgccgcccccgccgccgttctactactactgccctccccctccctcgaccttccccggggtgtccttgttcttcttccatccgtcttcttctgtctcttcctttcttttcggtgctcttcttctttctttttctttcttttccttcttttcttttttttttttttttttttcttttttttttttttttttccttttttgttttttcttttttttttttttcttttttttttttttcttttttttttttttttttgttttttctttttttttttccttgt

SEQ ID NO: 47801 - DNA, 434 bp, Zea mays
  Clone ID: MRT4577_143600C.1
gacaaatctcaaaacctaaaaaaaaaagaaaatatttagttactgcttgacacaaatgattagatgccacataaaaatgtttctaaattgctagatagtttgattgaatatatatacaaattttagatgacataccctaccggaaaattctagatcagtgcttgcttcgtctttttttattgccatctactgtcacgggtaaccgtataatacatacctcatattaaccgctaaaactttgacaacaattttcctcggcgtagtacaaatccctcatatgacgcgttgggtaaagaggaggtagtggtttggtcgactcaagcaacccttttgacccttctagtccagtcgacagtaggtacgctgcattcaaccctttacccttttgataagccacaatggtatggtcaactttggggggctcatggcatgga

SEQ ID NO: 47802 - DNA, 645 bp, Zea mays
  unsure (1)..(645): unsure at all n locations
  Clone ID: MRT4577_143601C.1
attgggaccctcgaggccggccgggaggctcatcttaatgcatctatttggtaggcacagcacacacacgccttggtctcggcatttaccactaccctattcacctggagacataacatgatggacagcttggtggatgctctctgtcgacatgctatcagcctctgctggcggacgtctgacgcattgggagcctcaagagcccgaggacgtgccggtccagaataactacctgacgacgagggcgtatgaccacatgcactacatctacaggacgcgggaggagtagctgaatatgacatagtcaaccggaacgggcttccagatgctgtcctcctacctcttcggatcgcttacctatgcacataaacttcgtggaaagagtactccgccgtggaccggcacggtcttctacctgtcgacacagaactcgccagcactacgagatcgaattcgcatctcctgcggaaccgaacgggtcattcctagcatcctgcaaactaacgtgactcaccggacnctgaggcgaatacaacatcagcaaatctacctctgtctacacgccaccagaggataccactcctactccgatctctggaaccactacatgcatggcggactaccagcactacgtgccgatccggt

SEQ ID NO: 47803 - DNA, 390 bp, Zea mays
  unsure (1)..(390): unsure at all n locations
  Clone ID: MRT4577_143602C.1
ccagcatatacccactcctaacttcccctccactacggctccttcccacccgaggtgggcgagggagcaacntcctctacacccaattaaccaccccacattgtcaagcccattgcgtcacccctcaaggcaaaagcaagacattcccacgcaccccgaacaaaacctacaacaccaaatactacgagatcctccgggcgcccaacataacttaccaagacgctctcaaaaaagtctaccgcaaggctgctatcaagaaccaccctgacaagagccataacccctagaagctcaaggagctcgcacaagcctatcatgctctcagttacccacacaaacgtgagatttattatccatattgtgaagatgcccctaaggaaagaatgggcg

SEQ ID NO: 47804 - DNA, 767 bp, Zea mays
  unsure (1)..(767): unsure at all n locations
  Clone ID: MRT4577_143603C.1
gatacaatcaggtatatatgattgactttggactggcaaagaaatacagggacacgtcaacacaccagcacattccatacncgggagaacaaaaatttgactgggacagctcgatatgcgagtgtaagcacccatcttggaattgaacaaagcagaagggatgacatggagtctcttggatatgtactcatgtacttcttgagaggaagtctcccatggcagggtttaaaagccggtacgaagaaacagaagtatgagaaaatcagcgaacggaagattgccacttcaattgaggctttgtgtcgtggatacccttctgaatttcagtcattcttccattactgccgctcactgcgttttgaagacagtccagactatcaatacctgaagagattgttcagagatctttttattcgagagggattccagtttgattatgtttttgactggaccattcttaaataccagcagtcacaaatgaccagtgttccaccacgtgctattgccgctgctgcaggacaaagctcggggatggctccaattgcatgtaataatagactgtcagccaccgaagagggaagaagaagtggatggtcagatgatcctacacgacgtcaggttccacctacaggaataaatgcaggcagcttatcgaaacagaagtcaccagttagaccagatgtgtccgcaccgaaggaagctgtgttgtccagttcgactttttttgngtcggtcaggcgtgtcctcaaggcgacctgctgtttcta

SEQ ID NO: 47805 - DNA, 277 bp, Zea mays
  Clone ID: MRT4577_143604C.1
gaggcacgcgtctcgagaggaattgttacccgttctagtgaacgcattgccgagggagaagatcatctgggtcctaattgctatcatgacacagctaaagcctacctggaccatatttctagggatgacaatgaagaactcagacgtggctgagctcacgaaggatgactaaggacgatactgtttgcgaactacgaacttccaagtggtctgtgcgcgaatacctatctagtgcgtattcctgactaggaacatggacttatccagtccagcccat

SEQ ID NO: 47806 - DNA, 534 bp, Zea mays
  Clone ID: MRT4577_143605C.1
atcgtgcggtctgccgccgggcgcaaggaccgccacagcaaggtgtgcaccgcgcgcgggctgcgcgaccgccgtgtccgcctcgccgcgcacacggccatccggttctacgacgtgcaggaccggctaggctacgaccgccccagcaaagccgtcgactggctcatccgtaacgctaaggccgccatcgacgagctttcggccgaccgggaagaggggcagcctgccgcggaggcagcggatgccactactaccgagccggccgagcaggtgacctcgacgtcctacgggttcgccatcggtggtgtggccggctccttcatgccacattcggtcggtgccgatgacgtctccggctccggctccggctccggctccggcaacgtcaagtctttgttcccctcgtcgtcgacaacgagcactacccccacccaggacgagtacaggggctccccgccggaccttctgtcgcgcacgaccagcagcaaccagcctcaggagctttgcctcactctccagtctaccaataaccac

SEQ ID NO: 47807 - DNA, 401 bp, Zea mays
  Clone ID: MRT4577_143606C.1
aatcaaagtttaattgacttgatttcaatcaagggattctggtaaccatggcaagaaaaggcagaaacgccacgcccgaccaaaaaaaaaaacaggacagcccgcatctattcttaaaacagcgaattctgaaaaacaacaaacagatggaaacttggaaccggaatagagaaggtaaaaaaaaaagaaaaataaaacggacggcgtaaaccattagtagttggggaggggccaacatcaagccaggaacagaaaggtacagaaaaaatattaaaaaaactgtcaatgactgggggaatgaaagaccgaggaaatgcctgaagccgcgagggcccatcaaacgggactggaaaaaactcacaggggggggggctggctctgcggagcctggaggaggcctt

SEQ ID NO: 47808 - DNA, 154 bp, Zea mays
  Clone ID: MRT4577_143607C.1
tacctcgaggccggccgggactcatttcggctccgtcgtcgcgtgccatcctattgtttctttccccgtcggagcctccccagatttgaacgccgacggcagtgacccaagatgccttgatggagaccggtgaacaatcgtcgaaggacacagg

SEQ ID NO: 47809 - DNA, 1038 bp, Zea mays
  Clone ID: MRT4577_143608C.1
aggttaataatggagtcatccactatcatttataaacatggttcagctttacaaatctagggataacctaaagtacatctttctttcttttcttttcttttgttcatatgcccccaccaattttccctctttttttcgtttttttaaataagcacccattagcaactagacgatcaaaacgagaaaaaacttaatatgtacagcaccacaaaaaacatgtggagataactgggaatcagtggtcgcacaaatatatctccattgtccaggccagtaacccccgtgatataagctgaggaactcaactactactccagtccaatgcaagtaagtaaagccgacgaactactgcaaggatgaatccgggaagatacctgtcctcaagccaatgctgccgctgaccactagaactacaactaagcatgctggtgtttggtgattcaaatttataggttggcacaggagcggtggtgatgcagctctgcagcagcagcgactccaaccacaaaaaaggcaaaagatatgtatgccttgaatccagctgatgaacatctgaatgtatttttgaagcccttgaggtagccttgactactgtggccttcaggattggctgccctagactgcttggcagaaatggcactgtttgtagttttcttctggtgctcaacatcatcagtcttgagatcaagacgtcggcccctgttatctgtaaaccgcatggtctggttgatggatacggaactacttgtggccgacctattaattccaacctgcattttaatcttgccagctgctagtgaaatgttagcaggagatgtggttgctctgcggctttgtattgtaactccagtgtcagtatttccatttgccagattcgtcgtgttattttcctggtctgactgcaattcagcattcagagttccgttcaagttggttggaagagcataggattccattcccatcatgtagtacgcttggttggtaggaaaagcaataccttcctggccagcttgttccaagaacatactatcatagaac

SEQ ID NO: 47810 - DNA, 430 bp, Zea mays
  Clone ID: MRT4577_143609C.1
ctgaaacaaaacaaagaaacaaccaaaaaacccccacaaaaaccccaaccaccccccacccgcccgccggactcgcgggggggggcaggaaagggggggaggggagcagagaaggggatttttaaacccagagggaaacccaggaacccagcaaaaaaacccggggcgcgaacccaaaccccgaagggaaaccccagagccccgcccaaaaccgggggcggcccccaggggggggccgggggcccggcggggggccgagacggggggccggcccaggaaacggggaaacgaaccgggacccggaagcgacaacggggagcgcaaacggggagggcaaacgagcgggggaggctagaacagaggggggggggggagggggacagggcggctaaccaggggggagagcccgggcaaagggacctgggaaggg

SEQ ID NO: 47811 - DNA, 296 bp, Zea mays
  Clone ID: MRT4577_14360C.1
ccttccttattgtttgtgcggccagacagcagggatgtccctccataaggagaagcaacatgcgccactgcctatctttatgcagtgctagctgttaccatccaatatgaggagctgcatgaggatgagccgatggcgctaaagttcctgaagtgcgcgctagacgtcgaggcgggcaacatcactagagggctacgctgcgagcggacctcatcagcggcggacacatgatcaaaagacagtacaaggcaactaagaaagggctcccttgtggacgtaacgaggcttgacctaac

SEQ ID NO: 47812 - DNA, 851 bp, Zea mays
  Clone ID: MRT4577_143610C.1
cattgggtacctcgagccggccgggacctctccactcaatccatcgcacagagttgcatgcacgactgcatccccagtccccagagctagctgaagtgcgtaaacttacttgactcgtcctccgtcgtcgtcctcagtccaattcgatcgatctcgtagctagcagcgtggggtgcgaacacaaaacaatggcctattattgcacgaagaaggccgccgtcgtcctcggcgcggcggtggtggccgccttctttctcgctgctgagagccgccacattgctcggaaggacctgggcgtcagcctcggcggcggcggtggcctaggggtcggcgttggcggcggcctgggtatcggcactgggattggcatcggcgttggtggctccggctccggctccggctctgcgtccgggtcaggatccggcgcaggctcgggctctggttctgcgtccgggtcaggatccggctcgggctcggggtcctggtccggctcgaactcaggctcgaacgcggggtctggcggcgcaggatcatatgctggctcgcatgccggctcaaacggaggaggcgcaggctcgtacgcggggtccgacgcaggctcgcatgccggctcaaacggaggaggcgcaggctcgtacgcgggctccgacgccggctcgtacgcgggctccgacgccggctcgtacgctggatccaacggacaggttcatacgcgggctccaacgccggctcgtacgccggatctaactaatcaagatcgggctcgtacgcgggctcctctccggctcgtacgctgtattgtccgcggaagttcaggttcgtacgcgggctccacgctggctcgtacgccg

SEQ ID NO: 47813 - DNA, 346 bp, Zea mays
  unsure (1)..(346): unsure at all n locations
  Clone ID: MRT4577_143611C.1
gcgagagagcagggacacaaacagaacgggaggcaacaaggaggcgaaaagagaaccacccgcnacaccgcaggcaaccgcacccgcggaccgcccggcagagccccggcgcccgcncgcgagagagggcccnccggccgcacagcagaagcgggggggggggcaggaacagnaaacaaagngcacggggggacngggcaccagcaacccnngaggancaacgcagcccaggccagccaacnggcaacgcgggggaagggcgccagacagcgggcacaaagcgaagcggagggcgcggcgaggaggcggacgnggagagggcgnngaaagccgaggggccggccca

SEQ ID NO: 47814 - DNA, 469 bp, Zea mays
  Clone ID: MRT4577_143612C.1
tcggggagatctcattttgcacctgtattagggggtccttctgttactgtgttgaacttctcaggaatagtcacatcagtagttggatttagtaataatgtctctgtttctatttctgtttctgtattaatttctcgtagacaactgatgtttgtaagaaccatattttgctctgctacatcctcagttttagtagcagaacattttgaagcttccatcactcttactaccttctgttacagttgagatcctgaaatctactatggtagagaagctccccaatgatctggaaggaatggagtcatcgatggggaagctttacattcttatcgatgagatctacaaataccgtcgatgatgttgtggaaggacccgttgcacccgacaacaaaatcggaagggtcatcttctgattcttttgcttcggtgcccaaattgtccccggttgctttcgataagcttttcaatg

SEQ ID NO: 47815 - DNA, 552 bp, Zea mays
  Clone ID: MRT4577_143613C.1
acaacaggggaccaggctaggtgcacggcgactgtgaaaacacagggggaaaacccaccagcaaagcaaagaaaaaaaaaaaagcaacacaaaaggggggacaaaaagcacaaaaccaaaggaatgtaagcaaaaggaaacaaaacaaaacaaaaagacaagaacaaaaccaaagcaagcaaagaaagacaaaacacccgaaaaaaaagaaaagaaagaccaccccaaagaacaaagggaggcagacgccgacggaccggaaccaaagggaaaaaaaaccgggaaaaacggggaaaccggggaaaaaaccgaaagaaaacaccaacccccaaaaaagctgggaaggctgaaggaacgacgggacccgcaaaaaaaataagaggcaacaacggttcaaaaaaaaccaaaaaatgccttaaaattttgctacacagcaacccaggaagaacaggccgaaaacttgggaaaaaacccagaccggaaagaaaaagccccactttgagaggacaaacaacatctggttgaacacaaacggcaggggccgtaaccact

SEQ ID NO: 47816 - DNA, 346 bp, Zea mays
  Clone ID: MRT4577_143614C.1
ctttctacaagcagattgcggctaactacgcaccccttttacaacttcaacgatgggagccctgtgatcatcttgctttgacatacccaacggcctgctactaacaacactttattggcggagcgctcacttaaattgctcattagtgggactgcaatgataaaggaatacggatgaagtctgtggtacacgctacatgagaacatacatttacagatcttaatgtcgatagcattgaccgtacaacaaccatatgccctattgcaacaaccatgctcaatgaatgtatatcttcaaagaatcgcagcacatcaactaccatcacagttgcttccaacaatcaatc

SEQ ID NO: 47817 - DNA, 347 bp, Zea mays
  Clone ID: MRT4577_143615C.1
cagttcgataataaagcattttagtctgcgatggctggggagtcgctcttgtatctgctctgcgtagttgttggaaagaacacggaacagtctaggcctcatccatcgtaacttttttaccaataacgctgtcgtcaagatcgagcatctatgataggtctgtgacattggtgatacgtcccttaagggacatttatgtgactgtatgtagacccgttctcggcaacgtggattctcagtacaactatacatctcaagactataattcggtacattgtttggataaataaacaaaaaaagcaaacacttttcgcaccaacatcaaattgggtgcggcccgcccacgc

SEQ ID NO: 47818 - DNA, 322 bp, Zea mays
  unsure (1)..(322): unsure at all n locations
  Clone ID: MRT4577_143616C.1
tgggatcggtcttgtttgaggntcgcgtncgttatgctgnaatntggttcgaggtccaaggacttggattagaaggctgtgatgaataagatgtatggccttatcgagacctacaagttgaacggctaattcagatggatctgctctcagatgaaccgtgtgaggtacggagagctctaccgtgtcatctgtgacacaaggtgtgcctttgtgcagcctgccgtttatgaggcctttgggttgactgtggttgaggccatgacttgtgggttaccaacatttgccacatgcaatggtggtcctgctgagatcattgtgcatg

SEQ ID NO: 47819 - DNA, 299 bp, Zea mays
  unsure (1)..(299): unsure at all n locations
  Clone ID: MRT4577_143617C.1
aattcggcacgaggctttctcccgcgccccagatccgagccccggcgcctgaggccatggcgagcgacagcgacgtcgacgaggacgagctcctccagattgcgctgcaggagcaggcggcgcgggacctcagcncaccagcgcccgcccgccgccaacaagcccgtcgtcaacctcgtccgcccacccgcccccaccgcccggggggnnancggcagaccccgggggcgccgcagcgnaaggcgcgccagcccagccgcggcggagacgaggacgaagactcagatgttgagctgctc

SEQ ID NO: 47820 - DNA, 228 bp, Zea mays
  unsure (1)..(228): unsure at all n locations
  Clone ID: MRT4577_143618C.1
gccgctcgagccggcgggcgggctctcccgcgcggaacaaaaccgcaccaactacccacggaatccgcccacccgcacccggagcagaggagatatgtcgcaggagaagggaggagcggngaggaaggaggaggtgtttatcatagagtacaccatcaacctccataagtgcctccangtctgctctttcaagaagacggtacaccaacgtcatcaaggagatcacga

SEQ ID NO: 47821 - DNA, 223 bp, Zea mays
  Clone ID: MRT4577_143619C.1
acgtaagctcggaattcggctcgaggtaaaatcaagcggctttttttttcttatcaatttaatagctgatctggggaccatgcgttccctacgcggctaaattgattttttgggggggagggctacctacagtggcttgcctcaggagtcctcaagcccccctccgccgttccactataggctgcatcaggcgcgccccaaccaatgcaatctcagctttaag

SEQ ID NO: 47822 - DNA, 462 bp, Zea mays
  Clone ID: MRT4577_14361C.1
aataaacaaagacctgggttatttctggggaagccacactcatgcatacaagaaaatttattagttgaactataaacccataagtaaacctaaaagagggcaccaccaatgtatgcggatgttgagaaggaacgctggtgggtttgttaaatcacgctgaccaaatggcaccaattgttgaagatgaaagtagggtgccagctattgacgcaccgtgctgatagaactgaaacagctgttgctgatttaataaggatgctaggctcacaccacctagctggctaaatggaaataggtaatagctgtgtaaataagcattatagttcaaagctgcacagttagtgtaaattgaaaaaattgctgagggtaagcaccagataactggctagaagctggttgtatgctgatgcaaataacaagcatgattcaatgcagaaagatgggtgaatagcataaactgct

SEQ ID NO: 47823 - DNA, 401 bp, Zea mays
  unsure (1)..(401): unsure at all n locations
  Clone ID: MRT4577_143620C.1
cggacgcgtgggtctgacgtcgtgtgtcatgacagctgttgggtcatcggcagtgccttaagtgaggaagaagagtcaactattcgcatccacgatacacctcatctagcaggtgtacttcatatatgactcatagtgcattaatatgacctctaattggataaatggctggcatctctctcttcttgatgacttcaaatggagttaacatcatactgatntgagatccttcatccaatgtgcatcggatgacgctcggacttacttgaatactatgtaacagctcacaataaattgcggtcttatatatcatattgtaatcgaacttctgatgatggattctgttgagatgattgccatggatttttataaaccattttgaatgtgtgacaagaataaca

SEQ ID NO: 47824 - DNA, 307 bp, Zea mays
  Clone ID: MRT4577_143621C.1
ccgtcttaatcttttccccaaacaccaccggggagggccacctctttttgtggtgttccaacccccacacaaacatcacggatgtccatatcttcaaggacaccttcatcttcacaaacaccaactatgttctagttgccgtaccgcagcatttattcttcttgggcgactataacaccaatttgatcacgctttacaaagcccccatcactaacttataacgcggaccacattcattaaccctctcaatcaaggaacaacaggttctcaactgccttacgttaatcaccgtgaccaagaccaaatt

SEQ ID NO: 47825 - DNA, 472 bp, Zea mays
  unsure (1)..(472): unsure at all n locations
  Clone ID: MRT4577_143622C.1
caaagttgatacagtatttacactcacggagacttattgatgatgcacattgtaggttgggggaagaatgattgagactattatgtggtccgatcaggcagccacaacattattagggaaacaagaggtatattgcagtgtttatgcctatcacaaaatgaccagatcacaaaggtacaggaaagtgtgtaatgtaaccacactattcttacaagaaagagtgcgactagggtgcgactgtgcgaggtgtgtgtggattgcgggcgcggcggcggcgtgagaggaacaggacggtgggagacagagagggggtgtgtgtggtggcggcaacgacgcaggagaggaaggtgtagtatgtttttttttgtgtatgggcggtagatgaagcgtactccgcgccttcaattgtgttgaccccccccccccgagatgggttagatgtttttgatgatttntgtgaaggtttggtatg

SEQ ID NO: 47826 - DNA, 748 bp, Zea mays
  Clone ID: MRT4577_143623C.1
gacgaacagaacagaacaaactccatagctcacaaatttttatagatctcaacaactgaaatacacataccgaaacacactgtagcgacaacgtacaacatgttcactccatgttcagactcatggacacaagttgtacatcaaagcaatagacaaaacaaagctggaacatagatgaacattttcctatcactctatgagacgacacaaggtaaaacaaatgctcctagaccatttggtcaaaaccttaactatgtcccacgacacaccaggtgttgtcgtcgcgatgcctctcaggatgcatgatagactatgtccaatcaagcagtcgcaacctgaacagcgtaaacgtcaagcctctatgcgatcatggataagtgctcaaatagcttgtcgtcctgcctgtcaaatccatcatgttagccagagcaaccatggtaccatcagggtcgatctcaaacagcttctccatgatcttggtgtacacagtttcatgtcgcttctcatttgaggcgatgatgccacatatttgtgtgagctttaagtcatcgaattccttagcgtgataagcagtgttcccttgtgagattatgatcgcgcgctattggatggaggtgtaaatgaaaccaagataaggattattcttggtcctataatccattccagagccaataatatattgaattatcttcttggtttgcctcatatctaccctccctcccagtgagctacatatacttgttgagta

SEQ ID NO: 47827 - DNA, 692 bp, Zea mays
  Clone ID: MRT4577_143624C.1
gccggccgggttcgcgaaacatcaagagcgactatgctagcttctcgattcgctactgaataatgctctaactaccgcagtcgttgtggggagcagcagcatgcctctctccttcactcccttggcctgtaaggacgtgaaatcgctgctccggtcctccttcgcggatgcatgcgtgaggatgagcaagacgacgggcaacgccagagcccttcttcaccgtcgagaggccgggtaatggagccgaacgggagctgtatctgagccaactggccgtccactctccatgctacgtgactgtcgagtacccgcgcgactatggctggcacaccgtcgagctgtccagggagctggagacgctcgccctgaagcgcctctcgtaggcgatctactcccggtgggccatgttgctggcgctgggttgaggcttcccggagctgatcgcccgcgcaggctcgaagctccgtgatcgcgtgcgtctcaaggacggctcccagatcttgactgaggctggactggattacgtcgacaatcctagccttatgctgctgcagaggatcctcgccatctggtcatggcatatttggctcatggtcgccgctgatgactaccgaatcgccagaggaccactcggacatgtcgacgatccgctctatgacgacgacagattcgacgcgttcgtactctgcgac

SEQ ID NO: 47828 - DNA, 284 bp, Zea mays
  Clone ID: MRT4577_143625C.1
gctacccaataaataccatgcatatactcatagcccacttcatgctatccatgcgcggaaaaagggcattatccaaaccctctgacaaaactactaactgaaccactattgacagggagccaattcctttcatatcgacacagactttacttacacgcggaacacccgagcatcaagcccagcaacagattgtcctttcattatatacatgaaccgcttgctgagattccgaggagaaggtctctgaattcacaaaggttacagaaccgccgcgtcacatgctg

SEQ ID NO: 47829 - DNA, 744 bp, Zea mays
  Clone ID: MRT4577_143626C.1
taggggccttttttttttttttttttcgctgaatgccttttgcccttcttcttatcttcactggagtgcggtaggcatatgtaaaactaaaaaaccagctagcactactactaaattggtacccatgaagttcggttcatagcaaagacatgacttgccaatccaatttgcacatcgtccacgccagtcgataaaattcaataatacaaaatccatcatttctgcatattcccaaaaagaagacgccgctatgcacgacctccacttccttatctcccccgcaacatcggagagctgttgtctctcgtatcaggccagactgaagccacaggtaagattcccgcctcgctcatgctaaacatgcggcggcggggacacgacctgctctggcacgacggcgggttgagcctcagtgtcaacctaggtcctcgatgactcggtaggagaggtttggagcagtggcgtggagggctgggccacatggcagtagcggtggtgcggcgctgacgctgacgaaggagagacgtcggctggtcgacctccaccttctcttggagcacggacccctaggggacggtgacggcggccgcggcgtggcggcgaaacgtgaggagatgctggtatgcacgcagcacggaggacaggaaccacaacgcatatggcgaggctggtcatgctggccgtcggcgcgaggatggaggagtaggtggctaaagtggttgtggtcgtggtcgggatcccggc

SEQ ID NO: 47830 - DNA, 446 bp, Zea mays
  Clone ID: MRT4577_143627C.1
cggactcgtgggcgagtggccgaacgagttccagaggctgtacgggaccattgacctgtactggatcgtgagggacgggggcctgatgcttctgctgtctcagctcctgctcgccagagacggcttcgagagctgcaagatccaggtgttctgcatcgcggaagagggcacggaagccgaggagctgaaggctgacgtcaagaagttcctgtatgatctgaggatgcgagctgaggtcatcgttgtgaccatgaagtcgatggaagcgcactctgagatcagccccaacgctaagaaggatccccaggaggagtacgcgagcgcccaggatagaatcagagcgtacctgtcgcagatgaaggaggatgcgcagagggaaggtcggccattgatggatgatggcaggcaggtcgtggtcaacgaagagaaggtcgagaagttcctct

SEQ ID NO: 47831 - DNA, 465 bp, Zea mays
  Clone ID: MRT4577_143628C.1
ggcatcaattgctagtgatcacagatgaagctaaggtgcctgaaccgcgctgatgattatcgtatttactcataactgccatcttttttctatgacttttgcgaggtttgggcagaagttgctccaccaagtttagccattgtttttgtccatgttgagaaaccctagtaggttatgtggacaaataccagatttatccctgaagggtctcgcttgtctatataaagaacatgtacaccttataagaaaaacataaagaggccagaggcccaatctacatctatgtctctcaaaaaaaaaaaaaaaaaaaaaaaaaaaaaaaaaaaaaaaaaaaaagaaaaaaaaaaaaaaaagaaaaaagaaaaaaaaaaaaaagactttaaaaaagttcctgtaaatgaaggagtaataaagatgaccgtgtatcattctaaaatatcctacatgggggggggggggggggcc

SEQ ID NO: 47832 - DNA, 2557 bp, Zea mays
  Clone ID: MRT4577_143629C.1
cattggctccctcgaggccgggccgggaaacgaggagagactgcggcagcggagtgcagagagcggacgcaacgcaacaccgcccactctctatcactgacgatcgaagtgaggagcgcactgaagccagccgccgatgagtcgcctcctctcgcggcagcaccttgccgccgtccgtcgatctgcaccctttgcgtgcgtgtccaggtggctgcacacgccgtcattcgcgacggtttctccgcaagaggtttcaggttccagcccagcggaagtgcagaattttgtgcagggcagctggacagcatctgctaactggaactggatagtcgatcccctgaacggtgataaattcatcaaagttgctgaggttcagggaacagaaataaagccattcgtggagagtttatctaaatgcccaaagcatggacttcacaacccacttaaagctccagagaggtacctcatgtatggagatatatctgcaaaagctgcgcatatgctgggccaacctgcagtcttagatttctttgctaaacttatccagagggtatctcccaagagctaccaacaagctcttgcagaagttcaagtttctcaaaagtttttggaaaacttttgtggagaccaggtacgctttctggcaaggtcatttgctgtaccaggtaaccatcttggacaaagaagtaatggctaccgttggccatatggcccagttgcaattatcacaccattcaattttccgttggagatccccttactacaattgatgggagcactatacatgggaaataaaccagtactcaaggttgacagcaaggttagcattgtgatggaacaaatgattaggttgcttcatgattgtggattgccagcagaggatatggatttcataaattctgatggtgccgtaatgaacaagcttctgttagaggctaatccgaaaatgacccttttcactgggagttcacgggtagcagagaaattggctgctgatttgaaaggccgagttaaattggaggatgctggttttgattggaaaattcttggtccagatgttcaagaggttgattatgttgcatgggtttgcgatcaggatgcttatgcttgtagcggtcagaaatgctctgctcagtctgttctattcatgcacaagaattggtcttctagtggtctgcttgagaaaatgaagaaactttctgaaagaaggaagcttgaagatttaacaattggtccagtccttacagttactacagaagccatgatagagcacatgaacaaccttctcaaaataagaggatcgaaggttctgtttggtggtgaaccgttagggaatcactcaattcccaaaatttatggtgccatgaagcctactgctgtatttgttcctctagaagaaattctaaaaagtgggaacttcgagcttgtgacaaaggagatatttggtccattccaggtagtcacagaatactctgaggatcagcttgagttggtcttagaagcctgcgaaaggatgaatgcgcatctgacagctgcagttgtctcaaacgacccgctattcctgcaggatgtacttgggagatccgttaacgggacaacctacgccggaattcgagcgaggaccacgggcgctccacagaaccactggtttggcccggccggtgatccgcgaggcgcagggatcgggactccggaagccatcaaacttgtctggtcctgccacagggaagtcatatatgacgtcgggcccgtgcccgagagctgggcgcttccttccgcgacctgattagctagacgaggatagactattccatgtcatcacgagaaataaaaggggaagataagcgaagccagcaggactggagcgaccgaccgagagcgagtggctgcatgcctaggcattcattctctgcacgcaactgcactttcaaccctggagaaaacataataaatgctcgttcccctgtacttgagatacatggtacttggaccggaacgtcggacaactcgtctgttcgcagctgcactgggttatcttcttaggccttatttgtttattatatattctaacaaattttatattaacacttagtttaaaatttgttagattatataatctaaatagattataattttaaacaaacaccgccttagataattatataatctagcttatagattatataagactatcaatcgcgcgtgcaaactgaggtgtcgttgcgtggtctgatgcgaattggggggatcgcactaatggtggaaatggaaccatgtgactgttcgccaggctacatgcgtgtgttcacactttccaactgaacaggatatgttttttacacctgcatttagatgcacaacaatgcgtcaatgcagatctacctttgagttgtatctgtctcaaacatactctatcctttaatctgatttctccatctgccctatgttttcccatgtatggtcaaataaggtgtttattcatacaaatctgaggcaatttattgtattactctcatgagttgatcaagtgattgtaattgataataatttctgaggc

SEQ ID NO: 47833 - DNA, 289 bp, Zea mays
  unsure (1)..(289): unsure at all n locations
  Clone ID: MRT4577_14362C.1
gcgcggggctcctcctttttttgagagcggcggctccatanagcgtggcgtgcagtggccgcgctggagcaactgtggccgccaagatgttgtccctccttatgctccttgctctttctacatgtgttgcttgcgcgacttttttcgcggagtgctcacaatctcctatagcttgccttgttgccgcgtgccttgcgtgggttgtggctgcggtgtggcggggccctgctgtgggtccgtgtggcctcgggcgggcggtcggggcgcgtgtcgtgccttggtggggctt

SEQ ID NO: 47834 - DNA, 231 bp, Zea mays
  Clone ID: MRT4577_143630C.1
gatagagagagatagagagagagagatatagatgagttagatgagatgccacgccactccggcactctcgctggccagtggcaggctcgcgcgcagtttatgtgaagtggaggctggaggcgcgcaggacgtgcccatcctcatagccatgccacgccgtgggcttattggtctggtactctggtgcgcgtgcagttgtcgtccatccacgctctgctctgccgatcttcc

SEQ ID NO: 47835 - DNA, 708 bp, Zea mays
  Clone ID: MRT4577_143631C.1
ctcgaggggccggccgggccggggaattcccaaaaaaaaaaaaaaaaaaaaaaaaaaaaaaaaaaaaaaaaaaaaaaccccgaggagagactgcggcagcggagtgcagagagcggacgcaacgcaacaccgcccactctctatcactgacgatcgaagcgaggagcgcactgaagccagccgccgatgagtcgcctcctctcgcggcagcaccttgccgccgtccgtcgatctgcaccctttgcgtgcgtgtccagggggctgcacacgccgtcattcgcgacggggtctccgcaagaggtttcaggttccagcccagcggaagtgcaaaattttgtgcagggcagctggacagcatctgctaactggaactggatagtcgatcccctgaacggggataaattcatcaaagttgctgaggttcagggaacagaaataaagccattcggggagagtttatctaaatgcccaaagcatggacttcacaacccacttaaagctccagagaggtacctcatgtatggagatatatctgcaaaagctgcgcatatgctgggccaacctgcagtcttagatttctttgctaaacttatccagagggtatctcccaagagctaccaacaagctcttgcagaagttcaagtttctcaaaagtttttggaaaacttttgtggagaccaggtacgctttctggcaaggtcatttgct

SEQ ID NO: 47836 - DNA, 1017 bp, Zea mays
  Clone ID: MRT4577_143632C.1
cattgggtacctcgaggccggccgggctcactctgagagctagggtttctccttcctctgtcgtctgccacagctacagacgacgaggcgacgacaccgcccactctctgtcaacacgaggagagagtagactgcggcagcggagtgcagagagcggacgcaacgcaacaccgtccactctttgtcactgatgatcgaattgaggagcgcactgaagctaaccgccttcgccgccgatgagtcgcctcctctcgcggcagcaccttgccgtcgtccgtcgatctgcaccctttgcgtgcgtgtccaggtgatcccgcctctcgccccctttccccgcgatcaatcgcgcgtgcaaactgaggtgtcgttgcgtggtctgatgcgaattggggggatcgcactaatggtggaaatggaaccatgtgactgttcgccaggctacatgcgtgtgttcacactttccaactgaacaggatatgttttttacacctgcatttagatgcacaacaatgcgtcaatgcagatctacctttgagttgtatctgtctcaaccacagttgttcagtgcagggcagctggacagcatctgctaactggaactggatagtcgatcccctgaacggtgataaattcatcaaagttgctgaggttcagggaacagaaataaagccattcgtggagagtttatctaaatgcccaaagcatggacttcacaacccacttaaagctccagagaggtacctcatgtatggagatatatctgcaaaagctgcgcatatgctgggccaacctgcagtcttagatttctttgctaaacttatccagagggtatctcccaagagctaccaacaagctcttgcagaagttcaagtttctcaaaagtttttggaaaacttttgtggagaccaggtacgctttctggcaaggtcatttgctgtaccaggtaaccatcttggacaaagaagtatggctaccgttgggcatatggcccagttggcattatcacaccattcattt

SEQ ID NO: 47837 - DNA, 388 bp, Zea mays
  Clone ID: MRT4577_143633C.1
tcgcgatctagaactgttagaaaaatatattaaaatgtataacttcaaataaatgcactattgaaacatcgtagatattagtgtattttctgtaaaattagtcatagttgagcagctacacttaggacaaaaccagtataagctatataattggctatctagatgtataggccattcagtttaagaatttggttacctagtcaataggttacccaagtgaaactaataaaccatttctggacctttttttcattccccttttgcatggtaaaaattgaatgattgcagctaagttttgggaggatttggcagaaagtttgactatatagcttaaagccctggttggttcccttaatcactaaactaaatttagtgacttaagttagtc

SEQ ID NO: 47838 - DNA, 295 bp, Zea mays
  Clone ID: MRT4577_143634C.1
aattcgcacgagggtttctctcgacaccggtgcgagaactggatcgagaaggaaccccacaggagcagagatcttccctaccagccgaggtggcgggcgctggtatcgtcagagcgagcgccacacatagggctggcccacgcgacggctgtggttgtatgggtcgcatcctagccaaacgcgctgaacgacgagcggctaaactggaccatgctcactacacattatgtgtaccggactgcccttgacatgttctcggaaagcacccgggctctccagcccgttcatccagccc

SEQ ID NO: 47839 - DNA, 1269 bp, Zea mays
  Clone ID: MRT4577_143635C.1
gagaaattggctgctgatttgaaaggccgagttaaattggaggatgctggttttgattggaaaattcttggtccagatgttcaagaggttgattatgttgcatgggtttgcgatcaggatgcttatgcttgtagcggtcagaaatgctctgctcagtctgttctattcatgcacaagaatgggtcttctagtggtctgcttgagaaaatgaagaaactttctgaaagaaggaagcttgaagatttaacaattggtccagtccttacagtaagtcaggggcggagccagcccttttttgggggtcagctgaccccggttactacagaagccatgatagagcacatgaacaaccttctcaaaataagaggatcaaaggttctgtttggtggtgaaccgttagcgaatcactcaattcccaaaatttatggtgccatgaagcctactgctgtatttgttcctctagaagaaattctaaaaagtgggaacttcgagcttgtgacaaaggagatatttggtccattccaggtagtcacagaatactctgaggatcagcttgagttggtcttagaagcctgcgaaaggatgaatgcgcatctgacagctgcagttgtctcaaacgacccgctattcctgcaggatgtacttgggagatccgttaacgggacaacctacgccggaattcgagcgaggaccacgggcgctccacagaaccactggtttggcccggccggtgatccgcgaggcgcagggatcgggactccggaagccatcaaacttgtctggtcctgccacagggaagtcatatatgacgtcgggcccgtgcccgagagctgggcgcttccttccgcgacctgattagctagacgaggatagactattccatgtcatcacgaggaataaaaggggaagataagcgaagccagcaggactggagcgaccgaccgagagcgagtggctgcatgcctaggcattcattctctgcacgcaactgcactttcaaccctggagaaaacataataaatgttcgttcccctgtacttgagatacatggtacttggaccggaacgtcggactagctcatgagcggacaagtcgtctgttcgcagctgcactcggttatcttcttaggacttgtttgttagattatatattataataaattttatattaacgcttagttcaaaatttgttaaattatataatgtaaacagattataattttaaacaaacatcgccttagataattatataatctagttattatagatt

SEQ ID NO: 47840 - DNA, 648 bp, Zea mays
  Clone ID: MRT4577_143636C.1
gccggccgggctcgggacagagctttcactcgtatttgtcgcgtgccttgtaatcgttagctatagcctgtacttactacctacctcttgcgacagcaggacggtcggctcaccttgctatgcgacgccgctgattacccaccagtaacccgatctagtctacaggcagaccgccagcggcgagaaccacctacctagacgcgcgccgcgcgccatgacgaacctgaacctgaagtacgcggtcgtgctgccctcgcaccacaccaatggctgctcctcgcacctgtcgctcccgtccccctcgaacagcacggcgtcatgacgtatgaccaattaccgcggagactctcccggtccctatccagatggcacgagatgctgtcgaggatcgcatgcagagacaccgagagtaagtagcggaatcctgtgatcgtcctccaccgtagagaggatgctgagggagacgattgctatgaactggacagcgctcatcgagaatatgtacttgccgcgatgcatcatcaacaccaaggacctcctcacttacactgtgttgactgagaaatcgacagatcctaacacgactcgagaacgcgcgtcaagaaggcacgagcttgctgaactcacacagaatgtgcaaaatgcaca

SEQ ID NO: 47841 - DNA, 327 bp, Zea mays
  unsure (1)..(327): unsure at all n locations
  Clone ID: MRT4577_143637C.1
tacacgaccgattactcgaaccacgactaagagcgctgctaactacctggttgctgacctggttgggaacgccagtccgtacgctgaccatttgactgacaatctggatgcaattgtctgggaagttgacaatgaaaagatcgaactactgatggaacaactgatcggccaagacatcaccgaggtcattgccgagctcatggacaagttcgcttaaaacccatgttgaggccgatgtggcggtggtgcggcagctgcacctgctgctggacgagctgcttgtggagctgatgctgcnaatgaagagaaggtggaagagaaggaaga

SEQ ID NO: 47842 - DNA, 115 bp, Zea mays
  Clone ID: MRT4577_143638C.1
ctagctgctcaatcaaggcgtgcattgggatgtagatcaagcgcctagtacaaattgtggtctaggttcaatgcaagcgtctagtgctatcaagtttcaaggacacaacaacgac

SEQ ID NO: 47843 - DNA, 296 bp, Zea mays
  Clone ID: MRT4577_143639C.1
cccactcatacactcactcttcccattcttattcatatccattttataattttcataaccatactcataccatggaacctttcaatactttaaagggcattcaaaattaacacacccaatatcctacataaaaccttcactactatcatactcactaaacctacataacttcatacaaatatttaaacaactaccttctcaataacattcctcccctcaactccaataagccatcaaatccatacaacataaatcattaaattaattacgacttacacttacaaaatcttacaact

SEQ ID NO: 47844 - DNA, 255 bp, Zea mays
  Clone ID: MRT4577_14363C.1
gggcatagcgcatgcagttcgttaccatttgcgttgtcacagccgaaaaaagacagggcatgcagttcagtgcccgagaaggaaaaaaaagagactttttggtctccacggggagataccagcaagggttttttttattacagggggccgctgacaggtttttcagagcttctcatacagtaacccaagttcccaacaggggtttttttcttgcagctttttaccagaaaagcctacacgggacagaaacatttt

SEQ ID NO: 47845 - DNA, 602 bp, Zea mays
  Clone ID: MRT4577_143640C.1
ggccgctttttttttttttttttcttttttttttttttttttttttttttttttttttttttaccagatagaggccaaaatcgaccgtaaaacaagctacaccacaacccggaagggcggcagccatgaaccaaccgaggaaagggaaacagctgccccccacatcactacacggaaaagttgggggggaaaaaacgaggcccctaccaacacaaaagcaggtaaacagagcctacgaaccaagagccgcacccacaaacacactaatgaccagcgtgctacaaggcacctgaagtgcaagccccgcttgcacaaaggcgggccaaaaaaggggatgctgactctaactcagagatacaggagatcaagggccgcgggcacgggcagccccacacacaaaaggccttcagccgatatgtcccaccaaaaatgcctcaaaccatatattggccaggaactggggacccaacggatcaaagaagccctgcccggtatagggcctgcacagaagatcgggaggcctccgggacggaatgaaacaagggccgaaccaagggagggaacccttcatcgtgagagaaaaaaaaaaacaccttcctggg

SEQ ID NO: 47846 - DNA, 199 bp, Zea mays
  Clone ID: MRT4577_143641C.1
aaagcacaataatctcatcctgcttctcatttagaagtcatctactgtatgttctgagctggattatatggacttggggcacggcaatatagggcactccatctaatgtaaataggctgattatcacactattcttaattgtataagtatatcacctatagataacttactctaatttgctcttacctcataattaatt

SEQ ID NO: 47847 - DNA, 333 bp, Zea mays
  Clone ID: MRT4577_143642C.1
aaaaaacaaacaacattttttcatgattaaaccatttgcgggggccccaaattttgggggaacgagaacccaccggggccatgaaacccgcttagtctcgattcacggcacaaaccatacagaattctttggaaggccgccccctccaggggcaaggggagagaccctaaaaaacccagatcccgggggtgcttcaacgacgggggggttaaaaacccccccgaaaaccggccccccgggggggggggccccccttttggaaattggagcccgcaggggggccaccatcctccaagtgtttgccggaaaaaataaaacccttttgggtggggg

SEQ ID NO: 47848 - DNA, 268 bp, Zea mays
  Clone ID: MRT4577_143643C.1
cccggcgggaccggtccgggaatcccggggcgtaccacacccgtccgtcgacgcgtccgcccaggcaaccgcccagggggccttttacagaccccttcgttacgtctgaggctgacaaggatggaaaacatgtcacgggccagtgtaagcctcgaggaaagaaattgtcactctgtcagccgagccagttgtgtggatatatgatccgaacaacgctgccgtattcattactcaataacatcagaacccatcagaaatactaagacat

SEQ ID NO: 47849 - DNA, 391 bp, Zea mays
  Clone ID: MRT4577_143644C.1
tcgagtccgcggatgaccgtatcgcggactcatcgtcgatcattcgagcataggggagggagagagatgaaggagggcacggccaactgcatcgacatcctcatagccatcatcctcccgcctctctctgccttcctcaagttcgactgctaggtggagctctggctctgcctcctgctcatgttcctcgcctatctccccgggatcatctactggatctacgttatctccttggactacccagatattgccgtatatcgttacaaggcgaaagagctaggtgatcaggcagcgaaggcaatgtacatgaacgtactgctgagatcgctttaatttgccctgttgctcaatgactctgtatggagaccgaatctcacctgcgctgtggcta

SEQ ID NO: 47850 - DNA, 1390 bp, Zea mays
  Clone ID: MRT4577_143645C.1
atctcatctcccatgggtagagacaacacaagagctactgactactataaatagagttgctggccccctaccttcggacgcacaacacaagagctactgactactatagctcctcatctcattctcaagtgtgtagccgagagagcgccatggccagcctccaagtcactcctacttcggcgttcactcagtggaatgagctgaagttcgaaggcctgtacttgttccacaagtaccagggctcaggcgccaaccaaactcaggtcataagcaacaaggcgccgattggcatcggtgccaccgtagttaacaactggacagtgtgtgacgggccagggccgaacgcaaagctcgttgcccgtgcacagggcttgcatatccaagccggcaactgggtcaactccttcagcctagtgttcgtggatcaaaggttcagtgggtccacgcttgaagtgaccgggatagtagttgaatccggggagtgggctattgttgggggcaccggtcagtttgccatggcaaacggtgtcatctccaagaagttacatgggaagaccagcgaaggggacatcatacaactcaccatccatgctttctgtccggtgctcggaccgacaaagcgctcggccacaaaagttggaccgtggggtgggagcggcgggtctccgatggacatcacggcagagccccagcgtctgaagagcatcaccgttgctactggcatcgccgtgacctcgattgccttctcctacgtcgactccgccggccaaacccaatctgctggtcgctggggcggttccggtggagaaactgagccggtgatccagctcggcgactccgaggtgctcacggagctgtccgggacgatcggcaacgtcgacggcctcaccgtcataacctccatcaagttcgtcacaagcctcaagacctacgggcctttcggagcatggggggacgggagtgacactccattcgcgatccccgtgcagcaagggagtgccatcgtcggcttcttcgcacgagctgggatctacctcgacgcccttggcgtttacgtgcgatccctgtgatgatgactctgacgacagaggcagctacctgctctgctccagtcaccctccgttttatttcctactgctacttgttgtgtcttgaataatttcgataaataaaggactccgccagagattggcacttgaatcgatccataaaaaaaaaaaaaaaaaagcggcctagcctgaacgtgcctcacgaggatagttgccacatccagtgaaaggcatcctctgtggtgaaacctgtgtcttcctaccatgctatacggcagccatgggttgccaatgcattggccacctctgcatgctgtgatatctggactaccgctatttgt

SEQ ID NO: 47851 - DNA, 447 bp, Zea mays
  Clone ID: MRT4577_143646C.1
ggttggaacctttgggctgatttatgtgcttgtcctgatactgagactgatggtaagttcgtaggttggactgcgtcgggatcgccgggggatattgccttcaaaatcgtagagaatccttgagtatcccgtataggggagaaaggaaccgttaagcttggtaagttctcgcggcataaggggctgatgccttataggactactttggggcctacgacttagggaggtgatcctattaatggtaatggtatggggggtgagcttactcatggtagtattactcctcttgatgagaatcctaagtatatttatgtcaaagttggcatgtcgcttacggtcaatcatgggtttgatcttaacggtctttagcctcctactattattgcagatgaaaattggccgtttaagaagtcggatgggtgttatgcggcgcctggtaaggcggcg

SEQ ID NO: 47852 - DNA, 1307 bp, Zea mays
  Clone ID: MRT4577_143647C.1
gtgaagctgtgcgtaggatcaatcaatctcaatctcaccttgggtagagaccgcgcgcagccccagccccagcctcatggccgacggggtgttctataaatagagttgcttgtcccctaccttcggacgcacaacacaagagctactactacagctcctcatctcaagtgtgtagacgagacagagagacactgagagagcgccatggccagcctccaagtcactcctacttcggcgttcactgagtggaacgagctgaagttcgaaggcctgtacctgttccacacgcccctgggctcaggcgccaaccaagctcgggtcatagacaacaaggcgccgattggcatcggtgccaccgtagttaacaactggacagtgtatgacgggccagggccgaacgcaaagctggttgcccgtgcacagggcttgcatatccaagccggcaactgggtcaactccttcagcctagtgttcgtggatcaaaggttcagtgggtccacgcttgaagtgaccgggatagtagttgaatccggggagtgggctattgttgggggcaccggtcagtttgccatggcaaacggtgtcatcttcaagaagttccatgagcagagaagcgaagggaacatcatacaactcaccatccatgctttctgtccggtgctcggaccgacaaagcgcttggctacaaaagttggaccgtggggtgggagcggcgggtctccggtggacatcacggcagagcctcagcgtctgaagagcatcaccgttgctactggcatcgccgtgacctcgatcgccttctcctacgtcgactccgccggccaaacccaatctgctggtcgctggggcggttccggtggagaaactgagccggtgatccagctcggcgactccgaggtgctcacggagctgtccgggacgatcggcaacgtcgacggccacaccgtcataacctccatcaagttcgtcacaagcctcaagacctacgggcctttcggagcatggggggacgggagtgacactccgttcgcggtccccgtgcagcaagggagtgccatcgtcggcttctttgcacgagctgggatctacctcgacgcagttggcgtttacgtgcgatccctgtgatgatgactgacgacagaggcagctagctgctctgctctgctctgttctgctccaccggcttcatcgcgcgggttccagtcacccaccgttttatttcctactcctacatgtgtgttgcctctgtgtctgaataatttcgataaataaaggactcgatccgccagagattggcacttgaatcg

SEQ ID NO: 47853 - DNA, 1383 bp, Zea mays
  Clone ID: MRT4577_143648C.1
ctcatctcaagtgtgtagacgagacagagagacactgagagagtggcccgctcccagctcctcatctcagctcgaggccgggcgggacaacacaagagctactactatagctcctcatctcaagtgtgtagccgagagaggagagagcgccatggccagcctccaagtcactcctacttcggcgttcactcagtggaacgagctgaagttcgaaggcctgtacttgttccacaagtccctgggctcaggcgccaaccaaactcaggtcataagcaacaaggcgccgattggcatcggtgccaccgtagttaacaactggacagtgtgtgacgggccagggccgaacgcaaagctcgttgcccgtgcacagggcttgcatatccaagccggcaactgggtcaactccttcagcctagtgttcgtggatcaaaggttcagtgggtccacgcttgaagtgaccgggatagtagttgaatccggggagtgggctattgttgggggcaccggtcagtttgccatggcaaacggtgtcatctccaagaagttacatgagcagagaagcgaagggaacatcatacaactcaccatccatgctttctgtccggtgctcggaccgacaaagcgctcggccacaaaagttggaccgtggggtgggagcggcgggtctccgatggacatcacggcagagccccagcgtctgaagagcatcaccgttgctactggcatcgccgtgacctcgattgccttctcctacgtcgactccgccggccaaacccaatctgctggtcgctggggcggttccggtggagaaactgagccggtgatccagctcggcgactccgaggtgctcacggagctgtccgggacgatcggcaacgtcgacggccacaccgtcataacctccatcaagttcgtcacaagcctcaagacctacggccctttcggagcatggggggacgggagtgacactccgttcgcgatccccgtgcagcaagggagtgccatcgttggcttcttcgcacgagctggggtctacctcgacgcccttggcgtttacgtgcgatccctgtgatgatgactctcacgagaggggcagctagctgctctgctagctccaccggctttcatcgcgtcaccctccgttttatttcctactgctacttgttgtgtcttgaataatttcgataaataaaggactccgccagagattggcacttgaatcgatccataaaaaaaaaaaaaaaaaaaaaaaaaaaaaaaaaaaaaaaaaaaaaaaaaaaaaaaaaagaggggggggggggggggggggggggggggggggggggggggggggggggggggggggggggggggggggggcccgggtacgggggcccgggtacc

SEQ ID NO: 47854 - DNA, 473 bp, Zea mays
  unsure (1)..(473): unsure at all n locations
  Clone ID: MRT4577_143649C.1
aaggagcgaccaccggggggacagggaccgcgagcagcgcccgaacgacgaggaccaccgaagcgcgggcgagcagcgacaaccgccagcaccaaggccgccaagggagggaggcagcccgccgaccgcgcagacggcgccgagggcgacaggaagggccacggcgaagncggcggggggagggccaaggaggncacggaggccaccaccaaggccgccaggaacggccgccgcaaccgcgccacagggccgggaaccaagaccccacagccccgcacagagccgacgcggacgagggagcagccaaggagaagaagaggccagccggccccggagcgggcgcgancgcgggcggagccgcgaggcccgcggnggagagggcagcangccgaaaacgccgccggccaagcagacgcgcaacaagaacccgccgaacaacgcccgagccaccaccacggccacccagacgagga

SEQ ID NO: 47855 - DNA, 113 bp, Zea mays
  Clone ID: MRT4577_14364C.1
gacccgcctgtcttcttctatgtttgggttgcctattgctgagagtactgggtctatgaaggtatgttgcttgctgtcagtgctggttgaagcctatatggtggttgagctgg

SEQ ID NO: 47856 - DNA, 655 bp, Zea mays
  Clone ID: MRT4577_143650C.1
cggcagctcatcagatcaattactgaaaaaaacagaaacgtcgaaccctaacagtaatgactagctagagcatcatcaatgtatgagatgggatactaatgaaaacactaaccccctctagaccatcagatgtctcagacagaaattagacagaacgaaataatcggacgtatagtcgtcggaggctcgtcggggcccactactgatatggcgagcgtgggcgctgtgcacttgccggcgccgccggccacaactcgtgggactcgcgcgcgaacaagggaaccggctgagttgccggagccatggcttgcgggtgcgacgacccgcccgcgtcgtgctgctccgggggctgatgccgcccgtgcccacggcgttcgtcggctccggcagtaccggagacggacgccggtgcgtcgtcctcgagggggaggcggtggaaggtaaggtccgtgaaaaaaaagacgagagggcccaccacggcgcccccgacgacctggccgtgcgggccggcgagcgacaccgagaggtccctgacggtcgcgcgggccaccgcggcgggcgtcgacggggccaggaaggtggccgagatggagaggatctcgtaccggccgcggaagacggccgtggagcctccagctccgcctcgtgccgaatt

SEQ ID NO: 47857 - DNA, 268 bp, Zea mays
  unsure (1)..(268): unsure at all n locations
  Clone ID: MRT4577_143651C.1
gcgtttctgttgaggnagctgtttaacagtgcaagcaagatcatcgctacagctaatctgcagtccgagatctacagccacatgacaaaccctgctgactagctgtagcgatgatgttgttgaaggaggctgtttaacagtgcaagcaagataacttatacttatgccttaggacaagtaatattgttttcctctgatgaaatacttggtaacgatctgtctctgtatttttatatttgattctgaatgctttgaaccctagtgttcc

SEQ ID NO: 47858 - DNA, 528 bp, Zea mays
  Clone ID: MRT4577_143652C.1
aaaaaaaaaaaaaaaaaaaaaaaaaaaaaaaaaaaaaaaaaaaaaaaaaaaaaaaaaaaaaaaaaaaaaaaaaacaaaaaaaaaggggaacatgcttgggggtgccctcttgccgggggccccgcttggggggtgttttcttcccgtttcccctgcctctggggggccctttctggccttccttttggggcggtcccctttttcccttttggggggttttttttccacggggcttggccgtcactttggggggggcccgccttgggaaccccctggctttccccccttttatcgcctggcttcccttccccgtttccccccctggtggactttccaaagggcccgtccggcttttttttcaaagggtttgccttgtggggaggccttttggccgccccttgtgcgggtcccttggggggggggcggcctctgcccccccccttggcccgctccctttcccccggccctttggcttttttttttcgtttttttgccttcctggccgggcgcgttttttggggttttcct

SEQ ID NO: 47859 - DNA, 396 bp, Zea mays
  Clone ID: MRT4577_143653C.1
aaaaaccgcaaagggaactttttttttggggggggccccctcccttatccaaaaacctttttttttggattccccccaaaaagccatctaaaagggggccccccccatgatgggttggtgggagggggctgctgggtttgtcaaaacaaggtggccaaagggcaacaattggtgtatttgtaaaaggggtggggggttagccccaaaccggtgggaaaaagggaacacctgttgctgggtcaaaaaggaaacacgggttggtgcaactagctggctaaaagggagaagtatttgctggtgcaaataaaccggggggttcaggggggcccattggttaaatggaaaaaatttttgtttcttaaagtaggccaaacccacccggccgaatgggaaaag

SEQ ID NO: 47860 - DNA, 309 bp, Zea mays
  unsure (1)..(309): unsure at all n locations
  Clone ID: MRT4577_143654C.1
ctactgcactgtacatagatgcacttggacacggcgcacttcatcaggaatatgattactggcacttcccaagctgactgcgctgttcttatcattgactccactactggtggttttgaggctggtatctacaaggatggacagacccgcgagcatgctctgcttgctttcacgcttggagtgaagcagatgattggctggtgcaacaagatggatgccaccacacccaaggactggcaggtccgtgatgatgagattgtgaaggaagagtgtggctacctggggaaggntgaatacgacggtgacgcg

SEQ ID NO: 47861 - DNA, 1191 bp, Zea mays
  Clone ID: MRT4577_143655C.1
cggctcgagagcaagtgcatgccgcaagacacatgcatgatgaataaacgatggctgtccgggagacaattccacagcacacggttcgtacgctttcctcgtcaggtggttccagaggttcccccagcacaaggccaaggagttctacatagctggagagagctacgcaggacactacgttccccagctcgcagacgtcattgtggaggggaacaagaaggcctccgaagaaaaccacatcaacttcaaaggcatcttgatcggaaacgcgtacatggacggcgacaccgatctggtgggcatcttcgactcggcgtggcaccacgccatcatctcggacgagctctacggcgacgtgcagaagaattgcgacttcagcttggtggagctgtccccggagtgcagcgcggacgtggaccagtacaccgcgctctacagggtcatcgacatctacagcctgtacaccgaccggtgcgagctcgggtacccggatttcaactactcggtgtcgccgaaaaccgcgcgcggcgccagtcgtcgtcgcggacgcctggactcttctcgaggtgccgatggggtacgacccgtgcacgcagacgtacgcgactgagtacttcaaccgcgtagacgtgcagaaggcgctgcacgcgaatgtcactggcgtgccttacccctactcgctttgccgtaattcgataaacgacgcgtggaaagattccgacttgacagtcgttccagtagtgaagaagctggtggaggcggggctccggatatggattttcagcggcgacacggacgcaagaatcccgaccacgtcaacccggtacacgctgaagaagctcggcctgcccatcaaagaggactggtcgccgtggttccatcgcaagcaggttggcggctggactgtggtgtacgacggcctgacattcgtcaccgtgagaggagccgggcacatggtcccgtccacgcagccgcagcaagcgctcgagctgttcaagcacttcctggccaacacgaacctgccctcccagcccttctagagaatgtgcaacaaagctccactcctggctggataaacagttattagacctgttgtacctacgttcttggatggtgtaatggaagtatggaacagtgccgtggcccgtggctgtgatggtagtaccattcaacaaatataaataattttag

SEQ ID NO: 47862 - DNA, 237 bp, Zea mays
  Clone ID: MRT4577_143656C.1
ctacaccccagttccacaatgacgccgacgctgatgagatccagatcccagatcctccgccgacggagctactcatccgaatacgggcagcccgagcgggaggtggacatgctcggggcggcggatagcatcgggcagacgctatcgctactcatgcagctcaacctactcgtctcctccctcaaactctacgatatcgccggaacaccaggtgtaccggtcgacgtctctaagatc

SEQ ID NO: 47863 - DNA, 158 bp, Zea mays
  Clone ID: MRT4577_143657C.1
ctcacgagtccgcccacgcgtccgctaagaagagggggtaaagaatcgattcatttaataaaagataatcaggcctaaaactatacaagcattaggtactgcctaggctccactctgtaaatgaccatgacgtgcattatgcaccaagtcgatagtct

SEQ ID NO: 47864 - DNA, 277 bp, Zea mays
  Clone ID: MRT4577_143658C.1
atatctggtgagcaggccgtttcagcatcaggcaagtggctggatggtattcgaaaatggtattacaatgctgcaggattcaataaactggggttaatgcgagatgatacaatatacgaggatgaagatgtaaaagaagccataagaagacttcctgagaacctttataatgacaggatgtttcgcattaagagggcactggacctgaacttgaagcatcagatcttgcctaaagagcagtgggccccaaatatgaagaggaaaatttctaccttga

SEQ ID NO: 47865 - DNA, 237 bp, Zea mays
  Clone ID: MRT4577_143659C.1
gacgcacgacgtccggcgggcagatgctagacattacgactgctgctggtgagaagaacctatacgacacatggggcatgcgatacaacatattggcatcttgattaaattacatccggaagagcattcttggacagatcactcaacgtcagtaagtaagctatatctatttggttgcatggctcactgccttgctaatttcgctacatgtaatgcaacgttcacatttgtactctg

SEQ ID NO: 47866 - DNA, 254 bp, Zea mays
  unsure (1)..(254): unsure at all n locations
  Clone ID: MRT4577_14365C.1
tatattgtagtttatagttcggggtagwtagtaatagtttgcatagtagcagtwtttttagaactgwacwgartagmgtgytccttaagtwatcgtkgaatcggtytctatgacctmgtaatcatggtctrgtcggcctggytggttgcagggggagaaggatgtcackygagaagtaggtgagctgcacgataggtgtgtgcgatcatgggtgagcsgtsrcggtagcgcaagggggtggtcgnggtcatcgg

SEQ ID NO: 47867 - DNA, 670 bp, Zea mays
  Clone ID: MRT4577_143660C.1
ataacccagccagagccggccgctttcccctcatccacctccgcaccgcaccgaatctctccccctccccgtggccgcgaggtgaaggcgagagcgcgcgctccaccaaccaccaatcccccacgcgcgcaccgcgaggccgaggccgaggccagggcagagcgcgcgatcaccaccaccacaagaggagctcgccgcgccaccaccacctcacagacagtccatataactcgtcttcttggtcgctgctgctcgatcgaccgaccgggcaagaagaagcaagaagcggcaggagagagcgagagctggctggatctgctcgtggcggggatccaacaagaagaggagcgctggcgatgctgcagctgatgatggcgctggccttctcggcggcgccgctgacgctctacgtgccgcccgtgcgcagcctcagcctcttcgtggaggccatggagacggtgtgccgcgagtgcgcgccctactcccagggcgccgtctcgcgcttccgcctcggcctctcccgcatcttcgccggcctcgcgcgcgccctgcgctaagagacggacgcgtccgccgaccagatcgatccttcttcttcttctcgccgtaggtacacgtgcgctacaccatgggcagggggcgcccccccttgcgcagcgcagcgcagcgg

SEQ ID NO: 47868 - DNA, 206 bp, Zea mays
  Clone ID: MRT4577_143661C.1
ttaattgaataaaatattacatattcaacttatctattccctatcacaaaacaataggggttgctatcttggggggcgtgttgtgtcttatacactatttcatctttatcttgtaaattgttccaccagttcatattatgtataccctccgattgtgctatgaaatcactttttttgccaaaaaaattaattaactaataaatata

SEQ ID NO: 47869 - DNA, 431 bp, Zea mays
  Clone ID: MRT4577_143662C.1
ggaacaaagagagtattagacattggacaataagccaataacgtaatctaatcaatccaaatcacgaatttaataaacaataatgttgatcatcttcatgatagaggcctaaatgcaatccatctttgaaacattgcaaaactttctcggggcttatattcaggggcaacatgtcctgctcccttgattgtagtaaatgtcaaattgtagctaccatttgaatagtctgtaacatatcccgcgacttggctgttcacaaaccagggcctccaatctacaattgggacaatatttagcttgttcttgatccatttgaatgtgctcgtatatggaactatcatatcttggtcaccactgaagattagtgccctaagaggacgggtagtcagattttgatgataaggaatgctactgtaaatatccactcgtgc

SEQ ID NO: 47870 - DNA, 252 bp, Zea mays
  Clone ID: MRT4577_143663C.1
gtggcatgccgcgacgtaagctcggaattcggctcgaggttaggccacagatcctttaccactctacggtctgcgcctacaggcggggggcccaccttacccgggggtgcccatgcattgaggaactgcgagcctccctgcccctcagacagcgatgcacaaggttgtcctacactcccattgcttcctgaacacagtccgcaacgtcctcacgggcatcctggtggtgtactacccacacatgcgcaccct

SEQ ID NO: 47871 - DNA, 981 bp, Zea mays
  Clone ID: MRT4577_143664C.1
ttcatggtttgcgagtttatatgcattctaccgcggttagtatgagatataaaattgcgcctataaacaacgctttcacctcttgtggttgctcttaaaccctaactccttatatgccggtgttcgaactatcgacataaatggaacttgggaatatcctgactacaagggtgctgaagtgtttatgacaccaaacgaaggaatccatgaattgagtatcccatactatagttcctatcctgtaactctaaccacgtttaacactagtggctctgatgtactcgacgctagaaacggttttaatcgtgttatagctcggttccatcaggacactaatgcttacgtttatagagctgccggagatgattttagttttgggtttcttcttggacctcctatagtaaaccacgcatccccacagcgttcgtctggtacgcgttagctaccattgagttcatagtcttgtgaaaactatgcgtctgatatgcgttaattatcaagtgagtagctatctcgaattaaaatagtcgttcggtggaacgtatccacttgacttacaaaccaatacgaaggataagagtattcgtcgcatttgattttagcgtcgctaggcctagtttgtaagttagtctaattattattaaggacaaaaaaataataaaatacaaaatacaaaaatatttagcattagttaattttaggaaataattttagataagcctggcgcgccaaaattggagtttaaagaccctataaaaatgctggcgttatacaccccttgttccttcgaggcgggccctcatgtgttccacatgcagacttaaagaagtctacccctggcccgtccgggggatctaagtttttatcagttttcttagactcagctattagctgggaggcgtaactgttactttatgtctggcgaacatgagaggtgctgtaatgtcatttttcgccaaaaaaaaaaaaaaaaaagcggcc

SEQ ID NO: 47872 - DNA, 461 bp, Zea mays
  Clone ID: MRT4577_143665C.1
gtgtgaatcacttaagttatatgagacgattgtggcttaaggtgcacgtttaaattcagtaattgcggctggattccttgaaagtgcagctctacgtacagctaccccaaaaaaatcatctatggttaacacactgcaacacatcttatttttctcgaattacacaggagagttgcgtatcatttcattcaagaagaagaagatacaacacccgaggggtggaaagaagccccgcccctccccgcaacacatcaccaaaaggtaacatacgcgccacgcactaaacctaaaagaacgaccacacagggctgctcaggcttccagccttggcttcctgctgagcagctcatggagggccgtgtttgtggccatacactagagctcactctcctctgctacttcctgacacaccaaggaaatactaggactaagaccctcaaaacgcacacattcctatgtct

SEQ ID NO: 47873 - DNA, 469 bp, Zea mays
  unsure (1)..(469): unsure at all n locations
  Clone ID: MRT4577_143666C.1
natagnaaggcccactcttgatttatttatcaccgctcaccgcagtagcaactgcattatatatatgcttcaaatccctagattcctagggtttatagctatgcataaggcctagtttaggaaccctattttttccagggatttttnattttctcaagaaaaaaataaactaatttttcttgtaaaataaaaaaccatagaaaaatatggttctcaaactaactctaacactaacactgtaaacgtgccgcgaaaaaaaagtgatacctaactatttatatgttttctcttgttataaaatttgagagttataatttaaaaaaaaaaaaaaaaaaaaaaaaaaaaaaaaaaaaaaaaaaaaaaaaaaaaaaaaaaaaaaaaagagaaaaaagaaagaaaaaagaaaaaaaaaaagaaaaaaaaaaaaaaaaaagaaaaagaaaaaagaaagaaaaaagganaaganagg

SEQ ID NO: 47874 - DNA, 462 bp, Zea mays
  Clone ID: MRT4577_143667C.1
aggcacctccccgtctctctcaagctcttcgagaccgccaactcccctcttaccctccacctcactcctccagtgtgacgcacatggcctccatcgaacggatcttccaatctctccttcaccatgcctgtcaagaaaatcaactcaaattctctagccttctccccggtgaggaaggacaacacattcctccgcctgcaaccagagactatgagatctgtatcatgagctgccaagaggatacgaagcaccacgtttgagaaatctgtgaagaaacagcttgctcttcctgaacacgctgaagtttgcggagaatcgaaattctctgaacttggtgcggatgtgctggacacgcttgagatcgtgatggagccttgaagaacactgcgacattatggtggaggagtccagcgcgcacacaattgccaccgttgaagaagccgcagacctcattgacaagct

SEQ ID NO: 47875 - DNA, 243 bp, Zea mays
  Clone ID: MRT4577_143668C.1
agtcacatccatcatccatccttgcttccaagcaccaactaatcaaataacgagcagccttattaaaaattactcaccatccacaaacaaaaatcaacaacctcacttctaccttctactgatactgacactaacaattgcatccaatctgttctctcttcataaagaaaccatcctccaaatctaattcttcttctccctccaaaacttttacatcttttcactccataccccatctttttt

SEQ ID NO: 47876 - DNA, 479 bp, Zea mays
  Clone ID: MRT4577_143669C.1
acgtgctgccgctcgtagctggtccttaacggccggtttttttttttttttgacacgggtacagatttgaatattgtcttagaagcgtccgacacatgaaataaagaggtcagacatacataaacaaccaattttcatagcggggtcataacacactatgctggctgtactgctggtttcctgcatcaccacaccatatcacccactatgtgtgtcgtaaactctggccatgatcaaggaggtagtgctgaactttctccttgttgctgcaagaaactctaccagctacgtgaagcccattctaaccgtgtggccttcttccttgggactgcaccatgggatacactgcattgcctattgtttctcagacaccctcgggtttgtcacagcggcactagttgatttcgataaaccagattggggttgttgcctagtctgaacatgctgaaattgggatagctgaccctgaacatgcttga

SEQ ID NO: 47877 - DNA, 433 bp, Zea mays
  Clone ID: MRT4577_14366C.1
cccacgcgttcgcccacccacccgcagggtcgccgttatctgctggccccaaaaccctaccttaatgggagccgccgccggcgccgcgggtgctgatcctcctccctcggaggctgccgctacaccagccagagaagatcaacagcactacgtcgccgccgcgactggcggagtttcgggcgaatcgtgcgatgcagcggcgcctcctgctggtggaggcggcgcagacgatgccgtggagcctgtggtcatcgatgcctccgcggtggccggcggaccaggggaggaggagcaaggggagtgcgggttctgcctcttcatgaagggcggcggctgcaaggacgagtttgtcgcgtgggaaaagtgcgtggaggaggcggaggccgccggtcccagcgtcgacgtcgtggagctgtgccaagacgccacggcc

SEQ ID NO: 47878 - DNA, 479 bp, Zea mays
  Clone ID: MRT4577_143670C.1
cgagaaaaaaaaaatgtccattaattcgagtgaattccatcacaggttcttacacccaacactctgattcactcgaccacaaggtcttgtacaaaattcaaaaaaaaaaagcctatcattattggcctggcccaaaggtgcctggatgaccaaacgcacgggggcgtccgtacatgcaacaaatgaggtggctgggtgagctcatctctggactcgcatggtttgaggatggggcccttgccctttgggataaacgggtcgcacctggcccacactagcaataagatcggggccagggggatggaccatagcactactatggtgggcgtccgggtttgcctccccatgagccccttgatgaactgctccaggtggacgatcacccatatggacaataatagcttgccgatgagcggtcccccatagccgtatcctgttgttgacggcttcacgacacgccggacacgatgcccaccatg

SEQ ID NO: 47879 - DNA, 550 bp, Zea mays
  Clone ID: MRT4577_143671C.1
gtacaagctttttttttttttttttttttttttttttttttttttatttttttttggttttttttttttttttttttttttttttttttttttttttttttttttttaaaaaagggccccccccggggggcccctcaaaagggggaattccacccccctgggggccgttcctaggggaccccacccgggccccaagctgggggaaaaaaggggaaaagctgttcccgggggaaaattgttaccccctcacaattccccacaaaatacgacccggaagcaaaaagggaaaacccgggggggcccaaggggggggccaccccacattaatggggggggccccactgccccctttccagggggaaaacctggggggccacctgctttaaaaaatcgcccaacccccggggagggggggtttgggtattgggcccttttccgcttcctcgttaaatgactcggtggcccggggcgttcgggtggggggaggggtttcaccccactcaaaggggggaatccgggtttccacaaaatcgggggataacccaggaaa

SEQ ID NO: 47880 - DNA, 311 bp, Zea mays
  Clone ID: MRT4577_143672C.1
cacaccacccaaacatcctctaaacctttccatcattaatcactctactctatcagaggaatcttaccaatatttggcaggcagataaaacatttactaaccaattcacatatcaatcaaccacttctgaaaacattcctaactttactcaagaaaaaccttatcatactgataagatacaaaatttcataaacatacctcacaattcatgaataaatcattgatcaaatagacctcctgcaaaagaaactcaaacaactccaaatagataaccttaatcactactataatatctcttcacctatacaaat

SEQ ID NO: 47881 - DNA, 449 bp, Zea mays
  Clone ID: MRT4577_143673C.1
ccgtccgaaaaaaaaaaaaaaaaaaaaaaaaaaaaaaaaaaaaaaaaaaaaaaaaaaaaaaaaaaaaaaaaaaaaaaaaaaaaaaaaaaaaaaaaaaaaaaaaaaaaaaaaaaaaaaaaaaaaaaaaaaaaaaaaaagggggggcccctttttgaggggtcccaattttccttccccggtccttgcaaagttattagttttttttttggggccccctaaattaaattcccctggcccgggttttaacaccgtggggccgggaaaacccttgggtttccccacttaattccctttgaagcaattccccttttccccagttgggtttataccaaaaggcccccccccattcccctttcccaacatttccccacccttattgggaatgggacccccccttttacgggccctttaaccccggggggtgggggggttcccccccgggggccctt

SEQ ID NO: 47882 - DNA, 187 bp, Zea mays
  Clone ID: MRT4577_143674C.1
gtcacgcgtccgtgcacgcgtcggtccacgcgtcggctgagattatgtttgaggtgagcgccatcaccgtatgaatagggcgacacgatgctgcgggttgcgggaagaagggtcgcgtcttccgtctccttgctgtccggcgtggctgcggtcaaggttgcccttgccggtgctgtcgccctcgagc

SEQ ID NO: 47883 - DNA, 299 bp, Zea mays
  Clone ID: MRT4577_143675C.1
aaatattattggggttttttagttcaaaattgcatacctttggctaaaacctaaaaacttacactttgatgaggagactttttaggaggagtggaaaaaaaaaaaccccacatgaatcgccatgtcacttaatatacccaggggcatatggcccaaactaaaaggaaaacaccccctcaaaaatgcatataaaggggccatgacacgaagttggggggggacccggtgacccaaaaaagcccccaaccgggggggcaaaaaagggaaaccccatgctcttgaatttccacgaagaaggc

SEQ ID NO: 47884 - DNA, 656 bp, Zea mays
  Clone ID: MRT4577_143676C.1
aaaggataaagtcgggtgcatctcatatatgcgccaaagaagacaacacatatagtaacagagtgtatagagataaatgtcacaatatcatcagagtacttattacatagtggtagtcttacaaaataaaatataaatatagatcaaactaaagtccatccttggcgtcataaagtcaactgggagatgccacctagatcaaatcgaactcctcactgtgtggatcctcttgaaccacctgttcttctcctgggacttgagattccaggtaccaggatgattcctcagatcctcgtgtccgcactgcgcaatccacccagcgcagagctcccaaccatgccaccgcatggacccgcggtgattcatgtacttcttccctattctcgtcgatgcttgctcaattgacggtggtttggcggcgcctaagatgagggttggggggttttgcgtctacgttatatgggcagaggcgggatcaggaatctcacaacccaatccaccagatcgcaggcatgcgcgtgattggcatcttctattggagtctgttaccatgaattgtggaagaagactcgtggaagaggaccccagccacaattgagagccatgagtcaaggggaaggctcggtcccaggcttgtaatggttgatcccggccgg

SEQ ID NO: 47885 - DNA, 309 bp, Zea mays
  Clone ID: MRT4577_143677C.1
cgttgctgtcgcctgagcttcgtgcacaagcaactgatccgaagagcaggcaaggtcacaggaccctggatggaagtttgggaggtggccatacactgtcacactataaaggactttgttcagtgtattttctgtttgaagattcttccttctagaattaaaagatttaaacagcacctgtagatcggtcctatgcatttttattgtgatctagctagctatctgtaaatgatctagttgtgaatgatgttataattgtgatgcttttgtgaatatataattgtggtgcttttgtgttcgacagcaacg

SEQ ID NO: 47886 - DNA, 184 bp, Zea mays
  Clone ID: MRT4577_143678C.1
ggaaccgtccccatccatcccaccgaggtttgcagcatctaagctagtagcatgggcaagctgtgctgcagccaggaagacgacgagccggcggtgagacctcctggggctgctcgtcaccgtcgttcacgacctgctgctgctcatgctgtgcacgccaacccgacacatgcgctggatctgc

SEQ ID NO: 47887 - DNA, 435 bp, Zea mays
  Clone ID: MRT4577_143679C.1
aaacgcaggaaagcaacaactctgcatataattaaaagcaaccacagaaggttctatgtatacatatagcatcggtgataagcaaacaggctaactaataaactctgtttacacacaagcaaacatgcaaatcaatatacaaaaaaggcacacaacctatacagacatcaggccaactaacttggcaactacaagcagcatgtgacatataactaccattagctacttggaccactcacttaatactactgggtacacgtagcgaacttgaagtatcagatataaccttcaccaaaacacgcgaggcccatgccccttccgtgacctatctatatgtagccaaactactcacacaaaaggtacttgaacagatagtacctgccggtggacgaatctggtggtcttcgttagccgcactaaagacacggcctggtg

SEQ ID NO: 47888 - DNA, 109 bp, Zea mays
  Clone ID: MRT4577_14367C.1
ccggaagcactcttacagaagcgcgctaacttcgacctaccatcgctggttaccaagatgttacccctaaaagggcggcatgcccaccttgggaccgcacaaacgcccg

SEQ ID NO: 47889 - DNA, 579 bp, Zea mays
  unsure (1)..(579): unsure at all n locations
  Clone ID: MRT4577_143680C.1
ngatttcttgcatttctgtcgaatcccaggtctcaccaagtcaattctctagggttcttggcccccatttccgcaattgttgccacctgcttttagttcccatttcctcaattggggccatctgcttttagttcctcttcttcactcgcggagttatcaaagcttcagatttcttgcttctccgcggcagtttgctaggggtcggagtgccggagccagagccacgcgggagtttgagctggattggttcttcaattgagcgtggcggccggcgtcaggtagaagtttccatggttcttggtttgttgttggagtgtaggagataacacggggaaggagattgcgggagggtaacggaggtcggggagctggcggcgggccacgggatgatggagccccaagtggtggacctcgaggatgacagcatcaacttctgggcctccctcggcgtcagcccccacgtggaccagatgccgctgcacagcgtccatattgtcgaccaccaagctcagtcagcgctggcagctgcggctgcggcgatacagccgcagtccgtctgcagggacctcttcccggtgg

SEQ ID NO: 47890 - DNA, 1974 bp, Zea mays
  Clone ID: MRT4577_143681C.1
atttcaacacctcatccaatcttgcatccccatctctgtctttgctcctccatggccatggccatggcccgaccttgtgctttccttctcttcttcctagttcttttctcctacgacggatccggtcctgggagcagcaggaggactaggaggagtggcgtcgcgcaggccacgcagagagtcttcctgtatccacaggctcccaaggtctcctccatcgtgagcagcaagtacaggaccgcgtaccacttccagcctcccaagaactggatcaacgatccaaatggaccaatgtactacaatggtatctaccaccagttctaccagtacaacccaaacggctcgctctggggcaacatagtctgggcgcactcggtctccacagatctcgtgaactggatccggctcgcgccggcgatagagcggacgactccgagcgacatcaatggctgctggacaggttcagccaccatcctaaagagcggccggcctgccatcatatacaccggcgccgacaccgagaagcgtcaggtccagaacgtggcgttccccaagaacctgtccgatccgtacctgcgggagtgggtgaagccacacgacaacccggtgatccagccggtcggacgagggctgaacccaggccagttcagagacccgacgaccggctggatcggcccggacgggctgtggaggatagccgtcggggccgaggtcgacggccacagcgcggcgcttctgtacgagagcgaggacttcgtgcgctgggacagagtggaccacccgctctactcctccaacgcctccgccatgtgggagtgcccggacttcttcgcggcgatgccgggcgagaactccgggctggacatgtcggctgcggtcccggatggcgccaagcacgtcctcaagatgagccttgacggctctgacaagtacatggtcggcgtctatgatctgaaaggtgacgcctttgtgccggataccgtgatcgaggaccggaggctgtggtcaaggattgactacggcaactactacgcttccaagtcgttcttcgactcgaagaaagggaggagggtcatatggggctggacgaatgagacggacagttcgtcagacgacgtcgccaaaggatgggctggaatccatgcaattcccaggactatatggttggataaagacagcaagcagctgctgcaatggccggtcgaagagatcgagtcgctccgaggaaaacaagtcagacaccaaggcctggagctcaggaagggggatctgtttgagattaaggaaattgacactctgcaggcagatgtggagatagatttcgagctcacatccataggcagtgccgacccttttgacccttcctggctcttggacatcgagaagcagtgccgggaagcgggcgcgtcggctcatggcccgttcgggctcgtggttcttgcttctgagagcatggaagagcacacctccgtgcacttcagagtgtactacagatcacaggagaagcacatggttcttatgtgcgccgatctgaggaaatcgtccttgagaccggagctgtacacgccagcctacggaggcttctttgagctggacctggagaaggaaaagacggtggtatctctgagaactttgatcgatcgctctgcggtggagagcttcggtggaggcggcagggtgtgcatcatggccagggtctatccggcggcgctcgtcgacgacggcggcactcgcatgtacgcgttcaacaatggcactagcaccgtcagagtgccccggctagaagcgtggagcatgaggagggcacaggttaacaagggatgaggaggaacacaaggccatttgatagctagaggagaggaacagagcatgggcacatgaattaaacacacactgctggtttaatttgctggaattaatcaatcaatcaatcaatcaaacacacgaagattaaatcataaaaaaaaaagaaaa

SEQ ID NO: 47891 - DNA, 470 bp, Zea mays
  Clone ID: MRT4577_143682C.1
gggcccaaaaaacacccaacagttaagggggggaaaaaaaacggggacccgaaccatatttacaaattcaaaaaaaaaaaatttggggccggaaaaaaaccccaaacaggggggaggggggatttggcccaaagttcccagaaaacacccggggccccaagcaagttcgaattggaaattaaacccttgctcgaaaggggggggaaaagccagccaaggcccttgaaaaaacccttgcaagggggggaaaaagggcttgggaggacccagggcccttgcccaagggggggaaaccaaagctgggaagggaccccagcagcattcaggggataaggaaaatcttgctgggggggaaaaaaagcagcacacttcccgtggttaatcctggttaagaatccggggaagttaattttgggtttaaaaaacaggggcaggggaatggttttccacaaaaaaaaaaaaccctgggg

SEQ ID NO: 47892 - DNA, 600 bp, Zea mays
  Clone ID: MRT4577_143684C.1
gactcctatagggcgattgggtttctcgaggccggccgatgtagtcatcgtgctcactcagtaagaatgatactatcactgtagaatctatagacatcccctctactctctacgtttcacttcctacgagaagattcctcctcctcgtcgtccactgtcgtcggcgccgttgcggcgggcgtatgctcgtccgcagatcggctgaacgacaagatctggtctgtcatctgacgaactgatgacacgtgtgttgtatgttcggcgagctgcacttcaaagagggtgcatcgcttcataatgatcaagatggacgacgagcacaaggacacagatgagcaccacacctctgattctactatcaagaacgacgacttcacaaatagcctccctgataacgactgtggatactccatctatgacttcgactttgacaatgaagacgatgctcagaacagcaagatcttctatatcctatggaacacattctccgccgaggaggagagcaagatgctttatgtgagatgcatgccgaaaactcaagatagagctccatgagattcaagaagaactacaggtgacatgagcgagtgacactctact

SEQ ID NO: 47893 - DNA, 2070 bp, Zea mays
  Clone ID: MRT4577_143685C.1
ggccggcgtaaagaatcgaacagaccaggaagaaacgcttcagccgatctgaatcacgcttacactcttctttagttcttacctcttcaaaccctagcctccctgatccatccgcacctcgaaatttcggcagccgatgcctccgccatcgccgccgtggtcgcctagcacctcttctatctaggtttcgtcggtccctcttcttcctgcgccctcaagatctgcgcgacgacctgagctctccgtgctgtttagggcggccatgaacagcgcgttcagcgaggacatactcgctggcaagctcgccaagctcaacaacacgcagcaatgcatcgagacgttgtcgcattggtgcatttaccatagaaagaacgcagagcaaattgttcagacttgggacaagcagttccacagctttggcaaggagcagaagatccctttcctttatcttgctaatgacatcttacagaacagcaagcgcaacgggacagagtttgtagaagaattttggaaggttctccctggggcgcttaaagatgtaagtgagaacggtgatgaccgtgggaagaaggtggcatctaggctggttgacatatggcaagaaaggagagtttttggctcacgcgctgggggcatcaaggatgtgatgcttggggcagccccccttcctgttttagatatgaccaaaaaacggtctcgcagttcagcaataaggattgttaaaagagattctcgttctgtgaaactgagactaggcattggaggaactgcagagaggatcatatctgcactgcacactgttctcagtgaacaagcagatgaggatgatgacctggaaaaatgcaagacttctatgcgtcatgttggaaagatggagaaggacgttgacagtgcttgtagcaaagccgaagatcctcgtcgcgaggttctttgcacagaactaaaagatgaggaagctaacatgaaaaaatgcatcgaaaagctaaaagctgttgagaaaaatagagcagctattgtgtttgaactgaaggaggcactgcaggaacaggaatctgaactggagaaagtccgcactcagttacagctgaagcaatggtacatgaagcctcgaacatgcagcggagactcaagaatgagccaaccattccgctgcccagatcagcatcgttagtagagccaggaaaggtggtctccaatgggcaagtaaaggagcagcacaagacggctgctgctatccttgcagacaagattgcagcatcatcaaactctcagcagattctgcagtctgcactttcgaagtttgctgccgaagaagcaaagaattcatctgaaacacgctcagataagaggcaaaaggctgaacaactatcgcaggtaccaagcgtcgcaaatgccgctgcttttgttccaatgccacaagtggttgccacaacagctcagcagcagccccaggcaatcttagtgcaacaagcacctatgcagagccaagccactgcatctcagccccagtacaatatctaccaggccccgccccagcagtttgtccctcagcctggaggtgtaatgatgggcatgccttacaacatgagctccatgaccccaccgcctccaccgccgccccagatgatgagcctaggaaggccctcaccttcagctccacagccccagatggctgtcatgccgcagactcagcctccagcgccaccgatgcttcagcagcagatgccaatgaacctaggtcctcagatgcagttcacccttcaaccgcctggcgtgccgcctttcaggcccatgcagccacctcctgggatgcagtacttccatccccaatctcagtgacagttttggtagcccagccctgttaaacttttgacaggttctcaatttagcgttgactagtaagcaggatctgactgctgtagggtatactgtttgtgtggttcgtttcgacatatgttgttgtactgtacatgtaatgcgaggagaggtaaagagcgaggagagaaatgaagattaaagatttcacataaaaaaaaaaaaaaaagcggccgagactagttctcctcgtgc

SEQ ID NO: 47894 - DNA, 213 bp, Zea mays
  Clone ID: MRT4577_143686C.1
tggctctctgtggcctccgccgctgtggtccgtgccgtcgccgggcgccttgtggggttgttcttcctgctggtcgctcgcttttgctccttctcgggggtgctcggggccggcgccgcctcgttcctcgctttggtgggcgtcctctccgtgtgcgcctctttcctgtctgtctctggcggtccgttctctgtgcgggtctgccctcccgtg

SEQ ID NO: 47895 - DNA, 274 bp, Zea mays
  Clone ID: MRT4577_143687C.1
ggagcataaacagaggcggtcagccggtcaacccaaacttaaactattaattcatgatcttggaataataaaataatattggtgccaaacacactaataaacacataaaaaagttgatgagcaagatgtaattatcaatagctttggatcttactaatacaagaaatgcacttttgcatacacattaggaaaaaccccgagcacgattttgatcttaactgaagggttgcatatattcccaaacatataatacataacttaggcttttggaaaa

SEQ ID NO: 47896 - DNA, 299 bp, Zea mays
  Clone ID: MRT4577_143688C.1
cgacttcaccgtatttttggaatcgcacactattcgatcagtttgctcgccattttggaaattgtgattgtgggaattttcgaaaacgcagaggtcgacgcgggttactccgtttcgcccaaaaagttggaataaatggctaccgataccgaaacgctctctcttccgaccacaacggcgcctacagaggtcgctgggtcatcatgcttgcctcaagacgaacatcagtgccggggactcaaaagagaatggagcgccgacgagtgggacacgagcatcacgcccaattttcatttctc

SEQ ID NO: 47897 - DNA, 429 bp, Zea mays
  unsure (1)..(429): unsure at all n locations
  Clone ID: MRT4577_143689C.1
accgggaaggaanggcgggaccgacgcatgcgttcgggtggtaatacaatcaacttattttatttaaagcggaggaaaaaccactccgtccggtgggggttgttgttggttgcctccctctccttgctctctctgggagcgcgacctacacgcatacatacaggcggtgggtgtggcagccaccgaccgcggttcatttactcgccgccgggcatctgtcacctacggttcacctgccacctgcggtgcatgtatcaccgaccgtccatctgtcggcggcggtccacctaccaccgaccgtccatgtgccggcgccggttgatgtatcgtcggcaccatgccactaccctactcaaccggcccggcctgagtcttatacacagccacacccatgcccgtgccaacagacggattcattcacgtgccagc

SEQ ID NO: 47898 - DNA, 512 bp, Zea mays
  unsure (1)..(512): unsure at all n locations
  Clone ID: MRT4577_14368C.1
ggcgattgggaccctcgaggccggccgggttattattgctaaccttgttgatcttcttagtgtctgcagaacaacacctttttaccggtttgcacatgacagctcataagcactactacactgatttggagctaaaaaacatgaggctaacaagatttttgtttgcaattttactgacctactaaatctgttatagttgatattagtacactgaactcccaaccaggtagataaatgtaacatctgaatttcctaattcctgccactagtagtatactgaacaattttccttgcttattggtagaagtaacatgtctgttcactaacaatagcattttgtttcttcagttagctttagtcttttagtttcagatgaaggcgataaatgtgaactgtaccatgttctactctattgttcgattacatgttgtctttatagtgactaaataacacaagtngggttattgggttagactaaaaaaaaaaaatatgtagcggccgctttttcttct

SEQ ID NO: 47899 - DNA, 612 bp, Zea mays
  unsure (1)..(612): unsure at all n locations
  Clone ID: MRT4577_143690C.1
gnaaacactgtgaagattgatgactatggggagcccataaaaagaccaagattgaaagttacagtggcacatgttgataccatagggactgcgttttgggaaaaccatccacacattcttcgagaaggaaaatttatgcacggccaaatgatgagactgcactaaggctgatgaatgaatctgcatctttgatgatggagcaataccctgacattgtctttggctatggttttagcaatgagtatagttttgtgttccatgagaagagtgaactataccagagacgggaaagcctaatcctttcatcatgttcttcatatttcacttctctttacatgacgaaatggaaagagttcttcccctacacagaattaatgcagacaccacactttgaggcagatgctctatgttatccaaaactaaagatcatatgtgaatacttatcatggaggcaagcagagtgtcatgctggcaaccaatacaacacatgcttttggatgctagtgaaatctggaaaaagcgaaaaagaagcccatgagatattgaagggaacgttgtctaaagataaaaacgagttgctttttcagcaattccaaatgaactacaacaatg

SEQ ID NO: 47900 - DNA, 479 bp, Zea mays
  Clone ID: MRT4577_143691C.1
cttattattattcctactgaaaccaacgtcaattatatccgttcatgcaaaaaaaaaaaaaaaaaaaaaaaaaaaaaaaaaaaaaaaaaaaaaaaaaaaaaaaaaaaaaaaaaaaaaagagaaaaaaaaaacaaaagcatttagaaccattaagagatggattatttgctgcgctaggaattttcctgctcatagtttgttctctgcgtaatttttgttctcactataacaattaaacacgccctgcgcccccaatgttttggctcccttggctggggtgcctagggcgggggctctctcatttggagcgcgttgctctccgtgcccttttttcagtcggcaaccctcccgccccatttgtttttttgactccccccctcccgggggggggggctttttgggtggcgcccttttttcctttggctcgctctctctctccctgctctcggccgggcggccgtggcgcgcgtttttttttc

SEQ ID NO: 47901 - DNA, 1667 bp, Zea mays
  Clone ID: MRT4577_143692C.1
acttcagcaaaattctctctttatgtgtttcctacttcacttctgtgtacgtaatgaagtggaaagacttctttcctaacaaagagctgaaggagccaccatattttgatgctcgagctgtatgttacccgaatttgaagactattcgtgattatttggcttggagacaagtggactgtaagctactggaattgattcaaattatcttgtatagcaaacgccacctcatatttgttcacacaacttttttgtttgccctgaagtcctacaaggaaactgcattatatacaccaaagttgtacaaagcatgaacctttgtgaacataaaaagaaaagtgatctatgtacgtgtcagaatcaaacagtaattttgttagttcactgatatgcatattctttgtttgtgccttcaggtcatataaataatcagtacaacacctgcttctggatgttggtgaaatctggaaaaagtgaacaagaggcccagctagctttgaagggaacatttgcaaaggacaagaatgagctgcttgctaaacaattccaaataaactatgatgatgaactggctatgttccgcaaaggatctagtgtttaccgagagaaggtagaaacaattgtgaagattgatgactatggggagcccataaaaagaccaagattgaaagttacagtggcacatgttgatatcatagggactgagttttgggaaaaccatccacacattcttcgagaaggaaaatttatgcatgggtttgtaaagaaatttggcatcaatcacatattttcaccttgtaattggatcattgttcgcatcattgcttgccaatttgaccaattctcaacaattcattcatttgacaagccaaatgatgagactgcactaaggctgatgaatgaatctgcatctttgatgatggagcaataccctgacattgtctttggctatggttttagcaatgagtatagttttgtgttccatgagaagagtgaactataccagagacgggaaagcctaatcctttcatcatgttcttcatatttcacttctctttacatgacgaaatggaaagagttcttcccctacacagaattaatgcagacaccacactttgaggcagatgctctatgttatccaaaactaaagatcatatgtgaatacttatcatggaggcaagcagagtgtcatgctggcaaccaatacaacacatgcttttggatgctagtgaaatctggaaaaagcgaaaaagaagcccatgagatattgaagggaacgttgtctaaagataaaaacgagttgctttttcagcaattccaaatgaactacaacaatgaacctgctatgttccgaaagggttcatgtgtctatcggcgaaaggtggaagaacttgcgggggctgaggacggcggcaatggcacatcaagagagcggtggcatgtgaaggtggaccacgttgacctagggcccggtttctggcgaaagcacccgtggttaatgactaattgcactcagtagtcccgactgatacatggtttttgtactggtttatcagtgtatgtaactcttgctgacacaggtctagaaacgaaagacggttgtttgttcacagatcgagccttctcttcaccctctatatgttctgatggttttctgagtcgtctgcctg

SEQ ID NO: 47902 - DNA, 300 bp, Zea mays
  Clone ID: MRT4577_143693C.1
aaaaataatggggggctcatacccctcaaaacaaccaaccaaaatgatccccgaacatattgatatactaaccgaccgacaaaatactgccagaaccattttgctttacaacctactattaaagatctgggtccatgtaaaaaaactaaaagtgaaagccttataaaccacttctacccaaaggtaaaatttgccgaacacttcgaacaagtaaagaaactcctacaaaaaacaacctttcaaaacacagataggattcagtttaccttaaagcgactttttgaaacgcacttactccaa

SEQ ID NO: 47903 - DNA, 434 bp, Zea mays
  Clone ID: MRT4577_143694C.1
tagtggacccactcgttcgccttcgctgcgatctccgtagcctgcgtggcgtcgagtctggacatgtcgacctactgcggagagtacaaggatgagctcatcaagaatgctgactacattggcacccctggcatgggtatccttgctgctgatgagtccattggcaccgttggcaggcgcctttccagcatcaatgtcgagaacgttgaggagaaccgccgtgccctgcgagagctcctattatgatgccctggtgctctccagtacatgaagcggagggagcctcttccaggagaccctgtaccagaagaccaaggatggcaatgccttttgttggtgtactaaacgagggaggcgtcctccctggcttcaaggttgacaagggcaccactgaggttggtgggtctgagcaggacaccaccacacaaggccat

SEQ ID NO: 47904 - DNA, 213 bp, Zea mays
  Clone ID: MRT4577_143695C.1
gacacttgtttactcttcaaatgacctgttactatattgaaactgagagcccgaattgcaatgttaatccatagtttcataattatgctaatgcattctgtgattctgtatgcttaaccgttctcttacatgtatcatcacagaaaatgcaggcaccagggttataactgtgtttgttatagttactaaatgtcgttacacaatagactttta

SEQ ID NO: 47905 - DNA, 791 bp, Zea mays
  unsure (1)..(791): unsure at all n locations
  Clone ID: MRT4577_143696C.1
ccggccgggaaactctctatcctctacaatccaattgatcatcaggcaacatgcgtttctcacgcgttgtaccactactgcccctagcatcagcacttgtcatcaccgacaccgaggtcttccagaaccttgaaagggctggaaattccgttcttgataacgctcaaaatgtcctggatgacgccttcggcaaggcttacgatgcttacgacaaggtcaaggacgaggcaaagaacgtctacagcaaagtccaccatgctggctgcgatgtagacgcatggctacaggggtcctcattcgacgacgatgtcattgatttcgaggaggatcacgaccacccacaccccncacatcgcggtccgccccgtcgccctcctcaccatggaccgccgccgcaccacggcaagcctcatcacccacctcacgacgacaagcccaatcgaactgtgtatgaactcattaacgagagcaagtacactactaagcttgcgaagctcatcaacgagtacgatgatctggtcaaggtcctcaacggtaccaaggcaaactacaccgtcttcgcccccacagacgaggcgtttgagaaaatccccgaccacggcaagaagccattcaaaggaagtcttgaaaagcattcttttttgtaccacgtctcggacgacttctacccaagctggccgtgtggcttcacagttacaccatccccactctctacgagcccgagaaagaaccttggtcacaagcagcgcttggaccgttcgcgtcacactcaagggcccgctataacttct

SEQ ID NO: 47906 - DNA, 254 bp, Zea mays
  Clone ID: MRT4577_143697C.1
cgctccctcacactatacacgcacacacaaatccgcttctaccccctcacgccgccaccggcgtaggactcctaaccagactcggcgtgctccaacaaccttctcatgctcaccgccaacgacctatatgacatcagaagacctcacaaccattatcaggaccaacacgcccatcaccaccatcatcaacctggcgaacgatgccaatcttacgccccagagtgtcaaggcgcccagctaacagatcctcacca

SEQ ID NO: 47907 - DNA, 317 bp, Zea mays
  Clone ID: MRT4577_143698C.1
attcggctcgaggtgctcggcatgccattgtagacggatgcagaggctacgggggttgggttggttctgctgggctgctgaggcggcaaaaaaaactgcaggcacgattgacagaggggccattgaaaacccggcgccgacaaccaacccggcctccgccacgccatgcccgagagggaggatgacagacttacagcacatcgcgggtcgctcaagtactggaagctaaaggaccagtacctaatgacccacggcttgtacctgctgctcaccccgctgatggtgctcgggggcgggtacctgtgcacgctctcccc

SEQ ID NO: 47908 - DNA, 369 bp, Zea mays
  Clone ID: MRT4577_143699C.1
atgacccaaggcctgtccggcatatctataggaaggttgttcgtttttgtttacataaaaccgacagagagaaagataaggtgtaccggtgcccctgcaatacaccgaatcctcctcctttgtttcttcaaatgcacaagagaactgcatctgcgaccagcattataccaaagcactttatgtgacaaaaaatacttataatgtaggaggaggaaatataaagattacaggcctttcaaaaagagaggacaccaccatgcgttaataaaaaagacaggcgagtacacgttgtctaaacactcggagcgagcgaaaaagggtctgtgatctaaaacagagaggagattagggggatataaacagaggggt

SEQ ID NO: 47909 - DNA, 454 bp, Zea mays
  unsure (1)..(454): unsure at all n locations
  Clone ID: MRT4577_14369C.1
naaaaaaaaaaaaaaaaaaaaaaaaaaaaaaaaaaaaaaaaaaaggaagaccaataaaaaaggaaaaaaaaataaaaaaaaaaaaaaaaagggcggggcggtgctccgttcttccgggcctcccgtttcgcctccctctgcgggtgcgttggcttttcctttttttttcctgtgcaccccacttcccttggccgggcctctttccattctcgccgcctggggctggccttgcccctgtgcccttcttactcttattggcccttgccccccctttcctctcttccggggtgtgctgtccttaaagggccgggccggcccccccttgcctttccccaactttagcccgacggggagtgggggcctgggccctgcccctgtcgctttaccttgcgggggcgtggtggtgtgggcgcttccccctacccttgccctttttccttgccagggccccccg

SEQ ID NO: 47910 - DNA, 176 bp, Zea mays
  Clone ID: MRT4577_1436C.1
gttggcttatcctccacatacggttcggtttcgggttcgtgaggttctacggggttcgggttcgtgggtgagcggatcgagatagcgacagtaggatgttgagtaccgctgattagtcggcagtctctacagagtcacaaacgactacttacttcataattacttgagtacctaca

SEQ ID NO: 47911 - DNA, 342 bp, Zea mays
  Clone ID: MRT4577_143700C.1
gcatggtacaattcttagaccttgtactatcaatgcaggtgagagacaacgcctcataaaaaatcatacacaaagggcacttttttctctctcccaacacgggtcaatgccgggggttcatctttttctccctttctgttatacatcagggcgctttctggaatgaatctcatttcttgcaacttgaaggggggaaagattgacttctaaccgaactctggaaacttcctggacttctttggtttattgactcaaggctatatcctggaagctgtctttagaaagttttcttacacaacttcattggctcggttggccgggttgtttgaatccaacacattc

SEQ ID NO: 47912 - DNA, 492 bp, Zea mays
  unsure (1)..(492): unsure at all n locations
  Clone ID: MRT4577_143701C.1
nctgtccgaaaaaaaaaaaaaaaaaaaaaaaaaaaaaaaaaaaaaaaaaaaaaaaaaaaaaaaaaaaaaaaaaaagaagaacgaaaaaaaggaaccaaatttacaaaaccaagaataaaaaaaaggggctgcccttttgggggatccaaatttaattcaccgggggtggccctgcagtgcctttttttggggggaacctggactttaacccaattggcgccagctgtgaaaaatatccgaattgggaaaacccgggtgttctcccaaatggtcggcctgaatgaactcccccttttccccgctgggtataagggcaaagggcccggcccctgtggcctttccaaaaattcggaaccgttaagggggtaagggcactgcccccggttcacttgccataaccccaggggccggtggtttacctccctagctttcctttttattcgcgtagtccttagcgccccgtacgttttttttttgggggtttcttttagg

SEQ ID NO: 47913 - DNA, 226 bp, Zea mays
  Clone ID: MRT4577_143702C.1
cccacgcgtgggccgacgcgtgcgccggcgtttcacatcgtactcctgttttttatcctgactctcatgtactatcagtgtaaaagcgcttgaactctcggacccgataaatacgagctactatacttattactcgtccttgtgaccatagcggggagcgagatccaccccgaggctgcactttaacacactaagaaatgtattgtatgcgacttcgctattgctc

SEQ ID NO: 47914 - DNA, 538 bp, Zea mays
  unsure (1)..(538): unsure at all n locations
  Clone ID: MRT4577_143703C.1
cctcgaggcncggcgggacaagttttcaagagggcgcgaaagataaagttttccacgagagatgcggaatgaagaccagccccgagacccctgagacgaggctcttcctccgcaggatgaggctggacgacacggcgacaccgccgactggcagagccacgcgcaagccaccgacgcacgaggacgggatactccccgcggcagactgggcagtgaaggacaccgtgaaaagatgctctccgaaacgacaacgacaagatgccgtcgaggagacgcaacgaaggcacgcacagatgctcccatgacagacacgactgacaggtgtcgcccgtcagcgacggcatgtcgtggatctccccccccccccggaccgatccgacgtgctgataaccgaaggagtgggaatggaggacacagagacctggactggaacgagatgccacacggcatgtgccagaacaaggaaggagaagcgctccagcaactgcaaatggtgcgaccttcagtgacggtcagacgctcctcggttgcaatgacg

SEQ ID NO: 47915 - DNA, 521 bp, Zea mays
  Clone ID: MRT4577_143704C.1
ttttttttttttttttcgttgaaatctggaaatcaggatttatttgaatttcaaattcaaaggaatgaggaataggaaaacaaaccaggaattataaataaaaagagaaaaaagagatggacattaacctacgcttgggtcggattaaacctggtcggcccaactcactatctttcccaccctgttgggcccacgcacggtcgactgctctctaccatgtgggccagctgcgccagcctcacacacgttcactgccgcgcgggacccacgcgtcatcacccacctccgccagaatcggatccgcgccgcgataccaacttcctccgcatgcacagggagtctgtcccctgactccaacctcttgagtccgcgccggccgcaatattacacctgcgccgaccctcagtttcatccacgccctagtaaaagcatccagagagctcgccaccggtgggaagcgccgcaaggaggaactgtcgacgcgccgtgcccagatcctcgaattcgtccacactggtcgt

SEQ ID NO: 47916 - DNA, 342 bp, Zea mays
  Clone ID: MRT4577_143705C.1
ccacccaccccaattccttgaaatatataaattacggttatcgacgtttgaagttcctcacccatgatttggataaaagcaaaaaaaaccctggcgggggggtatataaggagcccaccacaatagcgagatggtcattacatgaggtttgaggaaagtttgaggccctccctttggcaccttttgaggcaaacgtcgttccaatggggcacctggggctggttgacccaaacggggcccccccaagcgtgggcccaggcgttaagttcaaaaaccccgaaaacggtgacccaggtctccggtatggggtccttgaaaaaggcccctacctttttgagcata

SEQ ID NO: 47917 - DNA, 713 bp, Zea mays
  Clone ID: MRT4577_143706C.1
attactgccgccgccgccatgctccgcctccaaaagcggttcctctctctcctccgtgacggcggcgcctcccctctccccaccttccccctcacctccctccaccgccacctctgcgccaccgccaccgccaccgcgaccacctccaccgagtcccctttctccgtccaggattacctcgtcaacacctgcggcctcacccgggcgcaatccctcaaggcgtccaggtccatctcccatctcaggtccccctccaaccccgacgccgtccgcgccttcctctcgggcctcggcctctccagctccgacatcgccgccgtcgtcaccgccgacccgaagttcctctgctccaaggtggacgggaccctcgccccccgcgtcgccaagctccgcgatctcgggctatccccttccaagatcgcgcgcctcgtcttgatcggcgcccccgcgttgcgctcctgcgacgtcgccagcaggcttcagttctggatcccattgttcggctccttcgacgagttggtcaatgccgtgtcgaggggagctctgggaggtggtgccctcctaaggcgtgacattgacacagtggtcaagcccaacgtcgagctacttctgcgctgcgggttaaaaatcccccatctcgccaagactggcctcagtgggacgtgggtgatcgtctgcagcccagaaaagctccaggtactggtcgcacgcgc

SEQ ID NO: 47918 - DNA, 407 bp, Zea mays
  Clone ID: MRT4577_143707C.1
aggagcaacaagggggacgaaatcaggaaaccaaaacaaaagggattttacatgtttggaaaggctgaaacaacaaaggtagaagggacagggtggcacgtttattcaggagggggggaatggtttacatttggatacaacggaacaagaagctttttttgcctatgaacatggacagagcccaccggtttcctttatgggaaaaaagggttctgaaaggaaaaaaattccttttgccggtgataccctcttgatgcgctgaaggggccaaaaaaaactggtgcaaacattatgaggaaaaacggggctttaaccaacgttctatttgaacttccgggggtagggggaacaccagaacgcaaaaaaagaacttccatcctaccccctgaactttttccgcccttcaa

SEQ ID NO: 47919 - DNA, 264 bp, Zea mays
  unsure (1)..(264): unsure at all n locations
  Clone ID: MRT4577_143708C.1
cttgggggggggccaaattttattttcgcgagccacaatacccaattgtacatggaaaagcgcactgtctttattacaactagggctgggaatttttgtaccccttcactcctaggatcatgcattttggggggggggggccttacacacttnnnacctacaattcntnttttcctccttccaatcccccctcatcccanaccaannnnaatttcanttccctcnctttctccctctttctccaatcttttataaaaatatctt

SEQ ID NO: 47920 - DNA, 118 bp, Zea mays
  Clone ID: MRT4577_143709C.1
cttattacattgctgtcaagaggagcgggggatccaaactgtatgtgaaacgagggctgtcgatctcaatggttagattggtcaggaggtgcgtcatgaccttcaagcacaaagttga

SEQ ID NO: 47921 - DNA, 565 bp, Zea mays
  unsure (1)..(565): unsure at all n locations
  Clone ID: MRT4577_14370C.1
taacttcagccctgcacctttccaccgggccttccctcccctcccctccactccctctccgaaagctggagggggaaggaganccanngntnncggaggnngnnngncgggggggancnggggggggnnnncncaggggccgggggcngcnnnctaacgaggacaccaaggacnnnnnggggggggggggggganccnggcgcngagnnnccnaangccgcccgcgggcacgagaccgncncggcggcnggagccncaagaaacccgggnaaggcggccggnggaaaacggcccgcgggaacagcnccggcggcagccgccccggcggangaggccgaggacgacgangaccnnganccnnncggcgacgaaaccgaggaggacaagaaggcagnggaggagcgggcggccgccgccaaggccgcgggtaaaaagaaagaaaggggggaacgccgcgcccctaggggcgcaaaaccaggggacgacgagaccgacacaaagaagccggnggaggcngccccgcacggcccacgaggcgaggggaggacccgggggaggcacaaag

SEQ ID NO: 47922 - DNA, 645 bp, Zea mays
  Clone ID: MRT4577_143710C.1
aattcggcacgaggtttaagccccgcgctcgatcccccagtccccaccccacctgcgactgcgagcgactacgagctcaccccacgcccctcccccctggcgagctccacagttgctgctgctgccgctgcttctccggccaatatcggtgcctaacctcttcagtcccggcggcgcgggagggcggtttcgccgttcttggctgccgcgccgtcattcttggtctggcgggttcgtgatctggccccgcgcagcgtctgcggtcgcggaaacgcgccgtgccttctccgcgcgtccgctcgataacccctggtgggtctccgccccggcccggccgaccacgccttggggaagcgtcgccgtcgtggtccgtcgacgggagcgcgcggtcagtggagctgcgtcaacagagtcgcgcactggtttgttttggtgatggctcgcgtcgcgtcgcgtcttgatggaatcattaactagtcttccaggtcaatcccggcgtggtcttgactactagtgccgtgttcgacccgtgacgcctgtggttggcgggcggaaggggtcaagctttccgatcttcattctttatttacacacgcggcagccgggctctcagtctcagcccaatgctggcgtgagggaaggggg

SEQ ID NO: 47923 - DNA, 414 bp, Zea mays
  Clone ID: MRT4577_143711C.1
tttggggggcccccccttttttttttttctttcatttcatctttgttttctgccccagatttttatttttttcaatttttcttttttttttttttttttaatctgttgatgcgttgcaggattggacgagggcccgctcgctctagttgtgcctggcgcggcggttgcgacggctgcgccagcgccgaaggcgggggtagagacccttggcgctggaggcgaggtgactgccctcgcgttggtcagagacgaggcggacgcggcgacccgccggctgaaaggagtaatggaggcgctgagtcaggtctgccgagcttttttttttttttttttttttttttaacacgggccttatgtgtgttctgcaggtggctgacttcactagccgtactcgtacgcgtgggtcgagccggg

SEQ ID NO: 47924 - DNA, 587 bp, Zea mays
  Clone ID: MRT4577_143712C.1
ccggccgggagtagtagcgcacctgccaacgccgccgcggggccggacgcacggtcggtcggcggcctccttcgctcctctcccctcggcctctctccctcctctggctccggctccggctgcggtgcttggtggtggtgcggtgtggcggacggaccaggtcaggttatatatattggtggtgcggtgtgacacacacgcaacgcgggcagggacagcacgccgtccgtgcgtgcgtgcgtgcgtgcggcggcggcggcggcccccagctgccagacaactgtgtcctggcaattcaccctgctagtctagggaagatactaattactgctgctgcctggatggatctgaagggaggaaggaaggaggagggctagtcagccgcaaccagtggtggtgacagcgacgccatgatcgactcgagtcgagtgacgagtgaggataaggccagcaggatgttacccccgctgacaactacgtccgttgccacttgcttgccatgcgtggttttctttacctttatttttgttaaaaaaacaaataaaaacgttagctgagtttagaaaaaaaaaaaaaaaaaagcggcc

SEQ ID NO: 47925 - DNA, 122 bp, Zea mays
  Clone ID: MRT4577_143713C.1
gacaggtctgaattgcggcttcctctttggggcacattgcaaaattgtccttgttcggtgttccattaacgtggacgaaaagagtccattgtggctgaatgtggtgccggcacatttctaca

SEQ ID NO: 47926 - DNA, 253 bp, Zea mays
  unsure (1)..(253): unsure at all n locations
  Clone ID: MRT4577_143714C.1
gtgacttccctaggtttattcgcgccgccgccgtcttcgaaacgcacatcgctcgctggatcggggccatgacaaaggnggagcaggcgcaggaccccgngaagctcttcacccgcttgaccttaaaccatatgcctacacaccctatttcactgaacgactaccgtgggagctcccgcgaaggaatatctctaaataacgccgnactatgggggggggggggacccgagcaaccagggcagcacaaatccaa

SEQ ID NO: 47927 - DNA, 579 bp, Zea mays
  Clone ID: MRT4577_143715C.1
aaccagtgtagctaaagttttattgtgttatatgttgaattcttatacttaatatatgtaaaccattatttttaaaataaaaaatgtaactgtgtcgtgcccgtgccagcactacgggtcgagatagtggcccagacacggcaatatagccgtaccgtgccagacatggcactatactaaccgaaccgggtcgtgcctggaccgtgttttttcgtgtcgtgcatgggctggcccatcgtgttagtgctaaatggccatctatacatacacaacacattccaaccaaggaggcaaggcaagcgcgtaacagggcctccctcgcctgcaggctgcagccttagtcgcttgctctcgggacgaggcgcgcccggagcggcttcgccatgacaacggtgaactcggccttctcgccctccacgtccaccgtctccccctccagctgccgccactcgaactcgcgcaccaggttcgccacgaagaactcgaggtgcagcgtcgcgacgttgagccccgggcagatcctccgcccagccccgaacgggatcatcctgatctccctcgtgcccgtgatgtccacgc

SEQ ID NO: 47928 - DNA, 572 bp, Zea mays
  Clone ID: MRT4577_143716C.1
ccggccgggataccctccacttcccttccatactcccccagaaataatgtcgtcgcaaatcacagacgagtccctgcgcgaggctatcaaggagcgcctcgaagccgcacacgttgaggtcacagatatgtctggcggctgtggtcaagcattcaactcagtcatcgtgtcttcccaattccagggcctcaactctctcaagcgccaccgtctcgtcaatgctgccctcaaggaagaaatcgccatcatccacgcttggaccgccaagtgccagacacctgaagagtacgccaagacgaaggaagcagccgatgcgccagcacaggcataagctttcactctctctctccttcaaaattactagaatcatgcaacatggagttttttgcgtaaagacgggaatacggcagacacaagggatggaagaacaagaatgtgatgaagggatttagatgacgagatatccgtatcggagcggtttggtaccgcgatacatcacgaagcaacaaatatcaagaaatcaacattataattgcacctttaggaaaaaaaaaaaaaaaaaacccgcggcc

SEQ ID NO: 47929 - DNA, 261 bp, Zea mays
  Clone ID: MRT4577_143717C.1
gaaggtgacataatctatagctacatgaaacgcactcggaacacgatgacgcgcaagataccctagagggacatgccagtggatcccagcgcagccaacaagcacatatgctgtgtaatgcaagaaaggacctacttggtttcagtgcacaaacgcacacaggggactgggcgtttagcgagagcccaaccaggatcggatgaactcgtggagctatttggagcgtggaggaataataaaagggctactgattgggttacc

SEQ ID NO: 47930 - DNA, 631 bp, Zea mays
  Clone ID: MRT4577_143718C.1
cattgggtacctcgaggccggccggggagattcatcacaatatcacagacactgacagacatgcagacaaagtgtctgaccatgccggcatgagcgatcccgtctgctccaggagtattacctccgcctccgtgcggcgctgccgacaaccaggctcctggcatcctttcctccgactccggctggtccccgacgaggagtgcgtgcttgcgatatgtgtgaagtacactactcctctctaccggcaggagatgcagcccatgatgcccgatgggtccaaaggaccgagtgcatccctccacagaggactgggggcaacctcttctctctcgagattgaaaatgagatagggaatgacctggccgactgcacgtgtggctatgacgcatctgatcttgaagctgacaacaggaatggtgtctattaatgagaactaccactctgatgtacaggttagaactgatgcatttcttacctccatcgctctggagggaccatctgcgtacatgcgaggctgacatagacatgactgatgacctgtctgaacatatcatatcatccatgtttggttgctacctgatgattgctatcactgatggacgtctcgaaatgggaacctgtgactccatct

SEQ ID NO: 47931 - DNA, 422 bp, Zea mays
  Clone ID: MRT4577_143719C.1
acaaacccgggaattgaattaattatcacggggatatatatatatggaattctggcacttgatcgaacggggactatagtcagggactgactcaaatcgcttccgtttcccctgacccccacacttaaacagtccagggtaggggaaaaactccaaagggcaatgccgcccccgtccttctcccaggcccaaaaaaagccgccgtcgtcgtcggcccccgtcaagtccggcgcaaaaaagcccttcaggggtccatgagggcgtaatccaccacccacttgggcgactggaaaaaggggtcaatgtccccgagcgaggggtagtagtcgacgtccccggcccttttgacgggggagtcccgggaggaaacctcccccgcgtggcttgagggcaaactggtgggcctcaaccccgggggggcg

SEQ ID NO: 47932 - DNA, 464 bp, Zea mays
  unsure (1)..(464): unsure at all n locations
  Clone ID: MRT4577_14371C.1
tttttttntcnnnttttttatttatttttccaccncaaatttatttttggtttagtaaaaatttccaaaaaacaatcttacacacccccattatttctaacaggaacaacaaccactaaaaagactccttcttttaaaaatgcccttcatgcaataaaaaactttttaaacccaacccgttgtttcaacctgtaccaactcacattaaacaatcaatttaacatattttacattccaaccctttccaacaacccaatctcacaaaattcaaaaaaaacatttgggtaatgcttaacaattattaacattaaaaacccccccgcaaaaacaggttttaaatttttttcacggtctttcaggccccaaaaaaccacacgggaaaatcacctcactaaattttttatgccatgttccttaccaacaatggggtttttttcttctttgaacaaagaaaaaggaccgct

SEQ ID NO: 47933 - DNA, 748 bp, Zea mays
  Clone ID: MRT4577_143720C.1
cactcctatgggcgattgggttcctcgaggccggccgggacaactcaacaccgaagcagccaaacctgctagaagcctatacaccgggaaggtccaccgttgccaaatctacgacttgagcaaaaaccacagctatagcaatggcaaaggcaggggcaacggccgtgctggtgaccgtcctggtggtcctggcggcgaccgccgagatggcgcacggcgtctgcaacctgtcgagcgccggcatccgcgcgtgccagcccgcggcagccatccgcaacccgacagaccagccgtcgtctgagtgctgcgccgcgctggctggggccgacctggcatgtctctgccggtacaagaacgccgccggcgtgtgggtgaggttctaccggatcgacatcaaccgcgccatggggctgccgggcaagtgcggccttgccatgccggccaactgctgatgtcacactgcaactgcatgcatgccgtgctgcgtgcgcagctaagtttacattacatgcgcgtcaaggcgtatgttctactgctatatagctacgacatctatgcaataaacgaaggcatgcactgatgcacacaatgatacgtgtctcttgtcttgtgcatgcagtgcaatatatgtcgatgaactatgggtgcgtacgtgagcttaagcttattaatcagtgcagaagtttatgttacggaacaacataaaaatagcgttgagtacatgaaaaaaaaaaaaaaaaaagcggcc

SEQ ID NO: 47934 - DNA, 402 bp, Zea mays
  Clone ID: MRT4577_143721C.1
cgaccagctcactaggaatgcggccgttgtttccgtagcattggaagaggtcggagacctctaggacggacagcgcgagcgcctgaacgtgcattctgatgcgaaagacgcgcaggcccatacaccgctggggaggcttcctccgactgtaccccaccgaagcgcccatcgacgcaacccacacacctgctatggttgcgagctcgtggctccttcacccaagactgaactgacaagcttatgcggtccaccggctactgcatcgacacgtacggacggacagatctcgattacctccctgcctgtctgtgatgcgctgcggatctgcgatgcgacttctgctctcgtgggatggctgtctgatactagagttgttgcaacgtgtggcgagtgtaatgggaa

SEQ ID NO: 47935 - DNA, 842 bp, Zea mays
  Clone ID: MRT4577_143722C.1
cattgggtacctcgaggccgggccggggcaactcaacaccgaagcagccgaacctgctagaagcctatacacggccaaggtccaccgttcccaaatctacgacttgagcaaaaaccacagctatagccatggcaaaggcaggggcaacggccgtgctggtgaccgtcctggttgtcctggcggcgtccgccgagatggcgcacggcgtctgcaacctgtcgagcgccggcatccgcgcgtgccagcccgcggcagccatccgcaacccgacagaccagccgtcgtctgagtgctgcgccgcgctggcgggggccgacctggcatgtctctgccggtacaagaacgccgccggcgtgtgggtgaggttctacaggatcgacatcaaccgcgccatggcgctgccgggcaagtgcggccttgccatgccggccaactgctgatgtgctcactcacactccaactgcatgcatgccgtgctgcgtgcgccgctacgtttattacatgcgcgtcaaggcgcatgttctactgctatatagctacgacatctatgcaataaacgaaggcatgcacacaatgatacgtgcctcgtgcacgcagtgcaatatgtcgatgaactatgggtgcgtacgtgagcttaagcttattaatcagtgcagaagtttatgttacagaactgcattatgtttgagtttatgaatgtctgtctcgtcgtctactccaaatctggatatactaatatagtaatatgaattaaaaacgacctttgatgcatcaagcttacagagaaaacccaactttaatatatatgtgtcctagctcatgtcatgggccgggggaatggt

SEQ ID NO: 47936 - DNA, 366 bp, Zea mays
  Clone ID: MRT4577_143723C.1
agcctgggccggacgccgccgtggacacggatggccttgtcccgaggcaggccgtaggatcgccgggcgagcagggtgaagtcggccatggagtactcgccgccgccggcggtcctcgcggcgtccacgctcatctccttgtggaactcgaggcctaggatcacgtgcgggtagcagagcacgcccccgctgctgctccccctgcccatgtccaccaccgcgtgccgggagagcccgccgagcagcggccggaacttgtccagccaccacggctgggcgtcgccgacgaggaggtgcacgtcgccggcgaaccggcgcgcggtgatgaacagcgggacgaggacgtccgtcaggtcgtggaacatg

SEQ ID NO: 47937 - DNA, 457 bp, Zea mays
  Clone ID: MRT4577_143724C.1
ccggtccggatctcgggtcgcccagcgtccgcaggtgcccgcggggcccggtagatggtagacataagccagtggcactattggcctcgagacggcgtagaaaagtcaggaccttgagaacatggctagctcaatgatatgacggtgccggcggggagacacttggacctgtgtagagttggcgcactgccaacggtgaggaccctaggaccggcgccctgagaagacgtccgagaggcttagagcccgtatctcttgcatactacagctttcgcgggactctcattgtttgtttgttcagcgtagtctcacttactgctatacacgccaaccttccatagccacagaacttacttatattatatcgggtgcctcggcccgtgatgggttgtgagaaaactgaaggcttcttccttttgtcggttgtttgagtgtcccatgagagctattcacctcg

SEQ ID NO: 47938 - DNA, 359 bp, Zea mays
  unsure (1)..(359): unsure at all n locations
  Clone ID: MRT4577_143725C.1
attcccgggcgggcgcgcatctgtccctacaacnccaancatactggttctatgattgtatttatatgatccactcacgcatcatataatgtcggcaaccattggagggacgtgtggagagcctaaaaaaactatcanctacatggcacatacatttgtggtaactgcatcattcttaatcgttttccacgcaaaatgtctgtagactgatgatactgttgctatcaacaaatttttgcactacaagctctacaagaacatgtagcttctaatcatgcgatccatatatcactataattctctctccttcaatcattatttattatccaccacaatcaacatatgaactttctcttaac

SEQ ID NO: 47939 - DNA, 439 bp, Zea mays
  Clone ID: MRT4577_143726C.1
tcccacgcccaaccgaccccgccacgtacaccccttcgccaagcctcgacacccaagccgaccccgccgacgtacacccctttcccaagcctcgacgcccaagccgaccccgcgacgtacactccaagcccaagcctcacacacccgcgcccaagccgaccaccgacgtcacggttccaaagcctcgcgcccaagccgcccacgacgtcacccttcccaagctcgacacccaagccgccccacgagtaactccacaccgaagtcgcggccaccaagccgccactacctcgacgcgtcgggctacaccccagcccgcgcccatactactagaaaggtgcctccataccacactgtgtagtctctgagcattaggtggtctggatcaatggaagggttgtgtctagccaccggcacagagagctgttgtggtattgagatg

SEQ ID NO: 47940 - DNA, 153 bp, Zea mays
  Clone ID: MRT4577_143727C.1
cggacgcgtgggtttgcatcagttttgctgagccgtttttttatacgtgaggatttagagtactaacaatttaagtccaagaaaaatcaacagtgaagttcaactcagcagattaaatcttcaaagtgccgtttttaactgggagttgagctc

SEQ ID NO: 47941 - DNA, 607 bp, Zea mays
  unsure (1)..(607): unsure at all n locations
  Clone ID: MRT4577_143728C.1
cggtaccggacaatcccgggttcgnacccacgcgttttctgcccgccgcgnngcgcgtcgnngccgggcgggcgtgnagccaatgnngcacgggccctttgnngggcgcgaacgcccttaacgtnngggtcggggcgnnggcggcgagcagnaggcgccggttgcttagctttggattcttgacttagnaggnncgttcagtcattaatcctggcacaacggtagcttttcgcgccacttggctttgtgaacgcaaggcgcgatnngaccaatnntgtgtgaattcaacnnggttcctctttcgtactttaggttgaatttacttatcgcnnggcgcggtcattcanngtagggtaaaaacttaaccttgtcnnncacgacggtcttaaacccagtcttacgtttcccttatttggnntgggtgatacaatccaacactttggtgtaattnttgtttnactattgatttgtatatatgtttatattttaaggattttattatgttatttttttttttgtaatgtttttttttggtttttggttttttttttgtgtttttttttttttgttttttgagtgtttttgtgtttttttttntttttttttt

SEQ ID NO: 47942 - DNA, 352 bp, Zea mays
  Clone ID: MRT4577_143729C.1
tctttctcacaatcttacgatctcgagttttcagactcttggctcatactacttctaagtgacatttgcctatgttacaagtatctactgatgtattatcttatctaacatttacagaaagatctacatatactattacctgatcttctaaacctatgcaaaactactcttatccacattcataataacaaactattgatacacctccattcaaagcaccacctcaacttaaatcaactcatcatctacaagatcaattttaaagcattcaaactagacgttcaacatatctctctccttatttttaatgattactactcaaatcttgatgatgtattatacattttaaatt

SEQ ID NO: 47943 - DNA, 592 bp, Zea mays
  Clone ID: MRT4577_14372C.1
ccggccgggaactccacctttcaagtcacctcctcctccccctgtcggcaaaactcacccgccgtgaccgccacatcaggcatgcccgactgaataatcaatcccactaccgtcgacggcgacggctcacgtgaggacgccgtctccacacccaaagccgaccccgcatccgctccaagctcggctatggtggtttgtgttgaacacgcaaaataataaggcgttggatgtaacagacttgtgataactacgactatgaacatcagatcgctaatgatgctctcacgtccagacgcgggcgtcgccgatccccatacttgtgaggatgaaatcgagagaacaacccttcacgacgaggacaagacactcctgcccgcccatgaatacgaataggtgttccaccgtacgcgcgagaccactacgacgctggacgcaaacatgaacatcgatgatgcctgtaaggaaaagctatcccatcacaattgcaccactgtacgagcatgcaagcctattaatataattctgtgatgacgactgatggacatagcgcgatactgtgatcaagcaatgacagcacacttgaattctctac

SEQ ID NO: 47944 - DNA, 176 bp, Zea mays
  Clone ID: MRT4577_143730C.1
ccggccgggagggattctttgacagctaagactcgaagtcgaaggcgtcgtgatgtctgttcgtctctgccatgtgggaagcagctgtgtcgctgatgatctccgccgtggcaacgctggacaacagatcggagctgattcggcctcttgcactgccatccctagccgcaacaaaa

SEQ ID NO: 47945 - DNA, 471 bp, Zea mays
  unsure (1)..(471): unsure at all n locations
  Clone ID: MRT4577_143731C.1
aaccttggatcctctacagcgagccgccctctttcttttttnnnntttttttatattttacacgcacaggncnatcgcgggcgggtttaatttagaaacacaatccggccacccccccgggggacgcatggacaagggcattgccttagccaaaatcggacactatatttgtgtgccgaagcaacgcacgggcactatactagaacatatataagcatcaattatttatttacgcacaggctgggcggacaaaggtcaaaggcccatcccctgagcggacggaggcaacataatggcgttgcggtcccaaccgaggacggggtcaaagccgaaggccttgagccccttgtactgctggcagagcgcgcacagctcgcaaaagaagtggaccaagcagtcccaaaagggggtctccgggaggcccaactgggcgcgcattttggcgcgggacgtgcacgaatagatccactg

SEQ ID NO: 47946 - DNA, 539 bp, Zea mays
  Clone ID: MRT4577_143732C.1
ggccccggggcccccgacccattttttttattccccccaagtcccaaaaaaggacccaaatgggtaaataaaaaaacaaaagggggaaacccggaaagcccaaaggaccccccccccccccccggaaggaacaaaaagggggggggttcccctttgggacggaccaggggcttaagggccaaaaaacccataggggaaacccagggcccccggcccggggaaaaaattccagggggggaagggaaaaaaaaaccccggacccccccaaaaatttccaaaaaccaaaatgggaaggaaaaagggcgggttttgggaccccaaaaaaaaaataacccctgggaccccaaaaaccccagcctacccggataaaaaagggagttgggggccttttcggggaccaaaccaggggggaaacaaaccccccggccccaaaggggccacccaaagcaaagggggggcccaacggcccccttaaaccaaaaaaggccttaaaaagaggggggggggcacctggggggggccccccaactgggggggcg

SEQ ID NO: 47947 - DNA, 957 bp, Zea mays
  Clone ID: MRT4577_143733C.1
aaccataattggcagacataaattattatttttttctttatggaagacgaacaatatatattttctttttgtgaacatggagcacatgttaggttgcggcccattctgaatatgcttggctcagcaactgagaacacgggccgacgggatacgcgaccaccaactgtgcaaaaaatgtcgtcagtttggcccagatcacacacaacaaggcaagaagagcagcgagctgaatgcaaatgcaacgcaagcgcggcagcagaaagaagctggcgaaaccgcccaactgagctgaatgcatgttgaaagcctgaaatcgtataaggtgccactgccaaatgccaatggcagaatgcaccaggacttcttctgccatctgtgtgttcatgtctggctgcttctgcaaactctatcttcgtgtggagcaagcagaaatcgatatctgaggttacagagaaactgaaactggttcagagctcagacaccatctgcagagtaaactcctagcttccctacgacgttcgccacatcaatcctcctgtacccctgcaatagaagatcccccaatcacttgccgactttgcaaacacttgttttccaaagttgatgcacatatatgtaaccactgcagattcgagaagaatatctcctccgccttctcgacgacacgctggtactggtactctcccccgtacacctccgcggcggcggagcgagatcccgtgaggccctagatcgccgccttgagcttgtacagcgggcccttctagcgcttccacgcgtcggcctcagccgggtcgccgtcgccggcctcctgcttgaacgcgcggcaccacagcagggaaggccggtgagcgggtgaggaggaagaggaggtggacggccgatgatccggagagcggtggtgcggcggcggcgtggcctgctgtgagagagaagcgcagggcgggaatagacagg

SEQ ID NO: 47948 - DNA, 368 bp, Zea mays
  Clone ID: MRT4577_143734C.1
accccgaggggcccctttttttccggaaacagggggcccggctttctccgggccccttggtaaaaccccacatggggccacaggtaaaacttggcttaaaaacagggccacaaaaaaaacagccctttgttttaaccggggacacaaaaacccttttttttttttccctttccctttccggtaaagggctaaaataaagaaaactgccggagccccgggccccaaaagggggggttggcaggcccaaaaatttcaacggggggcccaaatttgggccaaaccttaagggccccctggacagggccccaaaaaaaattccttaaaaggccctggttaaacggggcgtccttgcccacccccacaaaagc

SEQ ID NO: 47949 - DNA, 358 bp, Zea mays
  Clone ID: MRT4577_143735C.1
ggaaagggggaaaaggaccacttaatttatgggaaaaaaagggaaaggggggggggggggaaaaaaccagggggcggggaaaaacaaaggccgcctcctaagatagggcaaaaaaaaagggcccgggttttaatgggggggaccataccaaacataaggcccaacgatttttaagggggggaaaaaattttttggggaggcggttttttggaagaattgaactttttaaaccaattgggtgaccgcttaaagtaaggtttggagccattgttggggaaaaaaaaaaaaaagccgaaacgttccggggggccggaaaaccattcgaaggtggccaaaaaaaaccaaacgaagtagccct

SEQ ID NO: 47950 - DNA, 729 bp, Zea mays
  Clone ID: MRT4577_143736C.1
cgggtccccccctcgggtcgacccagcgtccggctatatctgctgcatgccacttctccgatccatccatcaccgtccgtgagtgatcgatcgatcggcgccgtcgtacgttcgccggccgccggcgatggacgcggaggacgagcgtgacctgttgaagaagatacgggcgctggaggagggccaggccgagctcaagcgacaggtgtccaagctccagcggcgtccggaccgggaccgccgcggcggctcctcctcgtcgtcgcagcccgccgacgccgccaccgagtcctcgccatccagtcgctggggcaggtcgctcacgtcctcgacctccacgggaaggtcctctaccggaacccgcggaacgccgagcgtctgaaccgctacacgtcggccgaagccgtcgggcaggacatcacgaggctgatcgtccacgccgacgacagtgttgccatttgcagaggatggtagagaatagaccatgctgacaaagacacaccatggcaacatgttgccagaactgcttatgcttatagaaggggcagtggatgattaaaagtggtctgggattcacagattctgatttcattcttgttaagtgagtctgttttctctctctctctctctaagagctttgtgtaaccgtgttgcattggactggacaattcaaacccaattactccgattcaaaaaaaaaaaaaaagggcggccgccaccgcggtggag

SEQ ID NO: 47951 - DNA, 288 bp, Zea mays
  unsure (1)..(288): unsure at all n locations
  Clone ID: MRT4577_143737C.1
gacccacgcgttctctttattacaattatattttcanacctcttattccnccacaacattacatctatcacaagaaccattttcaccttattctccctcatctcatcccactctaaccaacataccacctaatccatactgatttccttctacctcatctaattcagtcccctactatacacccacacattcccaatcatatttactaccctacaattcactatacttctccccttaactcactcatcacattactcttaatacccctcactttcacatctttccacc

SEQ ID NO: 47952 - DNA, 482 bp, Zea mays
  Clone ID: MRT4577_143738C.1
aagaacgacggggttaaaaaaaaaaaagggctaaccacaaacaaaaaagggcaaacaccgacccgtccaaacaaagaaacccagggagcgggggggagggggaaaaccggacccggggggcgacccgggaacgccggaccgggcccggccgggggaccagcaggccggaaagggggggggaggagagggggggggaaaaaggggcaaagggggccccggggggaaaggggtaaacggccacaattcaacccaaaaaaagaaccggagggaaaaaggggaaaaacggggggggcaaaagaaggaaaaaaaccaaaggaaagggggggggcccaaagcccggcccccaaccgggaaaacaggcgagccaaacggattaaagaaaggggcaacccggggggagagggggggggggtaaagggcgccaaggggggattgcttttaaccagggaaacggggaacagcggaaaggccctcaccggcgg

SEQ ID NO: 47953 - DNA, 247 bp, Zea mays
  Clone ID: MRT4577_143739C.1
tgttggcttacacgacatggcaggcgagggtgatcctgtatgacttccagactccttttcctgggagcggattcatattgctacatatgcagcgttatgcgtcccgacggccagagcgagcacaacctacttaggcaatgcgacaacgggagacgaagtgtatgaacagtccctggtcaagttagtcgcgcgagataccacaaggcttgaccagttgataggttttaagatgctcaaccatgtccag

SEQ ID NO: 47954 - DNA, 287 bp, Zea mays
  Clone ID: MRT4577_14373C.1
ctcgagccgaataaaaccgagcaaaaaaggacgcgcgaaggacgttatcgaaaaactgtcttctttgcacaggctatctataataggagagcatatgaaaaaggtaacccattcttgtgtttttttagctgactgtccatacgctcatcagcatcagacttaataccgctctgttagcaacacatataataaatctaactggactatcataaggatagagttcctctgaaagataggacatatctgcagatagtatcctagatttagaggtcatagctggtccatct

SEQ ID NO: 47955 - DNA, 320 bp, Zea mays
  Clone ID: MRT4577_143740C.1
ggagcaagcaagtaatatggcttggtcttggctcgccgatgagctcgcctcgctgccgcctctgctggcggcggccgtggctgcagcaggcggcggagcgcgcccccaccacatggacgacgacgcagcatcgacatggaccgggagcgacgacttctttcatcgggggtactcgccggaggacctgacgcacacgaccggtcgtaggctgtcaggagtgggggcaagtaccgaggcgtcggcacttcaggagaactgcgccgtcagggttaaggaaacctgcaccacatgacaggccacagaggagtcaccagctctgc

SEQ ID NO: 47956 - DNA, 412 bp, Zea mays
  Clone ID: MRT4577_143741C.1
cgcgtagtaattttgggacctctagaacggacgggctgggggggggttttttttttttttttttttttttgggttttttttttttttttttttttttttttttttttttttttttttttttttttttttttttttttgggggggggaagatttttttttttttttaaaaaagatgttcccaaaaactgtgggggggggtgaagcttatgggggggtcgacagggggaaaacatttgggggggggaaaaagcgcctgaacaattttctttggtaaagctaatatttttttgggggtaaggggcttttcattggcccggggaaaagacagcggagggaataaaagggagaggggagggcttttttttggttttttattgactggtcaaggttgctaaaaaaggggaggggtttt

SEQ ID NO: 47957 - DNA, 369 bp, Zea mays
  Clone ID: MRT4577_143742C.1
acattaaaaaatgcctggtcaataaaggagcctaaaaaaacagattccggttcacggcaaacaaagacaatcggccaaagatagcttgtaaatcattatggactacctggcggacgggatgcctacaaagctttacccaatccaaatttagcaaaaacaccgcattcaaaaaaattacaatatcccaccgagaggcaaatgttgatgccttccgaacatcgctctttgacaaggtctccatcgctgcccaaacaactgttgccacactgacttggttctgccgaaggagatgatgggtacatacggggcacaaggaaatgatggattcgcatacaggtacttgaaggccaaagatgaaatgccacacct

SEQ ID NO: 47958 - DNA, 172 bp, Zea mays
  Clone ID: MRT4577_143743C.1
gtgatctatcacgctcgcgagcgagagagactcacatctatctgtcaagctactccccagtgtaagcacactcgtacgggaacaccggcatacttgcatattgctgcagcacacgatggaaagtatccctcatgatcatactcacctctgacctcaaactcccttacaaagt

SEQ ID NO: 47959 - DNA, 1405 bp, Zea mays
  Clone ID: MRT4577_143744C.1
ggcgccaacaaaagaggaagagtcaggccgaatgttctgcaagtcaagacgatgtaagcagaggatctgagatagggagtcggtggtatgtggctacgcacaccttgtacttactgctaacaattcgtaaaaaaatggttttgttcaggatcttgatgatgagtctggtgggatgcgaggatcaggcggcagaggtacgaagcgcagccgcaccgcggaggtgcacaatttgtccgaaaggaggagaagggacaggatcaatgagaaaatgcgcgccctgcaagagctcatccccaactgcaacaagattgacaaagcctccatgctggatgaagcgattgagtacctcaacacccttcagcttctaggtaagatgaaggccgtgagaaatagacggtgcactcctcccatggtgttaccgcgcgccatgcagctttgaatcaattcattgactcaggcccatcgtctttgtactgaaagagatcatggctggtgattttcaggtctcgactaccaagctgccgtgtctgaacatccgctcccactcaccatggaagagcttaacgagtttcatgattcgccaaccagatgtatcacttgaaaaaggtccaatcaatcaagatggatttggtggcgggatgtttaggcttagcgagctaagatgctccatagttttgtgtaatttgtagatggaacgggtcttcctgttaggccaaacctggcacctcaagtcccagccgtcatggctaacatggtgcaggagcaacagcaaggcgtagcgactcagcagcagcagagtctgaataatgaagctcaacagaaagcaaataccggagatccacaaatactacaaaaatagatgaagagatcttcgccagtaatcagtttctggatggtggtggcaacaggactaatactatagggagaaatgaggctgaaacataaaaacggtcagcaagtgccagtgtgtaacctgactcgagctaaacttgacacaaatcatggaacttggcagagcgttattatcctaatagataacatggctgatgattttcaggtctcgactaacaagctgcaggtgtgaatatcagcaccaactcatcatggaagagcttaacgagtttcatgattcacgaagcagatctatcacttgaaaaaggtccaatcaatcaagatggatttggtggcgggatgtctagcttagcgagctaagatgctccaaagttttgtgtaaaatgtagatggaaccttgttacaagtaacatttcttggcagcgatgccgttttcaggtgttttttttttttgttgcttcactgaagttttcttgagtcaatatatcttattttcccagcccttaagtgatcatatgcccaaagatatctgtgtggctctgctttaactcct

SEQ ID NO: 47960 - DNA, 710 bp, Zea mays
  Clone ID: MRT4577_143745C.1
atccttgcttgtccaacgccaccaaactctgcttactggtttttttaaccattcagttcaggtaattatctctcgggagatcaaatcataatgtttcccaagtatctgaaggagtgctctcaggtgatgaaaaccacaccgaagatacccccactcggcatgcattgagcccgtacctcgagtacatggcctacctctatcagaggatggatccacttcctgagcaagaacgctttgagatcaactatagggatttcttgcaatctccgctccagcctctgatggataatttggaagctcagacgtatgagactttcgagaaagacactgtgaagtatacacagtatcaaagagcaattgctaaggctttggttgataaggtctcagaggatgaagtttccacaactaggacggtcttgatggttgttggagcaggccgagggcctctcgtaagagcatcattgcaagctgcagaagaaactggtcggaagctaaaagtatatgcagtggagaaaaatcctaacgcagttattactcttcatagtttgatcaaattggaagggtgggaaagcatggttactattatttctagtgacatgcggtgctgggatgctcctgaaaaagctgatattttggtcagcgagttgcttgggtcctttggtgataatgagttatctcctgagtgtctagatggtgcccaaagattcttg

SEQ ID NO: 47961 - DNA, 326 bp, Zea mays
  Clone ID: MRT4577_143746C.1
cccacgcgtacgcggacgcgtgggggcacgtacaacgctgctgctgacaccgagctacctaccttccccgggccagcacctataaaatcccccagcggtccaaccgaacccgactagggatttctaccgagggaggccgcacgcagccatggattttctgcaggagcaaagcgtccagaccacagtggccgtcgccgtcgctgtcgccgacgtcgccgcatgcggcagcctttctgctacttcgatccacgaagcccaagggctgcttggatcctgagaacttcaagaagttcaaacttgttgaaaagaagcaaataagtcataat

SEQ ID NO: 47962 - DNA, 347 bp, Zea mays
  unsure (1)..(347): unsure at all n locations
  Clone ID: MRT4577_143747C.1
cccagaattcctctgatcatcctgttaaggatttcccccncccggggggccacccaaatatctttggcgatcccaccacnaactcctaccccgcccacaccggtcgcgctctttaaacccaacccctctgggggcccacaccattacaccacacggctactccctctccaaagacattggccccggccgatacctctccaacaacatcttctccccccgatgataccactgggccgtctacctctacccccactacaacaacgccgaggacaactacaactacttctccgcattcgacaccctcgctaccgactgcatcaacgtactaaccctcttcgagctcaccc

SEQ ID NO: 47963 - DNA, 330 bp, Zea mays
  Clone ID: MRT4577_143748C.1
gccacgcgttcgatagcaacatggcagcagcacaagcaagaaccacacctaacacccttcaggctgagatcatgacagtcttgctgacctcggccagtagcagatgcctggtccagctagatcctgcctgcagcagatgcaacaggctgcagtatgtaccctgacgtggagaccatcagtcaccagcatggtgaagaccacggtcctagacgtgccgaccaccaaggccagcgccgaacgattaaaggcagtcaccgatggcggctgatgcaactgcaacacctgcaagtgcggaaccagctgctgatgctcctgctgcagctgcaactg

SEQ ID NO: 47964 - DNA, 402 bp, Zea mays
  Clone ID: MRT4577_143749C.1
tcacgttgaggctgaccaaactttactgtgctgactgagtactagggcggccaattgacgccgttcaagaagtctgcgcctattcctgaggtcaacaatgagcctagtaaggtggactgctctgacaacgaacactactgacggggcggatgtggtaatactgtcctcattgcattctatgcccccaggtgcggacactgcaagaagctggcgcccatcttggacgagggaatcaccactttccagatcgaccaataagtcctgattgctaatatggacgcgactgccaatgacgataccaaagagttggacatccaaggctaccctaccttgtacttccataccctctacgggaaagggacatactacgacagcggtactactgtggaagacatattagac

SEQ ID NO: 47965 - DNA, 370 bp, Zea mays
  Clone ID: MRT4577_14374C.1
ggtataacagggacatgggaaatacggactcaggatcactcacggtgtacgcatctgggagtagatactcgaccaattggatcgggtactcactccaaggggacgcaaagcaagcccacatataccatatatatacatacatgctgcaggctatcatgtggttacggccggatcgacacatacgggtgcaggtcgatcgtcggcgtccgatgggaggtcggagccaccaccagggccagctagcagctagctcggatcggtaccggtaacggttctgcataagctgatggggtagacgtgctgcatgttggggtagaagagcccacaagtttgttccacgccggtctccttctggttttcgatgaacatg

SEQ ID NO: 47966 - DNA, 785 bp, Zea mays
  unsure (1)..(785): unsure at all n locations
  Clone ID: MRT4577_143750C.1
gagagcgaggggggttctagccgttccctcctcctgctcctcctcctccaccccgcagttcaacggcaggcagcgtcaggttctctctcgatcgagttgctcccttcccttccgttcctcttccttacccgccgccgcggcccacggtgcacgtgcatgggctgcaagggctccaagcacgcgctgcatggggccactggactgccggcgcgggcgccagagccgcagagccgatcgggacgctgggccccgccgcggcactccgtcgcgctgcgctcgtccacgctcgggacgctcagcctcgaccgcgccgccgcggccgtcgcggcggcgggcctttctttcgacgctgcaggacgaggcgccggcggcggggacgagtcggggacgatgacgaaggccggcaacggcgcagcgacgaagctgttggggcgnnccgcggtcgctcggcggatggcgcccgacgacgccgccgccggagcgacagaagagggtggaggcgccgcggagggccgtcgcgccgcggacgccgagcaagacgccggggcgcgaccccgaggagatcaacgtgtgggagctcatggagggtctcgacgacgacgacgaggaggacgaagcgacggacgacaacgtccgcggcgacggcgtcgagcggaaggcgcagtcggcgcccgggtcccccgcgcccccggtgcttgacccggacctcctggacgcgttccggaaggcgcttcgcgacctgccggcgactccagccggcttcgcctcgccacttcctggttccg

SEQ ID NO: 47967 - DNA, 393 bp, Zea mays
  Clone ID: MRT4577_143751C.1
ctcgtatctgccaggacgacagtataggccatcgacatatttaagctcatgtcatccacctacatcttggcgcataggggagccttttacctgcgccacctctttgagaacatcaaggagtcgttgaagaacactgagacccaagtagacaataaggtactgaccatgaacctcctagacgagctctccagcgcccgcttcatcaataaggagctgatcatcaccatctaccgcgatgacgtgttcacgtactctgaagacgcgctcagcgccaacctgtccctgatacagaagatgctcgccgagctcgtggaccactccctcatcagcgacaacacggagcgctagcccttcgtgttctgcaagatcatcagcttctaggaggatctacac

SEQ ID NO: 47968 - DNA, 685 bp, Zea mays
  Clone ID: MRT4577_143752C.1
ctctcactcactctctccctcgttccctcctcgtcgttctcccgtgtccgccgtgcactgtctgtctctggtggcggcgactgggcggcctccgccgctgccctacgccaggatcccaggctgcatcttccgtacgccaggaggagggcatcgccgcaggttgagtgggaggcggagatgagccgggggcggtcgccggagccgctggatttcttcatctggactgtgcaggatgtagggttatggttggaggaaataaatcttgggagctaccgccaggcttttgaagaaaatggtgtcaatggagagtatctagaaagcctgtcggtgttcaccactgagcagattctccgctttataagacgatgccatatgaaatggggagattttatcaccctctgtaaagagctgagacgcatcaaagttgcctgcttgaaaggggagcaggaggtccgcaggccgtggtgggcgccgtcatgcctgtcggtcgtgttcacgcgggtggccaggcacaaccggcagtcccgggttgtctccttgaagctggaagcttagcaagttagcaggctcgccctcagccagtggaactggcagagtcgtctccagcttgcctcgcgctttggcgcgccgccgccatccccgtcgttccagtgccctagggcacaacaaggggcgcctctctctg

SEQ ID NO: 47969 - DNA, 258 bp, Zea mays
  Clone ID: MRT4577_143753C.1
gaattgaggaggattttgaatgaataaaccactatttttttttgttcagcaaacaaaaaaaggggtatttttttaccagacagggacaccccatggggttgttttcccaaacacggagagaacacagagagtcgattacaggaagccccgcaaaaagaagcatccggtcaactggaaccgggaccccaggatttaacgattgttcttactcttgcaccaaagcttatagaaacaatcttttttcctgagacatggaac

SEQ ID NO: 47970 - DNA, 740 bp, Zea mays
  Clone ID: MRT4577_143754C.1
gggcatactactcctcactctctccctctgtccctcctcgtcgttctcccgtgtccgccgtgcactgtctgtctctggtggcggcgactgggcggcctccgccgctgccctacgccaggatcccaggctgcatcttccgtacgccaggaggagggcctcgccgcaggttgggtgggaggcggagatgagccgggggcggtcgccggagccgctggatttcttcatctggactgtgcaggatgtagggttatggttggaggaaataaatcttggaagctaccgccaggcttttgaagaaaatggtgtcaatggagagtatctagaaagcctgtcggtgttcaccactgagcagattcttcgctttataagacgatgccatatgaaatggggagattttatcaccctctgtaaagagttgagacgcatcaaagctacgagagaaaagagatggcattgctgggaacagcagagcgtggattaaggatcatgaaggatcgtgatgctgatgaaggtctattgctttgattgggcacaaggttgtggttctacaagataaagatcatgatagattgtgatgcagatgccggccttagtaaaaagttcctgctagtttcagctgctggtattgcttatctagtgaacaaattatgggtcccgtttacatctcatggtctaaggccatgtttgtttagccttttaatatataatctagcttaataagttgaacaccggaggatgtg

SEQ ID NO: 47971 - DNA, 306 bp, Zea mays
  unsure (1)..(306): unsure at all n locations
  Clone ID: MRT4577_143755C.1
caaccaccagacaagagcacaaccaagcagaccaccaacaccaaacgagacacaaaccacacacgcaaggacacggggcacgcaccagccagcacaggcagacacacacagaggcaaccaaccaccggcgagaacggaanacacaaaccacgcacgcagcagagcccacaaaaggcaacgcagacagagacagcacacgcacacccaacccacgcgaaggcaccgagcagccccccacccaccacgaaaacaggaccagcacacgccaaccaaccctatggtggcggtggccgcaggccctgggcc

SEQ ID NO: 47972 - DNA, 959 bp, Zea mays
  Clone ID: MRT4577_143756C.1
ttcgggaattagtggcatttccctttcttctctggttcccccggcatactctcactctctccctcggtccctcctcgtcgttctcccgtgtccgccgtgcactgtctgtctctggtggcggcgactgggcggcctccgccgctgccctacgccaggatcccaggctgcatattccgtacgccaggaggagggcctcgccgcaggttgggtgggaggcggagatgagccgggggcggtcgccggagccgctggatttcttcatctggactgtgcaggatgtagggttatggttggaggaaataaatcttggaagctaccgccaagcttttgaagaaaatggtgtcaatggagagtatctagaaagcctgtcggtgttcaccactgagcagattctccgctttataagacgatgccatatgaaatggggagattttatcaccctctgtaaagagttgagacgcatcaaagttgcctgcctgaaaggggagcaggaggtccgcaggccgtggtgggcgccgtcatgcctgtcggtcgtgttcacgcgggtggccaggcacaaccggcagtcccgggtcgtctccttgaagctggaagcttagcaagttagcaggctcgccctcagccagtggaactggcagagtcccgcgtcgtctcctgatgctggaagcttagtagcaggctcgccgtcagccaccttgcctcgcgccgccgccatccccgtcgttccagtgccgtagggcacacaaggggcgcctctctctgtgtaccatatagcaagcaatgggtctcagtgttcttgaaaggtgctctcgcgttacagtcgtcgtgtgttgccaggcatgcgtgtgttttcgttgatttgtttattttcttcacgtataggggttgtgggtttgagttcgagatggtaagatgttgtactgtagacgatgaatatacgtatgctttgcgtgttgtgc

SEQ ID NO: 47973 - DNA, 546 bp, Zea mays
  Clone ID: MRT4577_143757C.1
acgtatattcatcgtctacattacaacatcttaccatctcgaactcaaacccacaacccctagctatacggtgaaggaaaataaacacaatcaacgaaaaacacacgcatgcctggcaacacacgacgactgtaacgcgagagcacctttcaagaacactgagacacattgcttgctatatggtacacagagagaggcgccccttgtgtgccctagggcactggaacgacggggatggcggcggcgcgccaaagcgcgaggcaagctggctgacggcgagcctgctactaagcttccagcatctggagacgactctgccagttccactggctgagggcgagcctgctaacttgctaagcttccagcttcaaggagacgacccgggactgccggttgtgcctggccacccgcgtgaacacgaccgacaggcatgacggcgcccaccacggcctgcggacctcctgctcccctttcaagcaggcaactggcgagcaaatgtgactgggatcagttagatgaagcaatataatcaagcatgtgttttta

SEQ ID NO: 47974 - DNA, 281 bp, Zea mays
  Clone ID: MRT4577_143758C.1
ccacttataggggctacaagtaaaatgttccattggcataaaagataatgtgattatcacaatcaacttgatcataaaaatgtacatccttgttcaagtctatgttatggattttgcttctttctaaagtttagcttacaaatggctataaattatttgcataggaggtgcacttaattgtttcagttcagttgtaaaaagtagttgtagtttactcctctaatgacattagagatgttaatacctttgggatactgacttatggcctcttatgcatacga

SEQ ID NO: 47975 - DNA, 1162 bp, Zea mays
  Clone ID: MRT4577_143759C.1
cccactcactctctccctcgttccctcctcgtccttctcccgcggcctcggtcccgtggcggactctcgctcactctctccctcggtccctcctcgtcgttctcccgtgtccgccgtgcactgtctgtctctggtggcggcgactgggcggcctccgccgctgccctacgccaggatcccaggctgcatcttccgtacgccaggaggagggcctcgccgcaggttgggtgggaggcggagatgagccgggggcggtcgccggagccgctggatttcttcatctggactgtgcaggatgtagggttatggttggaggaaataaatcttggaagctaccgccaggcttttgaagaaaatggtgtcaatggagagtatctagaaagcctgtcggtgttcaccactgagcagattcttcgctttataagacgatgccatatgaaatggggagattttatcaccctctgtaaagagttgagacgcatcaaagttgcctgcctgaaaggggagcaggaggtccgcaggccgtggtgggcgccgtcatgcctgtcggtcgtgttcacgcgggtggccaggcacaaccggcagtcccgggtcgtttccttgaagctggaagcttagcaagttagcaggctcgccctcagccagtggaactggcagagtcccgcgtcgtctccagatgctggaagcttagtagcaggctcgccgtcagccaccttgcagtagcaggctcgccgtcagccaccttgcctcgcgccttggcgcgctgccgccatccccgtcgttccagtgtcgtagggcacacgagctagggcgcctctctctgtgtaccatatagcaagcagcaatgggtctcagtgttcttgaaaggtgctctcgcgttacagtcgtcgtgtgttggcatgcgtgtgttttcgttgatttgtttattttcttcacgtatagctaggggttgtgggtttgagttcgagatggtaagatgttgtaatgtagacgatgaatatacgtatgctttgcgtgttgtgcagatggctgctgtttaaaaaggccccctaaaaaaaaaaactacgcgggaaaagagatggcattgctgggaacagcagagcgtggattaaggatcatgaaggatcgtgatgctgatgaaggtctattgctttgattgggc

SEQ ID NO: 47976 - DNA, 2833 bp, Zea mays
  unsure (1)..(2833): unsure at all n locations
  Clone ID: MRT4577_14375C.1
caacagtgatattttttacacaaataggtatattatggaaacatattccatgatgaatctaacaatgcttatctgatattataaatattaatatactttttgtataaacttggtcaaactctatatggtttgactccgtactatgttataattagaattaaattgttttcatgggggagtaataaacaaagaaccattattggtgctcacagctgaaagaactggcagcacaagaatcttgatttctatagtaaacaagtttttctatgcaatatacaaatgagtgcatgctgtagagttcatcattttccttttcaaaaatgtaacaccgcattggcaacctctgaagagaagattgaagacatatggtaactgtattatcacaaacttaatttgcaccattatgtttgttgtttaactttgttcttaaaaaggtagtattctagaatttcatatagacacattccttagcaacgaggtccgctgattaaactgtagaatagcctttgtattggtccctaagtttcagtttcatatgattttcatgtgtcatttaaatgtaattgaaacattctgttctattaaaatgtaaaatataagttggtttactacactgttgatatatgacttcattttttgtcactgttctaaaaatatacaaagccatttcatgccttttagatgcactgcgatgtactatttaccaggcaaggctgcttgtcgggaggaggttgagctacagagtaaacacagataatgcgtcgagcaacctagtcgaggaggagcaatacctgacacttgttcgtaagtcaccgtatcatcatggtgacagagcaaccgtgcttctaaactggaaattacttgctgtggagttcttacctgaagaggatgcagtttttgttcttctcctatgcatggtgattgcacggaccatgacagagatcaggagagaagatgtggctgggcttttagtgcggcggaggataagtgaagcaagggccgggcagagagactggggttcggtgatgcttcctggctcgctttcaccggatcctcatctgcagccttggtaccggaacgcaacgcaggttttgagctctgcggagacaggaccagtgctcacaaagtactcacctgctgacgggaaggacatgttgtacaggaaaaaaaaatagaatggcaccattctagccgaaaaggactcagtgagaatgtaagatggaagatgaaaatccttcgacgtgtgatagtgctttgtgcgttggggtgtgactgtgactgccgctccagccggctttgattgcctctattgctttttgtatctcctcaatgaggatggcaatgggcactgtctacgctcccagtcttcccagatgatatcttcttgtgcgccttctgcaagtggagcttcagtgagctgctgctgagaccagcattcttgccacagatgagatgggacacaccttcattgcagttgaaggcctcttgcgttaccattccatggagattttcccgtgcagtttcttgtcaagatccagcaagaccttagcaaactcatcattgggatgcgcacgtcggtgcaccttcagcatgttccatgcttccagtacattcagatttaccttcaactcgtaagaatccacagcagtgctattatcagtgccttcaaaaaaacctgtttgaaaattgttgtcttgacacaactttactacttcagtcctcagcatgtcattccattgttctatctctttgcttaattcactgtctatctgtaaaaatgtgttcaatgactaatagaatcacatgataaacttgccctgtttgtttaccctctagattatataatccagcttaaataagttaaaagacaaacaaacaacgcaaattattaggtgaattatatccgatccgtaccgggtcagccgtcagacaaccgccgcggacgcggcccttcggacgtaaaaaaaagcatgaagccatttagctatttggcttcctgcaactaaatagtgggacaatctataagagtgaaaaaaacaactagaaacctacgtcagacagtttataatagacaatttatcaatccacacttcaaaggtcttcaccttggcatacttgttaaaatctcgcagcttcattgtcaaccgaagaccacgggaggaatcaccatttcctttgaaatgtctggtgataaagctatcccgacaaggagatgattggtctagactctcacgggataaggttcgggaaggcttacgcaggtgccttggaacatcagtatcatttgaatctccttgtggttccactgaacacaatggtgaatccgaagtaccagcatcctccctagcatattcattggaacatttatacataaggttgaagaaaatttttaatagaccatccagcttctgatacagtgtgatgagaaaaatgtggaatcgctgaaggtctctcagagcactacgaaaacctcctcggaatgaatgcactgttgctaccatatcactctcagagagaggagaattataactgtagtctgatggtacatcaaattcttcatgtcctggggtgccaagttttccgaaggacacctcaaacagaagtttggaagaatagtcgaagttgttcaatgttaactccactagtttggggtagctctcctgatcttttgcccgcttactggctggtggcctgcgtggtacacctgaatcaatggctacaatattaaagctagaaaacacatgtccactagaagcataagagtcctccaatgtgaggtcagagacantgagccaatactgccactaattgaaacagttttnctctgttnctg

SEQ ID NO: 47977 - DNA, 652 bp, Zea mays
  Clone ID: MRT4577_143760C.1
ccccgccccgcattccgccccaccaccaaaaccctagcgcgcacacaacctctgtgtgccgccatggcgcccgccgcgaagaagccgccgctgaagtccagctcctcgcacaactccgccgcgggggacgccgccgggaagaccatcgaggagatgtaccagaagaagacccagctggagcacatcctgctgcgcccggacacctacgtcggctccgtccagaaccacacgcagacgctctgggtctacgaggacggcgccatggtgaaccggcccgtctcctacgtccccggtctctacaagatcttcgacgagatcctcgtcaacgccgccgacaacaaacagcgcgacccctccatggactccctcaaggtcgacatcgacgtcgaggggtgctgcatctccatctacaacaacggagacggcgtgcccgtcgagatccaccaggaggagggcgtgtacgtgccggagctcatcttcggccatctcctcacaagcagcaactacgacgacaacgagcggaagaccactggcgggaggaacggctacggtgccaagctcgccaacatcttctccacggagttcgtcatcgagaccgctgatgggcaccggctgaagcggtacaggcaggttttctccgagaacatgggga

SEQ ID NO: 47978 - DNA, 229 bp, Zea mays
  Clone ID: MRT4577_143761C.1
caactccacaaacggcgcgcaccgcctcgtctttctctcaggacttcatcagcctctgcctccagaagaacccagcgaaccgcccgcccgcgatgcggctgctgcagcacccgttcgtggcccagcagccgctgaccgccggcccgccgtcatgatcgatcgattgaccgattaattcctccccgtcgtgggccaactggggcggccgcggaggatggatacatctctc

SEQ ID NO: 47979 - DNA, 765 bp, Zea mays
  unsure (1)..(765): unsure at all n locations
  Clone ID: MRT4577_143762C.1
cggncgcgtgggtgggagggcctcctcgacccgctggactccgacctccgccgcgagctcctccgctacggcgacttcgtgcaggccgcgtaccaggccttccactcgctgcccaccgcgtcggcgaggcaccgcggcctcatgctccccgaccgctcctaccgccccacgcgcagcctcttcgccacctccgcgctgtccatgccgccgtgggccaagcgccccaacacgcccgagtggctcacgcagcagtccaactgggtcggctacgtcgccgtctgcgagtcggagcgggaggtcgcccgcatgggccgccgcgacatcgccatcgtgctgcgcggcaccgccacctgcctcgagtgggccgagaacctccgcgcctcgctcgtgcccctcgacggcggcgacagcagcgacggcgccgacacgccgccgccggagccagagcccaaggtggcgcggggcttcctcagcctctacaagacggccggggacaaagtcaggagcctgtccgaggaggtcatggacgaggtgcgccgcctcatggacaagtacaagggcgaggagctcagcatcacggtcgtcggccacagcctcggcgccgccctggcgctcctcgtggccgacgaggtcgccacctccatccccgacgcgccccccgtcgccgtcgtctccttcgggggccccaaggtgggcaacgacgcgttcgtcgataggctcgccagcagcggcaaggtcaacgtcctccgcatcgtcaacgccggc

SEQ ID NO: 47980 - DNA, 267 bp, Zea mays
  Clone ID: MRT4577_143763C.1
ccacgcgtccgcaagcattaaggcatttgattggttgaagtgtatttactgggatcgccagaccaattcaattcctgatgttcaagcagaactgaggttgagactgcatgaaattgctcgctttctgaaggagaataattcacaagaatcaaaaccagggtctaaaaggaaacgttctgagaaactggtatcgaaagccatgaagtatgtcagacggctttactacgcttgtccctctgaggtggtctctgttctattggaccttat

SEQ ID NO: 47981 - DNA, 145 bp, Zea mays
  Clone ID: MRT4577_143764C.1
gttcgcaatttgtaatagcagtgtagccgtatcctgtcctccttcagatccttctaaagcgtcttcgggacctcccccgaaaggagacgacgaaattaaagagatggctgaagctatcatggatgaagttgttaatcgtctcccg

SEQ ID NO: 47982 - DNA, 226 bp, Zea mays
  Clone ID: MRT4577_143765C.1
gtttaacaaaaaaacaaggccccatgatatttcaagaccaatggtaaaggggggaaccaaaaaaaaactttttgaacgcgactagaactaattattggatcccaaagtaaacttttacaccaccagtacatttaggaatagattttatattgaaataaacactttgggaggaaggaaagaataccctacacggggaacaccccctttttttcttaacagggggtta

SEQ ID NO: 47983 - DNA, 181 bp, Zea mays
  Clone ID: MRT4577_143766C.1
cccacacaaacgcttcagtctctctcttccactcacatttttgttttcccgccccagcaaccatacaaagagacgtgtttttaaactaaagagctgggaccaacaaccacctgccttaaccacaaaaatcattccaatgatacaacgcaaccatgaacagagaacaggcactatgacccca

SEQ ID NO: 47984 - DNA, 270 bp, Zea mays
  Clone ID: MRT4577_143767C.1
taagaagttacatttgcagaaaaaaaaaaaaagctagaaccttgtccgctgcccgggctctcaggtggaaagtgtccatctcacatggcacgtggctgctcgttgcgtagcggcttccgagctaggtcccggggcttgtcatgaatcataggctatagccttgtgtcctagagtgatatttcggtttaccagttcacacatctccactacagacactccggaagccagtatagcagtacaagtgctgaaggcctcgctaatgccgtagat

SEQ ID NO: 47985 - DNA, 597 bp, Zea mays
  Clone ID: MRT4577_143768C.1
aaaaaaaacaggtttacccatagggaaaaaacccgttttaaacccaatcggggggccccccttatgcgaccccaacggccaaagtttaccccataagcccatcgcaaagtttaccagtttttactagggacaggcaacccaccacgggggggcacaggggcccacagtcaaaagaggggggattataacccaacgggaaaggtaattaaccaaggggggggggaaaatttcccccccctaaaaaaaaaaaaagagggccaagttttaccccgaaacggccccttggaaaatgaccccccatggggaaaagcttgggcccccaccctacaagggagcgaccccccgttttaaaaagggcatcctttctaacatatccccaaagggggcgtggggaccccacaaacggttttaaattacttaaggattttgaactggaccccccccaggctaaatcttttggtctttggaccgccgaggtccccaaaaccgggggaaagccctgctttaaccctaaaaaaaaaaaaaatttgggggggcccgaggagctccttcaaggggaaaaacccaaatgtcacccaaagcgttcgacccaaaatt

SEQ ID NO: 47986 - DNA, 115 bp, Zea mays
  Clone ID: MRT4577_143769C.1
ccggccgggccgggttcacatcgtataacacccaatctcctcttgtattaatcagtatgcggaacgcgggtgcttccgtccaattcctatcccagtcccaatcccaccactgtcc

SEQ ID NO: 47987 - DNA, 528 bp, Zea mays
  unsure (1)..(528): unsure at all n locations
  Clone ID: MRT4577_14376C.1
cctctctacacttttgtctccttgtattatactattattcagntaagcagcccttggactacactcggtagcaaggggttcttaacacgttatcacgcacgtggctctaaaacgaagatcgagcaaaggtctatggaggatatatgtattgtcgacagtggcacgacaaataccattttaagggaaacaaaatactttcacacgatcatgaagaacgttggtagtattaccacaatcgcgggaagcgattcatgtgtaataggctcaggtaaagccacaattacactcccgatgggtactcaaatcgaaatcaaagaagctctattataccctgaatcaacaagaactctcttgagttttagggatattcgtgcaaatggttttcatgtagaaaccacagaggaaaatggtaaggaatacctatacatcataaagtatggggaatatgacaaagaagcatagaaaaattcccatcgctagaatcagggttatattatactaagattagtgcacctgcagcgtacactt

SEQ ID NO: 47988 - DNA, 369 bp, Zea mays
  Clone ID: MRT4577_143770C.1
acaaatcaaactcaaaccaccctttaacgtttaactacacacgatatacgtgctctacagagtcatcatataagagagaactccgttatgcttgaccctatgcccactctcgaaacaaactcgacacgtgacaaagaattccgacccgatcggcccaagttaaataccactactattaacaatgagttacttatcccccggttccgaagcgggacatacgtcccatatcttgaatacaagggccatcctaattgcgcccatccgctcggactacatctacacgtctaaagttattctcatactctacatatagtaaaagacaacacaggtgtccttagatgatcacatcgacaacacaaatcccttggc

SEQ ID NO: 47989 - DNA, 373 bp, Zea mays
  Clone ID: MRT4577_143771C.1
gaacgaaagtttgtttcctaagaatcccttgcacttcatttccagggaaaatattgccttagcaatatatagcaaaaaaaattattgcctatcaaggggaggcgggaacagggatcttgcaccttgacgctttatgggggtagtaaacacatgcaaacgtcaatacatagaggccgtaccgagaaactaatacgcacgcctgcccacgccaaaaataaatcaacaattttgcacacccccgcaatggacatgtaagtgattgggtgcgcatgccaccttatatattggggctaaatttattctggggccaccaactctccatagagcttaataaccctggaacccaggacgaggcggccatgcgtttttgggg

SEQ ID NO: 47990 - DNA, 192 bp, Zea mays
  Clone ID: MRT4577_143772C.1
tcccggtcgaccagcgttcgttctgcgttcgagagaactattctgtgtgttgagcgaatcatgtgaaatggaaagtattgaactatagaagagccagcatgcatttatgaggagtatgatgacatctataatcttgcgttgcttcaagtatcatcatgatggattactgctagtttgctattgttgcattta

SEQ ID NO: 47991 - DNA, 501 bp, Zea mays
  Clone ID: MRT4577_143773C.1
acaacgccatccgcggccgcatcccggcgcaggtggccgacctcgccgggctgcagctgttcaacgtcagctacaacaagatgtgcggcgtggtgcccacgggagggagcatggccaagttcgacgcctacagctaccagcacaacaagtgcctctgcggcacgccgctgccggcatgcggccaccgttactattgatcgatcgatccatccatctatcgatcatgaaagtgtcatgcttgttcttgtgtacgttccagcaaggtaaagtacagttccaggcaaggtaaagtacacttccagcattggatcgagctgagactgagaagcaactatagccagtgtggtgtggcagtgaataataatgcatggttatctgtgcctgctagctaggcatatagactgattaataagctcaatgcataatgtactatatatatatatgtgagtctctcttccaatcgagtaccagcaataataatatattatattgttgcttcag

SEQ ID NO: 47992 - DNA, 249 bp, Zea mays
  Clone ID: MRT4577_143774C.1
ccacgcatccgcacacgcgtccgcccaactaagcccgcacgacacaaaaccaggtccaggagctcgagagggcaccaataatggcctgcgtgaactccaccgtcgtcgggctcaaacccgccggggcaatgcctcaagccgccgcctcatcatcgggggcgaaactgttgaacttgggcgcacccgagggcggccttgccgatctgctcggactgtctgtccgtcttccccgtcatcggtcatcaccat

SEQ ID NO: 47993 - DNA, 418 bp, Zea mays
  unsure (1)..(418): unsure at all n locations
  Clone ID: MRT4577_143775C.1
gtgttagctcggtaatggatttaatgtttgtaaatttagactgatttaagggctctctctctgtgagcaccaagagaccatgaagaaatttctctntacttattgggatcccttacttatttgaagaagaacaagtgacaatgtagcaccatacgacactaagctgaatggctgatattgtgtgtgggcagcgagatgaccaaggactgatcactggttactgagaatgagtaagaagcaattgtgctaggataggccatagatgtattgtcgctcaatattgtttgtactgcactaggctgtgtgcatattctttttggataatatatgtttgggacattgaattttttatttgcaattgtctttggtgtaaagaaatagatagttcgctttgctgtgtgaataaaatggggctctg

SEQ ID NO: 47994 - DNA, 115 bp, Zea mays
  Clone ID: MRT4577_143776C.1
gcagcatcgacatggtagactcgccccagctcgccgcgctagctgacgaggtgtctgcctccctggccaagcagggtttgtgatcaggcccctgaggcggtcaataatcgtggag

SEQ ID NO: 47995 - DNA, 295 bp, Zea mays
  Clone ID: MRT4577_143777C.1
attcttcagtacctttacaaataacttgacccatctaagaggaacaatgtggcattgtaattgtaaacatgaagaaagagccacccaaattcgtgttgaagaggactttaatctggtcggtgggagtgcacaccaaattttttagttcttgttatttattgtcttcttcttactcctgtttccacatcaatgatatgctgatttacattttattgctattcgtctatttccctctcatatctatgcatgtgaagttcctatgctatttttatgggcaactactactccctcaatt

SEQ ID NO: 47996 - DNA, 468 bp, Zea mays
  Clone ID: MRT4577_143778C.1
ccacgcttgaacttcacattcatctcgctctggattctttgactgtgataacagctcttactacagggacgggcgagttcttgtttatctgagagtgcatatactttgtagctaatgaccatactgttgctatcactcggcgcactttaaagcctcatgaactcgcactatttaacgggctctgtaagaaaaactcaactaatggcatggtttgtgatggtacctctatgctcttataactcggagaggacctcctaaagaatgagcttttaggcgctcctcatcggtatgtgcactgtgtgataaagcgcaaagcatgtaatctactatacgtgaagttgaatggttttacacttattgatggtagcttttatgacaggacaggtggaggcacgactgttcatggagaaattcgatcggtattgctcttgtcatttggtctcaatgttaacaccatgttttgccctt

SEQ ID NO: 47997 - DNA, 245 bp, Zea mays
  Clone ID: MRT4577_143779C.1
cgtaagtggtgctggagaaggcagcatttgccgcagacgtgaatgtggcgatgagctcgccgactcggtggttgtctagcacctcgtcggggtcgatgggggtgacgtcattggacactgtctgttcgagcactgcccaatggccatcctgagcatcaaggaaatcgcagatctgttgaaccaagctagtttgagtcgccaccccctgtgattgcgctttcattgccccccgccagactggaatt

SEQ ID NO: 47998 - DNA, 1129 bp, Zea mays
  Clone ID: MRT4577_14377C.1
gccgactaccagccttgttgatatattaataggaccgtaggaacgtaagattaaacgtcaaaatctttctatgtgtgattgtgatttatgcactgggctgtcactgccgccccagccagctttgattgcctctaatgctttttgtatctccagagtcattgcactgtctacgctcccagaggatatcttcttgtgtgccttctgcaagtggagcttgagtgaactgctgctgagaccagcattcttgccacagataggacacactttcattgcaggcctcttgtgttgccattccatggagattttcccgtgcagtttcttgtcaagatccagcaagatcttagcaaacccatcattgggatgcgcgcgtcggtgcaccttcttcagcatgttccatgcttccaggagagtacagtttttcctcagcatcaggtaggcaagaacaacagtcgcacttcgactttttccctcaaagcaatgcacaagtactttgccacgcaagtgatccacataactgatgaaatcagaaccatcttgaaagagatcaccaatgtctgcattgtcatcatcgtttatcgagaaattcctatactcaaaaaggtcaggcttctgcgattctgactgtccaatttcatttgcacacaagcacaatatatgggtgatgccaaggtgtttaagtgtgtgtgttgaccgagcagcaagagcaccaccaatatacagataatctgtgatctgtgatggacgctcagtacttgcagcatcagagatcaaagatatcctctcgagaatgtgctcaagtcgaaccttcaactcgtaagcatcaacaacagtgctattatcagtgccttcaaaaaaacctgtttgaaaattgttgtcttgacacaactttactacttcagtcctcagcatgtcattccattgttctatctctttgcttaattcactgtctatcttggcatacttgttaaaatctcgcagcttcattgtcaaccgaagaccacgggaggaatcaccatttcctttgaaatgtctggtgataaagctatcccgacaaggagatgattggtctagactctcacgggataaggttcgggaaggcttacgcagagccttggaacatcagtatcat

SEQ ID NO: 47999 - DNA, 434 bp, Zea mays
  Clone ID: MRT4577_143780C.1
ggggagggcccttgccaaatcggggctataaacggggaagggggccacatttgggaaaaaaaacttccggcaggggccggacacaaaactaaacgggccgaagggggctcccaaaaagggggggcgaccctttaacgaaaaaaaaaacttcgggggccctcagggtaaaacccaccaaaagcatttcgctcgctcaagtggccagggggacccccccacaaaaaacaattcggcaagggtgtttgggaaaatcggacccggtggtcttttgggaataaaggtgtttaaccacgtccatcccctttaaaacggggccaaacacaacgggacgggtggccaaccacggggttttcacagggcaaaagaaaaatagacttccatttgggggggggccaaaatttgccatgcttaacacaccagggccaacatgcttc

SEQ ID NO: 48000 - DNA, 373 bp, Zea mays
  unsure (1)..(373): unsure at all n locations
  Clone ID: MRT4577_143781C.1
caacccgaaactgtatatgggcggatgagaaggagcaatcagttcaatcactactacacctcaacaatcaccgtcgtgctggcacacgtgcttagcttttaccgtgcatgccggccctcacgaccccagccggtacatcccgccgtccgccatgaacggcggcgccggcctgtccatgtacagcgctgcggtgccctgcgcgacgtggaacccgccctccatcatcgcgaacggcatgtactttgacnccngtttccagtgccgcttccgatggttgatgaaccagttggtgatctgctttggagccagcccggtcgtctctgccagcgccatttttttcgtctcagaagggtagggccacttgtagtgcagc

SEQ ID NO: 48001 - DNA, 1110 bp, Zea mays
  Clone ID: MRT4577_143782C.1
attgggaccctcgaggccggccgggggtggttttcgaacggtttttgaaacccttgctccagtgcgtcgtcagccgcgtcacccaccgcggcaatggagtccgacaccgagcgagacgtccacaactcctcccgctccactaaccctagcggccaccaccagcgaccgcttcggttagtcaagtctacggcgttcaagcgggaggagcgccgcaagcgcaaggaccgcaagcggcagaggcacctcgttgacgagctcgtgcggtggcaacctctcggcgccccgacgcccctcccagccgccaccggatccgtgtccccctcccaagcgcagcccgatacgccttggccgtgtgacccgccgccgcctccggaccccgcggaagccgactcctggagctggggcccgcccgccgtaccctcgccgacgccgacgcaacccacagtcgacgtggcgggcgcggtccccttgcaccctcaggtcgtcgccgtaaggtcctgccgcgcgttctttgaatcgcagttcgaagaggacgaggaggaggagaacgagggcagtgcggctcgattcttcagcgagctgctgggcagcgacgcggcgctgagggggttctacgaggcggagcgggacaaggggcacttcctgtgcctggtgtgcgaggggagcggcgccaggctgggcaagaggtttgccggatgcgccgcgctcgttcagcacgccgggtcgatcgcccggaccaagtggaggctggcgcaccgcgcgttcgccgactccgtcggcctgctgctcggatggggcgcaggccggattgctcctccgccggtaccgccaccggcagattctgacagcgacggttcttttgatcaagtaggcagctctcagatggtagaaatggagctgtcgtgactcctgatgactgcagtctactgcaacaaggtttgtagttttctcgtaactacgcgttgttacagagtggagactgatcaggatggaaacagtggctagcatggtttaatcatcttgacctcaataatcatcacattgctgcatatctgatactatctcgacctgatgggctggggttgctgccttgctggtttacttttgttc

SEQ ID NO: 48002 - DNA, 411 bp, Zea mays
  Clone ID: MRT4577_143783C.1
atggccttgtactttatcattgacttgtgcttgcttggtttcttctatgagctgaggccatggccgagggctcagttgcatacccgagctcccctggtgaggagttgcccataccgtagtggttgtcacagggtccgttatgggaaaaagctcctcacgggaggtgtcatctccactgtttatgatgatgttgggaagtcttctatcacaggcattaggggaagagccaaactcgggcaaggtggaggcatgcattgtatttacctgcctagggtaggcttaggcgagacagacatgaccaccctaggccaagggagcctcggttgggatggagattcccccaagcttacattctatccgaggttgcgagggcagccctcgagccttcgcgtggggcaagaggatgattag

SEQ ID NO: 48003 - DNA, 233 bp, Zea mays
  Clone ID: MRT4577_143784C.1
attcggctcgagccttatccaggttatcactatacgacaaacgaacttgatgtttgtgaggtggtctttatagataccctgggaagagcaacactcctgatcatgtatctgcagatcactgcatttggatttcttctgatcactgcctaaatggattcataaacagtctaaaggtcccatccctttgcaaaaaatttttgttaatgcgcggggtccaaagagatctctttact

SEQ ID NO: 48004 - DNA, 192 bp, Zea mays
  Clone ID: MRT4577_143785C.1
ggactctataaccccaatcttctatgacattgcgggcataacatattgcgttgggggccatatctaaatgccaaactttacatatatctcatcgtatgtcatgactatcactctcttatatactgtcaactacaacgtaattaaacatctcattggatgacaaaaactggttgttttacattcaatatgcaa

SEQ ID NO: 48005 - DNA, 457 bp, Zea mays
  Clone ID: MRT4577_143786C.1
gcacgcaggtcagcaggcgtgcgttccctagcaccgactcatccggagccatgggtatggtcctaatgcccgaaggaaggaacagtgcgagcacaccgcatagggccgaaagtccgacgatgtttatctcaagctccttgtcaagctctaccgcttcttgtttagggaggaccaagatcaacttcactgctgtcattctcaataggttttttatgagcaaaaccaattgcacaccaatgtccatgcgccgacttgtcaagttcatggaaagcaaggagaagaacattgctgatattgttggcacacttacagattacaagaggatccaagaggttccagcagtgaaggttactgccctgttgctcaccgatacggcaagggccaggattgtgaatgctgccgtggagtgcctcacatttgaccagcttgctctccgttctccacttggcgagaacac

SEQ ID NO: 48006 - DNA, 248 bp, Zea mays
  Clone ID: MRT4577_143787C.1
ctcgatcatggactcacgacgttcgaaatacttgggaatccttgcggagtggggctttattgaatggtgggaactaaaagggggggggtaaaatctatcatctcatgctggagtaagtattttactcccatttccttggtggtgggcggagtccaatcgatttcctaccaagggaggtttataactcgactctgttttatttttctgcggaaaaataacccaacaacatgtacaaaaactttattatt

SEQ ID NO: 48007 - DNA, 749 bp, Zea mays
  Clone ID: MRT4577_143788C.1
acaccacctgcgcatcttctttccgagcagtacgtacgtagctgaattgctgaaaagagaggcagagatccgatccggaccgcgaagagacgatgactcacccgaggccggatcatgaaccgtcgggcgaggtgtcgctggcgctggcgctgagcacggactcgtccggctccgcgggtgcaccggcggcgaagcgggcgcggcggaggggcgccgcggcggccacgtcgggggagggggagttcgtgtgcaggacgtgcagccgcgccttcacctcgttccaggcgctcggcggccaccggaccagccacctgcggggccgccacggcctcgagctcggcgtcggcgccagggcgctcaggcagcagcacaagcatcatcagcaggccggcggcggcggcggcggcggcggcggcggaggaggaggtggagacagggagccgcaggcgcagcacgagtgccacgtctgtgggctcggcttcgagatggggcaggcgctgggcggacacatgaggcggcaccgcgaggagacgacgacgggcgccgccgatgcctgggtctggcgcgccgacgacgcgctgcagcgggcccgcgggggcgccgccgacccgcccgtcttgctcgagctcttcgcctagctagctagatgatccgtagcggcggcattgattagtatataatccacccaggacatgtaaatcttcttaggccctgtttgggaacaaagtttttgaaaaccacagtttttg

SEQ ID NO: 48008 - DNA, 799 bp, Zea mays
  Clone ID: MRT4577_143789C.1
gaggaactgtcctggcctgtccacggtccacacacgccttccttatatcggcgctcacggttctataaaaaaaaacacagtacgagcagagcaaggcggccgtgagctgagctgagggaaggacgacgtacggcacagttgctagcccggccgccggagctctccgtgatctgggccgccagcaacagcatgggtgccgcgctcttggcttcttggccatgggacaacctcggcttctacaagtacgtcctgtacgggccgctggtgggcaaggcggtggcgtcacgggcgtgggaggcggcgagccccgaccgctggatcctcctcctgctcctcctcttcggcctccgcgcgctcacctaccagctctggagctccttcagcaacatgctcttcgccacacgccggcgccgcgtcgtccgcgacggcgtcgacttcgaccagatcgacaaggagtgggactggtaccacgcgattcaccacaccaagaaggaggccaacttctgtctcttcatgccgctgttcgatctgctgggtggcacaatcgaccgacgctcgtgggacatgcagaggaagatgagcgcaggtgtggacgaggtgccggacttcgtgttcctggcgcacgtggtggacgtgatgcagtcgctgcacgtgcccttcgtcatgcggaccttcgcctccacgcccttctccgtgcagctcttcctgctgcccatgtggcccttcgccttcctcgtcatgctcgccatgtgggtctggtccaagaccttcgtcatctcctgctacaacctccgcggac

SEQ ID NO: 48009 - DNA, 805 bp, Zea mays
  Clone ID: MRT4577_14378C.1
aattcggcacgaggccgcctcacaggctctcagccgccgccgacgcgatgcccccgccggcggcgcccgccactaaccgcgttgccctctacctccgccgcgcgcgcctcatcgactccctgcgcgtccgtctgcgctcctcgtccccttcctcacctcctgcgctcccacccgacgaccccgtggtcgcgctccacgccatccgcgcggcgcccacggcgtcctgcgcgctctccctttttcgcgcgctcccctcccaaccaccgccgccgctcccactctaccaagctctcgccgcccgcctctcctccctcgctgcgctctccgacctccgcgcccacctcgcttctttcccgctgcctgctccgccgctcgcgcgcctccgcctcctcgccgccgcgggggaccgcgcctccgcgctcgaagccttcggttccctcccggccaccccgcgccgccctgcggaggcgcacaacgtcgtcatcgaactccacggcgcgggggcggcgaccatgccgccgccgtcgaggcgttccgccgcatggtccgcgagggcgcgctcccgaatgcacgcacgtacaccgtcgtcatcgcccacctcgctgccgcggggtttgtggaccaggcgctcgaggtgttccgcatcctgccgtcgctgcgcgttcggcggaccacccgacagtacaacgtgctcgccgaggcccttgcgtcgggaaggtaggtttgaccagcttcggtggctcgtccgcgagatggcggctgtggacggcgtcatgcccgggccgcagatgcgcgctgccatcgc

SEQ ID NO: 48010 - DNA, 369 bp, Zea mays
  Clone ID: MRT4577_143790C.1
attaacaggattttttatggggcagccccaaagagggcaaaaaaaacccctagggggacaattttggggcccaaaaggtcccttaaaaaaaacgggggcacccgggagaacgggggaaaacgaacgtttacgggacaccccgggaagcattaggccctttttaacttgggggggaaaaaatggggggggaaagcccaagcgtttttgttaacggggtccggaatggggcccggaaggttttcgggggggcccttgccggggacaaaagcccgcccaaaaaaccccaacagggaaaacagggggggggggccgtttttgatccccttcaccttgggccggggaaaaccccccgggtcttgggaaaccccc

SEQ ID NO: 48011 - DNA, 1585 bp, Zea mays
  Clone ID: MRT4577_143791C.1
gaattcggcacgaggtccacggtccacacacgccttccttatatcggcgctcacggttctataaaaaaaacacagtacgagcagagcaaggcggccgtgagctgagctgagggaaggacgacgtacggcacagttgctagcccggccgccggagctctccgtgatctgggccgccagcaacagcatgggtgccgcgctcttggcttcttggccatgggacaacctcggcttctacaagtacgtcctgtacgggccgctggtgggcaaggcggtggcgtcacgggcgtgggaggcggcgagccccgaccgctggatcctcctcctgctcctcctcttcggcctccgcgcgctcacctaccagctctggagctccttcagcaacatgctcttcgccacacgccggcgccgcgtcgtccgcgacggcgtcgacttcgaccagatcgacaaggagtgggactgggacaacttcctgatcctgcacgccctgatggcggccgcggcgctgtgcgcgttcccgtcgctgcggcatctcccggcgtgggacggccgggggttcgccgtcgcgctcgtcgcccacgcggcggccaccgagcccctctcctacctggcgcacagggcgctccacggcagcagcggccgcctctacgcgcgctaccactcgctgcaccactccagcagggtgccgcagccgttcacggcggggctggccacgccgctggagcacgtggcgctgggcgcgctcatgtcgctgcccctcgcggccgcgcgcgccgccgggtgcgcctccgtcgcgctcgccttcgcctacgtgctcgccttcgactccctccgcgccatgggccactgcaacgtcgaggtcgtcccggcctcgctcttccgggccatcccggccctcagatacgttctctacaccccgacgtacgtaccacgcgattcaccacaccaagaaggaggccaacttctgtctcttcatgccgctgttcgatctgctgggtggcacaatcgaccgacgctcgtgggacatgcagaggaagatgagcgcaggtacacacgtcgtctcgttttatgtccctggtccatgacaggccaccaaactacctatattggactaacccattttagctttaacaaccttactagctaaggcatccacacacacatacccatacaacttagcaatcctgcactagccggaacactgacactgaaacaaagagcggacccctttgaccagaactgcctagtaaacagacatcaagaaagagtgttaggcaaccagccgctacagacgagctaaacatccaccaacgagctctttcaccacctgcgcaacttgctctgttgttctctgttgtccattgaagattatgttgttgctttccaaccatacgctccaccagaagtaaattagtaggccatcgaaactttttcttgattgcttgctatagagcatcctcagtctatgccaccaagtgtatagggttcccgtctttggagtaccgtctaggaaccacagatcggtccaagacaagatcatgctccacacttcctcatatatcaccaaagcaaaaaaaaaaaaaaaaaa

SEQ ID NO: 48012 - DNA, 288 bp, Zea mays
  Clone ID: MRT4577_143792C.1
tggacccaccgcgtgtcggacatatttagtatactgctagcacaagaacactgtaggaccagtcacaaggagttactagcggagaactcatggaattatagcggtgtcttatttaactgaccaagagagctttaacactgtcaaacaacggctaaatgatatccgtaggtgtgccagagaaaatgggaacaagctgtgagtggaaaacaactgtgaccctactgataacagagtaaacgcttacaacgctggcgcggacgtcactgattacattggaataccatcccc

SEQ ID NO: 48013 - DNA, 730 bp, Zea mays
  Clone ID: MRT4577_143793C.1
gggacctcgaggccggccaccccgcgttttcctccaccaccaccgccccgcccaagtatcccacgaaatgccaaggagcccaaggacatccaagaagtcccctcccacgccgccgccgccggcccagcgaagactgcggttgatgctcgcgtatgtgttccagctccccacgacaccggtctccgagcaggtcgcgaccgtcaaggagcacctagcgtcactgctatccctgaagcagcagcagcaccccagccaccggcagtcgacgggccttcgacgcatggtaacgacgagagccgcggcgtcgtcggggagcgtgcgcccccggaggtgcccgatgtgtcccatctgctgcggagacactgtgtacacgctcaaggatctggagagcgtgaccgggatgttcgtcgacgtgaacgtgatcgctgagggtgtgtacggtaatcgtgtaccgtggtagatgctcgaaaacggcacatacgtcgccgtcaataacttgctatgcaacactgtggtgaatgcatcagaaggtaattcactgcgttgaggaacgaagctgatcgattcgagtgcttacacaagaaccctgtgagtgttctaggatactgtgctgatggtaatcacatgatgcttgaatatgactatgatgattatgtgaacttataaaatggttgcgcgattatgctgatgccatgaatcctctcgtctgtgatgtccggctgcagatcat

SEQ ID NO: 48014 - DNA, 547 bp, Zea mays
  Clone ID: MRT4577_143794C.1
acagattacaagcatgacaacttattcatgatttgccataggagtgggtacgaacggcacacaacacacccggcccgttattaaacacaacactgacagcgactgatgacacgaacacgccagatatctttgacaacctacatatggagagagggcaccagacgacgcagcgcgcatcggtagcttaaacgacccatgacttactgaccaccacggcgacggagcacaaggtggcgggtgctttactttagcatgtagtgacccgatcgggtgcggtcatcccacaggtgtttgccggtcgaacatcaacaacgtgaagacacggggggaggcccttcctgtgctgaatctaagacgtctcgttccaactggtgctctggcgatggacccaccaagtgtatgggccctacagtgacggacccaccaggaaagcgatgaccacagatgctgcgaaaaccttgctgtgggtcgccgaaatgggcttggttatttcctgtggagtgaaatctaacatgcgcatcatagcctccacagaccaacctgaatt

SEQ ID NO: 48015 - DNA, 326 bp, Zea mays
  Clone ID: MRT4577_143795C.1
caactgaccgggcgtacgacattggggacgagtacgggcgtgggcgtttcggcgtggtccggcgctgtgtctcccgcgccaggggggacgcctttgccgtgaggtccgaggaccggtccctcctcggcgactacctggaccgggcgctggcggagctggagccctagcttgcgcgggtcgcggggggcgagggccacgggaacccacacgtcttgcacgtgcgcgccggataccaggacgacgcctggacgcacacggtcatggtcctctgttcggaggcccgacctgacttgacatggattcctctacagtgctgaccgcccgtg

SEQ ID NO: 48016 - DNA, 279 bp, Zea mays
  Clone ID: MRT4577_143796C.1
ggccgcccaggaggggggggccaaaacagggaaaaccgcaagcaaaaaaggcactgacagcaaaaaaggcatgaccaaacacaaagaagacagggccagcaacaaccaacaaggacaggtccgacgctcgaatcacccaacaacacgcagggagagcgcgcagaaagacgccaagaaaaaagcaggagagaagagaaacccacagggaaaagagagaaggaccccacaagacgaaaccacgggagaaagcaggaaacacaaacgaaaaagagggcagaa

SEQ ID NO: 48017 - DNA, 232 bp, Zea mays
  unsure (1)..(232): unsure at all n locations
  Clone ID: MRT4577_143797C.1
cccacgcgttcgnccacgcgttcgtccacgcgttcggtcttgaaaagatatgctgaggaacaacgttgagccttcaccacatgatgaagagtggacaaattctgaggcaattggaaagttcctggcggcttttggggaatctccaaaagcattttcagcacatagaaggccaacatctcatttgtttttgcataaggggctatgtatccatcaggctttaaaaaatgaaaat

SEQ ID NO: 48018 - DNA, 300 bp, Zea mays
  Clone ID: MRT4577_143798C.1
cccaccacccccgcatcgcccccactcccgtctgctgccccgccagtcatcgtgggctcggtcaagcacctcacgcctgcgtgggtcagccgtcgttcccgctaatctccttcgctcaggcaccagagtcacaccatcctcgctgtcaatctcgtcgcaaaccctccgcccctctccggtctggcactaccacgagcttccagaccccccgcacgagaaatgttgtagcgtctcatgctgggatgggcggcgtcacgccgtctctcgccctgctgtggtcctcctcctctgggtggagtc

SEQ ID NO: 48019 - DNA, 985 bp, Zea mays
  Clone ID: MRT4577_143799C.1
gggtacctcgaggccggccgggaacttctttcccactcctgtagcgccgccgctgcgtgcccgtgaacctcccgccttcgttctcccctcccgcttgccccggtagtgattttcttccttggttcacggcggatcccatgccgatcgacgggatggtgtccgtggtcgcgaccgtgagtgggtaccacggcgacgagcggcacaggctcgtgaacctcatcgcggagaccggcgccagctacgtaggatccatgagcaggtccatcacccacctggtgtgctggaggctcgaggggaagaagtacgacatcgcgaggaggccggggacgctcgtcgtgagccattggtggtttacggagtgccttagggaggggaggcgcctcccagtggactcctacttgatggtaagtggtgaagaagcagggccagtcccagagttgcctagtcgttcttgtacacaaggcaaaaaaagtgctatcatggaggatcgagttttccaagagttacctgatgatttctgggacactcctctagccagaaccagctataaagttaagtttgatgattctgattctgattctgattttgagtctgccctactaaaagaaaattctgttggtgatggagattctaagaaaaatcgttcatcagatgttaagaaaagaaagcgtatgaagcatgtcaatacatcaacggacagaaatgtcttaaactcgcaggacaatgtgtcaagtgtcatggaaagacattttcttcatttgtcaagtcatacaacgtccaagagcacatcaaagcagaaggaaaacttgtcacacttgcttcacaatgaagttcctatcaggatgggagaaaggaatgatcttactgaaaactttgaaaatgatagtttgtctgacagcttcagtgaacctcaaatttcagatactctgtgtgtagaagctcaaagaaaatttaccaaaacaagtgcaccatcatcatcacttcg

SEQ ID NO: 48020 - DNA, 2576 bp, Zea mays
  Clone ID: MRT4577_14379C.1
tgggtccctcgggccggccggacaagctctgttggtttgctcctggtaacttagtttgtgaataattggctttcttggagatcacaattattatgataatgtgggctttttgttccccttatggtgcagaaaagatagtgggcacaggaacagtgatgaaagatcaactggagaataaggtagtttggagcttatcaacaggagatacgctgacaataagtttgggagatgaactcagctttcagttaaaaaatgacagctcagaagaagaggcaaggctgcttgtcgggaggaggttgagctacagagtaaacacagataatgcatcgagcaacctagtcgaggaggagcaatacctcacacttgttcgtaagtcaccgtatcatcatggtgacagagcaacagtgcttctaaactggaaattacttgctgtggagttcttacctgaagaggatgcagtttttgttcttctcctatgcatggtgattgcacggaccatgacagagatcaggagagaagatgtggctgggcttttagtgcggcggaggataagtgaagcaagagccgggcagagagactggggttcggtgatgcttcctggctcggctttcctgtgagcaccaataattatagtaaatatgcaatatacaaatgagtgcatgctgtagagttcatcattttccttttcaaaaatgtaacaccgcattggcaacctctgaagagaagattgaagacatatggtaactgtattatcacaaacttaatttgcaccattatgtttgttgtaacgttcttaaaaaggtagtattctagaatttcatatagacacattccttagcaacgaggtccgctgattaaactgtagcctttgtattggtccaaaagaagagcttgtccatttgaacaaactgattatacaggacaacagattcaaaatttgatagccaaagaatctgaatgctcatctcgtacaagtttcatgaaaaaagaatcgcacaattttataacagaaactacattccctctatggatggttcttgtcaatccaagctcatgaactatagaataaaaaccaaatgttccaaaaatgtgctacttacaagtgtcatgaagtctagagctgaggcttcactcttaaagcggtcgccgactaccagccttgttgatatattaataggaccgtaggaacgtaagattaaacgtcaaaatccttctatgtgtgattgtgatttatgcactgggctgtcactgccgccccagccagctttgattgcctctaatgctttttgtatctccagagtcattgcactgtctacgctcccagaggatatcttcttgtgtgccttctgcaagtggagcttgagtgaactgctgctgagaccagcattcttgccacagataggacacactttcattgcaggcctcttgtgttgccattccatggagattttcccgtgcagtttcttgtcaagatccagcaagatcttagcaaacccatcattgggatgcgcgcgtcggtgcaccttcttcagcatgttccatgcttccaggagagtacagttttttatcagaaacaggtgaacttacgagatgatgactgcgtccagaacaataaaaaataagtaaagatgcaatttcaatcttcctatccttacagatgtcaattctgggttgatagaccttaagatcacatgaaaaatagtaaatctgttaatagattgttttagtcgtggtgagttattggttttaacagagaagcatgatagtgatgatatagtaattactgtgcagtcttacttcctcagcatcaggtaggcaagaacaacagtcgcacttcgactttttccctcaaagcaatgcacagctacctcgccacgcaagtgatccccataactgaagaaattagatccatcatatcacattctcatggagcgatgtgttgcatgagaaagcactgagaatcacagatactcaaaatgtcaggatgagagcgattctgactgttcaatttcatttgcaagcacgataattatatgggtgatgtgcaggtgtttaagtgtgtgtgttgaccgagcagcaagagcaccaccaatatacagataatctgtgatctgtgatggacgctcagtacttgcagcatcagagatcaaagatatagtctcgagaatgtgctcaagtcgaacctaacaacagaattgctcgataggttcaattaatgtgtacacgtagttagtacagagtgtacatttagatttaccttcaactcgtaagcatcaacaacagtgctattatcagtgccttcaaaaaaacctgtttgaaaattgttgtcttgacacaactttactacttcagtcctcagcatgtcattccattgttctatctctttgcttaattcactgtctatctgtaaaaatgtgttcaatgactaatagaatcacatgataaacttgccctgtttgtttaccctctagattatataatccagcttaaataagttaaaagacaaacaaacaacacaaattattaggtgaattatatcatccgcgtacttaaattatgataatccataagcagat

SEQ ID NO: 48021 - DNA, 231 bp, Zea mays
  Clone ID: MRT4577_1437C.1
tagatcgcgagcggtcgcccttttttttttttttttttgtcatcatcttgcccttcggcattttatttggtaagaaacgagatggattcttcgtttttttctgcagctacacacgatgttaagatgactggtgttgatatatgacactccgtacattaagaaaatctccacaaaacatctgatcaagctaccagtgggagtcagcaatatacaaactcgatcgtctcagcc

SEQ ID NO: 48022 - DNA, 327 bp, Zea mays
  Clone ID: MRT4577_143800C.1
aaaaacatatgtgtccattttgtttggtttttttaaaacgaaaggaattttttttacccctcctttacatcccgcataactgcagcagcagtaaccccagcagcggacagatagaaagagagagagttattaccgcaccatgcaacggcaggaggtggagcaacagctagagaggtagccaccatgggctttggctctatggttacttcccctcctctcgctcctaatttaaacctcaacgtggcaatacgtggggggctggaacctgaaccccgaagcccccggggcgccctttacccccgcggtgacaatgaacccggggcaggg

SEQ ID NO: 48023 - DNA, 368 bp, Zea mays
  Clone ID: MRT4577_143801C.1
atctgggggaacaggttttttcaaaactacctcagggtgacccacccagcaataattaggaagtccagaactgcacggctgcacatttaaaaccccaagaacccacttagcgaaaacaggaacacaaaagggcgcagcctacatacatgtgtgtccaggcgagaagattcatctaaataccgcctccaccgaccggattacagcttttacgtttcgatccatgcctaacggctcggattaacagttcccacactcttttgacaaaccaagcttatctccacccctttttattccttgttaacaaaaaaaaaggagaagcccccgcacattgttcaagaattaagtgaaccttgccaccaattaccttt

SEQ ID NO: 48024 - DNA, 417 bp, Zea mays
  Clone ID: MRT4577_143802C.1
ctcggggggtttatacgatcgcgcagacgctcacgtcggtggacttttggctgatgttcgcgtcgttcctgatgggcgtgggcacggggctggccgtgatgaacaacctggggcagatgggcgtggccatgggctacgtcgacgtctccctcttcgtctccatgaccagcatctggggattcttcggtcgcatcgcctccggcaccatctccgagcacttcatcaagacacgaggtattccccgcccgctgtggaacgcagcctcgcaggtcctgatggccgtcggatacatcgtgatggcgctggcgatgccaggctccctcttcatcggctcggtggtcgtcggcatctgctacggcgtgcggctggcggtcaacgtgcccacggcgtcggagctgttcggcctcaagtactacg

SEQ ID NO: 48025 - DNA, 180 bp, Zea mays
  Clone ID: MRT4577_143803C.1
acaaaacactcgcgcaatcagatactacaatggtggatctcaccgtgtcgacgtgcgcttattgcaatgccgagtacacctgacgaatcgagtctggactggctgctcggtgctgtgcgcctactagacttcgtaccaggtcagaacattgatgcctgatgagcggcgataacagattca

SEQ ID NO: 48026 - DNA, 292 bp, Zea mays
  Clone ID: MRT4577_143804C.1
gaacatactggagcatggtgttggagtggatatgggctaacgtaattggagtggactctaacaagcacatggaaaattaggcaaggagtgctattgtgtctgctggactcccatcatcaagcttcacattcagaagaggttcttgaagccttgccagtagaagacaattccatagatgtggtgatcggcacacagatcgttcgaatcacaccaacataaataaagcgagtcgtgaagtccaatggtctctacgtgttcattgaacatgctgccacaccagatgatacgttgc

SEQ ID NO: 48027 - DNA, 559 bp, Zea mays
  Clone ID: MRT4577_143805C.1
gtgtttttttttttttttggggtttttttttttttttttttttttttttttttgtgtttttttatgtgggagggcggttgttttggttgaggcgaagaaaccaagtgggcctgggtagcggggggggggtttacagggccttccacattcttttttaggggggggtgatgatgcgggggggggactaggaaacgaggacgacaccaccgccgtgctgacatcggctcaacgggaaccggggtcagtaaatttgaataccgaaccttgcccgaggccccacgccaggtaataggacacatgtttggccaacagcttttggggtaacacaaaagaaatcagagggggttaagcctggatcaaaagaagaatcttgtgggggggcttaagcgggacgaaatcgtggggccctcctggtacacgggattcaggatgcccgtgatgatgctagggttaaccgaccaggggcacgcattttgtcgagaggagtcggtagtcaatcgaaccctttgttcaggccattggcttgtatagaacaagggccctggatgggcccaatgcg

SEQ ID NO: 48028 - DNA, 291 bp, Zea mays
  Clone ID: MRT4577_143806C.1
aataacagtttttgcaggggcttcaaccccaccccataaaattccacacaaaaaaagcgaacacccaaccccaaacacagaacgccggatgccgcattggacactacagctgaaaagtacaaattgaggggacaaacccagtactaaggaacaaaaggcatccgcacccaacacaacacaaaaccgggaaaccagggaaacaaacaaacacgagccgcctcccgatcaaaccaaaacctttaggaacaaaagccaagaggaagacgaacagcgaaaaacggcaaagactgc

SEQ ID NO: 48029 - DNA, 301 bp, Zea mays
  Clone ID: MRT4577_143807C.1
tctttttttatcttgctctgtttacaaaccagaaaatccctgtggggaatgggggtgaataatttaccctaccactcccaatacacattcttgtgaagcctggacaccatctatattcagacgccaaaaggagaccgatcaacaacctatccggctttgacaactggaaggccagtcaatacgcacaccgctaatgcccatactcgtgcgctagctccggccgcgtgcctactacgaagaaggggagaaccgtaaataccaggcggcctacgatcccatgaaagggcaagaagggggacct

SEQ ID NO: 48030 - DNA, 205 bp, Zea mays
  Clone ID: MRT4577_143808C.1
gggccgagccacgcgtcaggccaagcgtacgcgcacgcttcaggtgactcatgagtttggcttcgcgtggctaaactacctccgaggaaggggtgcccatgctgccaaaaatcccgtccatgttggctccacagtgtggatccaggattattcggcttggggatagcgctcaaccagttcggttacatgatgtcccgcaaagata

SEQ ID NO: 48031 - DNA, 1795 bp, Zea mays
  Clone ID: MRT4577_143809C.1
gaacctcgcgatttccctcaaaccagttctcggatcagagcgtcgtgggtgtcgccgggggcatggcgcagacgccgaacccgagtaggaggtcgtgggtcggcccggcgccgatgccattcctcacgccgcggccggagcggcggcaccttgagatgcggtgggcggacggagtgtcccaaagcgctgctcgccgtagcggcgtcggcgccattgccagggatggatgcgagagggatcaggaggtgaacgttcaggtcatgctccggtgcaggccactcagtgaggaggagcagagagtgaatgcgcagagcgctatctcttgtaatgaatcaaagagggaggtcacagttctgcacagcctcttcaagcaagcagacaggacatttaccttcgacaaggtatttggaccacaatctcagcaaaggtcgatatataaccatgccgttgcaccattagtgactgaagtccttgaaggctataactgcactgtcttcgtgtttgggcagactggaaccggaaagacatataccatggagggagagatgagacagaaggttagtgaactaccggatactgccggtgtcattcctagagcagtgtgccatatctttgaaatacttacagcacggagggctgattatagcatgaaggtaaccttcttagagctgtataatgaagatataacagacctattgtctttagaggaccaaagcagattccctgaaggtagacaaaaaaggcctataactcttatggaagatggcaaaggcggtgcggtaataagaggtcttgaagagattgttgtctacagtcctagcgacatatacagccttttggaacatgggtcagctaggagacgcactgctgacactgcactaaataagcaaagcagccgatcacatgctgttttttctataaacatccaagtcaaagaaacaacagtaggaaatgaggaactcattaagtatgggaggttaaaccttgtagacttggcaggatcagaaaatattgctcgatcaggggcaagagagggtagagcaagagaaactggagaaatgaataagagcctactaactctgggacgtgtcatcaatgcacttgtggagcattcagttcatgtgccatacagggatagtaagctcaccagactgctaagagaatcattaggaggcaaagccaaaacatgcatcatagcaacggtgtctccatctgcccattccctggaagaaacgctggtcacacttgattatgctgctcgtgctaaaagcataagaaacaagccagaggcaaataaaaaaacatgcaaaactgttgtgctcaaggagctctaccaagaaatggaaagaatgaaacaagatgtcaaagccgcaagggaaaagaatggaatctacatctctcacgaaaggtttgcccaagacgaaacaaaaagaaagacaatgaaggagaaaatagaacatttggagctcagtcttgaaaagcagaacaaagaagttcaaaaattcaaagccttgtacctagcagaacaggaatgccactgggactttgaaagtcagaacaacgatttgaaggtaaatcttgaaagcttgaagggcaagttcatagatcttgaagaagctcattgcagagctcacatgtccctgagggagaaggacttcattatatcaaatttacttcattctgagcacttaattattgaacgtgcaaaggatatgcggaacaccttggagaatgcaaccgaagatatcagtgtacttctgaataaacaagaaaggcatcaaaaactgaagctgaa

SEQ ID NO: 48032 - DNA, 343 bp, Zea mays
  Clone ID: MRT4577_14380C.1
aagagatctttattaagagggtgcttgcacctttgcacagaattgtactacaggacttatgaggtaaatggacggtagctaaaactcctctccaagaggaacaataagggcgggcatctgactcgtaccgaatacagaaccgggcacagtgaagggctcagggttaaaacaaagctcgatccatgagatagggccaggaaaagtcaacaaaaaccaccagtgtcatggggaaacacaccgttgggaggctccagcattgtccaacagacaatgatacacgggccagactgaaaagcgcaatcggggtgcattggcaccggcttagaggactagagctgtgcag

SEQ ID NO: 48033 - DNA, 426 bp, Zea mays
  Clone ID: MRT4577_143810C.1
attatgcacaagagaatttttttttcgcatcctgagtatccgagaaaaaaaatcattattaatgttttatctgctcttccctgctttggcttacgcctttagctcttcccaagcagcatttatgagtgaacattgtcattgttcccttccttttcacctggacaacctagtcaaaacacccctcactcgaaactggaatgatatgttcaaaaagggatttgatggaattttgattgtatgttgagtaatagagagaaaggcgaatctgcaatgaatacctttgcttttattcaactgtatggcatttgttatgacccaatatgcagatcttgtattgagcttgagaagaaaggatatgcagagagttatgagcagggacaggagatgcagaaaaaattgatttcagaggcttctgaggaggagaaa

SEQ ID NO: 48034 - DNA, 273 bp, Zea mays
  Clone ID: MRT4577_143811C.1
ggagaaacaaaattgtgtaaccctaaaaaccaatggccttttttatgaccttcagggagtttcaaacttatgcttggaagttgaaacaacaagtggcccgacatcctcagacggagttatgaacaataaagtgaccgagttctaggaatcaggagtttcatctagtatgaataattcgactacctgaaaatatcgagctatgtttgtgctcaacctactcaagaagacaactcagctatgttaagctcaggggcaactgtacaggagatgtgt

SEQ ID NO: 48035 - DNA, 660 bp, Zea mays
  Clone ID: MRT4577_143812C.1
tgtggatgatgttgatccagattcacgggcagggagtagtggtggtaagtacacaggggatccagttggttcgtcattccataaatcccaagatgctgccgttggatatcttgtccacctgctgaaatctgcacgtccactgcgagattttagctactcatctcatacatcaatgggcgaatctatccaagcaggaagcaccagctctttcatgtcccgcaggacatccgacgcactggaggagtttgaatctttcaaagaaataagagagaacctgcttgcacgtagtagatcttggttgcaagaatcattggataaatcctagtgttgatgcaatccgtggttccattttttaacactgaaagcataaggttttgtgactagggataataacggggaattccccgtcgggttttagctccccatttctgtttccacgacgatttttttttccccgggggatcctcaccaatacttgggggggataaaaaaataccacccccgctccccccggggataaatcctgtggggttcttgtccccgcttaaattataattagattatatttcatttgttagatgtaaaaacattgtcacttatatacattgttagatgtaaaaaaaaaaaaaaaaaaaaaaaaaaaaaaaccccccccccccc

SEQ ID NO: 48036 - DNA, 332 bp, Zea mays
  unsure (1)..(332): unsure at all n locations
  Clone ID: MRT4577_143813C.1
aagccaaacaaactttccagctttaaggaacacaaaatcaacgcggggggagggggttttcccaaactaacaagggttggtttaaggcgggcctgcaaagccaaaacaattttttcaccaaaggggggcacaaaaaaaattaaaggcgggtcctctctttatggggattatacaaaatcaaaaaggcccccaattccaaaaatctacaggggcctcgtttttttaaaaaagggtagttgagggggccgcgctgaanccccttttgaaccagttccgtttgttcctgcacgggccccgagaaaaaccccgtcggggaagcagccgacggggcc

SEQ ID NO: 48037 - DNA, 393 bp, Zea mays
  Clone ID: MRT4577_143814C.1
attcggctcgaggtttgcaaagcttctaccttatttttctggggccacggaataacaccatctacgtctgcgttctgaacatgatcaactgccagtagatggggagctggtttttgacttttttgaatttgaacagccatactcacggtcccaattttttgacatggtatatgaactgattgccggggcgaaaccctcaaattgctaaatatttggggacccaaactaatttggaggccagcctgcttaatcttcactcagcgtctgggatttgtgctggatgggatactatataccgtattcctgacggaaaaatccaggctacattcttgacatacaactttattgtccactggatactgccgaacagttcattggggggggccgttattt

SEQ ID NO: 48038 - DNA, 503 bp, Zea mays
  Clone ID: MRT4577_143815C.1
tccggacaacttcacctccgtcaccactttgcccaactacgcctgccattgccgccccaccacctcgaataacccccgacgcaccaccgcaatcatgtctgacaacggcaaaaacggcgaggagctagtcaccaagcccttcaagttcgtcactgctggcttcgatgcccgcttccccaaccagaaccagaccaagcactgctggcaaaactacgtcgactaccacaagtgcatcaatgccaagggcgaggactttgctccctgcaaccagttcaagttggcctacaaatctctgtgccccagcggctggacatcgcgatgggacgaccagcgtgaggccggaaacttccccgtaaagctcgaccagtaagcggctcgctcagacgagatgtagcatgtagcaagtttgtagagcaggaaaaggaagaaccagagactggcatctgcatcttagtgttctgtatcatagagattgatatcagcaatgcagcttgggttcgcat

SEQ ID NO: 48039 - DNA, 204 bp, Zea mays
  Clone ID: MRT4577_143816C.1
taacacaccacatcttctcttcataccattctttaaccccctagattattcatccctttcatgcttcatttaaaataatttaggcacctaccatttattatccactaactatttaataccctatctctttatatccttttcctattctcaattcttcaccttctcttcttcttttacctactctataccctcttttccttctac

SEQ ID NO: 48040 - DNA, 317 bp, Zea mays
  unsure (1)..(317): unsure at all n locations
  Clone ID: MRT4577_143817C.1
tgtatannncatacaagtcactgtcantgggcattcacaaaacagagcggtaagagccttttcttgtcacgacattctaaaaacgacgatcggaagacgccttctgtcatcgacagttcataaaatgtgaaccgtgtattataccacatacgtgttgtatacccattatcgtattccttggcgtgcacgcngcgtatagcatnaaaaaaaannaaaaaagaggcggcncgcttctaagagcgatcnnncaagcttatcgtacnnngcgtgcgatagcgacgtnncatagctcnttctaatagtgggtcacctaaaat

SEQ ID NO: 48041 - DNA, 530 bp, Zea mays
  Clone ID: MRT4577_143818C.1
tccggaacatatcccatctcctcttgtttcttctcctcttactactcaggcatacacaagacaagacgagaaaagctatatcccaacgtacgaagaaataagagagctgaacccgataccagctgcccaatgatggctcacggcgcactccgcgatcctccgcttccgtcacaagcagtgccagcgcgccgttactcgtccctcgaacgacgaccaagaaccaccacaagatgccgctcagaaactcactcgcagggtgatctccctaggaccatgacaaggccccttccgaggacacgaacgactctggcgtcaaccagctcatcaaacagctcatggtcaagctggacgccgttgaggacaagcccaccgtcctcctgtacggcggcggcgccgacgtcgcgctatggttgacgtccgatgtcgtcggcgccatcaacgccgtgccgctgctccccaagatcctggagctcattggcctcgactacaccggatggatcgtctaccgctacctcctcttcaagtaaaga

SEQ ID NO: 48042 - DNA, 447 bp, Zea mays
  Clone ID: MRT4577_143819C.1
ccggccggggggattgacacgcagcacacgctaaacaatagccctgacgagagatatcgtctacatctctcctcgcgttcctccctccttcagcccgaggaaaccctagcacgtcccagtactcgcctcgccgccggcgatggacgatagatgatcggtttgcccccttggaactgcctgactaccgtgatctccaagatcgccgccgaggctgccgatgtcgtagcggagctcgagtacttcgaaatcggcctaccgcgtgcacgcgccgcgccgcccacatagccattcagccttctcatgtcaaaagcgaaggtctacaccgacgtcaatgcactgcgtcccaaggagtactgtgactacgaggcgctcaccgcccaatgaccagagcatgatgactatgaaggtgcaccgaaagtaggaagacgtgaatatagggaggtcttt

SEQ ID NO: 48043 - DNA, 2309 bp, Zea mays
  Clone ID: MRT4577_14381C.1
ttttttttttttttttttatcgctgaaagtctgtaccaaaatttgaaaaaaaaatgcttaacactatacctaaatgcctcaccagaccaaatactggttcattaaaacacacacacacacatggcacgcggacatttctgccttgatgaacacatcatatcttgactaatcaggtctttcctttccttgcgctgcagggagggagccggcagttcaccagacgttgattttctgatatccaaatatctaacactacatcatgtaccaaccagcaagagaactccaaatccttcaacccaaaactagcgaaggtctaccgttgagcagctttggcagtatcagaatctgtttcctgctcctgagattcaggcaacgcgttagctgaacctccgggcgataggcatgccagtgcctttgccttgatctggttgtagagtctcatagcttccttcagctcgtccctggcatcggcgccatggtttcgccacgaatcgatcactctcttttggaattccatagccaggggatagcttcccatagcattgtaggcattagcaaggctctgacaagcctcgatggtatccgaatggtgaggccctaaggagacatccatgacttctttagcgagcgcaaacatctgtgcagcagactgcggacggtccatctccatgtaagcagcacccaagttgttatacacataccctactccataatgcttcggaccgaagctgtccttcatcctctccactgcatcctccaagtacgggacagcttcagagaccttaccagtcaaaagcaacagccacccaatcctcgctgcgacattgccctccaggtgctgtgcctgaggcatcctctcaagcattcccaggctcttcttcagcaaagatattgccttttccaactcattcaccgtctcaaacagtgaggatacctctatgtacatctctgccaccttgtcgggtgtcgcgaatttcttcttctccaggatgtcgcaagcaatctccaagcacctctttgtgtccccagccttctcctggttagcgagcgccttcgccatcgatatgaaaactagagctcgcgtctcgctatccttcttcacctgcttagcgacattcttcaacacgctgacagcctcatcaaactttcccaatgcaatattgatgtttgccgcatcaatctcagcatgtaggaggaggtcagggctagctgcaccccagctcttgatcaccctctgtgaaatctcgttctgctccagcgcctgctcatgctgctctagcccagtgtatatcacaccaagcaggcgcctgtcgtgcgcaacctccacggagttcttgccgagcgtcgactcatgcagctccagcgccttctggcagaacggcagcgcctgcttgaagtcaagcagggtggcgtgcgcctccgcgaggtcccggtacgcgactcccagctcccggctgcccggaggcagaatggactccttgaggtcaaggcaggcgcgcatgtcggcgagcgcctcctcccgcctccccagcgccgtcttcacgttggccagctgcagccgcaccgcgtgcgccacgggcctgacgtcgaaccctcccggttcctccccaacctcgaacgcgacgcctgtttcggggaggagcggggcgaggaggcgtagcgcgcgggagaggaaggacaacgcgtcgtggaagcgggagaggtcgaaggaggcggagccggcgaggtggagtgccatggcgagcgagacggcgtccgaggcggaggagggggtggaggcgttggggctggcctcgagtatgcccaggcaccggagggcaagcgcgaggacgcgggacgtgtcggcggagccggacgcctcgaggtgctggccgagcttgaggcaggcgagggcgaggcgcttgtcgttggcgggcacggtggcctcgaggcgggagaatgcagcgagcatgtcgttagttgacctcgctgcctcgaacgcctcttccgcggcatccgcggcggcggcggcggcgaaggggacgggaggaggcggccgcggcgagaattggcggcggggcggcgcttggagagggtgtacgagggctttgcgcgcgggggacgtgacggggcctcgcaggcgggttctgaggagaacggaggcgacgcggcgtagcgccatggtgggcgatggagcggttgcttgctcgcggcggcgcaggccggcggggagggcgaggcgggggatctggcgacgggttgggcatgggctttctcgtcttaacagtaagtagcagagctcattaggtccttcgtaaggcccggccggc

SEQ ID NO: 48044 - DNA, 861 bp, Zea mays
  unsure (1)..(861): unsure at all n locations
  Clone ID: MRT4577_143820C.1
ttgggtacctcgaggccggccgggagaccgtgcggtctcccagggacaagcgcgtcgtcaaggacgaggtcaccgcgcaggacctgtggtggggcaagggctcgcccaacatcgagatggacgagaagacgttcctgatcaacagggagagggccgtcgactacctcaactccctggagaaggtgttcgtcaacgaccagtacctcaactgggaccccgagaaccggatcaaggtccgcatcatctccgccagggcgtaccactccctcttcatgcacaacatgtgcatccgccccacggacgcagctggaggactttggcacgccggacttcaccatctacaacgcagggcagttcccctgcaaccgctacacccactacatgacgtcgtccacgagcatagacctcaacctcgccaggagggagatggtgatcatgggcacgcagtacgccggcgagatgaagaaggggctcttcggcgtcatgcactacctcatgcccaagcgcggcatcctctcgctgcactccggctgcaatatgggcaaggacggcgacgtcgccctcttctttggcctctcaggtaccgggaagacgacgctgtcgacggatcacaacaggcttctgatcggcgacgacgagcactgctggagcgacaatggcgtgtccaacatcgagggaggctgctacgccaagtgcatcgacctggcgcaggagaaagagcctgatatttggaacgccatcaagtttggaactgtngctggagaacgtggtctttgatgagcatactcgtgaagtcgactacngccgacactctgtcaccgagaacactcgngnnctgctaccgatcgagtacacccccaa

SEQ ID NO: 48045 - DNA, 485 bp, Zea mays
  Clone ID: MRT4577_143821C.1
accgatcgcaggcttttgactatgcgcccgcccagcaccagcaggggcagctgcggggtgggggcgcacagctccaacgccgcggcgagggtcggcggcggcccgctgcaggacagtgttggggaacagatcgcccaccaactggagctaatccttaaccaactgctacggggcaggggcgcacggcccgggcaaccctgatacggatccccagcggtccagcaaggacggacccttaagctaccatacgtaaaccacgagaaccgcctggggctcggcgagctcgtcgaccccagcagcgtccacccggagcactgcgacgtcggccggtacgacgcgctaaactcgttcttgaacgacagcgccaggatcctggactcgatccgcatcgggagctgcgccatcgtgggccagctcgggtgggccaagaacaacatcctgccctgcatcgggggccccaagctggtcgccaagatcgtaatgat

SEQ ID NO: 48046 - DNA, 338 bp, Zea mays
  Clone ID: MRT4577_143822C.1
tccacgcgtccgcggacgctttacgacctgttgttccacactagatttctgctctcctttagcggaggttatgacacctgcggtatctcttaacacatgtgccgccccagcctaactctccaactgacaatgactactgtccagatcggcatcacctggccgcaccttagatccaacatgaggcgctgcgtctcgtattccgacccacacaatatgtaaaatatccttaaactgatggatctttgactagcacctggaaagctccacttatactacagctttcaggtgatcagacagcgtctgactaaagaacacctccacaggcgtttgctttctca

SEQ ID NO: 48047 - DNA, 466 bp, Zea mays
  unsure (1)..(466): unsure at all n locations
  Clone ID: MRT4577_143823C.1
aaccaacatgaaaaaatatttcacccaaatctctcatatcacccgacactttaaactcaaaaactattagacccataacgactcaacattcactaaaacccgaccccaagcgatcccccaaccacttgatatgactcgacaaaacatgtatagatagaaagtgccaagacaatggtagactcatgatgcatcaaaacatttcgaggcttaattacctcgccaggatttggcaacttaaatgatgacgcttcttatgttgagggaacactttcttttggtttctttgctttaccaaaatttctctgccctgctctcttttttttcttctggtttcactttanatctttggcggctccacaactttcgcttcgggtttctccttcgtttttgtccctttcacaaacaatttcttaaaaaagccaacaatggcaacgggaactttgctctcttctttttttttcttaaa

SEQ ID NO: 48048 - DNA, 273 bp, Zea mays
  Clone ID: MRT4577_143824C.1
atggaccgtaaccaacacgtgaacaacgtcaaggacatcgggtggatcctcgggagcgtgccgctggacgtgctggaggattaccacctgacgaggattaaccttgaattaccgcgggaggggccgtaagtcgaagttgttcaagtggttaacaagattaacaacttgttgttggggcccggccaacccgccgttaacgtaaagcttgtgcggttttaacttgtccagaaaaaacttgttccggaagaagattgacagggccgaattggtaag

SEQ ID NO: 48049 - DNA, 319 bp, Zea mays
  Clone ID: MRT4577_143825C.1
gatgccttcctgttgaaactgccatttgtaagccggagggaaaaagtcagcacaaacggatggctagaccgctaggtaagagactggagacccgatctggttaccatcaaggtctcctaggctacacatggaggatctcggccttacctcctaaaatatgctattccaaggagggaaaatctatctatcaacacaaagtttctactatataacaaaattttaattgaaggcaggggaaacccaccatatttatttactgacgctactgctgatgtgtgacagctgttctctgccaaaatgggggggggatccatgtaca

SEQ ID NO: 48050 - DNA, 397 bp, Zea mays
  Clone ID: MRT4577_143826C.1
tcgctttggaggatatgatgacttcacacttagaagtcaaacaacatcttacttatcttgaggtgtatttgtgatccagcatcatcttggttttcgtcgttgcccaaacttcagcagttgcgatctaatatgtaataaagattttagtctcatgttctgacggacgtgatcacgtggtgtatgatctgttttgtggattcgcttacccgttcatgaatgattggttttttcagttcagacatcctgttagaacgacagtgtatatatatacagtgcttttatgacgccttttgcctagttgggtcataacgttaccgtaagaattgagatagatgatcatggggtgctatgaattgagtcgctattatttgatgtcacacttatcaaatggtaagcg

SEQ ID NO: 48051 - DNA, 378 bp, Zea mays
  Clone ID: MRT4577_143827C.1
cctgggtaatctagccctgtttattttttttgttttggtaaactgaaaacagatttttctggggttcatatattatagagtactccaacaagggccgagcaagcagaccggcaagggtacacagagctagaccgaataaccagtaacgggggcaggcatgcaccaacccctggtaaaatagggaaagctcgcggtaacaacctagctcgccccaatacacacaaaacacaccgtggggctgttgcagagcaggacagccctgcccccacagacaagacaaaggagccgtacacgaaaccacagcatgggcgtccactgcagggtgggactccaagaggcgggcaacacgaggactgggctagcaaaagcacaaccccc

SEQ ID NO: 48052 - DNA, 422 bp, Zea mays
  Clone ID: MRT4577_143828C.1
ggaactttgggctgatttatgtgcttggagagtctggtctttcatatgatactactccggatgttgttttgtcttctgtctcttctgctgtggttgagctttctcttgtggtggtggtgggtgatggtgtgtatttgggtcatcttgatgagggtattcgtatggcggatgttgttggagtgggtgcgggtctgggtttggagtcgtggtgttcggaggagtgttggtttgggtgtactactgatactatgtatgtgcatgcgttggattcctcggtgcctgtgttgggggtcgctatggggtttccggcttattctaaggagcttacggtgaatgggcttgagcataattcgctggagtcgtggccggagcgttatacgggtatttatgctgatgtgttaggttatacgaattaaggttat

SEQ ID NO: 48053 - DNA, 671 bp, Zea mays
  unsure (1)..(671): unsure at all n locations
  Clone ID: MRT4577_143829C.1
ggggtaccctcgggttcggccgggaactattctttctacagtgatctgcgcagggagggttcagggtttatgtctacgggcacaacatagatccctcaggtcagttgagttctgttacaattctttcaagaattaacgggatgtcgccttacatttcccatctctctttgtttgccagatctttttctattattttttgaattgatagttctgttgtgttaatgtttgttgtgctcaaatccatgaaatattttttctccagggtgtgatagtttgctctctggactgaaactataatgttgcatgtactgtgttctcaggaaattggatatgcttatgatgcttaaaatatgtttcatgcactttggtagtgtagaaatatgtatgtgcataacattgtgcagttaatttacttcattatgcagactggaagagccagggttgtgttcatacattccttgtgtgcagcttgcagcattaccatatctgactgacatctttgtctctatcacgattcatgggagatcatcagtcattgaaaattgggaatggtgttctcggctgctccttttttttgctcaaaagtgtgttctaaacttactantaagaatgctgntgagaatnctttttggtagttttacctcaccagcatggagcatttgcattactgc

SEQ ID NO: 48054 - DNA, 1132 bp, Zea mays
  Clone ID: MRT4577_14382C.1
acctcactcgcgcgcacacccccccccaccccgctcaccccccccctccccgccccccccctccctctctcgccgcgccatcgccccgcgggccccgctcgacccgcgcggggacagacgcgtgggcacgcgcgcagtcactcacgcacgcccccagctctctccttctccctgctcgctcgctcgccatggacgctccgagcagctggaagagtcctgcgcgcgccaagtgaccggagaagctgcgagatcagagtagttgcttgccgctcccgtgccaccaaattagattggacgtagctagcagctagctgagccgtagtgcgtagcggcagctaggctgctagctcgatcgttatagctgcgtactagtggtgtcgcagcagaagcagtagccagcttcagtagccgatccggtggtaaaagcaactttttttggacatggcggcggagggagccccggtgctggtgaggcatgctggcggcgtggaggagctgcggcagctcccgccggggttccggttccgccccacggacgaggagctcgtggtgcagtacctccggcgcaaggccttgggcgcgccgctccccgccgccgtcatccccgtcgtccgcgacctctacagcctcgacccctgggacgccgtcgacgtgccggccgcccctgatgcgagcagccaaggcgagagatacttcttcgcggtgcggccggcgggcggcgtcggaagtgctaggagggcgaccgcgagcgggcggtggaggccggcggggaaggagaagccggtggccctgccccgcccgtgcggcggcgggagcctcctggtgggcgtgaagagggcgatggcgttcgttccccggcggaagaagaagaaggcggcggcggcggcggccctggcgatcggctgggtcatgcacgagtaccgcctcgccgcgccgctgcacaagcacggctgcagcctggcccaggctcagggagagtgggtcgtctgccgcgtcttccagaagggcagcggcaggccgaggaggaggaggcaacgaccggtgtcaccgtcaccgtcgtccgctagcagctgcgtcacggacgggtcgtcgtcgtcgagctcggacatggacgaggtcagcagctagctaa

SEQ ID NO: 48055 - DNA, 375 bp, Zea mays
  Clone ID: MRT4577_143830C.1
agtgaaaagaaagagtatgcataggcaataaactaattgcctggcgtaaccagctgtgtagatatatagagtatcaaacactgtagccaccaactgggacacgactaatctggaaaaaaactgtcatacgaggggaggtctagcactagtgtacactgcacataacaaaaggctaaaacaaacacttgcacacgttgtatggggctaaactgtgtaacaaaagcactggcttgcgttgatgaaacttaaatataacgaggaccatctaacactgagctacaggagaagcggaagactggtgaaagatactgacgtgaagcaacaatgctacagagctaagcggtgcttaagctggattcggcaggctgctatgcc

SEQ ID NO: 48056 - DNA, 280 bp, Zea mays
  Clone ID: MRT4577_143831C.1
ctcatcgactccagattggagatctcgacatcatgaaggtgctgatcggtgcgcttgctgtcctggcgctcgctgcgagcgccggctccagtacaagcggcggctgtggctgccagacaccaccgtttcatgtaccgcctccgttctatatgcccgccttcgctctatctggcgccgcagcaacagtcgtagacatggcaataccccactcaaccaccgcagctaagcccgtgccagcagctcggatcctgcggcgtctgcggcgttgcagaccgttcct

SEQ ID NO: 48057 - DNA, 496 bp, Zea mays
  unsure (1)..(496): unsure at all n locations
  Clone ID: MRT4577_143834C.1
ttgggctgagatatatgtgcttgctcgcagctatcatttagaagttggtatacaccgaattcaaaatcttcgttaaaagttagagctaggtcatcggcctaaagatcacccccgccgggaacccagttcatagcacagagtgcgaataagccaaggaaccccccgaggaggtcggcgaagccgccgacgcctgcccggtcatccccgacgacgggagccctaagggccccggatacgccgaacctgtcatcgccgaagtcgtctagaaggtctccgaacccgccggctacgattcgacgggatggttctcaaggaccgatacggtcattgagaggggcgtacatatcttcagtagtgggaaggataatggcctccctaagaagcctgtcttaaggctaggtaatattgcgcccaccaagggtcccgatattctcggcggagaagattagacttgtattgtctccgaagagtacccccnactacgcggagacactat

SEQ ID NO: 48058 - DNA, 899 bp, Zea mays
  Clone ID: MRT4577_143835C.1
agatttctcattgttttgttggcattcaacaataattctgaaaaacgaaatatatttctaaaattggatagtatatcaatacgatattcatcaatatctaattctttagcaatagttgttgtcataaaacagatattattattgtagggttaccattaattcactaaatcacaattgctgctcagatctttgggaccacctgctgcaacgtgacagaagtaaaaggttgccactacagtactacaatgcagcacggttgagaatttgcctcaaacaaaacaaaaaaaaaatccttttttctcaaaccaaacaaaaatggccgcatttactgtacaagacataaaaaccttgagcattgaaaggtaaggaatttgaactttagtgttctggttaagctacaatatgttatgaacacatactacagttgtactcaaatgagagatgtaaaaaaggtacaatatgtttaagtagatgaactataatatatgaccaactatggttatcaagagcatttctctaaaacattaaacaacctatcatatgtatcaatttcataaaagtatatcacacaagttttatgtggacaaggtatatacaagtacaaaacatcaactgaatatctagcaggaaagtttgtgggatacaatacagaaataaaaaggtatctacaagtcaagaatcaagtaaaaatagtttcttaaacatattatcagatgtaaaaagtaaaagtgggcaacaattctaataagtgcaccatgacaagaaatagacaaacaaaacattgctggatgaactgatcatttttaggtgatagtatggttttggaaggatcacaaatcaacaatataactaagaggcgatctatagaaaatcccagtaaagttaaaaaaaaaaaaaaa

SEQ ID NO: 48059 - DNA, 837 bp, Zea mays
  Clone ID: MRT4577_143836C.1
gccggccgggtctggagagtccaagccaacgccgatcgagagcccgcatctctatatctcgctcgccgcggcaggcagagaggtggggtgccggccggcggcgaggagaaggtggaggagcacgtacgtgagttgagcgcggcgatgtcgcggttcgtcgacaagctgccattctttgaccggaggtcgtcgctgatggaggaggccggggacattccgcggagcggcctcctgcacatgcaccaccaccagccgcaccacagcggcctgctcatgcagccgcagccgtcgccgccggcgaagcagtcgtcgttcacgctcgcgcagctgctgaagcgcgtcaacgaggcgcgcagcgacgcctcgtcgcccacgtcctcgcccacgcactcgcactacaccatcgagctgggcggctccgtgccggggtccaccggcagcgacctgagcgagcgcataggcggcggcggcggcgacgggccgctcctgccgttcgtgctcaagttcacggacctcacgtacagcgtcaagcagcggaagaggggaccgtgcctaccggtgctgccgttccgccgcggggccggggagccggccgagcccgaggtgccccggatgaaaacgctgctggacaacatctccggcgaggcaagggagggcgagatcatggcggtgctcggcgccagcggctccggcaagagcacgctcatcgacgcgctcgccaaccgcatcgtcaaggagagcctccgcggctccgtcacgctcaacggcgagtcgctcgacagcaacctgctcaaggtcatctccgcgtacgtcatgcaggacgacctcctgtaccga

SEQ ID NO: 48060 - DNA, 257 bp, Zea mays
  Clone ID: MRT4577_143837C.1
ccacgatcttgcttctagtccccaggctcaggaaatctcttcccagcatctggggtgtccacccaggagactagcttgggggacccactggaggaagcgatctcttcaactttcccaagatctcccgtgaatttctggcagacctagggctagatctcaggcatcaatctcaggacagcgctggttcctggatcctacgccgcctccagtgataagatgtggtggcctagagcacccccacaccgacggaaatacac

SEQ ID NO: 48061 - DNA, 291 bp, Zea mays
  Clone ID: MRT4577_143838C.1
attcaatttcaaacattctgggaggacccttcctccccttcccccaggcctcagaagagtctgggttccaggcatctggtggccccactacccttctagtccagactcctgagattcctccatcttggagatttcgtgcagcagccaggcctgagtttgagattctatgccgagtggaggccccagtgtgtgagtttgttctggtggatgcagcagccaccccgctctgagatctggcccctctctcccgtctcggttctggggaagtgatctctgctccccactctgtca

SEQ ID NO: 48062 - DNA, 496 bp, Zea mays
  Clone ID: MRT4577_143839C.1
cgcccatctccgggtccaagtcttctagctaagtctctagctcttacgggaccaagcggcaggcccgcccagcatccgcgtcgaccgcgcgcgcacactgcagtacgccggccgcgcgcacttgacgctgacaatgccggcggactccgacgacgtcgccagcccggcgtcgacgctgggcagcgtgcacaagaggggcgggggcgggggcgggggtgggaaaagcggcgggcacggaggcgggcggcggcgtccgggcccggcgtaccgcggcgtgcggatgcgggcgtgggggaagtgggtgtcggagatccgcgagccgcgcaagaagtcgcgcatctggctcggcaccttcccgacggccgagatggcggcgcgcgcccacgacgccgccgcgctggtcgtcaagggccgcggtgcggtgctcaacttccccgagatggcggcgcgcctgccgcgcccggcctccgccgcgccgcgggacgtgcaggccgcg

SEQ ID NO: 48063 - DNA, 249 bp, Zea mays
  Clone ID: MRT4577_14383C.1
ggccgggccgtgtctctcgtctccctcctacacgttccttattcgtcacaccgtaaggcaggcgtacgagcttttccgctttcatcccggccgtgctcctccccagatctcgactccattaaagccgatcttgcccagattcgcgccctcctcgttcatatctgaaagcgcctctgattttctaagtcgaccgcaggagtgctgcaccggaccgcgtgattccgtcgtcttgatttgccaacttgcgat

SEQ ID NO: 48064 - DNA, 326 bp, Zea mays
  unsure (1)..(326): unsure at all n locations
  Clone ID: MRT4577_143841C.1
ggnggnaaaaggggcaaattcttgcagattccttttcattacaaaattgtggggcgcccattttttttggggccttgtgctgatacaataacaggtcgtagcctttttttggttcatgtttattggcagggttttttttattcccacgtttggaaaacaaaaggtttatttgttcctttggaaaattttttttttcttttttggggccattggaacagggggaagcttttttttatttttttaaactttttttttttttgcctgacccgtttttggcggggaaatgtggggggtggtttttcccacccttttttttttttttaggg

SEQ ID NO: 48065 - DNA, 555 bp, Zea mays
  Clone ID: MRT4577_143842C.1
aaggggcgtcaacgccccttcgacctcaacctcccctcgatcgccatctctcagcttcgaggcaccgtgacggtgacgcggaccgtcacaagcgtgtccgaggagaccgagacctacaccatcatgacgagaatgccgccggaggttgccctggaggtgacgcctccggcggtgacggtgctgcccggagcatcgagagagctagctgtgaccctgacggcgaggtccgtgaccggcacctacagtttcggagagatcgccatgaaaggcgaccgcggccacctcgtcagaatcccagtggtagctatgggattcaagtaggttaggtagaagacgactgcgaccggcgctagagagagtaaggaggagcgagttgtgcctctgagatccgaggtcttgagctgcagaggagtgctgtaatttttccatagtttgtagagaataagagttagcatctggcatgctgggctgtggctgtgaaaaatatgcgttccttgctcttaattctaaggcaaagtatcatgtgcacatcagctatcagtgcacatgtgagat

SEQ ID NO: 48066 - DNA, 269 bp, Zea mays
  Clone ID: MRT4577_143843C.1
gacaccatatcgccggaagcttgctttatgccaacttcaaggtaacaaatatttttgttatttcattactattattattaacttttgggtcgtgttctaacgaaggtcatttcgacagagtatattattaagcaaggttcgaagatgcaacaagatctggaggaagagaaaaacaaagctgtcattcaagatttggctgaaaatgttgagaatcacgaggccaatctgaaaaagaaagacttcgcaattcaagatcttgaactcatggt

SEQ ID NO: 48067 - DNA, 256 bp, Zea mays
  Clone ID: MRT4577_143844C.1
ggccattacatttttttattttgggaaccaaacgaaaattttaaagatttttaggcccccggaaagtaccaaaaggttgctcccccttccaatgcgaagcgttttggcccgatttaaaacggtataaatggggggcaaaacacgggcaaaaaaagaaactgggcaaagccagcaacacccctggcctgggaatggcggcatgctttaggggaatgattacagtgggggtggagtactgttttgtgaccaaaaatag

SEQ ID NO: 48068 - DNA, 434 bp, Zea mays
  Clone ID: MRT4577_143845C.1
ggtaagcccggggttttatttcatcgggttttgaaaaaaatttgggggcaataatccatggtcggacaggtgcggggtcttttccggcgggcattaccaacttttaaaaacaaacaaaaggggggctaaggggccccataatacaacgaagcggaagcccccctggtcgacagagtcattatgtcgccggcgccgggcgacccggcaagttatcatgaatcatcggatcggggggcaaagcccccgtcagccttttatttaataaatgcccccctcccggaaggcggggtttggtgcccgttttagctctaaaattactacgggtatccgagtggcccgtcccctcaaacaaactttaactggtttaatgggcccttcgcagtttcacaggtcgaattagttcatacttgcacatgcctgggttaatctttgag

SEQ ID NO: 48069 - DNA, 301 bp, Zea mays
  unsure (1)..(301): unsure at all n locations
  Clone ID: MRT4577_143846C.1
ggccgaggcacaagcaatggatgttcggacattgaccatttgtccagttaccgcaccaacccctgaggcgtatgcggtgaaattacgccttaccacgggccgcggcagatcggagggagaggctctatccatgcgtcgggtcggtcgaggggggggggggggggtgacggggcacagctggtcattggtccgagcacgaatgtggtctgcatggccatcctaaccccttgggttctgtggcggcagctggncagatgataccttcggcggcggccactctnagggggggttttggccgttt

SEQ ID NO: 48070 - DNA, 409 bp, Zea mays
  Clone ID: MRT4577_143847C.1
gctaagacagcggatgcactcttacttatactcttatatcagctcgttctttttctcacctatcgaagcgcactagctaggtcctaactacttgggttgggaagatattatccctctttgcgcttcttgccctttttatgagcacaacaaatgcgttcattattccacaattctcacttactcctagtgccattattccacaattcctccctccagttacttcaatgtgcttcgaacacccatctgttcaagcctacatgctacaacaagcgctttcgagcgagcgttcttacaacaaccaattgtccaattacaacaacatatcttggctcatttaaccattcaaaccatcgcatcgcaacatgatcaacaatttctaccagcactgatccaacttgctttggtgaac

SEQ ID NO: 48071 - DNA, 331 bp, Zea mays
  Clone ID: MRT4577_143848C.1
cggacgcccttactttttttttttttcgtcctgggaatttcttacgggtaccttcatgcgtaccaggggggccaaaaacaaacacattatagcttgccataataatgacaacagctgtaaccgggaaaaaacattatccactgacaatattacatatcatactagacggatgaataaagtgtaaaattttgggtgcccaaagcgataaaaaacggaggtggggtgaaaaaaagaaaaatgggcaattttcaaaaaacaaaacgtgtttggaactatttattctctaataaaacaacgcgcgaaaaagagaacatttatatttattacctaa

SEQ ID NO: 48072 - DNA, 526 bp, Zea mays
  unsure (1)..(526): unsure at all n locations
  Clone ID: MRT4577_143849C.1
ccctcgnattatttcttttttttttttttttttttttttttttttttttttttttttttttttttttttctattcttgagaggccatgttttgggaattcaaacgggggttcccctgaacagagctactgctttttcagcattcccaaacaaaaccccccaaaaaaaatgtttcatggggcagccgatttggtatctaaaaaattctcatcggcgctgatcagctttggtcctttatcaaggacccggttcattttttcaaaaaattcaagttgggctcgatttgtttttcctccaacgaccactgtccttcctttttgcaaggcccatttttgagagggggaaagatagctaatgcgggtcgttaacttaggccccccaaaccccgcttaaacaataggaactcctggatcagtcttaaaaccccgcccagtcctaccaatagctttttcaatgggtttttctttgcccttggccccaataggcagttttgagcttggccgacggacccctacaaacttaccatt

SEQ ID NO: 48073 - DNA, 443 bp, Zea mays
  Clone ID: MRT4577_14384C.1
gccaaatcacaacggtgggacgcctcaccagggaaggggggtattaagttaaacattttagcaacatgagtacacctaatacaagaggtctccttggcaattttttacttcagtccaacctgttccaccgattgtgaacacacacacttttgatttgacaacttcgctgaagcctcccacttttgcttatggctgcaccaaaagtacattggcgcgggggggttaccttcctcccacccacttatgccatcttgtcagaagcatggggatcacaaacttgcttataccacatgtaccgcctattaccttttatgacttgctttgtgccagacttaaaagaagtgtgcttacatgcgctgcttttctgggattgtgccgcaacctgcacgggtaaattgttgcacgcaagaaatgggaggagacactctccggtaaaataataa

SEQ ID NO: 48074 - DNA, 340 bp, Zea mays
  Clone ID: MRT4577_143850C.1
gttctagatcgctgagcggccaaggtcgttaggatctgatccacgacggcaaggaggggcacaacacaaaggctcgcagggcggctaaagagagaaaggcgcgcatacaagagctccggaaacattaccatacccttcgacaacctgactgtactgcatcataactacgcggccgtgggccttcacaccgtggacctagtggccctctcggaggctcacactttcgagcgggtccagtgacagttcgtcacggagcggctgtacaacttcagcggtactaaccggccggaccccactctcaactacggctaccgggcgttcctggcccatatgtgccccc

SEQ ID NO: 48075 - DNA, 661 bp, Zea mays
  Clone ID: MRT4577_143851C.1
acaatctgcagctgtttatcagcatgagcaataacagactgaaggatctattgctgttgttgaaggcttcaccttttgttgacatgaagagtataattgtctattgcaagtttcagggagaaactgactatgtttcaaagtacttatgtgataacaacattactgctaagagctaccacagtggacttcttatgaagaacaggaatcgtgtacaggagcttttctgctctaacaaaataagagtggttgttgcaacagtggcattcggaatgggtcttgataagagtgacgttgaaggggtgattcactatagcttgccagaaagcttagaagaatacatacaggaaactggccgtgctggaagggatggacgactgtcatattgtcatctatttcttgattcaacaacattctataaaagtcgtagtcttttgcacagtgacggtgttgacgaatatgctatgagcaaatttcttttccaggtattttcatgtgaaaattcagtggggtgcatttgctccttggttaaagagtcgacttcgcgcaagttcgatataaaagaggaggtgctcttcacagtcctaacacagctagaaattggtggtcagcaatatctccgtttacttcctcagttcagtgttacctgcaccctgtactttca

SEQ ID NO: 48076 - DNA, 685 bp, Zea mays
  unsure (1)..(685): unsure at all n locations
  Clone ID: MRT4577_143852C.1
ccggccgggatccggttctaatccctgtcacctgcaccaggactccatagacaccgctcccgctctcctcgacgacgccgtacatctgactcgatgcgatcctctgcactccgcttgtgctcgcgctgcagcaacaacgacaacaaaaaaatgatggatgacctgacactggccaccgccaaaaaatgagacgctaaccctcacctgaactgtgaatcgtaaagctccgcgggctgcaaacaatcttccaaatatacggaagaggatcagttctaccccgatcccatcgtcacgatcaaggtcaacgaagacaaagacgtggctcgacagtacctcgatgagacacgccacgactaagatactcatgtcccacaatcatggcagcatgcgctgcgccatccttggcggtaacccctgacaacaggtgcacaacaacgggacgctctcgggatcctnggtcaacaggctgcatcattggacgtgggatgtacatcaacgcgatgcacacagtcagtgaaccggtaatctcagcgtcgcaccctcatgacattgcaacaatgaaggggcatggangagaatcacgtccacgacaacatcgatggaaccagcatttgcgactgcgagtggttctacgtcgatcacgatgccattcatgactccataactgaactcaccgtgtaaacag

SEQ ID NO: 48077 - DNA, 322 bp, Zea mays
  Clone ID: MRT4577_143853C.1
taccggatcggaatttcgggcgggacctcatgttagttagccatgttgaacggtgcttatcgcaattttgatcgccacaggatcaatggcaacgcattggacaggacccttagagagatggtgacaacattctttataagggagtagggttcctactgattgcacaacgagagaagcagctcattaggtcctgtgtattcctggctttaaggacatctgagtaatgcacaaggtacccagacgtaagggtgacaatgactatgtactgtgctatgttgaaattgagaacccctaaaattcactcactacaatgcaagcttta

SEQ ID NO: 48078 - DNA, 295 bp, Zea mays
  Clone ID: MRT4577_143854C.1
tcgtttaacagtggagtacggctcagtatgggtgggttgtataggcaagcgggggtgtcggtccacatcgttacggtctacaccatagtgttcagagtgcaccggtacacctcctgctgcggagaggcatggttgacggtcacgaggacggcatcggcatcagagctgaactacatttccgtcatgtgcaataggcaccatccctgttcacgtgagcagtatgtggcgaaccgaccgcacccgctaacgctgagaggcatgggcatgccgccgctatccatgagcacgttccact

SEQ ID NO: 48079 - DNA, 776 bp, Zea mays
  Clone ID: MRT4577_143855C.1
ctcttccagacgcgaggactctctttgagatttcacgatcctcacgaaaccgcctttccgctacctacaaaaccccaaggcctgcaatcctgcatctgggttctggaaaggaaaccctcgccctacctattcgtgggaaccggccatctcatgatccgtcacccagcagcttcttacccacttcttcgccgtttactgcagcaaacatctgatttgggagattatgggtgctatttcctatctctcatcttatctatcgcatgacaggtaaatctgcggcgccctcgattgtcgattcggccgggggtgcagaaatccgatgataacctattattccagattccatgaagtgcgcgtgaaagttacaaacatatctcgaggaatcagctttctaaagcacgcgttctgacttctgagttactttgttttggtttcctatgtttcttggtgatattgactattgagggcctggatctatgcgctcgtagaaatgcctaatctcttgtaaataggttgtggtttcaacctcatttccgagctgactagatggtcgatttatttttatgggggctattctgatccgtcagcctgatgattagcattctttgcacaaaaaacggagatctgaatgtgctttccgtcgaagcctgcttgaccgctgtggggggtcatgtgagctcagctcgttgatctccctgactactacctccgtggctccgttccaattataagtaattttctctcagggaactaccagctactaccacacatgcatg

SEQ ID NO: 48080 - DNA, 466 bp, Zea mays
  Clone ID: MRT4577_143856C.1
ccctcacggacctgggcatctggtgttgcactatctaccacacacacacttggttcatcacggcctgaccgctctgggtgtcgatagctcgactcaaaatatactaatgctgcgactaggccgcctgcatggcaatgctcgtcaattctaacagtgacggtctaatatacatacacgagtgacatgagctctactactccatacccaataagaggcatcaccatcacccgccagcctaccttttcagagcagcaggaacggaagcgcctgtggagggctacaactactaggtcattgaggaaccgaaccttcaaggggtactcaacatattctacagatacacagacagcctcatctacagactatagctaagctcatgcctaggctcgctatgtctgcgcaaacagtgcaactgcctgaccgtcgtcactgattgacgacacatgatactcatcttccacacgag

SEQ ID NO: 48081 - DNA, 736 bp, Zea mays
  Clone ID: MRT4577_143857C.1
gttcagatctctgactgaggtaaattggcttactcaagaacacggtggtgaattggctttctcaagaacaaggcgttgctgcacacagactactgacatggatggctgttcttccacctttctgaataagcccattcatgtaatgtttggtaaatgcaaaccgcatgcttatccgcttgatactgtgattgatagatccttcacctcgtgccaatattctgtgttccaatgccaagtcacatattctgagcagcaactggagatttgctcatgtaccgattcttcaaggtcctaggatcatttggggtgatgaagattttgaaatacatgtggaggggtacttatatgatgaaaacaaggatggttgtgaagagaacggagtagtggcatcagctatcagggaaagggaagtgctattgacatcatggctgacccctttcagattatcgcgctgagatcttcctggcgaggattgggagccacgagccagatatccttgacggaaatgtttgcttggacaccgtaaaccggaaagtaccggcgatgatattgatgatgataatcgcactgctctctattgtcatactgttgtctgcactcttcagcgacatgtcttgtgccttttcaacgtgcgaaatgtgagcaattgctcttgtaaagctgcactatttcactaaaacattattgtttgggttatttagatccatggtattactatttatctatttggaaactt

SEQ ID NO: 48082 - DNA, 2971 bp, Zea mays
  Clone ID: MRT4577_143858C.1
ggctgatgttatacgagttgttgatgatgtagctaatggtattccatctacatacacaaatggtgtatcatcaccaccctccactccatcttgttctcaaaatgaatctttggatccagctgctcacttgataacagggaatgagatcaataatgaagctctgacttctccatcttcggtgcaagatagtcctgaagataaaataatgcaagttgcaaaggctgtgtcttgtggcagtgaagtagttaaggcagatacattgccatatgccatgctgcggccgatagttgttcctagtatatcacgaaggtcatcacgatctgagattaagggtgctcatgatcacaggaggagcccatgtgtaccatcaacaaggagggacatacctattctaagaagacctccatcaccagtagtacttagtgttcctcgcgtacctaggccaccacctccttcacctgctggagagtcaagaaaacgagggttccctatcgttagatccggcagctcaagtcctcgacattgggggatgagaggtttattttctgaagacaaaatttttcatagggctcagttttgcttggatggtcctgaagttgtatggccttcatggggtaacaaaggtacttctggtacattggtgcaaacaattgaggatactgttttgcaggaccaccttgttaagatttcacagctatcttgtgatcaacatccagatgtggcattgcctgtacagccactagatatgctaaatggttcgtctcacaaggcatccctctctttgatgcacaatgctctacatgaagaaatagatcaattctgtaagcaggttgctgctggtaatctggtgaggaggccctatataaattgggctgtcaaaagagtcacccgttgcctgcaggttctgtggcctcgctcccgtacaaatctatttggctcaaatgccactggtctggctcttccaactagtgatgttgatcttgtggttagtcttcctcctgtccgaaacctggaacctattaaagaagctggaattttggaaggccgtaatggcatcaaggaaacatgtctacagcatgcagcaaggtgccttactaaccaggactgggttagaagtgattcccttaaaacagttgaaaacacagctatacctgtgatcatgcttgtagcggatgtaccctgtgacacgaatatgtccaatgagtattcttcagtactagatggctcacaagactattcagttaacatgcttggagaacaagggagtcctcctcggtctgacacctctagttcagaaggcagcaacatgctgatgtgctcaaaattgaataaggatgattgtgatattgtgcagtcaattcgtcttgatataagtttcaaatcgccatcccatacaggactgcagactactgagttggtacgtgagttgagccagcaatttcctgcagttatacctcttgccttgattctcaagaagtttttggctgaccggagtttggaccacccctattcaggtggtctgagctcttactgtttggtgctgttaattgttcgttttctccagcatgagcatcatcttggtcgacctattaataaaaatctgggcagccttttgatggatttcttgtacttctttgggaacatatttgatccacgccatatgcgcatttctatccaaggaagtggaatttatttgaatcgagaaagagggcaaagcattgacccgattcacatagatgatccacattgccctgctaacaatgtgggcaggaattgtttccgcattcaccaatgtattaaggcatttgctgatgcgtttgctgttcttgagaatgagctactgcagttcagttcagaatgtagcatgcctgtatcttcattcaatatactaaagaaaataatcccaagtattgattctgatgagctgtagctataaaaaagaggtacgattccacagaatacaattgatgacagggtggaatgacctgtgctgccttctagacacactgatgtctatgcagctgctcagaagcctcagtgtggcaagtttgatacctctggaatagaccaaaaaatagaccggcaagatggcaatattcaaacgtgagctcttgtgtgttcatgcaatggcacatgatgccttgctccctgatcgagcttcttgatgttcagatctctgactgaggtaaattggcttactcaagaacaaggtggtgaattggctttctcatgaacaaggcgttgctgcacacagactactgacggtggctgttcttgcacctttctgaataagcccattcatgtaatgtttggtaaatgcaaaccgcatgattatccgcttgatactgtgattgatagatgcttcacctcgtgccaatattctgtgttccaatgccaagtcacatattctgagcagcaactggagatttgctcatgtaccgattcttcaaggtcctaggatcatttggggtgatgaagattgtgaaatacatgtggaggggtacttatatggagatgcatggtcttagtaattaagcggtcaagaacttatggtcacctgatgaaaacaaggatggttgtgaagagaacggagtagtggcatcagctatcagggaaagggaagtgctattgacatcatggctgacccctttcagattatcgcgctgagatcttcctggcgaggattgggagctacgagccagatatccttgacggaaatgtttgcttggacagcgtaaaccggaaagtaccggcgatgatattgatgatgataatcgcactgctctctattgtcatactgttgtctgcactcttcagcgacatgtcttgtgccttttcaacgtgcgaaatgtgagcaattgctcttgtaaagctgcactatttcactaaaacattattgtttgggttatttagatccatggtattactatttatctatttggaaacttgcattaaaaaaaaaaaaaaaaaa

SEQ ID NO: 48083 - DNA, 742 bp, Zea mays
  Clone ID: MRT4577_143859C.1
agtcatccttctatgatggtcaatggttatgatcttccatatgcctttttcagttgattggtgacaatgtaatgaagttaaattctttattggcaggcacggccccttttcaatgacaggcgcaagctcccaaagatggctgacccgggcctggaggggcagtttcctacacggggactttaccaggcgcttgcggtggcatcaatgtgcatccagtcagaggctgcatcgcgcccactcatcgccgacgttgtgactgctctgtcataccttgcaaaccagatttatgatcctagcttagcgcacgcatccaagaaagcaggcggcagcgaccagcggaaccgggtcggtgacagtggaagggcgctttccaagaatgacgatgcaggcagctctggccacaggtcgccgagcaaggactgggccgactccaccagagagcagttcccgggggctgcgaacaggggccaggacagggatcgaatggtggccaaggcaaaaatgtggggcgaaaactggcgggtagcgtcagtcaccaaagactgtttcggccgtgcgtgctctgtcacagactgttttttgcctttgtgtggtaaggatgagcatttccgtgtttgttaggtgtacatttgtaggtgtgacacaacagaaaaggtatcgttggggttataatggagggagaagaagaatgcttgttctgtatgtttatgagtggtgcctgtaaattatcggttaattttgc

SEQ ID NO: 48084 - DNA, 783 bp, Zea mays
  Clone ID: MRT4577_14385C.1
cattgggtacctcgaggccggccgggaaaagcttaagacgcgcccactcttcccatcgctctcctcatttggacactgccaagtgatgcttatcgcatagcactatggcttcggcaagtgatatcctcaccctcgtcagctctctggctctccgcctgagcatatggatcttcttgcgatggatacctacaactatcgttcctgcactcgcaaccgcactcacgcttgtctacatcccgtccttcttcacgagtttccaggacacagcccagtacaagattatatccgatgagctcgacattatcgtcaaggaaaccgtgggcggcaagagcgatgactcgagtgacgacatcaagctcatcgatggcgcagacgagggtccgttgcaggagctcgacgtccaggaaaccgtccagtatgaagagagggagcccaaggtactgcgcactcttctcactgggctcccgagtccttcgtcggcgctatggagctgggtcacctttggcatcaacatggccctgattgctatggtcttggacgtcgtttatcgcgcgccgctgctccaccagtgccacgacgcgagctttgcccgtgtcggatacgtgtcggagaacagtgcgaagattctggtcagagagccctttgcctttgatgtgagggttctctaccgctccatcgacgaaactaaacgctcttggatgcacaaaacacaccgcgcgagccagccagactactggctcaccacgagactgattttacactgtcctcaggctcgagcatcta

SEQ ID NO: 48085 - DNA, 141 bp, Zea mays
  unsure (1)..(141): unsure at all n locations
  Clone ID: MRT4577_143860C.1
ggccggggttctaacagccgcgggcggcaccagacaaaacgcttcgtggctataaaggggcaatccactctnctctccagggacccccaagccgcccaaaacccctaggggcccgccgccgcgaatccccgcaacgacccc

SEQ ID NO: 48086 - DNA, 349 bp, Zea mays
  Clone ID: MRT4577_143861C.1
cccacgcgtacggagatgtgcgctgaagagctgatctcgtaggacgagcgtcatgatgtgaagaagctgaaatctcatggtggcctgcacggcctttactacaaactatccacttcggagtctgaccgcctgaccacgttcgcggacaagctagcgaccccgcgggatcgttgtggctgcaacaagtttgcggaggcagcttatcgtggcttcttggtcttacaacgacaggcgcagcatgacatgacactaatgatccttgtacggtgcgcagtcttaaacctcatagccactataagcgcctagcggatggcccataggcacacactacatcctctgcattgtgggc

SEQ ID NO: 48087 - DNA, 1904 bp, Zea mays
  Clone ID: MRT4577_143862C.1
cccccgcctccgcccacgcgtctcctccacctcccaatccccacttgttcgcctccccccggcctccctgatccgtgccgccctcccccaccccgtcaaccaggagcgcagccgcttgtcggtgcggaaatgcgggttcgtcttgcggcgccgcggtgagctattgattgctggtggtagctcgccccgggcaccggcgatgggctgcttcccgtgcttcggctccacgcgcgaggaggagctcaagtactacggatccaagggccccggcggaggcaatggcggtggtgggcgagcgaccgcgtcctcgtcctcgtccgctgcagctggtggtggaggcggccgggtagaagaggccgtggtggcgccgccgcgtgctcagaggggccccgcaggggtcgacaagacacgagctaaaggcaatgctggctcgaagaaggagctttcagtactcagggacgccagtggcaatgtcatctctgctcagaccttcaccttccgccagcttgcagccgcaacgaagaactttagggatgaatgcttcattggggagcggacgcgtgggcgcgcgcgtgggggccgccttgacatgggccaggttgttgctatcaaacagctgaatagggatggtaatcaaggaaacaaagaatttctagtggaagttctcatgcttagtttgctgcatcatcaaaaccttgtcaatttggttggttattgtgctgatggagatcaacgccttctcgtgtatgagtacatgccacttggatcattggaggaccatttgcatgatctccctcctgacaaggagcctttggattggaacactaggatgaaaattgctgcgggtgctgctaaagggctggagtacctgcatgacaaggcacagccaccagttatttacagggatttcaagtcatcaaatattctattgggcgagggcttccatccaaagctatcagacttcggtcttgctaagttgggtcctgttggtgacaagtctcatgtctcaacgcgtgttatgggaacatatggttattgtgctccagaatatgctatgacaggacaacttacagttaagtcagatgtttacagctttggagttgtcttgctcgagctgattactggccgaaaggccattgacagcaccagaccagcgtcagagcaaaaccttgtgtcatgggcacggccccttttcaatgacaggcgcaagctcccaaagatggctgacccgggcctggaggggcagtttcctacacggggactttaccaggcgcttgcggtggcatcaatgtgcatccagtcagaggctgcatcgcgcccactcatcgccgacgttgtgactgctctgtcataccttgcaaaccagatttatgatcctagcttagcgcacgcatccaagaaagcaggcggcagcgaccagcggaaccgggtcggtgacagtggaagggcgctttccaagaatgacgatgcaggcagctctggccacaggtcgccgagcaaggaccgggccgactcccccagagagcagttcccgggggctgcgaacaggggccaggacagggagcgaatggtggcagaggcaaagatgtggggcgagaactggcgggagaagcggcgagctgctcaggggagcctggattctccgaccggaggcgggtagcgtcagtcaccaaagactgtttcgcccgtgcgtgctctgtctcagactgttttttgcctttgtgtggtgaggatgaggattcccgtgtttgttaggtgtacatttgtaggtgtaaaacaacagaaaagggaacgttggggtgaaaatggagggaagagaaggatgcttgttctggatgtttatgagtggtgcctgtaaattatcggaaaattttgcaacggtgaaggactagccacgttggaag

SEQ ID NO: 48088 - DNA, 236 bp, Zea mays
  unsure (1)..(236): unsure at all n locations
  Clone ID: MRT4577_143863C.1
gtgatatantctgcctatccatgaaatttggttttcccttcccttcctatactatttggatccgacaaagttcgacaatctaattaagtcgcccgtggtttctccatggatggatatgatccaccgatcgatggatctgtaataatgtaatcggtccactcaagagaccaatgcttgttattttatttgtattccacgcatcatatataagaaatacaaaggcatgcaattgagcc

SEQ ID NO: 48089 - DNA, 342 bp, Zea mays
  Clone ID: MRT4577_143864C.1
ctggcacttgcaggcatgcccctatgccggggggggcacttgcaacgtcgcctcacacgatctcaccttcatgctccatagcctggggataagcaaccacgccatgctgaacaagtttatgacaactgctgactacatcttcaagcatgtacgcatgccggtcgttttcaagaccgacactactctccagatgctgacctccttaaaaaaccttttcaagcactcccaacagaaatgtatcgcttcgaggtcccatctctcaggagatgaatgccctgtagatctactttatgcttttttttcgctcagacattgcctactctgagcattttatttacacac

SEQ ID NO: 48090 - DNA, 570 bp, Zea mays
  Clone ID: MRT4577_143865C.1
tttttaaattccctttttttttttttttttttttttttttttttttttttttttttttttaaccaaacaatggggcatgttataaaaacaaatccttcaacagtctggagccttgttgaacaagtttttgataccggaacctaaagctactggcaagcgacctcaaaaagggggaaaaacggggcagggggtaaacactgttgaatgaaaaatgggggggaaaacgaaaaacactgggggggctaccattttaaaacatttttcactttttcccgccaccagacccgttgaatttgaaaaaaaagatgcccccgtcctggaccacataggttttcccctcctggttggtttttccagcggcctttacagcaaattcactgcccagttttttcaaatttttaaactttctttaccttagggcatatgaaacccctttcaaaatcagggggatttgccccagcagcttggggagctttaatctgacggttgatctgcaaaactttacctcatcagggccagcggggaaaaagtatttaaaaagaattggtggaaaaccagtcttgaaatttt

SEQ ID NO: 48091 - DNA, 265 bp, Zea mays
  unsure (1)..(265): unsure at all n locations
  Clone ID: MRT4577_143866C.1
acgggacatgcatggcgagccncnagcgggancaggcccacatctacgggttctactacnaacacctngtgctcgacccggcgtctctgggcgtgccgtgggccgacccggccgccgtggagatcccgccttatctcctctccgcgctcggggagtacctctccggctccgcggcccgcggtgacgttgaggcaggaggcggacgacgagttcatgatgcacgagtacaaggtgcagccttccgcgcgctcaccgagccacgact

SEQ ID NO: 48092 - DNA, 867 bp, Zea mays
  Clone ID: MRT4577_143867C.1
atggcgcgccagcagccggagcgagtgccgccgcagcggcgtcctatcggttgcggaggtggttggaagcgcgacggggtttgcgggagcccgcccctgagcggcgggtggttggaagcgcggcagggtttgcgggagcccgcccctgagcggcgggctattcgcggggtaccccgtggtgggcccgaggacgtgttgctgacggtgtgcccctgggacccgcgcgtgcggggcggcaccctcttccaccagaccaccttcagcctcctcgtgcgccgcgccgtgctgttcgtcgccgaggtgcaccggctgcgggacctggagcccagggcgctgtgtggcgtggagctctacgacggcatcctcatgcgctacgtgaaggcgtccacagcctacctaggcaagcccgcgccgcgcggggagccgtcgggagacatggtggacttcgacatcacatactaccgcagttgtgaccccgggcaggcgcgcctgttcgaggacgtgttggaggaggtcgagcagatgggcatcttcaagtacggcggcctgccgcactggggcaagaaccgcaacctcgccttcgtcggtgccgcgcgcaagtaccccggcctgccgcgcttcctgcgcgtcaaggacgcctacgaccccgatggcctcttctccagcagtggcagcgagcgctgcggccagctgcgcgcactggtcctgctcgtggagcacgacgtcggtgagcggggccagcgccgcgggcggtgcacgcacggaggagtccgggtcccggacgcggcgcagcgcggcagccaggagcctgggcacgagcggcgcgacggcgtcccgcgggtgctccccggcgacgagcgccagtag

SEQ ID NO: 48093 - DNA, 3465 bp, Zea mays
  unsure (1)..(3465): unsure at all n locations
  Clone ID: MRT4577_143868C.1
gnaaaaaggcattgttctganaaanaaacgtccacanataatcaaactatcgtatgccctgagagtaatatgaggtgctcgaaaatggttgaagtaattgaataggaggatcactatgactatagccgttggtattcggcttaaagaagaaaacgatctatttgatattatggacgactggttacgaagggaccaaggcgattttgtaggatggtccggcttattgctctttccttgtgcttatttcgcttttgggggttggtttacagggactacttttgtaacttcttggtatacccatggattggctagttcctaattggaaggttgcaatttctttaccgcggcggattccacacctgccaatagtttagcacactctttgttgctactatggggaccggaagcacagggagatcttactcgttggtgtcaattaggtggtctttggacttttgtcgctctccatggagcttttgcactaataggtttcatgctacgtcaatttgaacttgctcggtctgttcaattgcggccttataatgcaatttcattctctggtccaatcgctgtttttgtttccgtattccttatttatccactgggacaatctggttggttctttgcgccgagttttggcgtagcagctatatttcggttcatccttttcttccaaggatttcataattggacgttgaacccatttcatatgatgggagttgccggagtattaggcgcagctctgctatgcgctatccacggggctaccgtagaaaacactctattcgaagatggcgatggtgcaaataccttccgtgcttttaacccaactcaagctgaagaaacttattcaatggtcactgctaaccgcttttggtcccaaatctttggtgttgctttttccaataaacgttggttacatttctttatgctatttgtacccgtcaccggtttatggatgagtgctattggcgtagttggtctggctctgaacctacgtgcctatgacttcgtttcccaggaaatccgtgcagcggaagatcctgaatttgagactttctacaccaaaaatattcttttaaacgagggtattcgtgcgtggatggcagctcaggatcagcctcatgaaaatcttatattccctgaggaggttctaccacgtggaaacgctctttaatggaactttcgttttagctggtcgtgaccaagaaaccaccggctttgcttggtgggctgggaatgccagacttatcaatttgtccggtaaactacttggagctcatgtagcccatgccggattaatcgtattctgggccggagcaatgaacctatttgaagtggcccatttcgtaccagaaaagcccatgtatgaacaagggttgattttacttccgcacttagctactctaggttggggagtagggccggggggagaagttctagatacttttccttactttgtatccggagtacttcacttaatttcctccgcagtcttaggcttcggtggcatttatcacgcgcttctgggacccgagactcttgaagaatcttttccattctttggttatgtatggaaagatagaaataaaatgactacaattttgggtattcacttaattttgttaggtctaggtgcttttcttctagtactcaaggctctttattttggcggcgtatatgatacctgggcccccggggggggggatgtaagaaaaattaccaatttgacccttagccccggtgttatatttggttatttactaaaatccccttttgggggagaaggatggattgttagtgtggatgatttagaagatataattgggggacatgtatggttgggttccatttgtgtacttggcggaatttggcatatcttaaccaaaccctttgcatgggctcgccgtgcatttgtatggtctggcgaagcttacttgtcttatagtttaggtgctttatctgtttttggttttatcgcttgttgttttgtctggttcaataatacggcttatccaagtgagttttacgggcccactggaccagaagcttctcaagctcaagcatttacttttctagttagagaccagcgtcttggagctaatgtagggtctgcccaaggaccgacgggtttaggtaaatatctaatgcgttccccaacgggagaggttatttttggaggggaaactatgcgtttttgggaccttcgtgctccgtggttagaacctctaaggggccccaacggtttggacttgagtaggttgaaaaaagacatccaaccttggcaagaacgacgttcagcagaatatatgacccatgctcctttaggctctttaaattccgtgggtggcgtagctaccgagatcaatgctgttaattatgtctcccctagaagttggttagcgacctcccattttgttctaggattcttcttttttgtgggccatttgtggcatgcaggaagagcccgagctgctgcagcaggctttgaaaagggaattgatcgcgatttggaacctgttctttacatgacccctcttaactaagattttttatttatacctgttctagtttttttctgttctggctcggttattccatctagccgagccattcatgcttttttatgaaagaatgatataaggggggctgcacaaagaaaaacatagatagaaagaagcaaatgtattcaatatacaaaaggagagagagggattcgaaccctcgatagttcctagaactataccggttttcaagaccggagctatcaaccactcagccatctctccacagcccaatccctattttattcctacaaatagaacatagctatatgaaattcggctcgagctcatctcagatgcaagtccactttcaatatatctctgtataaagcggtaaggaaaaagttttaataaaaagaagaatcaatggattcatgattaaacccctcctacttcttgtattttcatacaattttgattaagtgagggatcaaatagaaatatgtagtcaactttatttgaaggtagtttggaggattataaatatgaatattgctttccaattagctgtttttgcattaattgcgacttcctcagttttagtaattagtgtaccccttgtatttgcttctcctgatggttggtcaaataataaaaacgttgtattttccggtacatcattatggattggattagtctttctggtagctattctgaattctcttatttcttgaatttgtttagtatttagtaacccgatacaaaataaaaaaaaagaaaggccctttttcgaaaaaattaggatttttatacacattaaaatgctattttcgttccgaattattacctcttctctttcattattatgaaattctattgccattagaatattgattgatagacagttaataaaaaaaaaaaaaaaaaaaaaaaaaaagtacctgcccgggcggccgctcga

SEQ ID NO: 48094 - DNA, 573 bp, Zea mays
  unsure (1)..(573): unsure at all n locations
  Clone ID: MRT4577_143869C.1
ccacgcgtccgccctattttattcctacaaatagaacatagctatatgaaatgatctactaactcatctcagatgcaagtccactttcaatatatctctgtatactgtatacacggatacagaatccgctatatccgtttgtgaaataaaggctaaatcccctcccctcaactccatatccaaataaaagcggtaaggaaaaagttttaataaaaagaagaatcaatggattcatgattaaacccctcctacttcttgtattttcgtacaattttgattaagtgagggatcaaatagaaatatgtagtcaactttatttgaaggtagtttggaggatcataaatatgactattgctttccaattagctgtttttgcattaattgcgacttccttagttttagtaattagtgtaccccttgtatttgcttctcctgatggttggtcaaataataaaaacgttgtattttccggtacatcattatggattggattagtctttctggtagctattctgaattctcttatttcttgaatttgtttagtatttagtaacccgatacacaaaaannaaa

SEQ ID NO: 48095 - DNA, 304 bp, Zea mays
  Clone ID: MRT4577_14386C.1
gcagatatcattaaaagtgtattacgggatttcaatactcaagaacagtgcatactttccttgagacccgtggtcacagctctcattgttgggtgtggccacgaatggaggtcactcagtcacaaccccccttaggatgaaaatgaggaatagtcaacgtaacgcccaaacgtggctctttaatccccttctaattctgaatatttcgcgtgggtttactataatgtctattaatacatatccttaatgatgataggattagacaaaaaaagtgaaaattttcgtatctaaatcttcaaatcgc

SEQ ID NO: 48096 - DNA, 437 bp, Zea mays
  Clone ID: MRT4577_143870C.1
ggccaagcttgttttttttttttttttttttttttttgttgtttggtttttttttttttttttttttttttgtttgcataggtcgctctaggaatttgtgtttttgggccataggggcgacccgggggggggggtcttgccttattcgggccatcgggtactttgaacttatgcagggcggccctgcatgggggtgctggggctagccgggtggatggcgtgtgcgcctttggtgctgcaggaagggtaagtcttgccgcttgatactttgccagggggggtgcctcggatgttggggcctttcgtgttgggaccattggtggtgccgggccttgggggacctttggtctgggcgtgtttggggtggcctctggtggggccgcgttgtgtgtggggtgccggctggcatgttgtgctgcggtgtgggggaccattgg

SEQ ID NO: 48097 - DNA, 208 bp, Zea mays
  Clone ID: MRT4577_143871C.1
acggaagacaatgatagacttcggagccgtattatcactccggcccggcgcagagtgtacagtgcgacatgatgcactgcatgggggtgcgggacctgatgcctaacacatatttgtgctagagctgggacctcatgaaaactaactgctgacttgcctcccaacggaacactttgaagtgcatcatccggagcctaacctatcctat

SEQ ID NO: 48098 - DNA, 1144 bp, Zea mays
  Clone ID: MRT4577_143872C.1
cctgcaggtcgactctagaccggttttaatataactaaactataaatgtgtattataaaacatagtgcatcaaataaaataaaatagagcataaaaagagaatgttatgatcaccgagttagaggtagaaccttgaaaaagaatcatatatgaaaaacacaaatagagaaataaagtaatattatgcaaattataaaacaagaattttttataccactaacacgaggtaatttaatcttctgtattctcatatcttgaaaataccttgatatcttattgttggggacttgttctcaaatgctaagagttaagaacaaggcaacataaaaagtgttaagtgttaaagtccttcgtccttcgaagcattatgtcccttcgggaaataatgagcttcggacgaaggtcataagagacataccttcgtgaacataacaagtaatgacgaaggattcatataaagcatgaaatataatataagcatcatcatagaatcatttctatcttattaacatcagacataaaaatagaaatgatttcaaattacaaatgtacctccgatgagaaggaaatgaaagtacaagcgtgacgcaaaagcggatgtccagtcagcgtgaacagtacgggagtactgttcacctatttataggcacgggacgtagcccgtacaaaattacattaatgccctttacacttgataataaacatatagtactctgtcgaggtcttaatagccttttcatccttaagtcggttccaactgctgctgtctcgccgaagctttcctgcttgcaccttcggcgcttcaccaaccttcgtattattctggtctacagtgatgcctgacttgagcccgaagatacctgtttacacattatactccagaaacactattaaatcctgtttttgaggaccttcgaatgccgaaggtccccaacagtagcaatacatagagatacacaaagagtacataaacataacagtacaccaaacataggaagacaattgtgtaataatattctatgcgctcctacgaagtcgtagcttcgagaaccaattaaaatcggagttaaaacaaaaaaagttatgggtaaaacaatatttttaggtgcaataaatataatagatgttacatttaaactaagca

SEQ ID NO: 48099 - DNA, 606 bp, Zea mays
  Clone ID: MRT4577_143873C.1
cccacgcactacctataagaccttctagatgactttggcaagtaatctgtaactgaactccattattgaatgaattagagggactaacatatgtgcaggcataggagggatcgaccgatagagcatatgcttatgcataagcgtaacaattaggggaacacatacatattgggataaaaactttggtgacaagtgaaatggaaaatgagaatgaaaaaaagactgtgaagaatactgggatgcatacttgggtttacattattgctagcataaacacatggctgaacatactgatggggatactgaatgggagtaaaacaagtgtcagaacaactgatgggggtattaatgatgggatgattgatcaccttgatgtgcaatttgataggctaaatctttgggtaagtatttaggctacaatattgcgtaagataacaggtatgcatacagctattcatctaccttctaaggaacctattaaggaagctaccgatgaacacacccatgagcacaatcatagtgatgagcaaaatgtccctgagacagttattgagcatcttatagagaatcttaaagagaaccatatagaagctgagaatgcaggtg

SEQ ID NO: 48100 - DNA, 374 bp, Zea mays
  Clone ID: MRT4577_143874C.1
cgggggagcccgccggccttttaccatccagggggccccaaaaaaaattttttagaaccccccaacagacaattttgggggccaaatcagggagcggggaaaaaaaaattgggggggcaaaaaaccaaaaaaccactcacggcgcgggccagggaacgaccccgagggaggggagaggccaccttcgttgaatgccccggccccaaaaaaaacccctgtctctgaggaaaaatagctcagggcccaccccttttaattggtgacaagatcttcttcttgtttgggggaaaacccccccaaaaaagggggggggtcacgggggcccccgcgccgtctaagccaaaagggcccctctctgggggagctcttaaaaa

SEQ ID NO: 48101 - DNA, 290 bp, Zea mays
  unsure (1)..(290): unsure at all n locations
  Clone ID: MRT4577_143875C.1
ggctcgaggtccgtcctaccaccacagctagccgcggtttggcttactcccctcttccgcaccgctatctcgctccggattccggattccctctgcactttacccaacgaaggtagccatggcggggagaggtaaggtgatctgttcatgtgccgccaagatggccacgtccaggagctccaaggctggcctccagttccccgtgggaaggatcgccaggttcctcaaggccggcaagtatgccgagagagtcggcgccggcgcncctgtcatactcgctgccgtgctcg

SEQ ID NO: 48102 - DNA, 438 bp, Zea mays
  Clone ID: MRT4577_143876C.1
ccccgaaggagaccatcatcctgaacgtgctctcggccacggtggacttcccgacgtgcgagtctatccgcatgtcgcagcaggtggaccgcaccggcgagcgcacgctggccgtggtcaccaaggtcgacaaggcccccgaggggctgcttgagaaagtcaccatggacgacgtgcacattggccttggctacgtctgtgtccgtaaccgcgttggcgacgaaacgtacgaccaggcgcgcgttgcggaggcgcagctgttcaagaatcatccgttgctttcacagatcgacaagtccatggtcggcattccagtccttgcgcagcggctaatgcagattcaagcgaccatcattgccaagtgcctccccgacattgtgaagcagatcaacgatcgcctcatccgcagcagcaccgagctggaccggatgcctcccg

SEQ ID NO: 48103 - DNA, 454 bp, Zea mays
  unsure (1)..(454): unsure at all n locations
  Clone ID: MRT4577_143877C.1
aaaacaattgggcgttttttaatacatttaaaaacaccccaaattcaaaatttccagctgaaggacaaaaatgcggggagaaaaggagaaaagtcccggcgttcataaaagggaaggggcgactcagctcatacaaagggaaaggcaacggcaagcacatttagcagggcactggcccacttaaagggccttgaagaactcaggcccaagggcttgcctcggtgggatttttttgctgggctcggatcgaagcattttaaaaaaaagggccaacccaccaggggcaaaattggggactactggggccaggtcctgagcttgccacctggggaaagctgttttgaagtcaggcaaacaactgactccgggccaactttggtaattggggggacctagtatcctgaatatctaaaaaaggtccnccgatctcaaaatccccagggaataggggctt

SEQ ID NO: 48104 - DNA, 448 bp, Zea mays
  Clone ID: MRT4577_143878C.1
tgtgacgtccctcgccgcaacacgggagagcagctctctcgccacaccggaagttcttaatgtacatcactgcacgatccatggcgatgatctattggatgactggcgagaagtgcagtagcacatgccggtagtgtgctgtgggacggggattctgcctgtccaggcggtcgttctgaaggactagtcacaccacactgaggggcgtgcctgctgagatctcgcctagcggcgcgaccttgtccctaatgcatggctcatacgcatgttggcctagcgctgaaataccgtacagccttcacaatcctcacacttccttcttgctcgcaagatcgatctggtagcctgtctcagaccttgagtgagcattcctgactaaagaccagttggctatcgggactgtttccagcagcataccctgtattgcccgatacgttatgcactgcgt

SEQ ID NO: 48105 - DNA, 284 bp, Zea mays
  Clone ID: MRT4577_143879C.1
tcagtctctgggaaggaaaaacttggtgggcgggtacaaagcttggggttgcatatttccttactacgacaggccaagcaaacagaagtgtctgctgcgaagcttcaagcaaatatgagtggatctggtaatagtagtcaggagaaggatttgttgaaaaatgcaagtttccatactcacaagaaggctttggacaagaggttcatttctttaactaatcgtataaaagagttaccaggcatcaataagcatatccattttgattcgaccaatgatgaaactaa

SEQ ID NO: 48106 - DNA, 653 bp, Zea mays
  unsure (1)..(653): unsure at all n locations
  Clone ID: MRT4577_14387C.1
ggccctctgcgtgacgaggtacgtccacgctcctccggcggcacagagtttgcttagcatcgttgctctccaaagcgaggaaggaacccctttttttcacctgtgcacatcgcgcggccccatccatggctggaaagcgacacaatgcaagaaagtagctgaactagagtgctagatcgattcgatcgtatcttacaccctccccccccccccctgctacgtacgtgccgtccgcgcccctctttggcgacggccgtgcgcgcatatgcatggccctcagctcgaaaacctcgcgctcaccgtccacttccggcggcggtatccgagccaccaacaagcatgggggcgggggccactgaaatccaggctccctctttcgtcttgcttgcctgctgcgtgctgcctacgcactcactgagctactgcaggctacagctgctcgtcgttgggccgggcgttaggtacgtgggggcagccaagcatacgctgccattgtactcagctccgctgaatagcgcctaattaagtggngctctagacaattatatttccgggaccggcggcgcgaacccggccagctccgaatgattggatttgctgcagcatgaacgggacggctctgacatggntaagggctcagcgatgctccggct

SEQ ID NO: 48107 - DNA, 1027 bp, Zea mays
  Clone ID: MRT4577_143880C.1
gccggttcccggctccttcgcggcgctgcttatctcccgctcccggctcccctcctcccccgcgccgcgatgaacacagccatggccaccacctccttatccctccaaggccgcccatcccacgctcccactaggaagctctcctccccgttcctcggagcccccgcgtcctttctccggccgctggctcccacgcccgccgccggcccctcctcgcggcggacgcttgccgtcagggccatggcgcctcccaagccgggaggcaagcccaagaaagtggtgggccttataaagctggcgctcgaggccggcaaggcgacgccggcgccgcccgtcggcccggcgctcggtgccaagggagtcaacatcatggcgttctgcaaggagtacaatgccaagacggccgacaagcccggctacatcatccccgtcgagatcaccgtgtttgatgataagagctttaccttcgtcttgaagacccctccggcttcagtcctgctactcaaggctgcaggtgtcgaaaaaggttcaaaagagccacaacggcagaaggtgggaaaggtaacagtggatcaagtgcgtgcaatagctcaagagaagttgccggacttgaactgcaagagcatcgactctgctatgaggatcatcgctggcaccgccgctaacatgggcatcgatgttgatcctccaatccttgttaagaaggaaaaggtcctcttgtagtttgtttttgctggcaccaccagtgcccattttgagattatatgtgaaaggaccaagatgatcaaaagagtgaattgagtttctctaaaatatcttgtataaattaatgcctattaatgagtccatttcaccctttgtatctaaaaaaaaaaaaaaaaaagagaaaaaaaaaaaaagggcggccgccacctggcaccgccgccaacatgggcatcgatgttgatcctccaatccttgtcaagaagaaaaaggtcctcttgtagtttgtttttgctggcaccaccagtgcccattttgagattat

SEQ ID NO: 48108 - DNA, 136 bp, Zea mays
  Clone ID: MRT4577_143881C.1
ccacgcgtccgttttagcatcagggagaaacttaacgatatgctgggacctataagcaatctcgggacccgctacctaacgacaccctctcagaccacctagaaggtgatcattgagatgacaaagtccctcatca

SEQ ID NO: 48109 - DNA, 219 bp, Zea mays
  Clone ID: MRT4577_143882C.1
acctatcggcttgctagttggttaccataccacttaaatatctgatcgattatatatatagatacagacagagagatgttgcgtgtgtgcagcagtacagtgtacttttttttatatttagcatgtttacgtactaataatacgactagtgtaggtatttaatttgctttgtaaagtggtactagctgtttgatcacagacaaagcgatgctaaatata

SEQ ID NO: 48110 - DNA, 206 bp, Zea mays
  Clone ID: MRT4577_143883C.1
tttaaacctacctgctgtcaattgtgttgggtgtgatctactgagaggttgtagggaaggaataaactaaggatgtacaatatttaactgcatgcatgtggtattcaatcattatggaccaaagattgttccgaattttggcggtcgacaagactgctattaactcaattagagttagggctgtagttgaattaggcagcttaagg

SEQ ID NO: 48111 - DNA, 254 bp, Zea mays
  Clone ID: MRT4577_143885C.1
agctgggccgcgtcctgttcagataagactcctggctactggaactctggagcggggacggcttaattgaccgactgatcaggcaacgatactttctctacaagttccagagcgccatgcgcacgatgggccccgtaagcatgcgaacagtcgccgtacgcggggagatccgacggaactgcttggccaggatctaaaagaatgcgccgtgccaatacgtcacctgaactgggccaacgtgccaaagaattatg

SEQ ID NO: 48112 - DNA, 598 bp, Zea mays
  Clone ID: MRT4577_143886C.1
gtcgactcaacctccgtgacacacggtctagaaagctatacatcgtcggcaggcaaaggtttcagctggggactctgatactagttagcagatttgtcccccctgatgatttcaagtaagctttgctcactttagatctagattatgcaaaaggaagagccaacaaaggtgacgcattatatgctggggtgctttgcccaacaactccacgcagcagcagaagcactggacgatatgccaatcaagaagttgtacacacttgttgagatggctgctcaggggccaaccggaggaagtgctgaagcgatttatgccggagaggagaagatagatatcaaccatttctttagcatcttgagtgatattatccgttactaagcccgcatggagccgaaatgaaccctataagtatccagtaggagtttgtttgcacccgtgcttcatcaaccatttctgtagattggtttgatgtgttgtttttgtttgatgcacctactaggccctgtttgtttcagttctagcagttctggccaccaaaatctgctgtggactgccaaacgctcagcttttcagccagtttctataaaattcgtggggt

SEQ ID NO: 48113 - DNA, 833 bp, Zea mays
  Clone ID: MRT4577_143887C.1
aagaaattagagaggattttgacttaaaggagatttaatcctcctcaatctttatagattagtacaaaacgaacatgacctaacaggaaaagaaggagaagcattttattatccacgcctctttgccttttgttttctctttttgaccttggataagattccatccagaaacgccctccacgcggaccaatcacggtactttcccgtttgatacttcgctgctgctgctgctgctagttttttagcgtatccatgtacagaatcccttggtttgaaaagaattggctttggataagggctgtcttcctagctctgttcgactgttccccacttctagataggttgatccttctagaaaaatattctgtttcgatcaatgagacgagccgggcctgtccgagttaattttaatttataattttcttccttggtcaaactgtgtttttttttttttttttttgcaggatgttcgtggagacctgccggcgccttcgcctgatgaaagattcagaggccgttaacttggcaccaagagccgcccgatgaggcgcaagcgcaactccaccgtcaccagtatgcactggcttttagtggcttggcttgttggaggaacgagggaacgtacttcgtcgctgttttgaggatcttcccttgacatatatatagcaatgtgtacagctgtcacctgctgcttttgcctgaggaaagtttgtagttccattactttacttatctgtagtgtctatctatctatctatagatccgaagctttgatatacacatggcggctacaatgtatttttgatgaataagaccagaccagagtaccagac

SEQ ID NO: 48114 - DNA, 370 bp, Zea mays
  Clone ID: MRT4577_143888C.1
cttctccttcctcaatccgacacgctctgcgcgccgccgtcgacctatcgaatggaggcggagcagcaaaagcagcagcgcccgcgccagcgcccgcgccgcaaggggcagaagcggaagttggaggacgaggcatccgccgccaccgccgccgccgcgtcctcgctcggcagtgcgggcgccgacgatgacaacgaggaggaggacggctcggcgggcacccccgagatctgccgccactcccacgcggcgcttgcgcgcgaggtccgcgccgcaggtgatgtcctcaatcgcttgcccttttcgtggggccaagcaaaacggggccgcggcaaaggcgccaaccaagttcttggttaacttggcaaaa

SEQ ID NO: 48115 - DNA, 1016 bp, Zea mays
  Clone ID: MRT4577_143889C.1
ccgggataccggcagtgccactgtgccaaccagccagccgctctgcttgtcctccagacagtccaggattgaccgccagcccctgcactgcacacacgccctccctcattcacccaccccccaatcgcctccgaatctctctgcctcattctctctccaccggcgagtccgaccgcactgcccctctccgtgcggagatctctcgcgtgctggcaggcgcgtcctggtgactgggacacgggagaagagaccttggtgggtggcagcggcaggccatggaggcgctgctggtgacgaatggtgcgtgtgcaggcaggacgcgtcgcaggccgcgctgcagaagaccatcgactacgcgtgcggctccggggcggactgcaactccatccatgagagcggggcgtgctacaaccccaacaccgtcccggcgcactgctcctgggccgccaacagctactaccagaacaacaaggccaagggcgccacctgcgacttcgccggcaccgccaccctcaccaccagcgacccgagctcttcgggctgctcttaccccaccaccagtgcaagcgccgcgggaaccgtgaccccgaccaccggcggcacaatgggaggagcgggaggcccagggaccttgacgcccgccgggacaggcgcaggcacagccggcactaccggcatggggactgcaggcactacgggtaccgggttcggcggcctaggaccagcaggcatggacacagcggcggcggcggcggggggcttgctcctcctcccagaggctgggctgtgcgctgccctcgtcgcgctcctcctctccgccatcgtgctcgcgtgacgccttcacatgacctcggaaacaacaacctactgcctgcatgctagtagtagtagaaagcgctgcccttttgggaggtgtatgtagttcaggagtactctgattatctatggagaaagggtgggaattattggggaaaaaaaaaaatgcatcccacaaaaaaaaaaaaaaaaaagcggcc

SEQ ID NO: 48116 - DNA, 928 bp, Zea mays
  Clone ID: MRT4577_14388C.1
tctcgcgggtaccggtcaattgatccctatctatatctaaggcctacctagctcggtcggtccggcgagaggccgccatggcgtccatcatcgtcatcgccgccgtgctcgtcctggacgtcctcgccttcgtgctcgccatcggcgccgagcgccgccggagctacgtgaactacgtgagcgtggacccggccggggggtcctactgcgtgtacagctccgacgcgtccacggcgtacggcgtgagcgcgctgctgctgctgctcgccgcgcaggccgtggccatggtcgccacccgctgcttctgctgcggccgcgcgctctcgccgggccgctggcgggcgtggtccggcatctgcttcatcctctgctgggtgacgttcgtgatcgcggagctgtgcctgctggccgggtcggtccggaacgcgtatcacaccaagtacttccccaagggcgacggcccgccgccgtgcgccatgctgcgcaagggcgtcttcgccgccggcgccgccttcaccttcctcaccgcgctcttcgccgagctgcattacctcttctacgccagggcgcgcgacgccgccgccgccgtggccccgcccattgtcggcggcatcggcatgacccgcatgtgatgtggaggatattgtcctgtggttgtgatcgcggtggccgggcggcgctagctgcaggtgcagccccgccacgctagaaacctcagctcctggagtcgtgcgtgcctgaccggccgcttgtctgtacatgtgctcgttcagtcgttccatgaattccacggggcgttgccgcccgggctcacctgaaagcgtgtgatagtactgtactactgactgctgtcactacagcgtgctggaactgttgggtttgtaattctgtcaggaacacgtacgcaacatagctgcattgttagccc

SEQ ID NO: 48117 - DNA, 321 bp, Zea mays
  Clone ID: MRT4577_143890C.1
caaggttcctaaaggttgaacggccccctcaccaaaaaaaagggacctttcctttggctgaaacgacttttttactgaaaaggggggcgcccccaacttcaatgaattaaaaacccgggggggatcggaatcatcagactcgtcctcatcagaatcatacatgggctgaccgcctctcatgcccatgctttgtccccaacaaaatgaacctaaaccgttccgggccgctttttaaggggaccgataaatggccaatgtttttcccaaccctttctttaataacaaaacccgccctggaagaaaaaccacttttttttcctt

SEQ ID NO: 48118 - DNA, 815 bp, Zea mays
  unsure (1)..(815): unsure at all n locations
  Clone ID: MRT4577_143891C.1
tgggtacctcgaggccggccgagacggcctccgccgggctctgcctcattctctctccaccggcgagtccgaccgcactgcccctctccgtgcggagatctctcgcgtgctggcaggcgcgtcctggtgactgggacacgggagaagagaccttggtgggtggcagcggcaggccatggaggcgctgctggtgacggtgcttcttctcctcctctcctctaccctcgccgcagcacaatggtgcgtgtgcaggcaggacgcgtcgcaggccgcgctgcagaagaccatcgactacgcgtgcggctccggggcggactgcaactccatccatgagagcggggcgtgctacaaccccaacaccgtcccggcgcactgctcctgggccgccaacagctactaccagaacaacaaggccaagggcgccacctgcgacttcgccggcaccgccaccctcaccaccagcgacccgagtaagtggaaccaacgaacggtcatgcatgccgtgtagcattgttaagcttcaaggaatcgggttctgtacagggtaattaattttggctatcggtgtagcactgtagcctcgcctaataactaataataggaagaaaaaaaaaaaaaaaaaagctttctgagcgaataactgtaaaataagatttgcaaagtgcaaagctgtttgcggtatatatgctttattattctcgaccctanaagtaaaaccctatcatagtgtctactgggcagacattggcatcaaagtgcgtccaattttccccccgatttttcaaaaagggaaagtaactgtaaacgcgtctttt

SEQ ID NO: 48119 - DNA, 303 bp, Zea mays
  Clone ID: MRT4577_143892C.1
ccgggcccccccttccttgatatgagcagtgaagttatctctatgtctccgaagaagaaaaatcgaagttttgtagcagggaatgtaggcatggtagacaaggtttattaatttttggcatgtcaaattttgattccatgataccacaggattcattatccgtcgggagaagagtcattattgtcatcatcatctatatgaattcttttgtttgtcgtgcaaaaaaaaaaaaaaaatagaataatattaaaaagggggaaaaaaaaaaaaggggggcccccccaatatagggctctccccccc

SEQ ID NO: 48120 - DNA, 1114 bp, Zea mays
  Clone ID: MRT4577_143893C.1
aaacacgtgcacagtgcacgcactccgcataccggcagtgccactgtgccagccagccagccgctctgcttgtcctccagacagtccaggattgaccgccagcccctgcactgcccacacgcccgccctgattcacccaccccccaatcgcctccgaatctctctgcctcattctctctccaccggcgagtccgaccgcactgcccctctccgtgcggagatctctcgcgtgctggcaggcgcgtcctggtgactgggacacgggagaagagaccttggtgggtggcagcggcaggccatggaggcgctgctggtgacggtgcttcttctcctcctctcctctaccctcgccgcagcacaatggtgcgtgtgcaggcaggacgcgtcgcaggccgcgctgcagaagaccatcgactacgcgtgcggctccggggcggactgcaactccatccatgagagcggggcgtgctacaaccccaacaccgtcccggcgcactgctcctgggccgccaacagctactaccagaacaacaaggccaagggcgccacctgcgacttcgccggcaccgccaccctcaccaccagcgacccgagctcttcgggctgctcttaccccaccaccagtgcaagcgccgcgggaaccgtgaccccgaccaccggcggcacaatgggaggagcgggaggcccagggaccttgacgcccgccgggacaggcgcaggcacagccggcactaccggcatggggactgcaggcactacgggtaccgggttcggcggcctaggaccagcaggcatggacacagcggcggcggcggcggggggcttgctcctcctcccagaggctgggctgtgcgctgccctcgtcgcgctcctcctctccgccatcgtgctcgcgtgacgccttcacatgacctcggaaacaacaacctactgcctgcatgctagtagtagaaaagcgctgcgtggaaccaacgaacgatcatgcatgccgtgtagcattgttaagcttcaaggaatcgggttctgtacagggtaattaattctggctatcggtgtagcactggagcctcgcctaatatctaataataggaagaagaagaaaaaacaccaactt

SEQ ID NO: 48121 - DNA, 215 bp, Zea mays
  Clone ID: MRT4577_143894C.1
gagctcactagttggcggccgcccttacctgttcaagttgagggtcgcttctatgccttgtcactaacatgccttcagtcgaggtcaaggtccatgtgggcggcgcctgcgggtggaggccgattcagctactccaccatacaccagagatccgtcaggtgtggtctgacaccgtgtacggggaaaacaagctgattccctccggcatcgagcgg

SEQ ID NO: 48122 - DNA, 161 bp, Zea mays
  Clone ID: MRT4577_143895C.1
ttctcttctgaagttgcttctactgtatgggttgtctcaaccttctggggtcggaggtaaacagaccattgcctacatggagaaaaggactaatgctctaatggatggatggcaatggtgtacattgaattatctgtgaacttacctgagtttctttttca

SEQ ID NO: 48123 - DNA, 384 bp, Zea mays
  Clone ID: MRT4577_143896C.1
gaggtattttgcacatctttttgagtttgaggagccaagtagctattttgaagttgaggctccatttaacaagcttcttctggagataaggtggcttgagaccttggattatcttgttaggagcctatccctgcatggaaaataaggtggaatccttttcgaataaagaggaaagttatctttccacctcatccatgtgtcctaccctcaattttttttgcttttgtttgctttttcaaataaatctggtgccagcaatcactaatcagttccctctatgtgctaaacttgatagtctttagttatgcactcataagtgttaatgacacacaaatcatgtgaattttgtaatcaaaccaagtgctagttagcaagccatacagt

SEQ ID NO: 48124 - DNA, 498 bp, Zea mays
  Clone ID: MRT4577_143897C.1
ggccgcttttttttttttttttttcttttttttttttttttttttttttttttttttgcatttaatatcgtccccgcatatttattgcttcacaaacattttatcttttcagatgcaaaccgaaagaaggggtcccaccagagagggcaccccgcatggcagagctgcggctgggggtacatgtagaaggtacccaaacgaaagagattaattaaaccaaaaaaataaaaattaccgattcaaagaaaaacattcgcccagaagaaaagaagaaccccattaaaagaccctgcccagataagacaccgctcccaatctgacgcggctaggatgcctcagggtgcaagcacgatctcgcgatcgcaagctcgcacaacctcgacgcaaagagcatgccctcgctcagggcatggcaccctcccggggtggtcccggccacgggggtgggcctgcaggcggacttcatcgtggggcgagaccatttttggaccgaaataa

SEQ ID NO: 48125 - DNA, 747 bp, Zea mays
  Clone ID: MRT4577_143898C.1
catgcccgtcgttgctggcctcctagtttacgtcggctgcccctgctagctcgcccaaatctcggccatggcgcacggccatcccgtcccggcctgcttgctcctagcaccgttcgttgatgctggccatgtctcccaactccgtccttggatctgcttgctcctaggcaccaccgcgccgccgctctagatgttgtgctcggccccctgacgcccaccccaacgagtagcaacagcgccaccagctggtcctccccacgccgctggggactgctgcgtctttcctatcgtagtgcagatcgtcgtctccctgctctccctgctcgtcttgcgccgtcgttcaccactgttccggccttgtgtcatcgccgtcgtcttaacttgacagcaagcgccgctgctcagttcgcctctgtccgacaccgaactgggctgcccgtcctcaagcttgccgatgtcattttccctggtgcttgctctcgccctaggccatggagcagcagcagccacgacactccttcgtgtcgcactctcgacatgttcgatgaaataccgcagcaagctccatcttgatctatccagtctcggtcacgtcgtcgtttaccccgataaggaatagttgttctccttatgttattcatcaccagtacctgtaacccgcattaatttattagatgctatttatgtgtatgttattgtgtgcctttgaggagagtaatctctggaggtttgattgatatgaaagcg

SEQ ID NO: 48126 - DNA, 418 bp, Zea mays
  Clone ID: MRT4577_143899C.1
cttctctctcactccttaggtaaaacgtttttgttagaatgggatttttttccccattttaaactgctgcagtaagtcattcagtttaaaaatggtgagtgcttaatctgcttgcaggggggcctagcaaacaacatttactacaaggaacagaagatgccccccaccggaaccaaattcttcccccctcccagttccccatcaagaaaaaccgaaaggattgcacctacctgagccctccaggaaagaagagccctgaaaccatgcaaaatacccctgcctgcaaggtaaccaagatagcaaacgtagttaatccacttaaccaaaaaagaggaggaacaacaaggaaaacataggaaacacccccaccgagcgaggcttctctgagcacaccaacatgtttatctcgttcattgac

SEQ ID NO: 48127 - DNA, 525 bp, Zea mays
  Clone ID: MRT4577_14389C.1
gtaagcaaaccccgccgtacctttccaatttctacgcccatcgcccgtggttcggcctaatcctcctctctttactttgttcgtgagtgccgccgacgacgacggaggaaaagctaggggagctagcgagtgagcccagacatcctcctctaagattagcttttagctagcactagctagctcgatcatctgtcggtcggtccggcgcgcgcgagaccatggcgtccatcatcgtcatcgccgtcgtgctcgtcctggacgtcctcgccttcgtgctcgccatcggcgccgagcggcgccggagctacgccaacgtgaccgccgccgactcgtccgggcgtgcctactgcgtgtacagctccgacgcgtccacggcgtacggcgtgagcgcgctgctgctgctgctcgccgcgcaggccgtggccatggccgccacccgctgcttctgctgcggccgcggtctctccccgggccgctggcgggcatggtctggcacccgcttcctcatctgctggatgacgttcc

SEQ ID NO: 48128 - DNA, 293 bp, Zea mays
  Clone ID: MRT4577_1438C.1
aaacgggggcccccccccatttattttaatattacctcccccggcaaaaattacaaagccccatagggcccatccgggggacaaacaaactaaaggggggggggaaaaccaaagattttccaaaaggcaacaaaacccggaagatttttaggggcttgtttaggggcttgtttaggggcaaaaaaactttaccccctccaaatttattgcccccaaaaaagattaaggggggttgggggccccccccccgccttttttttagaccttggccagcggtttatccatagtttact

SEQ ID NO: 48129 - DNA, 804 bp, Zea mays
  unsure (1)..(804): unsure at all n locations
  Clone ID: MRT4577_143900C.1
cccacgcgtccgctcatcttctgctcgctggtgtcccctctctctacccatggcttcggcggcggcggcaactcaggtggggacttacttcctgcggaactactacaacctgctgcaacaaacccccgatgtcgtccaccagttctacagcgaagccagcaccatggtccgcgtcgacgacctcaccggcaacaatactgcaacaaggagctgtcgttcagccattgccaagccgagagcaggtgatggcgctggcaccttgctcgaattgatggtgatgcacgacctgccttggtgtgaggagtatttttgtagtttttatttgtaggatgagtgttcttcctggaaaaaaagggaccaatgtctacgctacgcagttcctctgattgtttttacatctaatttgttgacttgctacttatagagttcagtgattgttttagtgaaacaaattctaatttgcttacttacatggctgctcttagccccaacaattgttttggtgacttcaaagcagaaagcttaatggaattagataagctctatccagatgattttagttcagatgaattgaatgatcttgcttatgatcttcctatcagtacttcaatatctatgatttatttgaaagaatagtattattgttaattatcaaattatttcatatcagtacttcaatatatgacacaatgacacattnaaattttattttcagattacttcatctttatctttntacactgccttatattgatgtctatgctatttagctattgactattggctattttatattactatgaa

SEQ ID NO: 48130 - DNA, 643 bp, Zea mays
  Clone ID: MRT4577_143901C.1
ctctcgtgctctgttctcatcttctgctcgctggtgtcccctctctctcacccatggcttcggcggcggcggcaactcaggtggggacttacttcctgcggaactactacaacctgctgcaacaaacccccgatgtcgtccaccagttctacagcgaagccagcaccatggtccgcgtggacgacctcaccggcaacaatactgcaacaaggagctgtcgttcagccattgccaagccgagagcaggtaacaagcttctacttcgcccaagtcccaagacgtgtatggtaatgggtactgcggaaaagagtgttctttgttttttctatcaatttattaaagtacttgtatgatggattgaaggtgatggcgctggcaccttgctcgaattgatggtgatgcacgacctgccttggtgtgaggagtatttttgtagtttttatttgtaggatgagtgttcttcctggaaaaaaagggaccaatgtctacgctacgcagttcctctgattgtttttacatctaatttgttgacttgctacttatagagttcagtgattgttttagtgaaacaaattctaatttgcttacttacatggctgctcttagccccaacaattgttttggtgacttcaaagcagaaagc

SEQ ID NO: 48131 - DNA, 145 bp, Zea mays
  Clone ID: MRT4577_143902C.1
cagtgacacgcacggctacttttgcggacttccatacgtctgacccgcgggggccacttccaaccttgccgtgacccgaatggccccagatggaaacttggcagcaacttccagcttgcctgaaaggctgatagtgcatatacgc

SEQ ID NO: 48132 - DNA, 816 bp, Zea mays
  Clone ID: MRT4577_143903C.1
atcttcctccctactcgccgacgccttctgcgttgctgtcgcctacctctccaatttggcctctctcccttgcaaggttaagcttcatcttcagccatggccaaggacgaacgtcccacatcaacattgtggccattggaacacgtcgactctggccagtccaccaccacgcggccacctgatctacaagcttggacgaattgacaagtgcggactagagaggaccgataatgacgctgctgagatgaacaagcgcgccttccagcatgcttgggtgctcgacaagctccaggatgaacgtgagaggggaatcgccattgatattgctctgtggaaatttgagaccaccaagtattactgcaccggcattgatgcccctggacaccgagacttcatcaagaacatgatctctgacacctcccagggtgactgcgctgtccttatcattgactccaccactggtggatatgaggctggtatctccaaagatggacagacccgggagcatgctctccttgcggtcactcttggagtgaaacagatgactcgctgctgcaacaagatggatgcaacgactcccagatactccaaggcgcgttatgatgagattgtgaaggaagtctcatcctacctcaagataggtgggcacaaccctgatgagattgccttcgtccccatctcgtgtgtgtgagggcgactacatgattgagagtgcacccaagcttgactggctacaaggcccgaccctgcttgaggctcttggacagatcaccgagcccagagaccttctgacaagcccctgcgtctccccctgca

SEQ ID NO: 48133 - DNA, 332 bp, Zea mays
  unsure (1)..(332): unsure at all n locations
  Clone ID: MRT4577_143904C.1
aggacaggaccggggaagctgggttgacccacgcgncggactaaacccacgaacaaaaaaaacaaaaaatggtggggaaaaggagaaaaaccgggcgacacacaccacgaggaganaaaaggaaaccagcaagaagaaaagggagacgagaggaaacaagaggagcagaagaacgaacgctagagccaggacacagggagggagagagaggaaaagaagtggaccgggaaaagggagatcaccgcggagaaaagcaacaaccagaaagcgcaacagaaccaggaagcaaacaaggagagcacgaacagcgcggggaaacaacggaaagacga

SEQ ID NO: 48134 - DNA, 612 bp, Zea mays
  Clone ID: MRT4577_143905C.1
atcctttaaatattaatagagctcctcagagatctggggggggggggggggggggggggcgctctccggggcctacaccgaacgctcctttcttctacccccgaagtcttacccacaactggcactagtacccttgcctacagcttcgtagtagaggcgggacttcccctttagaaccttaacagcatcggcggcggaccttctaccacgaaacgaacttcccaccctttctacaacataagtcagtacacacacaacaacaacaaccatggaaagagaccaatcataccatacccagcagccactgaacgactcagcagcacctatcacaaattcgaccgtcgttccacctcaaggtcaccttgcttgcccggggccagaggtcctaccctctactaccatccataaataataagctacccctactcagaggggggggataagaatttccttccccccccctccctccctcccgttacctttcccctcacatcacagaatctgtagaaagagatagacgatcgatcgacttgagtgttaataatgttatacgacaggtagttctttagagaaagaacattaactattacattgtagataacgttgtattca

SEQ ID NO: 48135 - DNA, 516 bp, Zea mays
  Clone ID: MRT4577_143906C.1
ggcggcagttggtagcgcgagtggctcctcttctggtcgccgtgagcaaggagagcagcccgcctccgcctggcgatggtgctgctcggaagaacgacgtgcaccgtgggtacgcggcgcgtcctgcgggtcaagacggtggacgcgcagcggggaagacgaggaagggagctagctacagagcccgcggttctcgccatcgtgccgtcgtgaagaggctaagcgctatctcggaggacggcgagtgatccgtatatcgggctatcggctcagctgtccttatcctcgctgctgcagggtcggcgcgataaacgatgaatcaagttttgatcaagggccggataacacgatgattcgatgaatcgctgcagaatcaactcccggtttctaagccgtgagtgcgaattcggtaaaggcctacctagtcgaatcatatagctggaactaaaagagattccaattgctgattaaacatggtgagtttgtgatccaaattctgaagaggcgaccaagttg

SEQ ID NO: 48136 - DNA, 322 bp, Zea mays
  Clone ID: MRT4577_143907C.1
tcgaagacaaaaaactaagatgcaacgagaccttacatacaaatgtgacaagagagcttattgatccctatagatcatgatctaactgaaggcataatcttgtgtggctaagactgctcgtatcattctacaaaagctggtttatgcagaatgtaaatgctaaacttaatacatggtggaatcataatgtattgaatcagaaacctccctttgaacgcttacacactgcacctaattgtatattagttgttgcgctgatgcgatcatgccttaggtagtctttgcttgacttaataatctgcatagggataagccaacaaat

SEQ ID NO: 48137 - DNA, 476 bp, Zea mays
  unsure (1)..(476): unsure at all n locations
  Clone ID: MRT4577_143908C.1
atcctcttaaataattcacccaanacaaaaaacaaccccggggtggttttttttgaggattttccccctttttttacctaaccagatttaattttttttttgaaagggcccaacaaaaaccttaaaaaaaacaaaccaaccccaaccttaagaggccccaacccgggaagaaccaaagggcaaaaaaactttggaacaaagaaaaggggcccccgggaaaaaaaaagggggccgggccaagacccttgggcccaaatggcccaagagaggggcaaaaacattggaactaacccccccctcttcttattaaccaaggggatgggggcaccaaaaaaaccccccgccaaatgggggcagggccccaaagtaaaaaaaaaccctgtcttttaacaaccgaacccattcccccgggtgccttccaaccaaccgggtgtattaacactggaaaaggccccttttcccccgcggccgcccca

SEQ ID NO: 48138 - DNA, 228 bp, Zea mays
  Clone ID: MRT4577_143909C.1
gggggggggggggggggggggggttcgggggggaggggggggtggggggggagttgggggcggcgggggagctggttcctttcgcggccaagccggaggcgcctaaagagggagcgaaccaaaataaagggggaggcgctcattggagggttggaagtcaaaaaagctggggggccgggagggttaatgtattagtcgaagaaccgggggggcgggtttagttattgg

SEQ ID NO: 48139 - DNA, 587 bp, Zea mays
  Clone ID: MRT4577_14390C.1
accggtccgggattgacggatgcgcccacgcgtgcgtcttgcagtccttccaccgcctctcccccaatccctcccaccaccaccaccattctttccgttctgttgtactaccctgtacaatctgcttctgctccgtgcaggctctagttgagaggcttgtgtgtgttatgagagttgtgctgcttctttggttgttaacgtgcctcacctgatctagattagtagactgttagttctactgctgccttgctgttacatatttacagtgttcgcttctgtgggggttacaattgcttactcgcttactccgggtttggatgctaaatgggcttcaatgtacaaagccattatttcaattattgcactggtaccatataaactaaccacctgtcagttgcacttctcttattttcactgtcaagatcactccttgtggagtgattgagctataatatatataaaaaaaagcatacaggatattggtgtactcaagatcaagacccccaaccgcagcagtcctgggactcattaccatagatgatagcttgttggcatttgaaaggctttaattactcccttctccattt

SEQ ID NO: 48140 - DNA, 215 bp, Zea mays
  Clone ID: MRT4577_143910C.1
accacacattcgcccacgcatgcgctgtctcatccgtgttttctgagaagctttacaccaacggaggcgggggcattgtactaggcaaaaaagttgccctctacaacaattcaccctgtgatcatgattctttatcatcgcactcacaattctcttcttgataacacgccccctgtcattgaattctactatgcacacaacataatggcaacttc

SEQ ID NO: 48141 - DNA, 357 bp, Zea mays
  Clone ID: MRT4577_143911C.1
agaacgcctccgtagagttcttcgatatcactggtctctgcaacgactcatccaactacggggagatcgataccgacgagcagatcggacaccgcgcactatttctgcaggaccgcacgcatatgatcatgtaccagatccttgtgtggacgctcatacggctggagctaggcatgaactggactggctacatgtaggatcaatacgccatgggcatcgagctgatagagtacgtgcaccgtgccgagcttacgatagctggtgggcccattgagtggctggaccacatcgagatctacccggtggcctagcagtaggcagggatgtgcgtcacggcaaccgaatacatgtacttca

SEQ ID NO: 48142 - DNA, 623 bp, Zea mays
  Clone ID: MRT4577_143912C.1
cgggacaccccgaaaattgcgccgcgtgtctcatcaccgctccagctctttgccccgaccccagatccggcaccggccgttgatggaaccctgacctaactccagtagtctaaagcggtgggagcgcgccgcgcagatcgaggaagaggaagggctgaatggatgctcctccggtgagggcccaggaccgctacgactacgttatgaaggtcgttctcattggggagtatgcgggttgcaatagctgccttctgagggggggtatatgagaggtgctctagtagaagcttaattaccacattcggactcgacttatgcataagactattagaattgaatggtacgcgtataaagatacagatgtgagagacagcatgcaaacaacgcttgcgtactattaccactagatcataccgtgctggtatgggtatatgactagcattatgagggcagcgatcacatgttaataagaaccattcgaaagtggattaccaacattgagcaacttgcgctctgataatgtaaacacgattatgcctgttataaggctgatgttgacgatagctagaggtctgcagcctactacgaaaggacaaggagtctgatgatgagtatgggatcaa

SEQ ID NO: 48143 - DNA, 489 bp, Zea mays
  unsure (1)..(489): unsure at all n locations
  Clone ID: MRT4577_143913C.1
gccggggcgtgcagagcgagacgcgtcgcctcctccctncccccaccccgccgccgccctcgcgtccgtccgtccgtccgttattagggttcgggcgccgacatggcagatcctctagcagctcgacaaccatgacgatcatacctgggcttccaatactctgagaaacgccacacggagtaacgaggaacggctgaagagcgccatcccncagagtgggaggaggagggccttgaccaggccggatcccaccgtcgcccgctatactgaggggcatacatcagctacggcgcactgaaacgaaacaacgtgccatgctcccgccatcaagccatctactacaactaagcaccggtcggacaggacaacaccctaccaccgcgactgctcccgaatcacaatctgcacgtatgtgatgaggaggaagaaccccactactacccagaaacgttctgggtactaaagcaactgatccttaggccgacaata

SEQ ID NO: 48144 - DNA, 276 bp, Zea mays
  Clone ID: MRT4577_143914C.1
ttttgagcattcagaaacacaccatgcgaagcgcgctatcaacaacctagacaacactggctaccaagattttatacatccttgcgcttcttgcactgtttgcgagcgcaacagatgcgttcattattccacaatgctcactcgctcctaggtccattattccacagttgctcccaccacatacttcgatggcctgcgaacacccaactgcgctagcctataggctgccacaagcgattgcggcgagcgtgttaccacaaccaattgcccaattgc

SEQ ID NO: 48145 - DNA, 706 bp, Zea mays
  Clone ID: MRT4577_143915C.1
caaatacaaaaaactcaccgcacccaacccagagcgagctagctacacttgatcctcctccatacagctagctgaatcgagctagcaatggcgagggcatcgtcgtcgtcgctgtccatgggtgtggtcgccgcgttggccgtgctggtggtcctgtgcgccgccgtgcgggccgccgctcaggggaagacggggcctcccgctcctaagctatcgtccaacttcaagacgatccatccggggcggttcgggaagagggcccaggtgctcacatgcgacgacgaaaaggacaagaagaacccctgcgtcgccacctgcgacaaggtccgctgccccaacgagtgcatcgtcatgtgcccaggctgcaagacctactgcatgtgcgacttctaccccggcgtgtcctgcggtgacccgcgcttcaccggcgccgacggcaacaacttctacttccatggcaagaaggaccagagcttctgcgtcgtctccgacgccgacctccacatcaacgcccacttcatcggcaagcgtaaccccaccatgagccgagacttcacctggatccaggccctcggcatccgctttgccgaccaccgcctttacatggccgcccagaagaccgtcgagtgggacagcgatgtcgaccgccttgagctggcctttgatggtatgcccatcgacattcccaccgaggtcgatgctgagt

SEQ ID NO: 48146 - DNA, 328 bp, Zea mays
  Clone ID: MRT4577_143916C.1
ctcacacgctttacccttcatgagtttaaggctgcggacattccaaaaaggctggcttcaaccattggtattcatacctatcaccgccacatgaacaaatatctttattgtcttcattctcaatttcatagactttagacatacaattccatatcttttattcttcccaaatcttgctatctaagtcaattctaataactctactttcgagtatacttaccactattacccatgttcaatattgactacatgccatttactctctgttataatcgctttttataggtttttatagtttacttatttatattaaagcattttcttatct

SEQ ID NO: 48147 - DNA, 436 bp, Zea mays
  Clone ID: MRT4577_143917C.1
tcctgttcgacagtcagccgcatcttcttttgcgtcgccagccgagccacatcgctcagacaccatggggaaggtgaaggtcggagtcaacggatttggtcgtattgggcgcctggtcaccagggctgcttttaactctggtaaagtggatattgttgccatcaatgaccccttcattgacctcaactacatggtttacatgttccaatatgattccacccatggcaaattccatggcaccgtcaaggctgagaacgggaagcttgtcatcaatggaaatcccatcaccatcttccaggagcgagatccctccaaaatcaagtggggcgatgctggcgctgagtacgtcgtggagtccactggcgtcttcaccaccatggagaaggctggggctcatttgcaggggggagccaaaagggtcatcatctctgccccc

SEQ ID NO: 48148 - DNA, 543 bp, Zea mays
  Clone ID: MRT4577_143918C.1
ggttggggtttttttcataaaaaaaaaaaatttttttaaaaaaaaatcccttttttttaccccaaaggacacaaaattgaaaaaccccccttgaccttttggaaaaaataaaatcccgtggagttttttttataatcccccataaccgccgggggaaacatcgttttggtcctctttttaatcagctttgcgggggaatccaaattcttcccttttttcccccggaaagattcctaaccattggtcatttaggttgcacccccttcctccaaaaattgggggtttttgaaccatgaacccaaatcttaaggggggggttataaaaaaaaaaagggttgtttttttaacccctttccttgaagggttttctcccacaaaacccaaaaaattccggttgataggacccccacaattaattcccaccccttttcttggttaaaaaaaaaactttggtcaacccccctccttttttttccccctttaaaaaggaaaacccttttttttccccaccccccaaaacaaacacaacccccaagttatttt

SEQ ID NO: 48149 - DNA, 455 bp, Zea mays
  unsure (1)..(455): unsure at all n locations
  Clone ID: MRT4577_143919C.1
ggacctagggngcttttttttttttttttttgaattggaacaatgcgttattagccacggtgctggagagtatgcctccagaacctctcgtggcggaaaaaaacagaaaattttcggttcgaaaccacacaccagttttttatgggctgcacccacatcatgaggaccccgatttctaatctggagcaagaatcttcttgctggacttcctcacgacgccgaactgattaaaccacttggcatactccttaatggccaagccgaacttgttggtcctgcccaaagactcgatgccaaattcaccagagatcctcaagaccgacttgggtttaacctcctgatgaagaaccacggcaacgcttccattgctgttaacccttgccttcccgggtgtctgagaatcacctgtgtacagtccaccaactgagagggagccctgatttgcctgaaagcct

SEQ ID NO: 48150 - DNA, 386 bp, Zea mays
  unsure (1)..(386): unsure at all n locations
  Clone ID: MRT4577_14391C.1
cccacgcgcccgaggcgggaccacccgcngaananaagcaganaaanaaacacaggagaggaaacccacgaggacggcccgagaaacggcgagcgaaccgggagcagaccagccggagaancgggcggccncgccgcccgaaaaggagnccggagaggcggccccagcgacggaccgggcccaaggaccccggaaagggacgccagggagggngagagccccgcccggcccagacccaggcgcaccacgaggcgccggcaacgaggcagggcggccgggaacgcagcccaaaccgggcgcgaaaccccgnccaaggcnaaaaacaggcgagagacacgaagcgaacaagnaccgcgagggaaagaagaaaaggacgnngaaaagag

SEQ ID NO: 48151 - DNA, 448 bp, Zea mays
  Clone ID: MRT4577_143920C.1
tgggtccctcgaggccggccgggccgggtactcacccgaccattagatagcttgttttacctctactcaggtgcggatgctgaaataaggtaaccgtaagacaccggcatggattcccacggaggacaacatccgcctgggcccctttctgttctcggagaggcaggccatcggcccgttttacttcgacacggacgacaaggactactaggagcccccgccgtaggcggtcttcaagtccggcgacatcacgctcggattcttctaccgcagcgggatcatgaaggtcgacgcaaccttcaacttcctctacgtctccatcctcaacggaatgggcgtctccgagtccactcttcattgtgcctccgtcggaatccagggcatcgccagtgccaatccctctttgatcttcgacctcatctactgctacgccggcgtctacgtctgc

SEQ ID NO: 48152 - DNA, 543 bp, Zea mays
  Clone ID: MRT4577_143921C.1
tacacactcacgggggtaccatcccagtcctgcctggcttcctcctcctcccgcggcgcatcgggctcccatgaagacgccgccgacgacgatggcgaaggccgcggccaccgccaccgcatggggggatcacccccggctcgactgcgcgagcgcgacgacgcggcgccggacaagctctgtcacctgccaaaggtggagcccgtggtggacttgacggtgctgatgccggggcagcggtacccgacgttcctggcgcagccggcgccgctagcgccgtgccccagggaaggcgtgctctggccttcccatgaccgtcgccgctcgtttgtgccaccgtgaactttttttttcttccccttcctcacatcgttctgtacagaggttattgtaaaaggcagcgccctggcttattcgaggctgatatatatatggctgttgtcacatcacatgtgatgtggaacactgtttcggtatggtaggatagatcttcacatgcgtacggccggtacgtagtttcagcaacttgctgattgggctggg

SEQ ID NO: 48153 - DNA, 307 bp, Zea mays
  Clone ID: MRT4577_143922C.1
gtacgggggcaaaaccggcccccccccgattcgggggcggcacccgccccggaatagggggcccaattcccgagccggcacgggggggcagacagaaaaaaaaggcaagccggcccaaaaaaaggtttcaaaccccccgagggggggtttgggctcaaaaaaccgccaacccttcaaaaaggtcaggcgaaggtaggaaacaggggcccggggggcacaaaacataacgcggggtccgccccgcccaagggggccctagaaaatcccggagaacgaatttcgtgcgggaaaaaacccacccataaaa

SEQ ID NO: 48154 - DNA, 331 bp, Zea mays
  Clone ID: MRT4577_143923C.1
aattaccggctcgacgcacgcgtccgcaggcacacagcaacagagactcgaactttgaaggatcctccataacaagcagccttggatccacctaaatgggtgctcatgcaaactcaatacagccaggcttctttcctattccaaccacttatattaaccattacttgatctctgatgctacaactggaatagcgtatggacttgcccacatagaatatgcctatacacctgccactatcacctgcaaatttaaccattcaagatccacagatatacacaatgttggtcctcatgaatatcagaatggtccttcaacgatctgtcgacgacc

SEQ ID NO: 48155 - DNA, 808 bp, Zea mays
  unsure (1)..(808): unsure at all n locations
  Clone ID: MRT4577_143924C.1
ccggccgggggagttgtacaaagtcagcattgggggcgcaagcataggcaacacaggacggggtggggcgcgaaaaagcatttgcgattgcgagtcctccaaaccatggcgctcgccctggcctctccaatggcgtctctctccttccactccgggaggatctcggcggcgtctatcggaggcgtcggccgcactcgcagggcggccacggtgggcgtatccgcctcgccgttcctccggagctccttcgtctcgtcctcctccacgtcgtccgcctccgcctcccccgcctcgctcgcggcggctgtctcggcgtctctggcatttacgtcctcctcctcgtttgcgggttcatctttgggaatcgagttcagctacagtataatgacaacgcggagatcccgtggtatgcagattagggctggaaaggctgccctctgcatgaccaagaggtcaaggtctaggaagtcacttgcccgtacacatggtttccgcaggcggatgcggactacttctggaaggaaggtactgaagcgcaggcgcgccaaaggcaggaaggttctctgcacaaggacaaactcaaacagtgggaagaaaagaatgttctaattacactgcaatttgatgtgctcgcaactataagtgtaatgtctacttgcaatcttctaagccgccgtctatgtgtaacaatcatgtagcatcctattcctgtttaattggttaaaaatatctggatcaccttctgcttcaaggttntatttggtgtatgaatgatatttccttaagaaaaaaaaaaaaaaaagcggnc

SEQ ID NO: 48156 - DNA, 268 bp, Zea mays
  Clone ID: MRT4577_143925C.1
ccacgcggcgacgatttcagccacgcacgtatcactttgtcttagcttaatcagaataacaccatttactggtcggggcagcccaggctctccttttcagtcgacatctgctgggccgtcccgtgcaatcagtcgtctttatgtacgtatctaggaatgcgcccttcttctttagggccatcttcaacccttcatccaagcatggtgccgacaggcagttgtggttttcgtccaagcagttcctctcctaccttgatgtcacgctttc

SEQ ID NO: 48157 - DNA, 855 bp, Zea mays
  unsure (1)..(855): unsure at all n locations
  Clone ID: MRT4577_143926C.1
ttgaaggagatcctacttcattacagccgacggtatnctctctcaagtgtggcttcttttttttttttttttcaggcccactagggaagagtaaatattcataagaaaatatcattcatacaccaaataaaaccttggaagcagaaggtgatccagatatttttaaccaattaaacaggaataggatgctacatgattgttacacatagatggcggcttagaagattgcaagtagacattacacttacagttgcgagcacatcaaattgcagtgtaattagaacattcttttcttcccactgtttgagtttgtccttgtgcaaagaaccttcctgcctttggcgcgcctgcgcttcagtaccttccttccagaagtagtccgcatccgcctgcggaaaccatgtgtacgggcaagtgacttcctagaccttgacctcttggtcatgcagagggcagcctttccagccctaatctgcataccacgggatctccgtgttgtcattatactgtagctgaactcgattcccaaagatgaacccgcaaacgcggaggaggacgtaaatgccagagacgccgagacagccgccgcgagcgaagcgggggaggcggaggcggaggcggacgacgtggaggaggacgagacgaaggagctccggaggaacggcgaggcggatacgcccaccggggccgccctgcgagtgcggccgacgcctccgatagacgccgccgagatcctcccggagtggaaggagagagacgccattggagaggccagggcgagcgccatggtttggaggactcgcaatcgcaattgctgcggtctcgcccggccccgccggcctcgaggacccaatg

SEQ ID NO: 48158 - DNA, 530 bp, Zea mays
  unsure (1)..(530): unsure at all n locations
  Clone ID: MRT4577_143927C.1
ggggggggggtttttttttttttttttttttttttttttttttgagaacaagtccccaacaccattgcatcaactatgagttacaagacacaaggcatcgttgtcatctattttcagcaaacaaaagcagtgcgaaaacaacaaactggggctcgatngggattttggtaatttgacagatatctccaacagactaagctgctgctgcttcttcctctccagagatggatccatcgtccctgcatgcatgcgatgtgagcagtgtctgactcaggagtcaggaccagaacatcactcgaggaacggcggtgatgtacatgtacatgtacgtacgtccctacaaaacacgcatccgatcctgatgcgacatgcatgcgatgcgacttgtgctcaccgtcaccgtcaccggagaagggagagactcaccgtcaccgtcaccggagaagggagagaaaaagaaccagggctctgttccaccgcttcggcgaggggagggaggagatgggcaccacgctgatagctcgctgctg

SEQ ID NO: 48159 - DNA, 277 bp, Zea mays
  unsure (1)..(277): unsure at all n locations
  Clone ID: MRT4577_143928C.1
tttttttttttttttttttttttnnnnnnnnnnnnnnnnnnnnnnnnnnnnntcttttgaaatgcccgctttcgaaacccttgagacctctacacttttttttttcttttcaaaatgctcggcttttttttcgtctaagtaatactggatgtcgaagcataacactcactccttttgtgttttcccagggccaactcatgttttgacttaagaaccaatggactcggaaacaagggataatcgccttttccgatgacgacatgttgcagtcagtcac

SEQ ID NO: 48160 - DNA, 229 bp, Zea mays
  Clone ID: MRT4577_143929C.1
ccggaccggattccagggtcgacgagctctctctccggaggccgccccgcccttttttttttagggtataatcaggagcccgtgggtccattacggcatacacagaaaacatcgaactatctacacacgtagtcatggcccaaccatgctgaaacggtgggaggcacgccccctcgcttaaaccctgcctacatgcgaaacccttgagaccttccgccgcaccgtgaat

SEQ ID NO: 48161 - DNA, 247 bp, Zea mays
  Clone ID: MRT4577_14392C.1
atacacaaacataaaatggaagggggggggggtaccccacatggacgcagggacgccattgaggacaggaaattatcaaaaccaacaggaggcgtgaatagacagagaaaatgacgggcaaaagggggaagccggaaaaaaagggtgttgcctaccataaccgaaaaaaggagcgccgccaataaaatactgcaactgctggggctgggaagcaagaaccaaaaccgcactaaggtggggaaagggt

SEQ ID NO: 48162 - DNA, 823 bp, Zea mays
  Clone ID: MRT4577_143930C.1
cattgggtacctcgaggccggccgggatattttaaaaaaacctcgtagactatgtaaaattatactggggaaggagagcagacaccgacagcggagggaagtaccgggaaggaagaaccgtcgccgcccagcgacatgccatggcagccatcgccgctcttcgccgtcttccgccaacaacgcctcgcctcctcctgggccgccgccatcgctggccacgcgcgctgcggtcgccacgccgccgcacttaccgtcttccgccgcgttctccgagcccaccccgccgtcgctgcctccgaccagttcgcctatgccgccctgctccggtgccgcgaccgccgcctcgcgtaccagatacatgcccaggcgtgccgtcgtggcctgaccgcctccaaccccgtcctcgcttgctccctcctcatcttctatgccgactgcgaggagtggaacggcgccaccagggtgttcagcgaaatgccgtgcccagacaccgtgtcctacaccgccatgatatccgccctcctccgcgccggggactgccacggggcgctcgcgctctacccgtgcatgctcccactttgcgcacccacccagcacaccttctccaagctgctcgcgccctgcgcctccatgcgcttgcaccgccacggcagccagctccacgcgcagctcctccgctggggctgctggggcccccacctcggcctggtcctcaagaccgcgctcgtccacatgtacgccgcttgcggcgccatggtctccgcacgcgccgtgcttcacgccactcccgaaaccgacgtcgtgctctggacggcaattatca

SEQ ID NO: 48163 - DNA, 416 bp, Zea mays
  Clone ID: MRT4577_143931C.1
ctcgaggccacgcgtcacgcggttcggcgagacacaccaatcgaatttcactatcaacaacctatcaacaatgtctagcaagatgtttatacttccttgcgcttcttgcgctttttgcgagcgcatcaaatgcgtacattattccagaatgctcacttgctgctagttacattattacacagttactgctaccagttacttaaatggccttcgaacactcagctgtgcaagcctatacgctacatcaagcgattgctgcgagcgtcttacaccaaccaattgcccaattgcaacaacaatccttagtacatataacaatacagaccatcgcagcgtaacagcaacaacagttactaccatcactgatccacctagccatggtgaacactgtacgctacttgcaacagcagctgctt

SEQ ID NO: 48164 - DNA, 1341 bp, Zea mays
  Clone ID: MRT4577_143932C.1
aggccgtcgccgtcggcatggaggccgccatcacccgctccgattccatatcaccgcctaccgcgaccactgtacctaccttgcccgaggaggtgacctcgtctccgccttctccgagctgatgggccgcgaggccggctgctcccgcgggaagggtggatccatgcatttctataagaaggatgccaatttctatggcgggcacggcatcgtcggcgcgcaggtgcccctcggatgcggcctagccttcgctcagaagtacaagaaggaggagacggccacgtttgcgctctatggtgacggtgcggctaaccagggacagctctttgaggctctcaacatttcggccctctggaagctgcccgccatattggtttgcgagaacaaccattatggtatgggaacagcggaatggagggcagcgaagagtcctgcttactacaagcgtggcgactatgtgcctggattgaaggttgatggaatggatgttcttgctgtgaagcaagcatgcaaatttgcaaaagatcatgctgttgctaatggaccaattgtccttgagatggatacatacaggtaccatggccactctatgtcagatccaggaagcacttaccgcaccagggatgagatttcaggtgtcaggcaggaacgggacccaattgaaagagttagaaagttgctttttggctcacgacctggcaactgctgctgagctcaaggatatggagaaagaaatcaggaaacaagtagatgatgctattgcaaaagcaaaaggaaagttctatgcctgatacttctgagctcttcacaaatgtttataagaagggattcaacgtggagtcatttggacctgacaggaaggagttgagagctactcttccctaggttgggagcagaattggcagtcctcaatatgatatgatagccatgagaaataaacattgatgaagaaggcctcagacattgctggaattcttttgttggcaaatgaacctgtatagagatccgttgtcaggaggatctgcttatttgttttgcttccctttcccatttctacaattcagttttaactgctgctggttggcttcttattgaagctaatatcgtctgcaattgcttcggtccaaggaaatcgaagctggagattataaatttgctcacgcctctcgtctagacctgccacttttagctttagttcggtaatggtacatgcagaactgcgtcgttacacttcgactggacgattaattttatttaataaatgtggtgcatggatcggacagtgtgtaactcagaatatggtgcatgcaattgtcaaaatctaaggaggtgtttggtttc

SEQ ID NO: 48165 - DNA, 1732 bp, Zea mays
  unsure (1)..(1732): unsure at all n locations
  Clone ID: MRT4577_143933C.1
ggcaaatctattaggacatcgcggtctgcgccgtcagcctgccaagctcagcggggcggaggcaggccaaaccaacccacctccaacacaagcgaataaaagtctcgcgtctatcttcttccttccttccttcctaccaacctcccctccctctccacgcccaccgccccgcatccaccccgaaaccctagtggatcgtcgccatggccgcagccgccctccttcgccgcctccccgctgcccgggcccaggcccaggccccggcattcatggcggcgcgaccgatctccgactccacggcagcgctcaccatcgagacatctgtccctttcacctcccacctcgtcgacccaccctcgcgtgatgtcaccaccacccccgctgagctcgtcaccttcttccgcgacatgtccctcatgcgccgcatggagatcgcggccgactccctctacaaagccaagcttatccgtgggttctgccacctctacgacggccaggaggccgtcgccgtcggcatggaggccgccatcacccgctccgattccatcatcaccgcctaccgcgaccactgtacctacctcgcccgcggaggggacctcgtctccgccttctccgagctgatgggccgcgaggctgggtgctcccgcgggaagggcggatccatgcatttctacaagaaggacgccaatttctacggtgggcacggcatcgtaggcgctcaggtgcccctcggatgcggcctggccttcgctcaaaagtacaagaaggaggacacggccacgttcgcgctctatggtgacggtgcggctaaccagggacagctctttgaggctctcaacatttcggccctctggaagctgcctgccatattggtctgcgagaacaaccattatgggatgggaacagcggagtggagggcagcaaagagccctgcctactacaagcgtggcgactatgtgcctggattgaaggttgatggaatggatgttcttgctgtgaagcaagcgtgcaaatttgcaaaagatcatgctgtcgcaaatggcccaattgtccttgagatggatacctacagataccatggccactctatgtcagatccaggaagcacttaccgcaccagggatgagatttcaggtgtcaggcaggaacgggatccaattgaaagggttagaaagttgcttttgactcatgacctggcaaatgctgctgagctcaagaatatggagaaagaaatcaggaaacaagtagatgacgctattgctaaagcaaaggaaagttctatgcctgatacttctgaactcttcacaaatgtttataagaagggcttcggcgtggagtcatttgggccagacaggaaggagatgagagcttctcttccgtaggttggcagcatgatgaggcagtcctcattacatggtatgatagccaggaaaaataatttttgatgaaggcctcaggcattattggaatattttatcgggaaatgaacctgtatagagatgcgttgtctggaggatcagcttcgttgtttcgcccttttttcatttctacaattcagttttaactgctgctggctggcttcttattgaagctaatatcaccatccaagaaaaccgaagctagaggattataaatttgatcacacgtatcgtctagcactgcacggtgtttgcttgatcagtttctaactagcatggtacatgtaggacagtgcgtcattacacttncacct

SEQ ID NO: 48166 - DNA, 2125 bp, Zea mays
  Clone ID: MRT4577_143934C.1
ccggccgggccgggaatacgcgaataaaaatctcgcgtctttcttcctccattcctcctctccctctccctctccacggcccacgcccacgcccaccgccccatccaccccgaaaccctagcggatcgtcgccatggccgcggccgcgctccttcgccgcatccccgccgcgcgggccccggccacggccttcatggcggcgcgtccggtctccgattccacggcggcgctcaccatcgagacatctgtccctttcacctcccacctcgtcgacccgccctcgcgcgatgtcaccaccacccccgccgagctcgtcaccttcttccgcgacatgtccctcatgcgccgcatggagatcgccgccgactccctctataaggccaagctcatccgcgggttctgccacctctacgacggccaggaggccgtcgccgtcggcatggaggccgccatcacccgctccgattccatcatcaccgcctaccgcgaccactgtacctaccttgcccgaggaggtgacctcgtctccgccttctccgagctgatgggccgcgagggcggctgctcccgcgggaagggtggatccatgcatttctataagaaggatgccaatttctatggcgggcacggcatcgtcggcgcgcaggtgcccctcggatgcggcctcgccttcgctcagaagtacaagaaggaggagacggccacgtttgcgctctatggtgacggtgcggctaaccagggacagctctttgaggctctcaacatttcggccctctggaagctgcccgccatattggtttgcgagaacaaccattatggtatgggaacagcggaatggagggcagcgaagagtcctgcttactacaagcgtggcgactatgtgcctggattgaaggttgatggaatggatgttcttgctgtgaagcaagcgtgcaaatttgcaaaagatcatgctgttgcaaatggcccaattgtccttgagatggatacctacaggtaccatggccactctatgtcagatccaggaagcacttaccgcaccagggatgagatttcaggtgtcaggcaggaacgggacccaattgaaagggttagaaagttgcttttggctcacgacttggcaactgctgctgagctcaaggatatggagaaagaaatcaggaaacaagtagatgacgccattgcaaaagcaaaggaaagttctatgcctgatacttctgagctcttcacaaaaaaaaaaaaaaaatgtttataagaagggattcaacgtggagtcatttgggcccgacaggaaggagttgagagctactcttccgtaggttgggagaatggcagtcctcaatatgatatgatatccaggagaaataaacattgatgaagaaggcctcagacattgctggaattcttttgttggcaaatgaacctatgtagagatccgttgtcaggaggatctgcttagggcttgttcggttagccttcaatccatgtggattgagtgggattggatgggtttgaatcccacgcaagtcaaacttcttcataattttttccaaacccattcaatccatgtgtattgggaataagcgaacaaggccttatttgttttgcttcccttttccatttctacaattcagctttaactgctgctggttggcttcttattgaagctaatatcgtctgcaattgcttcggtccaaggaaatcgaagcaggagattataaatttgctcacgcctctcgtctatacctgccactcttagctttagttcggtaatggtacatgtaggactgcgtcgttacacttcgactggtcgattaattttatttaataaatgtggtgcatggatcggacagtgtgtaactcagaatatggtgcatgcaattgccgtgtttggtttctagaccctaactttagtctctccattttattctattttagtctctaagagactttaggaactttgtttctaaaacaaaaaccatagtttcttattgtatgccatgatataactatgatatattttatatcagtccaatttaatatctgtttggatacatagtattttatatgtagtgtagtagaaaagaaagttgcatgcaaacaaaaaccttcttcaagactaaag

SEQ ID NO: 48167 - DNA, 1115 bp, Zea mays
  Clone ID: MRT4577_143935C.1
attgggtacctcgaggccggccgggaaaaaaaaaaagtgccgcgtgcacgcctggacgacgatgcagctccagcatggccctcggcctggagtggcaggtgctgctcgtccccgcagtagtctcccccgccgacctagcctcccgcgccgccgccgcagcagcagcagcaggaccaggacgacgacgacggcgctggcggtgctagtagccgctgcgacaagagacggggccagaaagacgacggcgtcgggcagcagggccacggcggcggacgtggtgaggcagttctacgacggggtgaaccggcgggacctggcggcggtggagccgctcatcgcggagggctgcgtgtacgaggacctggtgttcccgcgccccttcgttgggcgggagcgtgtggtcggcttcttcggcgagttcatggggaccatcagccccgacctgcagttcgtcatcgacgacatctccgccgaggactccgccgccgtcggggtcacctggcacctggagtggagggggaggccgtttcccttcagcaggggatgcagcttctaccgcttgctcggctcgggctcggactcggacgcggattcggactcggagcagcagcggctgcagattgtgtatggtcgagactgcgtggagccggccgccaagcccggggatttggcactggtaatcatcaggggagtgacatggatcctcgaacgatttccgagccttgcaagcaggctctgatgaccccaggtccccaaccgaggcaatagctacaggatacgctacgcatggctttgctctcgaaagtccagtgagatcgagctagcagacgtgtataatgttctacaattaatacattattctaagaaactggccaaacgtatgtctcgtcgtgacgaaaagaaaaataaaaatataggcccaattacttttattaaataggagtgtatagttctgcacctaagtaagagcttgttactatacaaaaactgactattagtaagatgagatgtatagtttacagtcggtctaccggctaaaccattaaccttgctctaattttatatatatgcaaacataaatgtataacaaaaaaaaaaaaaaaaaacccgcggcc

SEQ ID NO: 48168 - DNA, 873 bp, Zea mays
  Clone ID: MRT4577_143936C.1
atggaggtggtgttcaggcgacgactccagtctggtgccgagcaagaagctgcgccagtccccctccctcgtatgttgtctcgtgcccaccaggtccttagtgacactggggcagcaatcttgcgggagtgggaggcgcttgaggctgagcaccagcgcctcagtgactggcgcacccaactggaggagcgcaccaagacggcgtctcgccagttcatcttcgagcggtcccaactcgagcgggaccacaaggagtacaagagggacctccaaaaggtgtgcgctagggagctggaggcgtcccggagggaaaagaaggtggccaggagggaggaggccgtgactcagcgggaggccctcacgacagagtatcaggccaagctgagcgccctggaccagactctggaagcccaacgggcccaccaggcggcgccgggtccccaggcgatggaggccaccaggaaggcccttgaagatctccaagcggagcaccacaccggggtacagcgcattgctgcgtgggccggcgaggcaagcacaacactggtgatgttagggatgagccccattccagtgtcggagctgccaacgtcgatctccgatgcgctcctggtgctagactccgtcgctgatcgcctctggcgcctggaccagatcctcggggcccgcctagaggcagagggcggcaagctctgccgggtggtggttgaatacgtcctgacgtgcttctggagtcacgaccctgccatatccttggcgccggtgatcgctggtccagtagccgccacagaagacgccgcccgggagagtatacaagacgccgtggagctggtggccgagcgcttccagcgtgatcctgctgacgacctgtag

SEQ ID NO: 48169 - DNA, 1147 bp, Zea mays
  Clone ID: MRT4577_143937C.1
ggaccctcgaggccggccggggtccaaactagtgcgtgaattgtaaaaatcccgaagagataagactcctcgtggcaacaaaacagcagagggttggcgtgccgcgtgcacgcctagacgacgatgcagctccagcatggccctcggcctggagtggccggtgctgctcgtccccgcagtagtctcccccgccgacctagcctcccgcgccgccgccgcagcagcagcagcagcaggaccaggacgacgacgacggcgctggtggtgctagtagccgcggcgacaagagacggggccagaaagacgacggcgtcgggcagcagggccacggcggcggacgtggtgaggcagttctacgacggggtgaaccggcgggacctggcggcggtggagccgctcatcgcggagggctgcgtgtacgaggacctggtgttcccgcgccccttcgtggggcgggagcgggtggtcggcttcttcggcgagttcatggggaccatcagccccgacctgcagttcgtcatcgacgacatctccgccgaggactccgccgccgtcggggtcacctggcacctggagtggagggggaggccgtttcccttcagcaggggatgcagcttctaccgcttgctcggttcttcggactcggagcagcagcagcggctgcagattgtgtatggtcgagactgcgtggagccggccgccaagcccggggatttggcactggtaatcatcaggggagtgacatggatcctcgaacgatttccgagccttgcaagcaggctctgatgaccccaaccgaggcaatagctacaggatacgctacgcatggcttaatttgctctcaaaagtccagtgagatcgagctagcagacgtgtataatgttctacacttaatacattattctaagaaactggcgaaacgtatgtctcgtcgtgaggaaaaaaaaaataaaaatataggcccaattacttttattaaataggagtgtgtatagttctgcacctaagtaagagcttgttactatacaaaaactgattattagtaagatgagatgtatagtttacaatcggtctaccggataaaccattagccttgctctaattttatatatatgtaagcataaatgtataaaaaagatgtttgcgg

SEQ ID NO: 48170 - DNA, 405 bp, Zea mays
  Clone ID: MRT4577_143938C.1
aataaaatatttttttttatcaacctttccaaaccaactgtgggttttttatcaccagagaggggtcacccatcaattcttataaaatacattccccaaaatgtaaccacataaatttatctttactctttttccaaccccactcaacctatttcacatatatataaaaaaccaaccaaactccataaattttcttagaataaaacccttagaaaaacactttttttccaatataagtcgaaaaacaatattattccccctataaaatcaataaaaatattctttatactctaaaatcttataaaattctctattattgcttttttcccccttcttctcatttgtaaacttcacaatcttttttcttctctcactcttaaataaaaaccttttcttaatatctaa

SEQ ID NO: 48171 - DNA, 337 bp, Zea mays
  Clone ID: MRT4577_143939C.1
gtaaatttctgaccactaatacgaggaagagaagaaagattctgaggaaggaaaggtctaagatgttcttcagagagaagacgacgtccactaggtagtcgcagttcaaggaggtgtatcatgccttgttaacggtcctcaaggccaagcccacacccaccttgtggggagtcttgctcactgctagccacgctgatgcttgtcttcaccactagggggctcactgtggggaccaccgtgctgttaatcttcacgccgagcctgttgccgatggttgcacctttgttgactactgcattcagaaagaaagctcccttcattttgagctccaccttag

SEQ ID NO: 48172 - DNA, 328 bp, Zea mays
  Clone ID: MRT4577_14393C.1
cgggcactatgtatctcgagcaggacacaattaactttgtgatcgaggtagataatataaggttagagaaaattattgaatcacagccatttttggacgtgtatccttattattgaacagagaaggctccaatagaataaagtctatttttggaagattgcaaaaacttttttgatgaatagtgtatcttgatcacttgctcatattcgatctttatacaagagagaaaggctttatagtccgtcaccttgacctcatggtgcttccactggacctgccagggcggtacttgaacatgtcgaatatggaatatatgcatgacgaatgg

SEQ ID NO: 48173 - DNA, 534 bp, Zea mays
  Clone ID: MRT4577_143940C.1
ccggggattgatgtcagtaagctgtttgtgctttttgtatgttgagttattttcctcgagcgggtcgtccgacggcggtgcggggccggcgctgaggaggagcagtagcgcgagctcgaaggtggagaaccccgtccaggggctcatcgcctactgcaagaggtcccagcagctggccttcgtccggaagagcgccagcgacgccggcttccgcttcctgtcgtcgtccgcgtccaggatcgccgccgagtccgagtccgacgacctcgacgagctcaccgagatctgcagaggatgacgatacgatagtgctccacgaacgatgaatcccgatcattatacaatgatgcaaatgcgttccggagattttgtgaaggaaaaaaaactgaaacttgtggcgttgaccgcgcaccctgtgtcaagtgtcatgatgatatcgttcaaatgaatgtcatctgaatttgagccttgactggttctgaacagctgtaggtttttccatggatgaggaaaaccaatagcatagccttattt

SEQ ID NO: 48174 - DNA, 1208 bp, Zea mays
  Clone ID: MRT4577_143941C.1
caagaggagacacctgacggaaacatccattcaagatacaaaaccttttttttggctgggatacaggcttaacgacaactcggtactcgttacagaggggtttacattttgccatatgtttggtgccaagaactggcgtcatggaactgatctcaaaaaccttgtttcaaagcggcgaaaaaaaagcttaagccaaaactgagggagcgaaaccgtctcactacaagctcacactggtactgctggtagccacaccgtaaagcctaaccgaaactgaaggagcggaaaccataacactacaagttcactggtactataaccgctggcgacggggcggcgctcttcagccccggttgctgactgaatacgccactttgacaggcctgccctgcagtttcgactggttcatcgctatggccttctcgagcgactcgtcgtcttgaaattcgacatggcagaagccacgggaacccccggttcttttgtcgacggcaaaccttaccgatgcaatcttcgacggcccgaagaaacctcgcaagtcgttttcgtccacgttccatgagaggttgccaacatatgccgagaggcagccttcggacttcttggggtcggtttcgaactctgccttcctcttcttgtttgaggtggccgtcaccctgcacctttcaaccctcatgtatctgctgccaattttgaatccatcaagctcaagagactttattgcatcttcttctgactcgaagcagaggaaggcaaggccgcggaagttgccggagtccgggaagcgagagagctgcatcgactggatgggcccgtagaactcgaacagcttccggatgtccgcctcggtggtcgtgtagggcaagccgctcgccaccaccttcccgggctcatagccttccgccgccgcagtcgcctcttcctcctcctccttctccacctgtactgccgcctcaactacccccgccgggtgctcttgctccggctccaccgacggctcctcatcggcggcggcggcggagataggctggccccacttgtccctcttcgtcttcttccgcgtctttgccttgccggggcggagcttggtacaaggagtctggtcctcggccgccatggctaaaccctagtcctctcggcggctcgtccttggttccttgctccgcagccctctctcagccgaggctccccctagagaaatttctatt

SEQ ID NO: 48175 - DNA, 338 bp, Zea mays
  unsure (1)..(338): unsure at all n locations
  Clone ID: MRT4577_143942C.1
cgggggggacccacgcgttncgtcggagaggaggctctaccccggtgggtggctactttgacccgctgcgtctggcggcggtcccggggagggaaggtgactgtgctattggtggatatcaagcgcggctccgctgacatggaagcactcgctctgctcttccgctgacgacgttgatgagaatgcggctgttaaaaactatgcggtgctcccgcgtgttcaatggagtggctgcactttctataagtcctatgctttcttttttcccaaaggtgggtgtggaggttctcgagtggacaggattgggtcagtaatgttgacctttgtgccggcagttg

SEQ ID NO: 48176 - DNA, 439 bp, Zea mays
  Clone ID: MRT4577_143943C.1
attcggctcgagagcaaattcgtcatcatggacttttttgatgccggtggcgagacatgtgggacggtcatacagcgggcaacgacggagctgatacggaacccttggaggacgcggaaggcgcaggccgcggtccggtcaccgctcgcgggacagagcacggtgacgggggccggactcaccgacctacactacctggggctagttatcaaggagacgctacggctgcacccgccggcgacagtgctgctctgggagtgccttagcgcacgcaaggtgctcgggtaccacctcgcgtgtggagccatggggctggtgaacgcgggctcgatgacaaaggcgcaggctcgggaccggacggcgcttgcggtgcagagcacggtgacggaggccggtctcaccgacctacactacctgcggctagtgatcaaggaggatg

SEQ ID NO: 48177 - DNA, 823 bp, Zea mays
  Clone ID: MRT4577_143944C.1
attccagggccgaccgacccgtccggttcaatctgaagggcaaatggcacttggacgtagcatttgggtgcctgctattcccactagttaatctactctcacacataaacatcagcctagttccagcgtcaccaggtccagctgtcggggtttccagcgtagaacagtccatcgtggcccgggatccagtggcaatggctttgtatgctgtggtagtcacggtatgcgcgcctatatgggaagaaatcgtgttccgaggattccttctcccgtctctaacacggtacatgccactcccatggtcgatcctagcgagcgccgctgcgttcgcgctcgctcacttcaacgcacagagggtgatgccgctagtgtttcttggagtggtgatgggaggagtctttgcaaggtcgcgcaacctgctggcgtcgatggtgctgcacagcttgtggaatggatttgtgttcttggatttgatgaagtgagcagctgagctggagttattgtttcggttccaaccttggacatatctgcttgagcctcgtctgaaaatgttttggacaagattggttctattcttttttcaggattaaaagcaaggcatctaatgcagcggcggaacaggagtcgtgtaagtctgaagcgaagagggaacagttagtgcaggaaaatagaccacagaacagaagaaatgtttatttttttcagaattttgtgtagaatgatcagtcactgcagtcttaggacctgtgcccagcttccataagcatctgccacatttttgtaaattgcataggcgggagaatatttgtctcgtcgtgtatag

SEQ ID NO: 48178 - DNA, 219 bp, Zea mays
  Clone ID: MRT4577_143945C.1
aggacctgccgcatcgccctttcattgagccatgggccttgggtacgtctgcggctgtgcggttacaagaaccctccaccggcgatgtgcttgcccgagcgagcatgaccccacggagaacgcgagcaccgcgctcgccggcgccatggcgcagtacgcttgctccagcatggcgtcggactgcacccacacggtgcaggggcccaccttgacgcgaac

SEQ ID NO: 48179 - DNA, 449 bp, Zea mays
  Clone ID: MRT4577_143946C.1
aaccttcaaagaagagggccgattcacgagagtgccctcccactgagtgccccgttgcatgtgatgccggagatagggcgtgactttgcgctctgagcgggaccaaaagcccatcccggagagtaggcacctgaggagctaacccacggcggctgcaggaagagctgcccacggcgaccagcgggacggcgacacgacaactacatcgtgctcgggaaggccgtcacaatctggacggaggatacgccgtgcaaggctagtgcgatcaagcttaccttgacgtatacaacggaaaaccgctccaagacatcggtgcttcgacacggctcttttttttttcacacgccgaaccgtactgagtaccagcatgattgatatatcacagaatggattcgtgagccttcttactgctgatggctacactagagatgaccatacactccctgctg

SEQ ID NO: 48180 - DNA, 543 bp, Zea mays
  Clone ID: MRT4577_143947C.1
ccttttctttttttttttctttttttgcctaaaaagataatttcataacattgtctttattcttacatctcaccatgttaaactgggtttaaattaatgctattctctacccaaatgcaatcatcacaatgccccccacaaataaatagctgtgctgaacactaggaagaataatagggtacacatccaactgggctgacaccatttacagttaatggccattaacgacaattcttactcactgacatcaactttaatttttgaatcaacctggcgaggatcatgaaggctatatgaaccaaggatgatgtgtggctttactttggatcaaagctacggtgcacaacttaactctcttcacactactaccccctattacaaaaacaaatatacgctaaccaagtttcctgaagtcactgaaagcattctttaacacagaatcacttgaatatccatcatgagaccccttaggtcttgcccatgtgccacctcttcatatgcatcccattgcacgagcggggcttgttaatggcagactactgg

SEQ ID NO: 48181 - DNA, 321 bp, Zea mays
  Clone ID: MRT4577_143948C.1
atggttcagatcatcgggcaccatgacttgtctcccgaggacttcttgatggaggaaggggcagcatcctccatgccacgaggctccaaccgccctgcgcctggtgctgctgctatgcacgctgcacaacagcacacgccagtgcagacctccaggactctgtcgagggctgcccatggtggggtgttgtccgcggccagggagttgctacgtaacccaccaagttcaacggcctcgccgggggccatgaggcagtggcgcgaggatgttgaccatctcctcggcatgacccatcctgactcggctagatctaggccatga

SEQ ID NO: 48182 - DNA, 373 bp, Zea mays
  Clone ID: MRT4577_143949C.1
gagagcgccatacatgatcaaccttacagcaccaatggccactaatagattgtacgggcttatgattcttgatgaagctgaatgtgccgataacgcaaccattgatcttcaatactgacaacgtggtattggtgctcttcttggcccatatcttccatcaccgaccgctacaggtcgagataaacgacgcctacaaccgtacaggctccaacaagtactcggaacacgacacttacgtgtactaccgctgatgttacaacaatcggcagcacctatcactggcacactaattggtacagaccatgagaccacaacagctggcacgactgacgctacctgctatcagccgactgacactgtcaaacttatctac

SEQ ID NO: 48183 - DNA, 232 bp, Zea mays
  Clone ID: MRT4577_14394C.1
acccgtccggccaattctcagtatcttacaaccccatagcaccaacacctttttagattattaatctcacgaggagacctttgggggttggggtaattccctggccatttaacttcaaggaatgatagctcaccacttttccttgctcaacttgggcctttacctgttagataaagacttcaccctcctgttgccggatcatcttacaaatcaacaccttttttggtctgga

SEQ ID NO: 48184 - DNA, 453 bp, Zea mays
  Clone ID: MRT4577_143950C.1
ccccgcttagggataaaaagcaattatggggggcatcaaatagaggaacagatactagcacctgacttggtacaaagggtggggcagctctgggcctctggccaaatatatatatatgtttaaacaaacgtttggaggaacccatgctacctaccacctgcagctataaaaaggctgccgagtgaagggcgaaaagggacccgtaccccccatccttgacgttgaccaaaggggcgggctttcccttttcgaagaaaaccccgttcctgacgacggggaacaaaaccgcattctgtatcgtcgacagacggggggcgaaaaccactggtggccggttaaacataaccctgtccaaggcgtcctggaagaaccgctcggactcggaatccagggcgctgggcgcttcgtccaaaaacaagaaccgagggtccttcacgaacgcacgggcgaagg

SEQ ID NO: 48185 - DNA, 1929 bp, Zea mays
  Clone ID: MRT4577_143951C.1
gttggtaggtggcgggcacgagaaaagaggaaacgaacccaagcgacagacgggcagcgcggggaggccgccgccgttgcggtatataaacggaccctcgaggccggccgggaaaccgaagcagcgacagagctcttccctcccacacgctcggcgctctgtccgccagaaatctcgtcgctggtagaagagaatcgtgccatttgtcatgtcaggaggatcttcaccatcatcaaggcgaaacagctttaattctttgtctaaggacctagaccttccttcagagcaaggttgtctctccattgttgtacttggggcttctggtgaccttgctaagaagaaaacattcccagccctctaccacctctttgagcagggattcatacaatctggagaagtccatatatttggttatgctagatcaaatctttctgatgatgggttaagagaacgcattcgtgggtatctcaaaggagccccagaagatctttcagaatttttgcaactaataaaatatgtcagtggttcctatgatactggagaaggatttgagaaactgaacagggcaatatcagagtatgaggtgtcaaagagttcaggaagctatcgcaggctcttttatttggcattgcctccatctgtctacccttcagtgtgcaaaatgatcagaacatattgcatgaatccatcttctcaccctggatggaccagagtcattgttgagaagccctttggaaaggacttggattccgctgaagaattaagtgcccaacttggggagctattcgaggaacaccaactatacagaatagaccattacctgggaaaagagttggtccaaaacttgcttgttcttcgttttgccaaccgattgttcttgcctctttggaaccgcgacaatattgataatatacagattgtattcagggaagactttggtactgaagggcgtggaggatattttgaccaatatggaatcattcgtgatatcattcagaatcatttactgcaggttttctgtttggttgcaatggaaaagcctgtctcccttaagcctgagcacatcagagatgagaaagtcaaggttctgcaatctgtgaaccctattaagcctgaagaggtagtccttgggcaatacgatggctacaaggatgaccctacagtgccagatgactcgaataccccaacttttgcatctgttgttcttcgggtacacaatgaaagatgggaaggtgttcctttcattcttaaagctggtaaagcattgagttcaaagaaagcagaagttcgggtgcaattcaaggatgtccctggtgacatttttagaagcaagaagcaaggaagaaatgagtttgttatacgcctccaaccatcagaagccatgtacatgaaactaactgttaagaagcctgggttagaaatggctactgaacaaagtgaacttgatctgtcatatgggatgcggtaccaaaatgtcaaaattcctgaggcatatgaacgccttatcttggatacaataagaggtgatcagcagcactttgttcgcagagatgagctacaggctgcttggaagatcttcactcctttgctgcatgacattgacgacggcaagctgaaggccctcccgtatgaacctggcagccggggacccaaggaagccgacgaattgagcgcgagagttggatacgtgcagacccacggttacatatgggtaccgccgacccttgcatagaagagaatacgaattgtttgtacctaggaagatccgagtgtcctacaataaagctgtgcgtatatgctcattttcgctatatcgcctgccgttgtaataatgttgtgctggatatgaaataaaattgcgtgttccattcagtaaaaaaaaaaaaaaaaaaaaaaaaaaaaaaaaaaaaaaaaaaaaaaaaaaaaaaa

SEQ ID NO: 48186 - DNA, 490 bp, Zea mays
  Clone ID: MRT4577_143952C.1
gaattctccgggttcgactccacgtcgtgccggggaatttgagggggaaaattggaggggatttgaggtgtggaggtggggaatgaactgaatttccacttcaagtccccgggcattatctctcaatgtctctagtcattcaaatcagcccctgagggccctgttcgtttcaagctcaatccatatggataggggattgaatggttttaaatctctagcaagtcaaaatcattcctaattcctcatgttgggagagtgcatcagccgaaggtcctcaaactacaaattccaagttttatgatctgtttccagatcattcttcgtcacggcatgcctcagccgaaagctataaaatgaaaacgaaggtctggagcaagtaactgggaaacgaagaaggaatcaagtgacgtgcacgtaacgtcttcaagaggaacagaaagacgatatctctggtagattatgtagctcacgtgtataagatcaaaggtca

SEQ ID NO: 48187 - DNA, 207 bp, Zea mays
  Clone ID: MRT4577_143953C.1
gttgatcttacccgagggcattggatatgattgaaggatgtatgtgatggctgaagaagtttattgcgagacataaggtgaagtcagaaaaagataatattagactgtttgaaagcaaaaactaagttgataacgagagaaacgatgtagacactaatgctgctatggagaagtaactgcataacggagatgctaaacatcattgag

SEQ ID NO: 48188 - DNA, 194 bp, Zea mays
  Clone ID: MRT4577_143954C.1
caaatactttaagtctgagaccattctttacttcccagattgtccaagttctagggttcattggggggaaagtaaatctgcatcttcgagctggatttgctgatcgtatcgccgtacaatcaaaccggtaatttaggcgggcaattctgttttttgagacttgcaaagtgcaacaatatccatttacattaaat

SEQ ID NO: 48189 - DNA, 766 bp, Zea mays
  Clone ID: MRT4577_143955C.1
atatggttctattctatgttccaatagggaggtagatagtacatatatggatacacatactgggctgatacaaattccgcctgtttggttggtttttttcggtagcccggctgcatgagataggccggcgggagcgtggctccagagatgcgaccaatttgctcgtgtctacagactctggcccagagtgctttaagtatcgtgcgagcctgacttcatatctacacacaggtaactaaacacacatctcgcacgcgtagagcttggttgagaacaaccaaataccagctcattgcatctcgcgatgcaagcatcaacaaatacagtcaaccaaacaccagctccctcaatgtgctggtcgtcttacgggccatggggctgcttcacagaaaggatggtcttgaagagtcccgcgagcacgccgacgatggagaagacagtggcgatggtcttgatgttgttgtacaagaacctgtggacggcgatccacagccacctctcctgcctgtactcctgcaggccctggaagacctcgtagtagcggtaaccgacgctcaggtgcggcgctagcgccttgaagaagccgagtgtttccgcgtcgtcgaagacgctgacgacgaggcccttggcgcgcatctcctgcacgtcctccggccggttcaccaggagcgacacgagcgtgacgtaggagctgacagggaagctatcagtagcgtcgccttgcggctggcacaactcataggccgccatgttcaggagccagcac

SEQ ID NO: 48190 - DNA, 366 bp, Zea mays
  Clone ID: MRT4577_143956C.1
cccatgcgtacgtggactcttgggcggacgcgtgggttctgagacagttgtaaaaattgtcgaataatagctggaggcatttgtaaatgaaatattagatcgatttgattttgaaccaatggctgctgatagcctcgggcaggtttatagggcacgtgtgaatggccaacatgttgtgatcaatgtgcaacggcctgggatggaggatctgatcaatattgatctgaagaatctaagggaaattgctgatataccttcagattgtgtacctcaagatcagatggagctctagagagactgcgttgctatttataatgagtgttcgtatgggttatttgtcgaaatattctatatgaatgaagcatt

SEQ ID NO: 48191 - DNA, 280 bp, Zea mays
  Clone ID: MRT4577_143957C.1
gacccacacgtccggcacaaaactgtactcaaccattgcttccaaaacacacagccaccatacgggccggagtatttcaaaaagtgctgctcccccaaccatcaacccgcaatgcacacaagctactatagcttcccttcttcccccatacctctcaccaacggagtcttctgaatgcagaaaacccaattattcaaccctacaagatccaacaagcaatcacatctggcatcttacctttaacacccatgtacctccaacaatcatcaatcctattaca

SEQ ID NO: 48192 - DNA, 205 bp, Zea mays
  Clone ID: MRT4577_143958C.1
cccacgccagcgagcacagcattcgttcatactaataatctcttattcagcgtactagctaacaccagctggcagctagatcgctctgacctgcaataatggccgctcgctcctcctcccagcaactggtcgcggcggaggacctggcagcggcgctgatgatgctgtcggtgagggccgagacagtgtaagcttcgatgagcta

SEQ ID NO: 48193 - DNA, 330 bp, Zea mays
  unsure (1)..(330): unsure at all n locations
  Clone ID: MRT4577_143959C.1
ntatantttttttttttatggtttttttttttttatttttgttataatggatacaggactacccacaccaaactaaaccaggaaactaaattacggacagacaggcagaggtacatccgagggcttaatattgggaatcattaattaaagaccaaagcaaatgaaaggacgaatttgaaacgaacccagatcgctagagcctgaagtggaggagcgcacggtcattgagtcctatggagtagaactctgcgatggagaatctggccctgcctctcctgtacagcgggggcttgctggggtctggaatggggccatacatcctgtgagacc

SEQ ID NO: 48194 - DNA, 443 bp, Zea mays
  Clone ID: MRT4577_14395C.1
ccggtctacccagcgttcttcaagcgtacgccagacccgatgcgggggcgggtgctgtacctaaaaaccatcttctccgcggtctcttcaccgtcatctacaaccacatgtacgaccggctgtactaacgcactgtccaacgtactctccttcatcttgggcttcaacttctacatctccatctacaactcctgggggggggggagctccctctccttcgtacttcttcctcgacttcatcttggtgtggctctttctattgctgctggaggtgcagctgcaccggcggagggccaccgatatgggcatcattatagccatcatgagaaccctgacgacgatgctctcgaccatgttctcgtctatggtggcgtctatgatggcgcccgtgatgccgcccctcgtctgcgcgatcgtttgggccactgctgtcggcactttct

SEQ ID NO: 48195 - DNA, 407 bp, Zea mays
  unsure (1)..(407): unsure at all n locations
  Clone ID: MRT4577_143960C.1
ttgaattcggnacgagggttacacgcgctaacaactctaactgactttctactcgatcgtggtgccgggtgcgtgatgggatcttatactgccatgccggtgagggatacgaacgccgacgaggtgggaacatgctaatgacgccatctcagatgatcgcggacgatggcgctctgtgaccggtccaacattgtgtattctgcgaggttcagagagctatctccttctgaatctgactggggctacctgagaactgcatctgcggcacggtatatctacttgagacatggcatacctaccagtacgctttcagataatttgtgcaggacaacctatgaatgggttattcacagctctgttcttcacaaacagcggtggcatttaacatttcgtccttcactttctgc

SEQ ID NO: 48196 - DNA, 168 bp, Zea mays
  Clone ID: MRT4577_143961C.1
agcaacagatagaatttctggaagaagcttcaggctcgagcaccttatttgacgtctccatagcctctcaaactctgagaagctccaggaagaggcacaggcagagtcctcttctatccaggttaaataagttgttttgcctttcttatgtgaacttaacaatattgg

SEQ ID NO: 48197 - DNA, 299 bp, Zea mays
  Clone ID: MRT4577_143962C.1
atacctggcgaaaagagcttaattaacaagggggggtttttccttacttcaaacattttaattataggatttattacaactgggcatttcaaaacctcctaaaacggataataggtaagaaggatttttatatctggaaagacttcacctgaacaagatggctccttgactgggcttctaaacgtctaaggaacaacgtggcatcataaattcactcagtcgactcttgtttatgaattatgaaggttatttactttagcggtgggtggatgtctttttttttttccaaaacctttttt

SEQ ID NO: 48198 - DNA, 480 bp, Zea mays
  Clone ID: MRT4577_143963C.1
gccacagccgcggcccggctgccgagcggcctcctccaccacgtcgtggtcctcgccgttgtgtccctcgcgctagcaggggctctgtactgatggtgagccccactgcacagtgacgacgcgacgccacgcgggagacaatcgtgctcctacagaccgagggacaaaaattgcaggacagatacgagaaatggacgcatcacctgcctgccggtgtggacggcggtggtcctcgcggtccagcgagcctgcgagccccgacgacggtgtgattattcacccgtgccgaccgagagagacgtgtgtagtggcgatacaaatttgattgaagacattattgtgcgttttcttagatatttattaattacacgataatacacacatgtattattatagcagttgagctcttttgtttgtggtaaatgctagacatcctctttttcttcctttttccatatacaagtcagtggttacgataat

SEQ ID NO: 48199 - DNA, 458 bp, Zea mays
  Clone ID: MRT4577_143964C.1
cccacgcgtccggcttatgaaaagagccaacatgcttgtgtagttgcgtgtttctgcaggctgagggtaggatattttgtactgttccataagaaatttacacccaccagtttgatggaaacaaaagctattggcttacaggatcatgcttcggtttatttggcctgcaactttttatattgtgcactttttaatagcagacaacacatattatgatggcaccacagtataggggcagtgcagcatttaagtttttactcctcgtaatattacttattgtgattctgagctatattagggtgaaacaatttcataaattcatgaattataacttataagggaatagaaactggaatgtttctttgtgatgtcctaccttcctcacctgcatatctgtatccttgcacgatagctataatttaacagagaatgcaatagttttaaccatgtatagaaac

SEQ ID NO: 48200 - DNA, 393 bp, Zea mays
  Clone ID: MRT4577_143965C.1
ttgtcagggaacctcggaaggcgacgctcttgtgggcggtccacatgcccaccatggagtagcatgggttgggtgctggcgtataggtttttttttctgtatccaagggtggtcttactggatgtggggaggcttaaaggctcaagactattatgtgtggcggtaggggcgttagcagctctgtccctacggagacctaacagtcgccgtccaccagagttggtaactgcatgaacctttctttctgtcagatagactaagtggggatgggagactcagcttgctggagcttactgaggggattgaggatctttgtgctggatgcgattacgctgcaccgctcatgcatcttcttgtctgcagcagggactgctccttgcgctctgtcgaatt

SEQ ID NO: 48201 - DNA, 581 bp, Zea mays
  Clone ID: MRT4577_143966C.1
ctcgagggccggccggggaaaacccgtgtgaaagcacgcgcgcgcgagccacccggagacgcggaggagagcgaagacaagattctcgtggccttgctgagcgtggccatagtgggcctgctgctttgcagcttgccagcaccgactacggccaccagaaagacatccacgtgcttgctagaggagacggatgacagtgacgagggcagcccccaatccgaaggccgagtcgcttactgcggacatcaagctggatgatacggaatccgatgcgccagcacctgacccggcgtcggctgccggttgaactgaaaagcgcgcgtacagccaagcagggtgcccaaaaccgcgaactaagtaaggtctcgagacgagagtccggcctactacatgatcttgccataatgatatatagatactcaacagtgtggacaaacctacccacatgcatgctatcgcatgcctacgaacatatatatattatccgactcgatcctgacaaaatgcttcgccgacttcattatatatattacatccctttaatctaatgtgaaaaaaacaaaaaacaagttgagggcctg

SEQ ID NO: 48202 - DNA, 834 bp, Zea mays
  unsure (1)..(834): unsure at all n locations
  Clone ID: MRT4577_143967C.1
gtggcggccgcttcgaaaggccggccggttcccgggacgcaaaaaaccctcacgcgtattaagccatccccctcaccacctagggtttccttttacagccgccgccgacgccgccgccgacaccgacgcatctctcagcctccccgcactcgcttccgtcgccgcagccgccacttcgcagccatgggtaaggtgcacggatcgctggcccgcgccgggaaggtccgcgggcagacgcccaaggtggcgaagcaggacaagaagaagaagccccgcggccgcgcgtacaagaggatgcagtacaaccgccgcttcgtcaccgccgtcgtcggcttcggcaagaagcgcgggcccaactcgtccgagaagtaggcgcgacgccgttgggctcgcatgcatgcctatgctcttgctcttcctggtagtagttttcgtttgtgcaagctgaagaagatctttttttttgttgttgttgttccagtctcagttacgtgcggtgagatgagagcttgagattatatgacaacctccttattaattaaggatggatttttgagatatgatatacgtggcaatgagttcttgcccctttttgcattctttgtggaatgttacgcaaataggtgggttaaatcattcgtcgatggctacatgacattgactacatttgcctaatttgtttgtttggtccggcgttcctcgcttggtaaaggaacccgctgttttttcactcgttattgctggcatggcattatggtccagttgtaaatttgaatggtaaacccactttgnaaacagcttgctgataagatctgtactangttcgggtaaaaa

SEQ ID NO: 48203 - DNA, 841 bp, Zea mays
  Clone ID: MRT4577_143968C.1
agcggaagacttattacaaaataaaataatgaatataaaacgaactaaggatcgtcggcgccaatgtcaactaagaaacgccacctagatcagatcaaactcctcgccttgtggctcctcctgaaccacctgttcttctccttcaatgagctcctgctcagctacttcaacctgctgctcaccaggatcctcagcaacgggctcttctgttgccgaccaggccaaaaaaacgctctccgttttttttcctgctggccgcagcatgcaactgtgtgggacccacgcaattgagcccccttctccctccgtattgctcgcatccatcgtaacaacctcacgaagtgcttaatccaatcctccacccacgtcgtggataaaagcaaggccatgacccccctgcgcatatctgcctacccatgcggtcctcccccaaacgtcttcatcatggacgaagccaagaagctgccagcgttgatccacacatatcgttcggtcctcctctggcgctaagagatttgctgccgatgccgcgattcacgcgctgaaccagcgttccgttgccgttttcctggaccgatggctagtatttagggctcgtttggtagagctccactctatgattctctagctccgagagctgattctctaatggagtgattctgggcgattctctggtaggagtgaatttgttgatgaattgcgtttggctgctagttgtacccaagcttgtttaagtgagaacctgatctgttctttgctcttacttcctcagcaaatatttcacaagctatcttaacattttcatcgcaccagtctgcattatcctccttcatggtgcttg

SEQ ID NO: 48204 - DNA, 337 bp, Zea mays
  Clone ID: MRT4577_143969C.1
acgttgagaaacacagcaagcgaaacggacttacaacggccttaaaaccattggctcccatggggttacccggccttgcgctaagtgccctttatgtgaccgcatcacaggcgtgcataattccacattgctcacttgctcctagtgccataatttcacagtttgtgccaccagttacttcaatgcgcttcgaacaactagctgtgcatgccaacatgcatcaacatgcgcttgctgccagcgtcttactacaactaattgcctaattgcgacaactatacttggcacatctagcaatacaagctatcacaacgcatcaggaacaacagctactacc

SEQ ID NO: 48205 - DNA, 306 bp, Zea mays
  Clone ID: MRT4577_14396C.1
tttttattattattttttatctacctttttttttttgtgtgtttttttttttttggggcgaatgtcacaccctcaccataaaacaggggttctattcaaaataaaaaaataatttccattttaggggacaacggtccaacaacccaaagttgactgggagactatggcctaaaccttttacgaactcgccacaacattctccatgcgcctaaatctgcgggacctgtttttgacctgggacttgaaaatccagggaccaactttggtttttaaatgactcgtgacctcacctgcaccgcgggggtg

SEQ ID NO: 48206 - DNA, 344 bp, Zea mays
  Clone ID: MRT4577_143970C.1
gacagacaaagatttgtgaaggtgatccgcgctgacaagagatggataagatggacgaggcggcggcggcatcgctgtgcttagcggccctgatggccgtggtcgtctggcaaggccaggtcgagctgcagaggctcagggacctgcagtgctgtcaggaggtccaagagagcccgctcgacgcgtgccgccaggtgctcgaccggcagctaaccggcggcggctgccgacgacgcgttggcccgttacggtagcgcaccgttctacggatgctgtgctgccagcagctacaggacgtgagcctcgaatgccactgagacgtcatccggagcatggtcaaggga

SEQ ID NO: 48207 - DNA, 314 bp, Zea mays
  Clone ID: MRT4577_143971C.1
atgtaaattacgttcgtcacatttgtatggagaaaaacgccccacattgctgttggtgccaagatgtacatgcaccgcgcgcaccgagggcacgacggggcgtccggtggcgcattatgaagctgttaaccaaatgaacagcgcttgagagcgccggtatacaagagagagatccttatttacccacgcatcgcacgcatttgttgttattaaaccgtttgtggggagtctagatactactgtggcggtattaattaggcgggggggggacccgggctgtctcatgccttaccaggggggggggggttaaaatg

SEQ ID NO: 48208 - DNA, 289 bp, Zea mays
  Clone ID: MRT4577_143972C.1
gaagaattgcctgctgatcctggaaataaaggagggcaaaccacgaatgaggatatcaccaacaatagccgttctcctgttgctgatactgacttaactatcccatccaagaaaactattcatgtcccacccttcaatagttttcttgtcttggaggtgtccgaaaaacataaagctgatgattcatcatgtgatcgctaccctgttaaggttctgcgtctgctgaatgaacactctggtacagaatgtgccgtgcatctgtgtgatgagtggttcgacagtattgttg

SEQ ID NO: 48209 - DNA, 439 bp, Zea mays
  Clone ID: MRT4577_143973C.1
ggccgcttttttttttttttttttgttattttttttttttttttttttttttttttttttttgtgttctctttttttttttttttttgcgcgacatgccagatttttatcagcactaaaggttgccacgccaaggccttttttgcaaaattggataacatacatccagcaaaaaactgcttgaaaggaaggggcccatgccctgtgaaaagaaaaaaaaaaaaggaaaaaaggaaagaaaaaaccaagcaagcaaaggggacacggggaccccaagcaaaaccgaaccacaaaaacaactcatgggactagctactacttcacgcagaaaataattaccttgttaaccctgagggggaggcctgcgggaccagtttaactatttccccgagtcttgtaggcgaagaaactaacccactgcgcttgcttaaagttggcaa

SEQ ID NO: 48210 - DNA, 194 bp, Zea mays
  Clone ID: MRT4577_143974C.1
aagcaagcttctgtcgacaccgtgggagcgggttagagtgcggtgcgagggagagatggccgccgcatcctgggctcgcggtgctgcccttctacacgagtggggtggttctggggcttcgcagacacgcggggaagctttgcctggttcgtgtgaatcggggttgtggccggagcctgggtaatttctcgacg

SEQ ID NO: 48211 - DNA, 377 bp, Zea mays
  Clone ID: MRT4577_143975C.1
gcaggtattatcgctgcctcgcacatgatcaccaagtcagctcatgcaagaatccctttcgttgcatccgttgttgccgtcccggtcatcgggagcggcattgtcgctttcggtcctcctctcccgtccgtcaagttaactcctccgtgcaatgtgatcatcctcaacaatcgaggacttgggctgaggttgtggccatgccttcgccaagtatgttgtcagctgacgccatcgccaagtcaccatcgcaaggacatcgcgatcctccgtcggcttctcaacccatcggtttgcgtggtaaggacggcgatccttgttgccgtagctgtttttgtgcctctcttgcctcgatacctttgaaccttcagtctttgatc

SEQ ID NO: 48212 - DNA, 170 bp, Zea mays
  unsure (1)..(170): unsure at all n locations
  Clone ID: MRT4577_143976C.1
tntacacctgtccctgcgcccaatgcacctccataccttcatcaacaatattttcaacacggggtactgaataagactcatcgggttgtggcaaacactgctcgctactttgctcctgtgctatccttcatcccactgactatgttgaactcttgtgcggaccttccact

SEQ ID NO: 48213 - DNA, 882 bp, Zea mays
  Clone ID: MRT4577_143977C.1
gggtacctcgaggccggccgggatcctatcccctcgcgtcgcatctttcctctcgtaacgcgtatcagtgccaaccaggcagccatcgccgcggccctcgtgcctctgcatcgcggcgcgccttggtgctccatccacgtaatccctgaggtgcggcacaggcgtggaggtatctcggcagtcggcagggcggctggagttcggtcccagaagagatggcggggggccctgatgtcgcgggcttgatcgaggatgatgcggtctccgtcatcacggagggcttagtggtgtgtgacatatgtggcagtggtagtgcccctcatcttattgcaaactgcgctcggtgcaatgcgcgtgagcacggatgccaacgcaacgccaacagggcacccagatcctaaccaaggttctggagatggtgttgggcgccaaattcccttgaggaaggtagcagctagtgtcgtgtgagaaatgttggcttgtttttgtggttgtgtgtattggcaatcgctggagcctggagctgtgtgtattggcatcgctggagcaaaatgtccatgtggcttggcactgatgctggctggcctcagaacatacgtcggatattctttcaccgcgagtgagcaattgaaattgggcaggtaataccatgttgtgggcgtaaatgcgatggacactgtcagtttcgtgggttttcttttcttctttttcgggccaagagtttcgtggattctcagcctcggttgcatgcgcaagatcttgagtgcagcatagaacacgcttgttcttaccagtacgtgtgcaagaaaaatggatctcggtatatttaattaatatattttcttgtttgatggcaaaaaaaaaaaaaaaaaaggggcggcc

SEQ ID NO: 48214 - DNA, 596 bp, Zea mays
  Clone ID: MRT4577_143978C.1
cgggacgatgagccaggcgcgccgtggggtagagcaaaccaccgtcgccgttgctgatggggaggccggtggtcaccatgactgcagggccggtgctggggagggcagggccacaacggggcctgtgggtccgacgaagaaggcctactggggacgttgttactgttgaatccccccgttccccaggccaggccacatggtgatgtgactgatctaggggttgtaggagggccaggcaggagcgggtgcctgttcggcttgggtgcgctgcgtctagagggaagcatcgccaaggtcgaccatggagcagattagagctgctagggggcctggcggctatgctaggaaggaaaacgaaaacgatagggaaaatctaggtctctagatacataccatgacagaatgagctgccagatattggattaatggtagaggtacaagggggtataatatataggcatggattgtctaaggtttatagaaagcatgcaatcaatagaaatccttgcataatctaaagcacccaatcaatgaagatctttgtgtaatctatgatttgttctcgaaagcgtaggagagctacacatcatatatat

SEQ ID NO: 48215 - DNA, 736 bp, Zea mays
  Clone ID: MRT4577_143979C.1
atcgccgcggccctcgtgcctctgcatcgcggcgcgccttggtgctccatccacgtaatccctgaggtgcggcacaggcgtggaggtatctcggcagtcggcagggcggctggagttcggtcccagaagagatggcggggggccctgatgtcgcgggcttgatcgaggatgatgcggtctccgtcatcacggagggcttagtggtgtgtgacatatgtggcagtggtagtgcccctcatcttattgcaaactgcgctcggtgcaatgcgcgtgagcacggcctgcaggttctggagatggtgttgggcgccaaattcccttgaggaaggtagcagctagtgtcgtgtgagaaatgttggcttgtttttgtggttgtgtgtattggcaatcgctggagcctggagctgtgtgtattggcatcgctggagcaaaatgtccatgtggcttggcactgatgctggctggcctcagaacatacgtcggatattctttcaccgcgagtgagcaattgaaattgggcaggtaataccatgttgtgggcgtaaatgcgatggacactgtcagtttcgtgggttttcttttcttctttttcgggccaagagtttcgtggattctcagcctcggttgcatgcgcaagatcttgagtgcagcatagaacacgcttgttcttaccagtacgtgtgcaagaaaaatggatctcggtatatttaattaatatatttcttgtttgatggtg

SEQ ID NO: 48216 - DNA, 388 bp, Zea mays
  Clone ID: MRT4577_14397C.1
cacgcgttcggagattcgtctcgccggtggaggaggtgtatattcatattgtattattgccgctacgacgagggcagcctcgctccatgccgtggtcaccctgatgcatgcggccaagatcgggtgggcgggcgctactttgtcttgctggcgttccgaccgtcttctgaactcgcctgcacggcgttcggcgtagacgccggcgccggcaggatcacgtgctccgtgcaggacgtcatcagcaggtgcgtcaactccgcgaagctggccggcttcgcgctcgccaccttagggctcctcgtattgggcgcgagcgccgagggtgcgcccaagatgctgacctacgaccagatgcagagcagaacgtacatggaggtgaagggcacgg

SEQ ID NO: 48217 - DNA, 951 bp, Zea mays
  Clone ID: MRT4577_143980C.1
gggtacctcgaggccggccgggactcctatagtcgcatctttcctctcgtaacgcgtatcagtgccaaccaggcagccatcgccgcggccctcgtgcctctgcatcgcggcgcgccttggtgctccatccacgtaatccctgaggtgcggcacaggcgtggaggtatctcggcagtcggcagggcggctggagttcggtcccagaagagatggcggggggccctgatgtcgcgggcttgatcgaggatgatgcggtctccgtcatcacggagggcttagtggtgtgtgacatatgtggcagtggtagtgcccctcatcttattgcaaactgcgctcggtgcaatgcgcgtgagcacgggtactgtatggaggggttgacgttcctgattccgctcatatggttttgtaatagatgccaacgcaacgccaacagggcacccagatcctaaccaagcctgcaggttctggagatggtgttgggcgccaaattcccttgaggaaggtagcagctagtgtcgtgtgagaaatgttggcttgtttttgtggttgtgtgtattggcaatcgctggagcctggagctgtgtgtattggcatcgctggagcaaaatgtccatgtggcttggcactgatgctggctggcctcagaacatacgtcggatattctttcaccgcgagtgagcaattgaaattgggcaggtaataccatgttgtgggcgtaaatgcgatggacactgtcagtttcgtgggttttcttttcttctttttcgggccaagagtttcgtggattctcagcctcggttgaatgcgcaagatcttgagtgcagcatagaacatgcttgttcttaccagtacgtgtgcaagaaaaatggatctcggtatatttaattaatatattttcttgtttgatggtgaacataattatttgaactaatatatttactaaaaaaaaaa

SEQ ID NO: 48218 - DNA, 258 bp, Zea mays
  Clone ID: MRT4577_143981C.1
agcccatggtacaactggttgactggcagcatttggaacacacaacaacagggaaacttgtgttataaagctatccgtgttcccaacagagagttgctacttgtaaacaggtcactaccttgaatgctactcttctaccagccgttttgttaaaccatttcatactgtgcctccggcggctggagcagggccaagttttgggccaatacggtccttttgtgacccaatcatgcctgtgattcttaaccctgtgtttgg

SEQ ID NO: 48219 - DNA, 572 bp, Zea mays
  Clone ID: MRT4577_143982C.1
ggcctccgcggcacgctcctccacgtcgccatcgtccaggccgcgctgccgcagggcattgtccccttcgtgttcgccaaggagtacggcgtgcaccctgacatcctcagcacggcagtcatcttcggcatgctcatcgcgctgcccatcacgctggtgtactacatcctgatggggctgtgaaaaagccagacaagctgctcgttcccgcaggccaacagcgatgccggatggggatgtggagcaggaggagacagactaggggggacaagacaactgcgcaggggcaggggcgggggcggggggcggcaggttaattcgtaggagtatgcttttaggtgtagacatcatggaacgcgattagagagcaaacaaaaaatgtttttaggacaaacccaacgtcatatgcaaaaatccttgggggtgacagtttgcgttgcaaagcatccggttatgagttttgatttgggtgtgttagggacttttcatgcgcatggctttccatgccctatataaaatggatgcgtgtcacttcgatggaaaaaaaaaaaaaaaaaaaggcccctagggcc

SEQ ID NO: 48220 - DNA, 371 bp, Zea mays
  unsure (1)..(371): unsure at all n locations
  Clone ID: MRT4577_143983C.1
attgtgaggggtgggagggatctgnttccgctgntaccgnnagcctgggggggaagtgggcagatcaaaaaaatcggctggggctcgcagggtcctgcgcaagctcagaacttgagagactcacttgttgaggcaaagtcagatattgctgattaaattgaccttcgggccggtgcctcttgtcttnnagaatcccnnttttctggggggggggctcnttntnnntcncctacccattcnnntttttaatatttgtnatctgngggcggctcgccctgggattcgcgntggggnttnttnccancggngcgagctcctngtcgtcgcggctggaccccgcggcgccccctccccccccccccgggggggcc

SEQ ID NO: 48221 - DNA, 1305 bp, Zea mays
  Clone ID: MRT4577_143984C.1
tcgcttaaatccaagctgcattttagaggtttcgtgatatctgactggctaggagtggaccgtatcacctcacctcctggcgcaaactatacttattctgtgcaagctggaattaatgctggcattgatatggtgatggtgccatacaattacactgattacattaatgatctcacttctctcgttcacaagggtgtcatcaatataagcagaattgatgatgctgtgaagcggatccttcgagtcaaatttacaatgggcctgtttgagaaccctttagctgatcttagttttgcagagcagcttggaaagaaggagcatagggaactggctagagaagctgtcaggaaatcacttgctctgttaaaaaatgggaactctcccgatcagcaattcctacctctccctaagagagctagaagtatcctggtagctggaagtcatgctagcaatttggggtaccagtgtggtggatggtcaatccaatggatgggggacagtggtaatatcacaactgggacaacaattcttgatgcgataaagtctaccgttgctgactcgacgtctgttgtctactctgagaaccccgatgacagtttcatgaagcacaatgacttctcattcgctatcgtcgttgttggcgagccaccatacgctgaaacagttggcgatagcaccgacctcactatgctagaccctggtccagacacgatcagaactgtgtgtgctgcagttaaatgtgcagtagtcatcatttctggtcgtcccattgtgattgagccgtatgttccattagtggaagcgcttgttgcagcttggcttccgggaaccgaaggtcagggtgtcgcagatgtactctttggagactacggtttcacaggcaagctcccgcacacctggttcaagtctgtcgaccaactgcccatgaatgtgggagacctacagtacgatccactctaccctttcggcttcggtttgatgataaattcatcattgccagggttctctggtgttgacaatctgggatataggaagcaaagagtgctatttgctgtgctgtgttctctactgtcattggttctaatcagttaatgaattgggcgtagatagtatttcaacacatagctgcccttttgtagttctcatatgattagagtgttactaatctagctttagcgattgttagctgccaaatgagtcactggacgtcaatcaatctattatctatctatctactagatgattccccgcgtttaaaaaaaaaaaaaaaaaaaaaaaaaactcgagctgattctcacttacctt

SEQ ID NO: 48222 - DNA, 362 bp, Zea mays
  unsure (1)..(362): unsure at all n locations
  Clone ID: MRT4577_143985C.1
agcccagccaactttccggctttaccaggccccacgaacacagggggagggggcgcngcttcccatgggcaggacaaaaaaccccgactcacagccgagccctggcgacggaaccaggcatgcgccaccaactcggcagcggcaacctcgctaaggcggacaacgcccatacggtggccaccggccaggctgcgagccgcaaggtgctggacaaggatgctgtgcaccgatccggcatggcggagaatgtgaacaccgatggcgacgtgatgcaggccgtgcaccaacacaacggcccctcgctgcacaagatgatggccatgcgggccaagatctacgtcgtcatgcaaaacgccagccgc

SEQ ID NO: 48223 - DNA, 515 bp, Zea mays
  Clone ID: MRT4577_143986C.1
cggaaaaaaaaaaaaaaaaaaaaaaaaaaaaaaaaaaaaaaaatttaaaaaaaaaaaaaaaaaaaaaaaacctcagaattccagggccccttccgtggccaataaaaatttaccggtggaggttgaaactttgaggaaaagggttcgttcgttttgaaggcatcacaaaccttttttttttttttttggtggaccaaaaactttaaactgcatccatttatggagcataacattttaacggggctctgggtatcctcaccgaaaccaacgttaacttttttttaaagggctgcaaagggcagggaaagaaataggatggtccatagtttttatttaaaaacctgcaagtccagttaagtttctaagggttttaaacggcccacaaaaggtagggcagcattttcatttgattttctgaaattctgcataccttttacaagggggataggaataattaaacaggggtgaggagttgtaaaacgaaccaaaacattaaaagcgcacatcccatgccg

SEQ ID NO: 48224 - DNA, 634 bp, Zea mays
  unsure (1)..(634): unsure at all n locations
  Clone ID: MRT4577_143987C.1
cgacaaatngtattttatgtttggngatggactgntacccctgctgttgagtttcaggcaacgtaggattttctatgtttatttattgtttattttttcagcaataactaagaaaaccatctatgcaatataggatgatgctctagtgtttttgaaatattgttgcaagttttaactattatttggttgttcttatatggtgcactgaacattggcatgatcagtgaaaagaaaataaattttatcttagaaaaaacatttgttgatgtcagtcacgtcactattttcactttaacttacctgtttttttgtgcctctttgatattgattggtgaacatatagtttggatccaaaggcagttgaatcaccccctctatttgaagggccacctctacccagggaggttttgtgcacaatgccaattatcggaactgttttgaggattttttcagatatgcctatcaaggaagtatcccacatgcaaaatagggtttattgggccagattctgtaacattacttgcaaggaagagtttggcatttggaaaggcattttgctggcctctagtaaagttcggcttttatctcatgaagatggtagcgttgttgatcgtcgaaagtaatctacttttct

SEQ ID NO: 48225 - DNA, 819 bp, Zea mays
  Clone ID: MRT4577_143988C.1
ccatcccattgctgcccagaacacacgcctccctcccgcgaccccaaaatcatcagtcagcgcgagcgagagatctctccctgcttcttcttccatggagaaggcgatcgaccggcagcgcgtgctcctcgcgcacctcctcccctcctcctccgccgccccgtcccggatatccgcgtcggcgtgcgcggccggggacagcgccgcctaccagaggagctcctgcttcggggacgacgtcgtcatcgtcgccgcctaccggacgccgatatgcaaggccaagcgagggggcttcaaggacacgtacccggaggaccttcttactcctgtcctcaaggctgtcctggacaaaactggaatcaacccagctgaaatcggcgacgttgtggtcgggacggtgctaggcccaggttctcagcgtgcgatcgagtgcaggacgtcatctctgttagctggaattcctgagaccgtccccgtgagaactgtgaaccgccaatgctcatcggggctacaggcagtagcagatgttgctgctgcaataaaagctggtttctatgacatagggattggtgcaggtcttgaatccatgtcggtgaactccgttggttgggaaggccaagtaaacccaagagtcattgaactacagaaagcacaggattgtcttctacccatgggaataacatctgaaaatgttgctcagcgatacggtgtaaccagagaagagcaagataaggccgctgctgagtctcatgcgagagctgctgcagccacggcttctggaaagttcagggatgagattattccggtgcatacaaagct

SEQ ID NO: 48226 - DNA, 888 bp, Zea mays
  Clone ID: MRT4577_143989C.1
gctttcgcttccgactctctcccttttcgataagaacgaaccagccagggacctccccccatccccactgcccagcaagaacacgcctccctcccccgaccccgaactcctcgcagtcagcgcgagagatctctccctgcttcttccatggagaaggcgatcgaccggcagcgcgtgctcctcgcgcacctcctcccctccgcatcgagccagacccagctatccgcgtcgccgtgcgcggccggggacagcgccgcctaccagcggagctcctgcttcggggacgatgtcgtcatcgtcgctgcctaccgtacaccgatatgcaaggccaagcgaggaggcttcaaggacacgtacccagaggacctccttacccctgttctcaaggctgttctggacaaaactggaatcaacccagctgaaatcggtgacgtcgtggtcgggacggtgctaggcccaggttctcagcgtgcgatcgagtgcaggactgcatctctgttagctggaattcctgagactgtccctgtgagaactgtgaaccgccaatgctcatcggggctacaggcagtagcagatgttgctgctgctataaaagctggtttctatgaaatagggattggtgcaggtcttgaatccatgtcggtgaactctgttggttgggaaggccaagtaaacccaagagtcattgaactacagaaggcacaggattgtcttctacccatgggaataacatctgaaaatgttgctcagcgatacggtgtaaccagagaagagcaagataaggctgctgttgagtctcatgcgagagctgctgcagccacgggcttctggaaagttcaaggatgagattattccagtgcatacaaagcttattgacccaaaactgga

SEQ ID NO: 48227 - DNA, 539 bp, Zea mays
  unsure (1)..(539): unsure at all n locations
  Clone ID: MRT4577_14398C.1
tttacttggttttttttttttctaaaacgcttgttttttttcttctaaaaggtgcaggagaactgcgcgttaaatatattaagaagatagaagaaacaataatggtctaaatagaccagagtacagagtaaaaagcaaaagaaaaaccaccttatggtggccagaaacaaaaatacacataaacatccatatagaagacagccaaaagacatcaacaactgcccctaaactaagtccagatggcgcacagatctttggcacccgccagacaccacctctgagcgttgtctttgatgttctgtataatttggttgccgctaggagcatcccctcaaacacacatttattccgctgcttccaaagccaccatgccaacaacatcataagagagttaatccctttgcgcagcacatgagggatctttccctccaaattagcccatcaatcttggaaaaccaaatcagccctcgtgggggagaaatgccgcagattaaccatggagaaaatcctgaaccacacttnnctagagaaaacacaaa

SEQ ID NO: 48228 - DNA, 487 bp, Zea mays
  Clone ID: MRT4577_143990C.1
ttttttttttttttttttatactcgatattaatcactcaatattctcatgattccgatctcgcaacatatacaaatttaaacaacaaatcgctgcaggagatctaaactaaattaaacatagttttgaaaatagaacacaaaatttgtgtcatcttcaaccttgctccagtagttcttgcgcagggaggaatcaacgagcatgggatcgacaggtcgcagcagggggtcggcggggagggagcaggactcggcggcgcggctccggtcggcggcgagctccacgacgagcggcggggtcgacgcagggcggtctcgcgcgacaaggaggagaggagtggggatgagctcgagtgaaaaaggggaaccggctccatgggctcgacgtcgggctttatagagagagggaccacagggagggcgctggggagagggagaggccgatgacggtgccattaacgccgttaattgagttggtactagggagag

SEQ ID NO: 48229 - DNA, 412 bp, Zea mays
  Clone ID: MRT4577_143991C.1
cccacgcgtccgtccacacgtacgtccatgcatttgaacagctgcccatccaattctgggttgctgtccatccaacaagcgaattatggaccatgcatagatgttgtagctcgtcttattatgcatggctgactagatgcacgacaactacatcatggtttaccataccaaggtcatggagcatgtcctttgactcttagacggctagtgctccgaatcacctaggccaactgacagatgtcttttctctggaccataacgacttcgtcgagatcgagatcgatgacacgctggagatgctcaagcatctatgtcggtgaggtcagacatatcagcggcgaactgatccactttacgacaatcacgatgcccataatgacccatatcacgctcactgacctcaagtatttat

SEQ ID NO: 48230 - DNA, 847 bp, Zea mays
  Clone ID: MRT4577_143992C.1
attggtaccctcgagccggcctgttgccatgctctggagtaccttcatttttattgtgatcctccactataccatggagatgttaagcctagcaatgtcttcttggacaagaattaccttgcaaagcttgctggttgcggtcttgcacaccactctagtagtggcaatacaactcccagttgcacaccagtaaatgtcaaggcccaagcaactcctggctacgtagaccccgagtacatggtgacccaggagttgaccccgaagagcgacgtgtacagctacggcgtgctgttgctggagctggtgacggggaagccggtgatccaggacaacaagagtctggtggagtggtcccgcgagctgatcggcacggactaccggctccacgagctggtcgacccgtctgtggcggacgcgttcgacctggacgagttgcaggtggtggcggacgtgattcactggtgcacgcaccgggacggcgcagcgcggccgtccatgaagcaggtgctccgcatcctgtatgagcggctggacccgctgtccgggcggttcgcgcgcgccgtggagggcgaggaggggtactactactgccacggtggcgggcgggtgaaggggaagcaggcgggcgacggcgtgatccagttcagcggcgacgcggcgcggtcttggctgccgtcgtcgagcagcacgtccaggtcgcactgcagccgcagcgtgctgctggagtgcaactcgcccgagccgcagtcgtccccggcccacggcaacggagcgttcctggcttgatagcaccggtccgtcacccgtgttgcgtccgtttcatggtctgcactgcaccgcagtctgg

SEQ ID NO: 48231 - DNA, 375 bp, Zea mays
  Clone ID: MRT4577_143993C.1
gataaacatactgaagaccatgtatccgtcttaccctaatcccaaaatttttgtggaggaggatgtcacttgtgtaccactctttgaaactgtgcaaactggggtggagctcttaagccatatagggaatcccccgcgacactgttgaatcctacagggatttgggcatctggattggaccattgacctaggatggtttcattggtggtggcctccgacctcctcctgaataatgtaggcgcagtgacaccagaactgccgttttcttaatttttaaacacttttttgtacgggttaaggccaaataaataggcccggtgctgactgttgaatggtttggggccaattggggtggttaaaaccttccaaaaattt

SEQ ID NO: 48232 - DNA, 235 bp, Zea mays
  Clone ID: MRT4577_143994C.1
ctattggatgggattatggggtctaaaatcccttactattaggggtgtttcggtagtgatcaattgcatctgaaactgctgcagcttcaagcttgttgtgttggtgtctagtgtctgcatgagtttgttccttggctacggtagctacagcatgctttactgaacaagcccttgaagtttgtacattgagctttggtatatatttgcattggactataatgtaaagaactaaaaa

SEQ ID NO: 48233 - DNA, 507 bp, Zea mays
  Clone ID: MRT4577_143995C.1
cattttacaacaactacaacaacttcttctaacaaaccttgctgcctactctcaataacatcaatttcttccattcaaccaactagctgcattgaactctgcttcttatttgcaacaacaacaactaccattcagccagctatctgctgcctacccccaacaatttctttcattcaaccaactgacagcattgaactcttctgcttatttacagcaacaacaactactaccattcaaccaactaactcgtgtgagccctgctaccttcttgacacaaacacagtttgttcctttcttaccacaacactgcccttaacacttatacccttttacaactgtaacaattgttgtcatttaaaccactttctttaacaaactccaccaacttttaaccaacaacccaaatttgtttgtcccctcttttaaatttcttaataaatatactttaaaaataaacctttttgccttatttttgggccttcccaaaaataaaaaaatcttttttat

SEQ ID NO: 48234 - DNA, 818 bp, Zea mays
  Clone ID: MRT4577_143996C.1
ccggccgggaaaaaaaaaacatccatcacctaccagcacttaaagcaccaccagaaatcacaaccgatacaatgcgccccctcacagaaaaggagacacagactctcttcgagaagctggcaaactacactggaggctctcttaagaacctcatcgcccctctcgacgactctcccaacgctgatcgctatgtcttccgcctggttcgcgatcgtgtcttttacgtccgcctttccattgccaacctggctacttctattgcgcgcgagaagcttctgtctctaggcacatgtctcggcaagttcaccaagacgggcaagttccgtctgcacgtcacagccctccccatcatcgccgagcacgcccgctacaagatctgggtcaaggagaacggaaccatgcctttcctctacggcagcaacatcgtcaaggcccacgttggccgttggtccgaggactgccctgagcaccagggagtcgtggtctacagcatgaacgacaccccgctcggatttggtgttacagcccgcagcaccgctgaggcgcgaagactggaccctactggtattacctgcttcagacaggccgattgtggagagtacctccgtgacgaagacaacttgtttgcgaccggttagagtggaaggcggctttacttcgtctgggcgttggggtcattttttaagtcattctttggcgttgagagtgaagggaaaaagaaacttgcaatcaagtcaatcatgcttggattattttgggtggatttggtagacataatcatcgtcatcaccaaaaaaaaaaaaaaaaaacccgcggcc

SEQ ID NO: 48235 - DNA, 745 bp, Zea mays
  unsure (1)..(745): unsure at all n locations
  Clone ID: MRT4577_143997C.1
aataaccgacccccctcccccagaaaattccccaaatttggccggccaaaatcatggacggagatcgacggacgccggcggccgcggccgccgccgcatcggcggcatcggtccttgacgacgacaacctcctccgcgagatcctcctctgcgtcgccttccccacctgcctcgtcaacgccgctctcgtctgcaagcggtggctcctccacgcctccagcccggccttcctccgccgcttccgcgagtgcaacccgccccgcctccccggcgcctgcgtcggctaccccggcaggtatcgcttcgtgcctctcccgcggcagcccccggagctcgccgcccccatacgccgcgcgacctcctgctgcgacgccgccttcgcccgcagatgcccgcgaatcaagcactgccggagcggccgcctcatcatcgaggtcttccgcgacggcagcttcaatcacccccttgtggtgccggttctcgccggggagtcttcaaccgtcctcccaccaaccctgctgtcccacgcccaccgtaactactgggagaggcgcactcaattcactgagatgttcctacccgaggatgngggccgcgacggcatatcgttggtgaatctgtggaaggaccggncaaaagtgtatgcggaggtgtgcatcctcagatctggccgatggtgcgtccctgacatggaatcagagatagagcccccagatggcacagtctttctttgaatgctaccacc

SEQ ID NO: 48236 - DNA, 1642 bp, Zea mays
  Clone ID: MRT4577_143998C.1
gaaaccatgagttctaggtttgctgaaatctcctttgatctttaatctgttcatctccttgcgtgagtctgtggcgttagcgtgatgccttctcctagttcatgaacttccttccggttcgcaatccctagtcgtcttgtcctgatcttacttgagtgctcgtgagctctttccagtggctaaagactgcagatttgagttctggcccaagaaccgcgtgctagcccgccatggaggtgaggtccgagcaagggctgatggcggggagggatctattcggcatgccgaagagcccgccggcgcccgcgccgccgtcgtccgccgccatgcagagcgtgcgcatggcgtacaccgcggacggcaccgccgtgttcgctccggtgagctcttcggccgcgacgccgtcttaccagccgcagggtgcagcccacggcgctagcatgtccgcggcgacggtcattggaggcaatggcgcggcagctgcgccgagcatgggggagccggtgcccaagaagaagcgcggacgaccaaggaagtacgggcccgacgggtccatggcgctggcaatggtgcctgcttcggcggcttcagggtcgccggcgacagggcagggtttttctgggccgttctcaccgcctgcgttaaatccggcgagctctctggtggtggcgtcgccagacggattcaagaagcggggccggcctaagggttctaccaacaggccacgcgtggacgctgctgggtcatcaggagctggatttacacctcatgttatcacagttcaagctggggaggacgtggcatcaaagattatgtcattttcccagcatggaacacacggagtttgtgttctttcagcaaatggctccatatcaaatgtaacgcttcgtcagactgctacatcaggcagaactgtaacatacgagggtcaattcgagatactgtcgctgtcggggtcattcttcctggctgaggatggtgtccagcgcagccgaaacggaggcctcagcgtgtcgctggctggtcctgatggccgtctgttgggtggtggggtcgcaggacttctagtagcggcttcaccggttcagatagtactgggaagcttcaattctggaggcggaaaggagccacaaaagcaggctccttcagaacctacatcggctccaccgagggttgctccgacagctgggatgggaggacccagcagcccttcttcaagaggcacattgagcgagtcatccggtggcgctggaagcccaccgccactgcatcgagccatggctgctagtgctagcaatagtaaccagccaccgttcttgtccagcatgccttggagatgagtttgcagcttgcattctcttggccaattccaggcaggatgtagcaatctgcgctttcagtagcgcccgttgtgtgagtagctgtgtgcagtacaagccagaagcttgggtgggaatataattgcgtctggtaaatctgtagctctgttgtaggttccaccctgaattcctgtgctaggtgtgttgagctgtgtaagcaatgtaatcctttcagcgttatcaaatgctatttagttaaatgtttctaccaaggcatgtcgatttgaatcataagatatgaatttgctgtttgcgtctcgggc

SEQ ID NO: 48237 - DNA, 367 bp, Zea mays
  Clone ID: MRT4577_143999C.1
tattttttattagacagcacaaacacactgagcacgaagaggcatatattttgcgtagcgtgaatatatcatttagcaagatattcataacgggcgacaccaactctatactatgcgtagcttgaatcacaagtacgtaaaatgaggactcacgaatatgagatgagccatcaaaatgatagcgaagatccgataacatcctaacaaaatttgtccccatgagccaacattaacctgacccataatccaactgacaaagaatacttactatggtgatgaagcgtctgagacgatgcacacgcaacaactgaatttcccgatttgcagaggccgagctttatggcaaaatccagggcaaaactgaccg

SEQ ID NO: 48238 - DNA, 359 bp, Zea mays
  Clone ID: MRT4577_14399C.1
ggccattacaaaaaaaggaaatggttcttattatcttaaacaacaaactgattgaacttatacgaagattggaccacacacattaagacagatgagttcacaaatccagaaatgctattaagttaaaaatacataactgtgaatttgaaacacaagtacatactcagactgaaagaggattttattcactgagtgtttgattgatttcaattacattagtactagaaaaaaagttgctaggcgaatacaagtaacaattacacattcaagcgctaataagggtagaactatgtacaggttatgaccaaatttaaatataaaaacagacttctttggcacttaatgacacatctgtgtaa

SEQ ID NO: 48239 - DNA, 561 bp, Zea mays
  unsure (1)..(561): unsure at all n locations
  Clone ID: MRT4577_1439C.1
cccagctccggcggagtgcacagctctacatggtgtcttcgaggtaatgtccagcaacatgagctcctcattcccattgattcaggatcgtcccataattttaccagtgatatatggcagccaaggttgtctggtgttcagtcaatacattgcaggctggcagacaaagtagataatgggcagacgatatcttgtcctcatcacttgccaggtgctgagtggtttatatcatgctaccagtttgtgaatgacctggttgattggcttaacaaatggagggttataccatatcagagcacttctatttgtttgaattggtttgctgtatgttcatggtatctggcttttaaggtgctacaagaggataagaatgattattgctctgaattatttgagcttgcagctacttttttcagttcagggcatggtgaatatggtgctaaccttctcttgaattgcaaatcattgctcacgagtgtcaatggcatgctcatggctaacgacttaaacaaaanaggcattgagatgctcggacgagatggaaagctattggctttgcct

SEQ ID NO: 48240 - DNA, 352 bp, Zea mays
  Clone ID: MRT4577_143C.1
ctaaaatgtgcggatgttgctcagaacacgagaccttctatagtggaaattgcggacaagctcaatggaaggcatgctcactgaatgatgaactcctgcatactatacatgcacgtgaaaattatgtcgcggacccattgagattcgctctagatggaatcatgtacacagtaattgcatgagttaccgattatgtacttttgaatcatgtgttcctcgtgttgtgtcactatttcaggagttccttgattagccattgagtattactatcttctgacacatatctgaatgcataacctgttgaaaaattgcgtgcatactagttatcagtgtgttctcattgaaacgctag

SEQ ID NO: 48241 - DNA, 2289 bp, Zea mays
  Clone ID: MRT4577_144000C.1
atgagttctaggtttgctgaaatctccattgatctttaatctgttcatcggcttgcttgagtgtgtggcgttagcgtgatgccttctcctagttcatgaacttccttccggtctggagctttgcttactcagttacccttttttgacccgtatttttttctctccattccacaactgttggctcccaaattctggtgatttgttgggtatccccctgcgaaatccgggtaaaagtggggatccgcagcttctgtggcttgtcggcttttaaccctactttttttttgaccctttaccattttcttttgcccatttttaatcccccattttcgtcagtaatttacttttattttcatgtctacttatttccgccgtaaaactgtgtttgtcgcgtgaaagatcgcgtacttgagcagtgaagggttttatggtttttttgcaggttcgcaatccctagtcgtcttgtcctgatcttacttgagtgctcgtgagctctttccagtggctaaagactgcagatttgagttctggcccaagaaccgcgtgctagcccgccatggaggtgaggtccgagcaagggctgatggcggggagggatctattcggcatgacgaagagcccgccggcgcccgcgccgccgtcgtccgccgccatgcagagcgtgcgcatggcgtacaccgcggacggcaccgccgtgttcgctccggtgagctcttcgcctgcgacgccgtcttaccagccgcagggcgcagcccacggcgctagcatgtccgcggcgacggtcgttggaggcaatggcgctccagctgcgccgagcatgggtgagccgctggccaagaagaagcgcggacgaccaaggaagtacgggcccgacgggtccatggcgctggcaatggtgcctgcttcggcggcttcagggtcgccggcgacagggcagggtttttctgggccgttctcaccgcctgcgttaaatccggcgagctctctggtggtggcgtcgccagacggattcaagaagcggggccggcctaagggttctaccaacaagccacgcgtggacgctgctgggtcatcaggagctggatttacacctcatgttatcacagttcaagctggggaggacgtggcatcaaagattatgtcattttcccagcatggaacacacggagtttgtgttctttcagcaaatggctccatatcaaatgtaacgcttcgtcagactgctacatcaggcagaactgtaacatacgagggtcaattcgagatactgtcgctgtcggggtcattcttcctggctgaggatggtgtccagcgcagccgaaacggaagcctcagcgtgtcgctggctggtcctgatggccgtctgttgggtggtggggtcgcaggacttctagtagcggcttcaccggttcagatagtactgggaagcttcaattctggaggcggaaaggagccacaaaagcaggctccttcagaacccacatcggctccaccgagggttgctccgacagccgggatgggaggacccagcagcccttcttcaagaggcacattgagcgagtcatccggtggcgctggaagcccaccgccactgcatcgagccatggctgctagtgctagcaatagtaaccagccaccgttcttgtccagcatgccttggagatgagtttgcagcttgcattctcttggccaattccaggcaggatgtagcaatctgcgctttcagtagcgcccgttgtgtgagtagctgtgtgtagtacaagccagaagcttgggtgggaatataattgcgtctggtaaatctgtagctctgttgtaggttccaccctgaattcctgtgctaggtgtgttgagctgtgtaagcaatgtaatcctttcagcgttatcaaatgctatttagttaaatgtttctaccaaggcatgtcgatttgaatcataagatatcaatttgctgtttgcgtctaaaaaaaaaaaaaaaaaaaaaaaaaaaaaaaaaaaaaaaaaaaaaaaaaaaaaaaaaaaaaaaaaaaaaaaaaaaaaaaaaaaaaaaaaaaaaaaaaaaaaaaaaaaaaaaaaaaaaaaaaaaaaaaaaaaaaaaaaaaaaaaaaaaggggggggccctttttggggaaaacaaatttttttctccctggttgttgaaagataaaaattttttttttttggggcgggacaaaaaattaactggctccgcgggtttaaaggtttgggtacgggggaaaaccggggaaataccccaaattaaaagctttttggaaaaaaatccccttt

SEQ ID NO: 48242 - DNA, 883 bp, Zea mays
  Clone ID: MRT4577_144001C.1
ccggccgggaaaatagaggatgagacagaggatttgagaatgcagaaggcggctgggcatttgcttcccctctgcagctctgctctgtttgcttactcctcttcccttccatggcggcatacgccggaaccctagttccacccttcctcaccgtccgcctcgcggtctcccacctcagatccattaccccggggtcctactccctgagccactgtctcccccgcctcgcggtcgcccgtgcggcctcccgcggaaacggagacggcgacggcgggcctccagcggagggggagaaggagcggcggcgctcgtcactcccagcgctgtcggagatccggtggggggagctgctatccccggaccccaccaacgccgtggctgtggtgctcacgggcgcgctcgtatgggctggcgcctcactgctgctgcagctcgcgctcatctccgcggcaatctttgccgccgctgtcaagtactcgtttgtcgccgcgctcctgttattcgtccttatcgcgctgctgtgatcgatccgccttaaggaaaaaagctgtaaattcgcacgaagcattcggatggaagatcagttttgattggcctcgcagatttaatttgcagaggtggcactcgtggcaaacagacactgactttgctttcctctgaagccgaatacacatgcattgacatggcctgcttttatatagcaatccaccttgtaagaaatatgacctttgggttacttgcatagctgtgggccgccccacatgaaactatgaaagcatctcgctggccactgtacatctttatttaagctctgtaaattcttatgaatattgtaatatgatatagtttgtatacttgtgttatgattaagtgaactcatctt

SEQ ID NO: 48243 - DNA, 333 bp, Zea mays
  unsure (1)..(333): unsure at all n locations
  Clone ID: MRT4577_144002C.1
ggaaaaccggccgacccacgcgtacgaccacacnttctactgctactagccaaattttcatccaatcccaaacaacaacctgcgctgcccttttaatatctttagccaccctcactacaactctcaataaccatggttcctcattaaccataattacacccttctctacaatgacaccaagtgtcctctcctttatccactaaccggctaccctcaccctcatagaccttactactgtgccgtcggagccaacaattcctacaccccttacatcgtgcacgctcactacaatgactgcctctacgaccccatcgacatcaatgacatcaactc

SEQ ID NO: 48244 - DNA, 379 bp, Zea mays
  Clone ID: MRT4577_144003C.1
ctgtgcggcgctcgaggcggccgggtgcgacgggggcccagccccagccacggttgtttggccgctagccatgggagcacgaccgccaacagaggacgcatgtccgaccgtagctgtcgtgggcgcgggaccaaccttagccgcagatccggccgccgactatctcgccacctgggcgtcgcgcagccgcctctcccacgtggcgacgttgcgggagcagtgcgggagacgacatcaggagtgcggaaggtggaggggaatcaaccactgcattggtgtagattggcgggcaacctgtccgggctgccatcgtcggacggcgaccaaatctaggcagcgcgggtgttggtgatatcttacgacgcctctcctccactgc

SEQ ID NO: 48245 - DNA, 488 bp, Zea mays
  Clone ID: MRT4577_144004C.1
ctagatcatttacatatactctgacattaatctcattttttaaataactaacgaaagcttaaattcgtattaaatgtgcccacctatttgtcatttacaaagaatagtactttatctatgcttgttggcgtactgattgttgcttcatttgaaatgttgaaatgaaaacattcttattgcttattcctttttttggtgatattactgccttctagacatgctttattaaagtgaaaatatttctctttttgttgaacttctaagtagtgtatttgttttgctgaggtttcttcttttatagtagaattttatttttttattttcttgtatttgttttttcttttcattatttttttgtacttgttttatttagtttttttttctttatttattcttattattttggtttttttttttatttttatgtttttttgttattatctatttatatttttttattgttattttttttattattatgttttttt

SEQ ID NO: 48246 - DNA, 348 bp, Zea mays
  Clone ID: MRT4577_144005C.1
caggataaaaaaactttggtaaccttttgggccccataaaaattaacctttgcagatcattttgattaattggcacatgggggggtaaaaaaagggaacaggggcccaactggcctgggacttgaaattccaggtcccaggatgatcttaagggggctcgttccctcccccttgtcatagcacagtaaaaaagggggttagcaggttaaaccatggggttcgggggccataaatggagctttagttgaccaccattgcttttccccgccccagccatccggaccgggaggccctttaccgtcgcttcaaaaacaggcccaagggtgcggttgttgtttttacacaagc

SEQ ID NO: 48247 - DNA, 397 bp, Zea mays
  unsure (1)..(397): unsure at all n locations
  Clone ID: MRT4577_144006C.1
gggggcgaccctcccgggccggncggcgctcgtatcactctcacacgccgggtagcaaacggcgagggacgaccatcgatatgggaggatcaatcagctagccgaagaagtggtgcttcttctcgccgccggcctcctcggcctccttgtggtccttcttcttctcgcggcgctcgnggaaggcgaanccgccggagccgacggccgccgccgccgcgacctccccctcaatcttgaggaggagcgcgtgctccgaaaccttcttcaactcgcgcttcccctaaagagcgaaggccccggccacccacgagcacgacatcaccacgcgctaccccgcctcgcactccctccccccccctccgactaccaaaaacccccccccccccccccacaccac

SEQ ID NO: 48248 - DNA, 563 bp, Zea mays
  unsure (1)..(563): unsure at all n locations
  Clone ID: MRT4577_144007C.1
ccgtgccattgaaccttcccganactacatcaacatggcctctgagggaattgaacagaaaatggagaacctcaacgtcgaaaagccctccacctcgcagtcggccgagcccaccgagaagcccgcccagcaggacaaggagaggaaggaccagaagaaggccgcgaagcccaagaaggagaagggagagaacaagcagggccagggaaagcaaggccagggcaaacaaggccagggcaagcagggccagggcaaaaagaaggaggaagacaatgccgacaccaagggtatcacagtcaccaaggccgaggacctctcagaatggtaccagcaggttatcctcaaggctgagatgctcgagttcaccgatgttcccggctgctacatctacctgccccgctcatacatgatctgggaggagatccgcgacttcttcgacgcgaagatcaaggccatgggcgtggagaactcatacttcccgctcttcatctcggaggccaacttgcagcgtgaataggatcacgcctagggtttcgccgctgaggccgagtgggtgactgagg

SEQ ID NO: 48249 - DNA, 132 bp, Zea mays
  Clone ID: MRT4577_144008C.1
gcaggacaggccgctaaagtgtgacgagcccatcctcagcaaccgatctggagaccaccgtggcaaattcaaggtggcgtccttccgtaaaaagtatgagctcagggccccggtggctggcacgtgttacca

SEQ ID NO: 48250 - DNA, 617 bp, Zea mays
  Clone ID: MRT4577_144009C.1
aacatatatcatatcattttttggacattaaacatgctttacataccaccatgtggtgttagttttcttaaaatgatgtctgtgtcgcctcctcttcctcccacggttctggagccaaacatgctcaaactctttttttctcgaactgaaaacttgttaggctctagaagcatcgcggtacttggagttgtcgaaaggaaataccagatcatgtccggctgtctgctcgatgttcattgtacggctacgaatgaaattggcattgtggatactctaaccggcgatctttgctcctgtctctcgctaaagctccataaccaaggatctagacaagggtgaagccgttggtattagaacagctaaaagccaccactgtgctttgtgtacatcaataggttgcttccacgttgcctttgacgtactctgtctgcaacagttgatcttaacaacttttatcagaaaaaatagaatcatatactagaatccaccttcctaatacaataaataataacgaaaaagggatcttaggacctgcaggggaaaagaggaaaaaatcgaatagaacacaaacccaccaaatcagatgtgtaaagttgttgtgttctacttaggatcta

SEQ ID NO: 48251 - DNA, 637 bp, Zea mays
  unsure (1)..(637): unsure at all n locations
  Clone ID: MRT4577_14400C.1
accggtnccggcacattcccgggttcgnnacccacgcgtccgnaaaaaaaaaaaaaaaaaaaaaaaaaaaaaaaaaaaaaaaaaaaaaaaaaaaaaaaaaaaaaaaaaaaaaaaaaaaaaaaaaaaaaaaaaaaaaaaaaaaaaaaaaaaaaaaaaaaaaaaaaaaaaaaagggggggccgtttttagaggttccatttttttttccccttgcttgcaacttattactttttttttggggccccctaatttaatttaatggcccgggtttttccaactttgggcttggaaaacccctgggtttccccatttttttccttttgaaaaaattccccttttcccaatttggcttattatgaaaaaggcccccccctttcccctttccaaacatttgcccccccttattggcaattggtcccccccttttaccggccctttaagcccgggggttggggggtttccccccaggtggcccctttcttttcccagcccctttgcccccgtttttttggtttttttcctttcttttttggccagtttggcgggttttccccgtaattttttaattggggggctccttttagggttccattttatttttttaggggccttttcccccaaaaaacttgtttgggggg

SEQ ID NO: 48252 - DNA, 293 bp, Zea mays
  Clone ID: MRT4577_144010C.1
gttatacttaggaaggtgagaagaacacacatgggggatcttttcgaacaaatgggggtgccaaacaaacaggcaaccagagacatgggagatcagagccacggagagagggacaggaaccacccaaggaccaatgaaactgggcctgacagccgacgcgacaacgaacacacacaaggaaaggacccagaggaagccacccatgctcacgaacaggagcaagcataagaccacgctgaagcagggcactacagccgaggtgaaccaagagcggaaccccgcctacggcgaga

SEQ ID NO: 48253 - DNA, 113 bp, Zea mays
  Clone ID: MRT4577_144011C.1
gaacgtgacagcggcgggcaaggacagtaacttgacaggtcacagcgggtcccatcggcgaaggctgacgttgtgggaaggggcagcgacgcgctgttgttgcattatgttat

SEQ ID NO: 48254 - DNA, 569 bp, Zea mays
  unsure (1)..(569): unsure at all n locations
  Clone ID: MRT4577_144012C.1
gttcagatgcgtanagcttgctctgtcttcaagttgttcctgaaagattcttgctttgatttcaaggaattgaaacttcttctgtgatggttataagttacttacaatttttttaattaaaaacgtgcaattgtgaattgatgattatggtctcttccaacttcacttcttgttactaatactgtgccaacgtttcgatagtggatggatctgattatggggtttgcttaagtattctacttcaagctttttactaatctttctgcagaagtagctattgataaccatggccaaatatgtagcaaagccttttagtcctcatcttattgttttctactttgttttgttcttttttccagttattttttttctagtgcaacaatttaaaatgattcctattctattgtatttaagttgttctccatccacaaaagctttaatttttaacatatttttatttacatgattttttttcgaatcagaatctatcttatcagccaaacggttccataaagtgattctgattcatcatcaaaaacatttcttgagagatcttgatcctaacattt

SEQ ID NO: 48255 - DNA, 716 bp, Zea mays
  Clone ID: MRT4577_144013C.1
attcctcacaagcagatcaaaggtctagttttagttaggtagcaaagggggggaaaatggctccgcttatcgctgctgtcatgaaccacgctgcagcccatcctgtccttatgaggcacctactacgacccaaccatgagagattctcacggcaccagctggcggcttcttctccacagagcagcaagtgaacgcgcaagctatatcttgtactacacgatctgtaagagtacgcagacaaaatgtgagtccaaatgttgagcccctcggaaatcgcacaaagggactggctcccctctgacttcaccttcggggccgccacttcagtgtaccaaattgaacgggcttggaatgaatatggaaaggtggaaagtaactgggatgacttctgtcacaatcagtccggaaaggatactgcacgggagcaattcagacattggagctaattctgaccatatgtacaaaacggacgtcagattgctcaaggagatgcgcatgcacgcatatacgtgctctatctcttggtccacaatactgtctgaaggaaccaaataatgatgtattaacccggatggcatcaagtactacagagacctcatcaacttgttgctagaaaacgacatacagccatatgtgaccatgttccactgggatgcacctctagcactagatgagaagtacggcggcttcctagatatcagtctaagaggattgca

SEQ ID NO: 48256 - DNA, 204 bp, Zea mays
  unsure (1)..(204): unsure at all n locations
  Clone ID: MRT4577_144015C.1
cgacgacccctctctcattccataccgnacaagatctactcaatatgtgcatggtatttatttcacacccatattatatccatatctgcaaacatgaaaaaactcttgatattgctaaagtactttcttgctataataacatcattattgctaagctcccttctcaacaaaatattctttactttgcaaaaaattcatctttac

SEQ ID NO: 48257 - DNA, 364 bp, Zea mays
  unsure (1)..(364): unsure at all n locations
  Clone ID: MRT4577_144016C.1
aaatcccggggccgcccaagccttccnnaaccccttggccaacccattcaattccttttttttcttaaccgcaaattccaaaaaaaccggggtttttttcctgaaattcccagttaaaacaaacnccttcccttctaaattctttaaccctttcaaaacctgaacgtccaaggccttttccaagaaaaatttccttaggtttggcggctttttaaaaaaaaactttaagtttttccccagttccaaaatcgggaacaacagcatcctaacttacaatatcttttcctaaggcccaaatttttaaactaaaccatttaatcccattaattaaaacgttggtttttttccctccttcctttttaaa

SEQ ID NO: 48258 - DNA, 847 bp, Zea mays
  unsure (1)..(847): unsure at all n locations
  Clone ID: MRT4577_144017C.1
cattgggaccctcgaggccggccggggccacctcctgggcacctcccccggcctccgacgctgctaaccgctcgacgtcccgccacctccaaacgcagttgggcgcgcttccagcctccgccggaccggcgagctccggaggtctcagtcactcgaactctcgaagaacagagtgtccatggaatgatttaaagatggcggcaccactgccttcgtcttgcacatctcttgcacactctcctagggtttagggtctagactcaaaccccttctcgaagactaccatatggcgtccgcatctcgagtgaggcttggcactctagttccccttaccaaggacaatgctggctcatcaaatggatctgtatcaagcattcctatattccaggggcccaatgtagtcgggagggatcatttggttgtcgtcgacaagaggatcagccgcaagcatctgagcctccacgcctctactgatggctccattgaagtagtagtggaaggtccaaaccctataattgtgcgatcgaagggacagaggaggaaggtttgtgctaaagagacagccaagattgctcatggtgatgtcctagaactgattcctggtgattatttcgtgaagtacgtggacatgggtgatgaacatgtaccaatgcatttgagcgacttaatgaagggtaagaggtatagtgaggaacatggcgcagcagtcaagaggattcgacagattatggaagatgaggctttggcaaaaacactacaggaaagctttgcagcagatgatgcagctgtttctggcatgccttctgggcaaaaaatagttcacatgacagtgncggttcttccgaag

SEQ ID NO: 48259 - DNA, 300 bp, Zea mays
  Clone ID: MRT4577_144018C.1
cttgaaatcgcacactctcaccaccgtcattctcgtatatgttcgcaatgtaaaagcatcgatcgtgtgtggtgactgtggtcgccgtatacctgacgtaaaaaaacagcagtccacattcggggggtcgtcgacacttgcaccacgcactcatcgctgcacccttgagaacacgagacacatctaatggtcatcgtgtcttgacagagtagtacaatagttaccatcgtgtcttgtcggttaatgtgatatgatccaattttgggttgggtgatctaatggtcatggtttttttttggt

SEQ ID NO: 48260 - DNA, 308 bp, Zea mays
  Clone ID: MRT4577_144019C.1
cagagatgaaaaagcaaggctattggggaacttgcttgggcctatatgcagtccgaaaattatgaggaagcggagatgctctataggcaagctcttgctatagaagctgactacaacaaagagtgtaacttggccatctgtttgatgaagactggaaagttggctgaagctaaatatctgattcatgctataccttacaactgtaatgatgaaagtcatgttaagtctctctcccgggctactgaaatgcttagggaatttgacttgcaatccatcccctctcccataactcaggcgaagtccaaaga

SEQ ID NO: 48261 - DNA, 1037 bp, Zea mays
  Clone ID: MRT4577_14401C.1
tgcctctacaggaaaaccatcagagtgcaacacatacaatgacatagaggccgtttatgattgcttgaaaaaggagtatgggatagaagaagaggatttaatcttgtatgggcaatcagttggaagtggaccgacattgcatttagcctcacgtctggaaaatataagaggggttgtgcttcacagtggtatactctctggcatacgggttctttatccagtcaaagtgacactttggttcgacatcttcaagaacatcgacaaaataaagcaggttgactgccctgtgttggtcatacatggcacagccgatgagatcgtggacttcacgcatggcaagcggctgtgggagctagccaaggagaagtacgagccgctgtggatcaaaggcggtgggcattgcaacctggagacgtacccggagtacatcaggcacctgcgcaagttcataaacgccatggagaagctggcaaaggacagcaaggcggccagggcgccgccgccgtcgagcatggccgacgaagtaagacgcaccaagtgcttgagattcgggaagagatgaggctggcggcgaggccatgcgggtctcggccgtctttagctgcgtacgccagtcactaaccctgctgcattgcattgcattgaattgctttgctgctgctcgtgccgtgtgcaagtcgaaggagcgatgtcactggtcgtcgatgaggaaggaagggactaaggaaagcaggcaggtgaatggggattgtttgcctgttgagttgtacgtgctgctctctctgcagacgtcgacgacctgggaaggaaacgcagcagcaaccctaggtcatgtatgatccgtgtgagctgagttcagagtagagtagacagaaagacctgtggctgctgcagtgtgctgcagatcgggagatgcctttgctttcctagtggttgtgcaaaggaattcgtagcgtaatttttctttctcattttttcctacctgtattgtagtcattgtgcaaaggaattcgttttgattgattgattgaaaaaat

SEQ ID NO: 48262 - DNA, 291 bp, Zea mays
  Clone ID: MRT4577_144020C.1
gaggagaagccctctagtggtactgggacctaatttgcttctttaacccatgattggaccgcttggtctgtagaaaaggaggatggaacctttgaaattccagaatcctgttgaaaggtcaaccccgaaaaaacctaccactgttgcaaaggagccaggtaaaactccgaagatgaagaagcttagaaacctcagatccagatatggacacagttcacaacatattctcgttgcccacacccaattcatccgaggctctgttacacactctatgtggaacaccacaggtgt

SEQ ID NO: 48263 - DNA, 669 bp, Zea mays
  Clone ID: MRT4577_144021C.1
gccctccctcgagttttttttttttttttttttttttttttttttttttttttttttttttttttttttttttttttttttttttaaaaaaaaaacaacctttggggggggctttaacccagaaaaaactaaaagggggccctaaaggcttttaaaaatatgggggccgggggccaccctgggggaaaacgctgccataggaaaaaacacccaaccccgggggggggggcagctccccccccaggggaacccgggttagttcccctcccccccaaacagaaaaacaaagccctgtttaaagttaacccaactgggttttttttctttaaaattccccccaaattacagttaaaaagcccccaacatttccaaacaggggcaaaaaaaagataggggggggcctaaaaaaaaaaattttttatccccccccgggcccttttgggttgggggaccaaaaaaaaacacccttcccgtaaaaccccctgggcacaatgaaccccccgcccccccccttgaacccctttcccgaatactgggaaaacaaaacgttgtttccaggagggacccacagaggtttcttggtgccgtcccccccaaagggcctggggccaagggttcccattgatccaaaagaagggttctccttagtggccgggggaaaaagaaaac

SEQ ID NO: 48264 - DNA, 311 bp, Zea mays
  Clone ID: MRT4577_144022C.1
cgtccccggcccgcaccaagcacaggtgcatcatcgtctccagcaagctcttattagtctgacgcgatgagtggcacaccgtgccgtgcaacgttataccatgccggaaatggcatgcaccacagacttctggtcgggtgtctgtgcgacttaactagacaaccctcacccatcgtaaatcgcgttacaatgtcatgcctgaaaagcaagtgctggcaaatgctggctaaccaacaaccgtactgtctgaacacgcagcttgcaatacactaaattaaaagggatcggcacgtttccagacacacaaaaag

SEQ ID NO: 48265 - DNA, 720 bp, Zea mays
  Clone ID: MRT4577_144023C.1
tgggtacctcgaggccggccgggtttggtgcatcactgattgagttatgctatatgcatggaattgaattgtatatacaatgtttatttgaattttctatcaaactatatcttgtactaatttcagtgctactactcaaggatgttgttgcaaatgagttgtggagaaccgtagatgcaaatggttggagagcatcttctgcaccacacatctattggcctcacataccagctgaatctgagagcaatgggtacttgtgtgtccggtgcaacggcggcttgaccttacaaatcagtgttcttatggtagcggcaacattagttttgctatgcaccaaatctttggaatcatcactgctcaatgatgggccatggcttctaacagtcccttccattgctatcattggaagagaggttcttgactttctacatgagctttttgatatcttaaaagaccggtcttacatgttgacagaagctgaagctgcaatttttcttccttgcctcataatgaagtcaagatttgttgcgagaaccaaaaaatcacgctaatggttatgaggtgaataaagtaccatgctatgagtttgagataattcaatgttgtgtgagaaagagcaaaaccttgaccaggattcccttgtatgagataatttcatgtgattctaaactgaatggttatactctctcttcttttgatttggccacttctattttctct

SEQ ID NO: 48266 - DNA, 744 bp, Zea mays
  Clone ID: MRT4577_144024C.1
gcacgagccctcatttaaaccgccaccacgacggcgcgccggcccgcgggaaaaaccatcatctaaagttcaacgcccgcaccgcaagcgcaacacgccaacacccgagacccgacgcggccttcgccttccctccgcgcgagggagattcgaggggagagaggttctcaccttcgcgcctgcggttgcttggcgcagagtcgtcgcagatggaccggtaccagagggtggagaagccgcgggaggagtcccctatcggcgccaacgagatccgcatcacggcgcagggccggccccgcaactacatcacctatgcgctcgccctgctccaggacaatgcaacagatgacattgtcatcaaggccatgggaagggcgatcaacaagacagttgccatcgtggagcttcttaagagaaggattgctggtctccatcagaatacctctattgaatccattgatataacagacacttgggagccattggaagaaggccttgtcactcttgagaccattcgccatgtgtccttaatcactattaaattgtcaaagaaggagctggatacatcatccccaggttaccagccgcccataccagctgaccaggtcaggccagcagctgactttgatcaggatgcagaggccgtaccaagtggtcgcggaagaggacgtggtcgtcgcagcaggggcaggggaagggggaggggggtcagcagtggagtagactatgatgatgagattggag

SEQ ID NO: 48267 - DNA, 505 bp, Zea mays
  Clone ID: MRT4577_144025C.1
gggatttaggtgccagtatagaatggcgaggatctctttttatgctgcactttggggtcctacgaacggccctatgaccggagagcccagggccgcgcgccgtctggagcgctagaaggacggcagctcagtcaaggctaccaccaccgagcagcctgtcatccgccgcctcgctgaggagcgacaaagccactctgatctgcgactgatgccatcctggccggtctcatgtgcacggccccgcagcatgactagtcactgggacatcagctcgcgcaggcgctgtgggcaacaagctgatccttgacaagcgtgatggctcccaggtcgacctgctcactgccaatgagactgcgcacgagcacattcctgagaacaaggatgagatcaactgcgagcactcgatcgctgctgaggccacctacatcaaccagaacttctcacagcaggtgctgcaccgtgatggtgaaaagggtaacttcgacgagcccaacaccatttgctt

SEQ ID NO: 48268 - DNA, 302 bp, Zea mays
  unsure (1)..(302): unsure at all n locations
  Clone ID: MRT4577_144026C.1
tttttgtcgggcagacgggcaccggttgggcttgttcgcgcaggcaagagcagncaggcggttggggatcgggacgcggagaggggaaaggggggtggttgtgcgtncgcgggtggttgggttcgttttctgtggggcccgggttgccgtaggggggnngggattgggggnnggggggggggggggggnggtgtgatgcagtgctgattgggggtttgggtttggggggagagnttgcatgtggaggaggtagcatgagctgctgtggaggaanggatggggaangaggaggagactttgaa

SEQ ID NO: 48269 - DNA, 290 bp, Zea mays
  Clone ID: MRT4577_144027C.1
agagatacaaaccgatactaccatcggtgtgcgatactatgctaggcatcatcccaataacgcaactaatagccccaattcatgtgcgataatcgggtgtaacgcgttgcaggtgccgcgtaactcgccaatgatagggtggaccaggtggagttgcccagtatcaggggcgccaagtcggtgtttggtttagcttgctagtggttggtggcctcaccaatcgccccagcgaatagccgggttagtaccaaagcatattagtaacacctggactacggcctagtagttgt

SEQ ID NO: 48270 - DNA, 590 bp, Zea mays
  Clone ID: MRT4577_144028C.1
ttgggtacctcgaggccggccgggatacgtaggtaccagctacgcgcaatccgcgtctcgcgcgaagaatccgcatttccccttccccgcacccaacccccgctcggagagagagatggcatcggagtggttacatgcaacccctcgcgccgacggggtaccgccgcgcgtcgcagatgaaggagaaggggtaggcgtcgaggacggacctggaggccggcaccggggaagacgctgtacccggggtatctcagcgcagggaggagagcgcgcctctctgatgggtgcattacaatcgcgcagaggctcctacggctgtccgtcgatgcgcagctgcgtcctcaccacctggcgaactcgcagtcgcactcacctgattctcgcaccccagcctgaacttctcgctctccgaatccccgtacctcacgctggtgctcgtcgaactgcccttcatcctgatgcattccattgaatcattgtcagcacaatcacccacacaatttctttttccttgtatctgtgcactttgtgcttgaggttcaacatccgatgtggcttgtcgattatcacccctcgctactacgtgctgg

SEQ ID NO: 48271 - DNA, 1333 bp, Zea mays
  Clone ID: MRT4577_144029C.1
ctcgaggctcggcccgggccgggaaaaaagatcctctcccccggcctccttttcctcccctcccctgcgtccccgtccccgtccccgtcccgtctcctcccccgccgcggtgcggaatacgggctagattaatcagtcagcgctcatgatccggaggagcgaaggccgcaaccagcgccgcggggacaaagcctcacgtgctcgggacctcttctccacccagtagaggtctccttgcctttgccgcggttcttgctcgtggagtcgtggcccaggtttccaggttggtagcatgtgagagtgatggcggccgccgaagcgagggctgcctggcaacgtgctgccaaccgctgcctggtccaggaggatgccaagcgagctcccaagctggcatgctgcccaccgtccctgcgaccgcatgacacgagcgatggaaatcctccgagtccgcaagatctccatgcccctatgtttatgcccatcaactggaacctgatgaactccagtatgcccatggaaacccagtggtggctccagttgcagcccagctttgggtgccagacagcccttgctagggagcacctcaactatgtaggtggggacgccgctgagaagggaatggagggtctagcgccggtgtctaaacttgaggatgtccaagcaaagactgtggatccttttgagcctccgtggatcgtttcgacgactctcatgaagcaaacgcctgatacgggttcggaagagttgaagaatcttgcctcctataccccggcgagcctcaagtgcaagggaaatgccaacaagtgtatttacgaggataaagagtttagagtcaaagcttttgatcctctggttcctaacagccacaaaaggacactgcgaaatgcggcaggcgcagagatataatcgagtttgggatggtcttttagacgccattagacagatgcaattatctgccgatgagttgaggaagttgagccgtcgcaatcatgtgcctgagtatttggatatggtgcacaagaattgcttggttaatgccatgagtgatgttactgaaattgcaaaaggtctagacactatgagcagggatttggaggaagttcttattggtccgcaacctctccttgaggattacgaagcccttggagtgtacgatgatttcaaatctgatgttcattgtgattgtattgagcagtttggttcggatgtagacaactcttcttttgactcggatgagatcattgatcgccgtttatcacatatgaacgagcctatctgagctatttgtctgtgatagagctgcctcctcgacatagccatgtattaatttgat

SEQ ID NO: 48272 - DNA, 251 bp, Zea mays
  Clone ID: MRT4577_144030C.1
acaacccgaaagctgacgccaccgctctcctgacaacgatccaacgtcacccaacccaccggtgctccccccaaaacccaccacaaggcttgcccaaggcttcccctcaaccatgccacactcgcgcccttcaccgaccccatacccgcgggcatgatccgctgcgatggaggactcgttgccatcgtccgtcgcacctgaccctaccacttcccctgcaccttgcacgcccccgtccccgaacccgcacc

SEQ ID NO: 48273 - DNA, 287 bp, Zea mays
  Clone ID: MRT4577_144031C.1
cttaacaccccttttatattagtgttacttaaaagcaacgaataatacaagagtgtatagccgggctaaacgaatcaagtactgttctcgcttaagcacgagccaagcatgaaaataacacacgtgtgtgagaacccattgacaagaaactaaagcggacttcaatactgggaacaaggtaacatatctcccctcacgcacagaaacacaccacactagccctacaaaaactggcggggggggagtctgtgtcccggacacgagcccaaacattgtgaatgctacat

SEQ ID NO: 48274 - DNA, 162 bp, Zea mays
  Clone ID: MRT4577_144032C.1
agcctgaggccagtgatggttcaggctcctgggaagatgcagctttgctgacggaggccaacctgcctgctcctgctcctgacttctgcttctgcccctgtcctagagactctgggcagctctgaacctgctgggggtgctctccgacagcgccccacctgc

SEQ ID NO: 48275 - DNA, 146 bp, Zea mays
  Clone ID: MRT4577_144033C.1
tatcacagcagaagtgctcaatttttgctgcggagcccacaagtatgggcaccacaatgaggacttcatcgccatctactttgcttcttgcatggaatttatttgggtgtcattgctgcatatggttgccgtagacatcctaatgc

SEQ ID NO: 48276 - DNA, 374 bp, Zea mays
  unsure (1)..(374): unsure at all n locations
  Clone ID: MRT4577_144034C.1
ggcggggtggtcttctttgtcatgtcctggcgggcccggtcgtcggcccggccagctgcgagtgcgccaggtcgtctntgttgtggcccctctgctcctgcgtggttcatgggtttcgctttttcccgggcccttggttacgccgtggggggtggcctcgtcgtggttggcgccagctttcactgttaacggttcggtggctagcgcgctctctatctggcattggttgctgcttggcttggtgggatctctcctctcggtcggcctgctgggccggccgcatgattgaagcgtccttctcgtgatttgtggccccttgcgtcgttgtggcgtgggtgttcttttctatgctctgctgtctgctgcctcctgtg

SEQ ID NO: 48277 - DNA, 290 bp, Zea mays
  Clone ID: MRT4577_144035C.1
ctctacgcgttcgtttttttttttagagaatgacaggtattggctttatggatgattttgttgtagattgcttaggatttgttgttgacacgaaagacgaagtgggagagggcccttttaattacatgttgcagggtttaaaacaggaatgcatcgataggatttcctttacaatcaagctgggcttgaagaactactcagacactatggagaaaccattaggctggcttaagccatttgggacctccgccttctgcacagctatgaagtgtgcaaacgggcaactgcaa

SEQ ID NO: 48278 - DNA, 511 bp, Zea mays
  Clone ID: MRT4577_144036C.1
gaggcccggatgatggaacgacagagggcaacccggtggtgaggtgagaggcacttgaagcaccgtcctttaaaggtctccagaccttgaataccaaacgacctctccaggcggcgcctctgcttctgtgtgcggcggctctccacgagtgtgaaaccatcacgatccaccaagggcttctggcgcttgggctgaaccgaagagcgcagtggggaagaccgacagacgaaccgtccaccagcaccagaggagttctgcacggaggcctgcaaggtcctagcctgggcgtcatgggaaccagtgcccccagacgtcaccgagactgaagccgagaccgttcccgcgagcaggacatccttgaacgaagaagggctcccaacatccaacgatgtggtgatttttcttcgtccgactgctttggatatcaatattactttagatattcttcacctccttggagaggctttcggcttatgtactaatgtccagcgacagcaacggaattcgagct

SEQ ID NO: 48279 - DNA, 2031 bp, Zea mays
  Clone ID: MRT4577_144037C.1
ccccaagtcagtctggactctggagtccgggttctcctgtctccaccaagtcccaactccagtccaccatgccttcttgatcgcgagcaccgcaggcacaccaacccggattcccctcgcgacttcaatctccgccgccatgctggcctcggcaagggggttctgggcgcggcatcgccggaagatcctcgtcactctgggcgtcgctgggttggggtacgccgcctaccgcttctacgataggcgccgcgcccagctcgtgcgggtcgagcagctgcgcgccatggaggagcgggccgccgccgacctcgttaagaaccagctccagacacactttgagaaggtgaagatgatctgcgacactaccacattgcctttggccatgcatcatctcagtgataagataatgagtcatggcgtcacccccgctgtacatgagctttccatcgcccgtcgctcctgtaactgtgcgtgccctcctccacaacgaccagctcatccggggcctgttcgtgtccttcgatcctgtctggaaccttattctccaggactgcgtcgagatccaccctcaggcgggccgtcacgtgcctggaccgctagtcttcccgtgtgctgcaatcgcctccctagcggttgagcccgtgtcatctccctccctccctagcacctatatcggggcaccttctttagccctctccgctcacaccgtaccttcgccaccaccacctcctcctccctccaccgattgggtggttgactccggggcctccttccacactacccccacaactagttcgttactccactcccatccaccgcacccctcacatccttcctccatcgtcgttggcaacggttccaccctcccggtcacctcagtaggtgcatcggttcttccaggacaattctgccttaacgacgtccttgttgctcctggactgactcatcccctcctctcggttcgtcgcttcactagtgacaaccagtgctctatggagttcgacccctggggtctcaccatacaccaccttcccacacgtgctgtgctcgctcgctgtgatagctccggccccctctactcccttcaattgcccaccactccccacaccagaatagcctcatctcctgcccttactactaccaccacatcacatgctcttactactaccaccacctcctccgccatttggcaccgtcgcctcgggcaccctggacctgacgtcatgtcccagcttgccggccactctaacatatcctatactcggggctcctctgagcacctctgtcatgcttgtcagcttggccgtcactcccgccttcctttttccacttccacgtccagggctgtccaggcctttgatcttgtccactgtgatctctggacgtctcctgtccttagcctctccggctacaaatactacctggtcattctggacgactactcccatttcctttggactttcccccttcggctgaagtccgacacgtttaccaccctcactcacttcttcgcctgggtatccacccagtttcggcgcccggtccgtgccctgcagtgcgacaatggccgcgagttcgacaacaacgcctctcgttctttcttcctcactcacggcgtccagttgcgtctctcgtgtccctacacctctgctcagaacggccgggccgagcgcatgattcgcaccaccaccaacatgatccgctgccttctctttcaggcgtctctccctgccacctactgggcagaggcccttcatactgccactcatctcctcaaccgtcttccctcgaaggcggtgagccaccctacacctcactttgccctgtacggcacagccccttcctacgaccacctgcgcgtgttcggctgtgcctgctaccctaacatttccgctactgcccccaacaagctttctcctcgctccactcgctgcctattcctcggctactcccctgaccacaaggggtatcggtgcctggacctcacctcccaccgcatcatcatctctcgtcatgtcgtcttcgacgaag

SEQ ID NO: 48280 - DNA, 366 bp, Zea mays
  unsure (1)..(366): unsure at all n locations
  Clone ID: MRT4577_144038C.1
cggacactgggcgngacacataatggcgtcgtatgcgaaactagagctccaaatatggaaatactgctagtactagtttaccccctatacagacacggatgtctgaagaatccattctatcagtgatagatgccttacattacaagccaaacattgggtttaaacgcattaccgccagaatgtccatcatacgcaccttttgcgaatgaagtaaggaaaccaccggtcctaagcatagcattgagctgtaaaaaacggcatcttagaggaaatcacnacnggancncaaaaaaggccagttcgaaaaagcgtgtggcggacggtgcggggaatccacggaggacaatagaagggaggccgagagtc

SEQ ID NO: 48281 - DNA, 1784 bp, Zea mays
  Clone ID: MRT4577_144039C.1
tttttttttttttttttttggagactaaggacatttatcaattatcagagacttccgaatacaaagtttttattctagtcttcctataaaaaaattacagagcattttgaaagaagaatttactatgtcacttctatcgtcgttttttacatgtcaagaaatatacagaattgagagagagagagagagagagagagagagaaggatctacaaactgacacggctacagcctacaaggtacagacagaataaattatgaatgctaagttaacaggttgcaaattctacgattcaaattcttctatcttggagatttggtcgaaatgcatcttccacacaatatgagccttgatatggtgcgtgatcttcgattcctgaccttaattgaagagagcttccgacgagtccttgaggttctccaacaaagtagactcgatttaggctccatcctcaaattctcttgctctagcttttcagcaatcgatatagcttttcgtctagaccagcctcctcgctgagaacaagcttcagccctcccaataacatgagcaagagatacctttcctcttactatgctgttctgtcgattctgtctgttcccatttcttccttttggattagtcacgctctcttggtttggtgatgacgaagtttcttcctcccatgtgttctcctttcttctttcatttacgtcaagaacatcattatttgtttgagcatgccaatgcatgcgagaaggtccaacttcaattatttcaccttctccagaagagagtggactatgtttagtaaaggacctcctcagtgtcgagtcattctcagggtaaggaaacattgatggagcatgacctggttttgcatcattctttgattcatatcgaatttcaagtattatagcagaacgaagaacagactcaaatgcctgcagaatctgagctctgtagttttcggctttggacttactgatatgtgagctaattattagttgcactgttggtgctgttccaaggctgacagagtttagcctggcctctttagccatcatttttctcaatgtatctgattggatactttcaagcacagcttgccagatcatttcattgtccgcttttctgtttttagttccctcatttgctttgacagaactggttgataacacatgaccattttctgtgtgttcaacagttctttccccataagacgtgcctgccaggttacatttatgctcaactgctgaggccctccctacacccctatcaggaaagggaccaaccagcaaaccatggttcaaacttgtactagttgatgaactaggcagcaggtactgtttatcaggagcaagctgaagcagagcagctgtaagccaggttgtcttgtcactagaaaccctcaactgcttttcagtttcagatagtattttcaaggcctgacgtagttttcccatatcttccttagacaaggtaggacgtttgaagaactttctcttgggcctttctcgattaaatgcataggaaccagcaagaatatcagtaattattgtggcaagctgagacatcagtgctaaaggctcaacgccggtttctgtgatgtctcgtagtgtcttgcaggagccaagcaaatcgaccagtttatcatcagacaccagaccaaccaggacaagagacaaggagcaaactgagatctagagtcttcttgcctatccctactaacaccctgcccctccttatgtagagaagctaagcaacataacaaaccttatttggctagcactgttcacgcgctaa

SEQ ID NO: 48282 - DNA, 312 bp, Zea mays
  unsure (1)..(312): unsure at all n locations
  Clone ID: MRT4577_14403C.1
ggagacggacccgtccacaatatcaccaccctccctcccgtttctattttatcctttttccccccnccaggcggtccagaagacagccatacttaaaacgcacactccccctcaccaacacaatctcaaactttaccatcccactaccacgcaccctcacaacaataaccccaccagcatcctaaatctgcccgcacgtactcctctgaccatccatattcgccccaaccccgttcgcatattcatcgacacctttataaatacaccccacatagtctgacaatccaatctataaaacgaataactccgaca

SEQ ID NO: 48283 - DNA, 199 bp, Zea mays
  Clone ID: MRT4577_144040C.1
aacgccaaacttaataacccagtagcaaagggggggaataaagttttacaacgtaggttgtaaaccacacaacgcccgatagattagaaccggcagaaacataacacgttgggggccatttagggcagatcacaggatagcagtggtacacaagcccgacgactccgggccagtagagcgtttagtacttgtcaccctt

SEQ ID NO: 48284 - DNA, 251 bp, Zea mays
  Clone ID: MRT4577_144041C.1
ttcccggtcgacccacgcgtccgcggacgcgtgggcggacgcgtgggcggtcgagagcacatcgtgtaccgtgtctccgcagcgtgcgcgcgcgcgtggacggaggctgccgtcgctcgcgtcgggcgatcacggtccccgacggccagctagagcgagggacaacgaccgtcctaccgaccagctacaggcgaatgaacagaccaataccagttcttcagaaaatgcaccgctggatcattcctagctgc

SEQ ID NO: 48285 - DNA, 325 bp, Zea mays
  Clone ID: MRT4577_144042C.1
ctacatcctgactatctcgtcccctggcagcgttcgcggtatgatggcggaatctacggcggggacggcgagggatgtcaacccgcacgatttcgttaaggcctactgcgcccacctcaagcgctccagcaagatggagcttcctgagtgggttgacatagtgaagactgcgaggttcaaggagcttactccttatgatcctgactggtactacatgacggctgcatccatagcacggaagatctacctaaggcacagcttcgcagtgagtggctctcagaagatctacagaggccgctagaggaatggctctctgccaccacac

SEQ ID NO: 48286 - DNA, 108 bp, Zea mays
  Clone ID: MRT4577_144043C.1
atgctaatgggctacctgccatggggcacgtgtcatacatttacgtaaaacagttgggattggcgcggcattccatggttgtctgcaatgcggaacgcttaccgtgcc

SEQ ID NO: 48287 - DNA, 274 bp, Zea mays
  Clone ID: MRT4577_144044C.1
gaattccaaccggggcggtttttttaattaaagtagaattaactttggttcttggttcttttggggggaaaaggaaccaaaaatgctggccgcaaaaacatttttcatacaagagctccatatcacctttttataaaaaggctgctgcatggtccacccggcaaaaaaggcaggtccacttgggaaggacccgggggaaagaaacccctaaaactcgggggaaagcaactatacgcggaactttggggcggcttattaacttggctcagcgcaa

SEQ ID NO: 48288 - DNA, 1877 bp, Zea mays
  Clone ID: MRT4577_144045C.1
cattgggtacctcgaggccggccgggaatctcccccgcgcgcctgcatgcggctgaagaaccggccagcgccccgctgccggcgcgcccatggctgagctctgctctttgctgttgcaaacgcgttgtgccattgtgttgtgtccacgtgagaattcttgacgtctcatacgtatcatgtaacgccctctgcttgtcggaccggtatatattaggttgatctgaagccagactcggtcagtttatcgagttacttattcctcatgccctgcatctgttgttgtttctgaggtcaaccgcatacagagttgcttgactcctcggccatgccggccaggacatggctcgccgacctgcggtcgaggctccgcgtcggccccaggaagaacgacgggcttggcatcctggccttcgaggcagcagccaacatgtcgcggctggtatccctccaccggacggtgtccgacgtcgaggtcaggaggctccgcgccgacgtcttgcgcgccgagggcgtcgcgcggctaacgtctacggaccagtctctcctgctccgcttcgcgtgcggcgagctcctggcggacctcgaccgcgccgccggcagcgtggcgtgcctcggcgcgcggtgctgcgccggcgacgcgccgctgctgagggacttcgatcgggtctacgccgaggcgaagcgtggccggctcgcgcagctggacgccacggtcgggttctccaggggcgccacgaggcggttcaaggagatggagcgccatgtggtcgtggcggcgaagctgtacgcggagatggacgcgctcagcgagctggaggcgtcagagcggcggatggagcggtggaagcagcacagcgggccaatcccggcgcagacgacggggacgggcaaggggtcagcggccgatcccggagagaagctgatgagtaagctcagggagcagcggcagaaggtgcgacgggtcatggagggatcgctgtggaacgtcgccgccagcaaggcggcgaggctcatggccaagtcggtcctcgccgtgctcgcgcgcatctccctcgcctttgccgcgttcgttccaggccttcccccttggacggtaggacgcgcgtgggcgctcggtcactcatccggatccggcccgttacaccggtcggcgacgcccgcggcgctccagcattcggctcccatcttcggccagagagactccgcctccctactgtcggcgtcgtcgatcaagccgtcagtgagcacggtcggcggctcgagcatggagctgcgatacgcgaacgtgatcttagccgccaagacgttgctcgcggcgctgaggccgccggcaggtgacaacgaggaggcgcacgaagggatgatcgacctgtcgaagagagacgcgctgtacaagatgctacccgtcggcatccgcaaggccatgaacgcgaagctgagagagatctggaagaaagcgcaaccggtggacgaggtgtctgccgcggcatcgaaggatgcggtggagtgtctgctgcggtggttgagcccgatggcgcacgacactgtgcggtggaacgacgagcagagtatggagcgggcgcagcggttcagcatgcagcctcgcgcgctgatggtgcagacgttgcacttcgccgaccgcaagaagacggatgctgctattgttgatgtgctcatcggcctcacctgcgtatgctggtacgacgatgagcagcgaaggctggagtctccagacagggacgacgacgacgagtatcagctatagatttttgagctgtgattgtatcgtggtgtgtgtgaatatcatgtaactgcaagtcgcgtgtacatagaacaacttaacagcctttatataatcaaatctagccgttttagat

SEQ ID NO: 48289 - DNA, 606 bp, Zea mays
  Clone ID: MRT4577_144046C.1
aattcggcacgagggtcgaattggggcatggaggggggaggaggaagccggggggttaaggtggctaacggcaacaacggcggcggcggcggtgggcccaagtggggggccggtggcccggggggcggcttggttggctttgaacggagaaccaagttcggctttgggttcggcaaagggcttgggcgggaagaagaagttaactttaaggctaataagaagggaaacaaggggggcaagggattctgggcccccttggaagctttggcaacggtcttggcgaatgggccttttaaggagggaatggcggggggggaagttcttttggaaattctggacaagcaaccggacttggttgctggcggtggccaacaagaagttgaggaagttcaaaatggacgggaaggccaccagggaaaaggttaagggaaggaaggtggggaacaggtgggttccacaggggggaaccttgtggcggacaagggggttggttgagttaaagaaaaaggaccgggaaaggacttggaaggaataccttaaggtttgggtggtcaaaaagtcggtggaaccggtggcttttttgtttcaagaattttaaggttcaac

SEQ ID NO: 48290 - DNA, 162 bp, Zea mays
  Clone ID: MRT4577_144047C.1
tccggattcgccgcgcagctgagcctgtcgagctcattgaagcggtgaagaagctgcgaaggcattcgcgagggaagagaagacacgaaaagggctgccgctggagctgaagcagaaagtttcactggagattttgcagagactgcacgatttgggggaagg

SEQ ID NO: 48291 - DNA, 1412 bp, Zea mays
  Clone ID: MRT4577_144048C.1
cattgggtacctcgaggccggccgggaatctgtccctctgtagcactgaggcgaggatagattgcatttgaggcctaaaaccatcaaacacacaagcatttctatgcttccaaatctcccaagtgactaggatgactagagagttgaaacccttccaaagatccttagggaggtgattgacagcttcagaccatcaagaccgaaaacggcttgtagaattaggtggtaagatcgacatttaagttcagcccctgcagaattcgagtccacgcttcctgcaccagcacacaggaggagagaatgtggttgattgtttcctcatcctggtcagaaaaaagacaggtcggctgatggggcagcccttgcttggctaggcgatcagaagtccaacatcagttattaattgccaaccatataaagaattcacaattggctggggcccagctcttccaaatcttcttccagtgagaaaacatgatggtcccaatgaacattgagttataggctgatttgcagctgtacataccggaggccgagaatttccaaagatgctgatccgagacgtcaggctgcagcaccacatcctccactaaatcccagataagcaagtattccacaagaacatgtacagataaggcccccctaatgtcagccatccaatttctgttgacaagtgcctggctcactgtatgccgttttgcgaccctttttggaatcatctgaacaaattaggtgctaattctgccactatcttcccggtagccaacaatcagtccaaaattttgcacgaattcccatccccaatagcagtgatcactgcagcatcaaacaaagaccgagcaatctgagggacctgaaccgtcaagccagaccaaggcttaaatgggtctgtcttctccaaccaaagccaacgaatgcgcagagcccatcctaaccgctccagtgttcttgctgcgaaaaatcttggagaaccagcatacagcaacttcttagaccacacctatcttggtgaccggaaaactacaataagggaatacttggccactaccgctgctggactcatggaagaggagcctcccgagtcgctaaaaagtcgctacggtggctgattcgatggctgactctcatatccaccacaggttgagctatcatgcgctcgcagtttatcatattaacagttagtgaattaggatttagtagtagtgttccaggatgttcgaaataatgcatggtgctccgttgcagaagatctaggattctggtttgttcggcaggtggcgccaaaacatgtgatatgtgaccaaattgtgattgatgtgcatctataatttgcgactgtttgctacaacaacagaaattcagggccagacacccaaaaatgaggacaaaatgcatctttcccccctttttct

SEQ ID NO: 48292 - DNA, 627 bp, Zea mays
  Clone ID: MRT4577_144049C.1
ttgggtacctcgaggccggccgggatcttccacgaatcacaatcactattctgttatatattctattccctctcctctctgcaccggccgccgcgccgagcacgcctctccctccctcgattcagatcaccccatatcctccgcagggccaccccttcccgctgcttctagccggagtcggggcgagacggagatctgttttctccgggatgaaaactcctattgcgacctatatatgggtgccaaatctgcagacgacgtgttctgactcgccgccgccgaagtccattactccacagtccgtgtggaggggcacgtgtccgcaacgacgcctgagctggagaaggccacccgagcccttgtgtcattggtgttgcgtgcgggtagcatacggcctgcaagagcaccgtgtgctagatgatgattgatcacctccgggaccagcgtgctacgtctgttacgcatgagcccttctattatgtgttgacggctgaagaattagcagatgttgataattataagtttgatcatcccgacgcattatgatagcagagctacttctctcttcgtatgccaaacttgaaatgtgggcaaagatgctgacactccctaactactgcttcgcga

SEQ ID NO: 48293 - DNA, 927 bp, Zea mays
  Clone ID: MRT4577_14404C.1
ccggccgggccgggtgtctctgcctctctttctctccataagcagcagcagcaccaacagcaacgacgaacagttgcccgccacacctgaccttgtcaccaccagagagcagaggcccagcgcgctcggccgtcagaagcagaggcggccaggggaacccaaaggggagcgcgtcgtcgaggctggccgccgcgaggatcccggcgcccgtgcgcgcggtcatggcgtggtggcggaagaaggtggtgtccccggcgcgccgcgcgtgggccgccgtctccacccgcgtccgcgcgcgcaacacaggcggcggcggcggcagcatactgaagcttcacgaggacgtgcagacctgtggctacagggacgtgcaggtgatgttcgacatcctgacgtcggagctggaggcgtccgcgcagcgccccgccgccaagcaccaccaccagcgcaagcggccgccgtcgtcgtcgtcgccgtggcccagatacccgtcatcctccatgatcgcggccgcgcaatagaggccgcgcgcgacgctgacggggcgtggacgacatggagtatagtccaaagctgccgcgctcgattcctgggtgatgtggcgccgcggttagttaataagcaagcagttcggttaagaacaccgggttattagtagcacgctgtctagttcgtggtggtagctagctaatagagctggcactgaacgtaaggtttggtgccatgaagggtgtcgtcgatcgtcctcctgccgtctctccggcgaaaagagcgaagaaatccaacagcgtcaaggaccaaggtggtggtagtgtcatataagctgtctggtctgaatgtgcctgtacatactacatagcaccatgtgctgaatttttcgcaatactcggagaaatatattgatggaacaagagaggtttgtttttt

SEQ ID NO: 48294 - DNA, 331 bp, Zea mays
  unsure (1)..(331): unsure at all n locations
  Clone ID: MRT4577_144050C.1
accattagctgtatctactccagagcgcagaagaacccgatcgacaccatgagggtgttgctcgttgccctcgctctcctggctctcgctgcgagcgccacctgcaggcgtcaagcggcggctgcggctgccagccaccgccgccggttcatctaccgccgccggtgcatctgccacctncggttcacctgccacctncggtgcatctnccaccgccggtccctggccgcgccggtcacctgcaccgcggccatgtgccgcgcgtcattgcgcgcacatgactacctactaccgccngctagctatncagcaaccatgcggcacagcgatc

SEQ ID NO: 48295 - DNA, 384 bp, Zea mays
  Clone ID: MRT4577_144051C.1
cgagacttgggcaagcgagtcatgacaggtgatatctcgcccgacaggtttgtcaacatgtcggatgaggagctcaagagcgaggatcaacgcaagatggaaatcgagctggagaaggagaacatgaagaaggcccaggtaccaatggccgagaagagcatcagtgacagtctggaatgcggcaagtgtaagaagaagcgtgtcagctacacccaggcgcagacacgaagtgccgatgaaccgatgacgacattttgcgagtgtatgaactgcggtaatcgttggaagttctcgtaaagtggcaacgagagaggagttttacggttgatagcgccacgtctgctccaaggggttgaaagacagcatttcaacgagctttttatt

SEQ ID NO: 48296 - DNA, 447 bp, Zea mays
  unsure (1)..(447): unsure at all n locations
  Clone ID: MRT4577_144052C.1
cccacgcgtccgtttgatattgggctgaagattggcaaccttgaagatactcggaatcgtactctgcatggtattttaagggttcaaagctgtttcagggggcatcaagcccgtcatcatgcaagagaacgaacaagaggagttttgactcttcaatcattcattcgtggtgagaatgcacggcaaatttactcctctttgttgaggaaacatagagccgcagttgttttgcagagaaatgtgagatgttggcttgcaagaaggtatttcataaatgtccggaaggcctcagtgataatacagtctggtattcgtggcagtcttgttcgaagatgtaatggcaatattgatctaataaatgtgctaagagagtttgaatcanaacaggtacaataactgtgtgtgcgcgcgcgccccttatacggtgctgctggcagctatattcat

SEQ ID NO: 48297 - DNA, 333 bp, Zea mays
  Clone ID: MRT4577_144053C.1
cgttcactggacaatccggaacttcgtgacggcgtacaggggactattccagggcctattggatctgctgatctggaagcaccttcaaagaatccccaacctgatgcggtggtggcaacaacagcaatcacacattttaacaaggacatggatgatgtgccacctccagcaattgaggatggtgcgctacatgcatccctcaaacatactggcggcatactggaggtacaccatggtgattgcttgtggcatgtttgaccttcttcaagtgatgacacggacaacatgccctttggtatgacagaacctcgtctcggcaaatatactgctcct

SEQ ID NO: 48298 - DNA, 2273 bp, Zea mays
  Clone ID: MRT4577_144054C.1
cattgtcggcaagggggctggcctgcacgctggacgcatcctcctgacctccacgctcgggtcgggcgcgtgaacccctcgccgccgtcgcagccgcagttccatcgccggagggtgagagggacgaggaagaggagggcaagatgaagacgaccaaggggggcaaggcgatgaaccccaccgacgccttccgcaaggagcagcggaagaaggagctcaagcggaacaaaaaggaaaggaagaaggtgcgggaagttggtattttgaaaaaggatccagacgctatacgagagcagattgagaaattggagaagatgaaggctgatggtgctctcgacaaggctaggaagcataagaaaagacagcttgaggatacatacaatcttattgttaagaaacgaaaggaatatgaacagaaaatgaaagagaagggtgagcaaccgattatgtttagtcatcttgcaccaccaaagaggcggcctacagcagatgaagatgatagagctaatcctaagcccgaggactctgtttactatcatccaaccttaaatccatctggagcaccaccacctggaaaacctccgatgtacaaatcatctataggaccaaggatcccactgccttccttatccagcactggggcctcatcttccatgtcagagtctgaagcaggtccatctaccctgccaccccctccaccaccaccaccattgccagacacctcagagtccattgatccatctgcccctcatttccctttgcctccactcccgccaccgcccccaccaccacctaaacctaacagtgacacagcattgccaggcttacctcctcctcctggtccacctctgagagaacctgtatccggtcatacagtacttcagccgccaccacctccatcgcagaggtctttaaatccgccagcagcgtctagtgcaaatgaaagcaaaacggattctgttcagttgcagccctcagttgtcctgcctccaccacccccgccgcctgggttgccaccaaaatctaatgacatggaggctgctggcacttcaaaggacactcctggacttaaagaagatactgcagcgagagtcttaccaccgctgcctccaccacctagtttgccacctttacctccaaggcctccaatgcaatctgatatgctagctcctggagtcatgagatttccaccacctccgccaccaccagattcaaggccatcgcttatggcggctggagttaacaggccccctccacctcctccaggatttccaccgtctcaaatgccaatgccaccgtatggtgtgctccctggtccgccgccgatgcttaggcctccatttttgccaggacctcctatgcaactagatgagtttgctgcctttgccccaaggcctcagttacctcagcagccatcatacgtgaagtcggctgccccaacagttgtgaagagaccattagcacagcacactcctgagctgacggctatggttcctgcatcagtccgtgtcaagagagaatctgctctccccaagccaaaaccaaaggtgcagcagcagccacaactatcaacagtatccatttcaaagccctcggtgaccctcataagaagcgacgctcggcctccttcagcggcacccaagccgccaagcatcgacgactcttacatggcgttcttggaagatatgaaggagctaggggcacttgatgggtaactcaagtagagcaaatgcctgattgcacttagcagcttaattcatggaaacctgggcatggaacctttttttttttgcaacgtgagaatcaatagtctctggtcaatcaatcggagaaaatcatgcattagtttaattaaacactgggaaaacaattgtaatctatctttttcatactaaaggctctgtggcccaactgtacaagctggagatatttgaaacttgaatatggctctagcaaaggacatctcccagctgcatgtttcatggctgatttgcagataataccagtcgtggggaaaaaaaaaaaaaaagtttttgactcttttccgttgggaccactgttgtcccttaatttttgtatggtgcatttcccttgaaacccatgccggagttcctgtcctgggcccccatgtaaccttgtgccattcccaaatgtcggtattggttctatacccccccgcccggcgacattactggacacgacccccggcttctaaataaaagtttcgtcctttctgtgctgaaatctgaaattaccagttttttatttgcccc

SEQ ID NO: 48299 - DNA, 144 bp, Zea mays
  Clone ID: MRT4577_144055C.1
tcgtgcttagccaactaaatttataaaatggagtcgcgatacaccctatctataatcaccactttggatccataccattgctatctcacttacatgtgggaccacatgagtcaaggacatgaggcgccatgatatatatgtaaa

SEQ ID NO: 48300 - DNA, 809 bp, Zea mays
  unsure (1)..(809): unsure at all n locations
  Clone ID: MRT4577_144056C.1
gatagagctaatcctaagcccgaggactctgtttactatcatccaaccttaaatccatctggagcaccaccacctggaaaacctccgatgtacaaatcatctataggttactatattcatttctcttttgcatgtaaatatattattttttaaaaaaaaatcaagttcacataaaattatctccttacagttagtaatcatcacacgccttttctcagttccatttcttggttgacatgcaggaccaaggatcccactgccttccttatccagcactggggcctcatcttccatgtcagagtctgaagcaggtccatctaccctgccaccccctccaccaccaccaccattgccagacacctcagagtccattgatccatctgcccctcatttccctttgcctccactcccgccaccgcccccaccaccacctaaacctaacagtgacacagcattgccaggcttacctcctcctcctggtccacctctgagagaacctgtatccggtcatacagtacttcagccgccaccacctccatcgcagaggtctttaaatccgccagcagcgtctagtgcaaatgaaagcaaaacggattctgttcagttgcagccctcagttgtcctgcctccaccacccccgccgcctgggttgccaccaaaatctaatgacatggaggctgctggcacttcaaaggacactcctggacttaaagaagatactgcagcgagagtcttaccaccgctgcctncaccacctagtttgccacctttacctccaaggcctccaatgcaatctgatatgctagctc

SEQ ID NO: 48301 - DNA, 582 bp, Zea mays
  Clone ID: MRT4577_144057C.1
gcgcaaatcagcctcctcttacagtgctgtgaaaaatccttgtattgggggacaagctcccatcaaacccattcacctgccagcagctgaggggccctcctctgctcacggagtcaggcaggccctccacgcagaaactccggcgctgctaccattccggccctgccatccgcccacggtgggccagatcaaaccgtgaaccacacagtcgcgatggagtgccgatgtttgggcacaccttggcaccctcctgagagcaacctatgttttgacactaaatgatgtgacacatacaaacacaaacccatcaggactctatactgctatgcaagctccaatgaacgtgtctgagtcaaaaaagggctgcaaacggcccaaccaaataaatcctcagcaacctgtatgacctataatggtatttggtggagatcttgacagacgaaaccatcaacgcattgacatattacaaacatggtgccactaataccaacattcctttatggctctcatggtgttaatgagatcaaaagccaggttacgtacccatgttgtgtactatatatgagcgattgtgatccccac

SEQ ID NO: 48302 - DNA, 349 bp, Zea mays
  Clone ID: MRT4577_144058C.1
agttaaacaaaaatattattaattatttaaaacacacggcatagtgaaacaaggttaccaacgtgtagacgatgctcaccttgcaacgacggcagacggccaaacaagctagtggcgaggcacgacaacgtgatgcgcgcatgacgcgaagcgacggcgaggcgagccaacgacgaacggcaaaacgaggatgcggacagtgaacgtcacggccgcgcaatggcgcaccaggaggcggacgacgtcgaggctgcagcacggacgcactcaatcatggaggagagaggaagcgccgaccgaggatcgcgggaaagggagcagagcttgctggcctttcgtcaagcacttg

SEQ ID NO: 48303 - DNA, 345 bp, Zea mays
  Clone ID: MRT4577_144059C.1
ccaaaaaacacctttggttttggcaatccttaggtttggaaaccagagtttttcccaagttggccaaaccccattatgaatataacactgcagttttggggaattctgcagtttttctcaaaaccgggaaaaaacttttgtccccaaacccccctaaggtttcaatacatgtccctggataaaattttaaggcactttttaaggggtttaaacatccttggctcttgggcctagagccgaaggcttaccccttctaagggatcgggggggccctgactaaggtaacccccgggaggttgttgggcccgcccccggggggggggcttcccgaggggttccaggggg

SEQ ID NO: 48304 - DNA, 772 bp, Zea mays
  Clone ID: MRT4577_14405C.1
caacacgatcgagaatgtgataggagttcggcacaaatctggcaattattatatactatactactatgaatgagacacggtgctaatagaatactatatactactaatattaaaagaagacgaaattctgcctgctttattccaagaaactattttatttgactcagcgcacgaatttgctagttgcattggaaataattgcataccctgaattggttgcatgctcacgaccaatctcgcaaatggatgcaaatgattaaacaagcctttgaccatggatacagaacaaaagttaaactgatgtatcgtggacatgatatgatatatcactaattggtactatcatctagtgattattagtttattactatgcttttggttcatccgtcagcaactaaaaactgagtctcttcttaattatatataagatgttccttttcccacgaaccaagtacgtgctacttgaccaactaccggaccgaattgcagcagctaatttgggacagctcacgccgaaattaaaaccttgtccaagcaataatcagtgcttctagacgtagaagcgatataatcattgtgttcgttcatcgatctgtcatgaaaacgacgcacgtacgtactcctacgacgtgcttcaaagattcctgggtttaataccacagctgtagccgagaaccgaaagcgatggtcgcacgtacgtttccagagggtatgttggtctctctcgccgcagtcgatgatgatgatgatgacgacgacgaccgtgcatttt

SEQ ID NO: 48305 - DNA, 811 bp, Zea mays
  Clone ID: MRT4577_144060C.1
gggccgggctctcctctcccctcccaagctccaagccgatctgactgatactctctccgatcccctcgacccagatctgacgacggccgccgcgcacgagagaggcggcgaaaacccgatcggaagcggcctcaccggcggatcgcgatgggcgtggagtgccggtacgagctcgcgcaggcggcgtacgtgaagctggcgctgcacgcgctcaagcacccggcggcggccgtcaacgggctcctcgtcggaactctggcggacccggccgcctccccggccgtcgtctcggtcgccgacgccgtgccgctctcccaccagccgcaccacctcccgctgctccccacgctcgagctcgcgctcaccctcgtcgaggaccacttccaggcgcagggcctcgccgtcgtcggctactaccacgccaacgcgcgccgcgacgacgccgacctccccgccgtcgccaagcgcgtcggggaccacatcttccgctacttcccccgcgccgccgtgctgctgctggacaacgtgaagctcgaggaggtggtcaaggggaacagccgcgacgcagttgttcagctatacaccagggattcatcaaaaagctggcgtcaggctggatcagatggaagcagtcagctctaactgaaagagccatctaccaatgtggtcttagctgatcatgttaccacgaagagatggcagcaagttgttgatttcgacgaccacctcgatgatatcagcaaggactggtttgacgcgagcctgcttggttgaaacggttttgagatcaaatttgtcccatatttatttg

SEQ ID NO: 48306 - DNA, 311 bp, Zea mays
  Clone ID: MRT4577_144061C.1
tttttaccaacaaccaaacaacaagggcgggcaaattataaagcctgcttgcccttcttgcgctttaagcgagcgcaacaaatacattcattattcacacaatgataacttgctacaagttccattattacacaatacctcccaccaattactgcaataggcttcgaacacccagctgtgcaagcctataggctacaacaagcaattgcggcgagcgtcatacaacaaccaactttcgagttgcaacaacaatccttgtcacatgtgacaatacaaaccctcgcaactcagcagcaacaacatgtcctacc

SEQ ID NO: 48307 - DNA, 290 bp, Zea mays
  Clone ID: MRT4577_144062C.1
gcttctttgggtccaagcgcgtggccggcgccatcccagcgccctatgtgcacatcgagcgacagttcttcagtgaggtgtgcagcctgggacagcaggagcgggtccagcttcaggactactggcggaagggctggacgttccacgccaaaggtcagttcaccgggacctggaggcccagattgcgatcgtgacggcgaaccaggccctgcagcagcagcttcaccaggaccaagagcagctctacctgaggtcaggtgtggtgtcctctgccaccttcgagcagccga

SEQ ID NO: 48308 - DNA, 151 bp, Zea mays
  Clone ID: MRT4577_144063C.1
cccaagtgcagaggcgctaatggtagcttgagattcaaagtcgagttgaagcatggggccaatgctgatcttgtgaatgctctgaagttgatcccgccttcaacgacgtccgaaccccatccgcgatccatgcctgccgcgccatcctcgc

SEQ ID NO: 48309 - DNA, 394 bp, Zea mays
  unsure (1)..(394): unsure at all n locations
  Clone ID: MRT4577_144064C.1
ccggccgggatcctttcacctcaccatccatcactcgctttctactcaatcttatacattcttttcttctctacttgattcaggaatcaaaaatctttcgccaaaatggttcgcatcacttccatcttcgctgggctgtcgctcgtagctggttctatcgctgccccctctcctgaaggcatgttctccacgcttgccaagcgaggtggtacccccaacagntcgggnatgaacaatggnttcttctactcttggtggnntgatggtggtgccgaggncacttatgagaacggngctggcggntcttacagcatgtcttgccagactgctggcaacgtcctccgtggaaagggttggagccccggaaaggctcgaaccatctcttacgagggaa

SEQ ID NO: 48310 - DNA, 621 bp, Zea mays
  Clone ID: MRT4577_144065C.1
ggtgactgatggaactgagaaccaccttgttctctgggatctccggccccttggcttgactggaaacaaggtcgaaaagctatgtgatctttgccacatcacattgaacaagaatggtgtcttcggtgacagcagtgcattgtctccgggtggtgtccgcattggttagtatcatttatttgttcatttcttctgtgcaagcttcaattaagtattagtccaacattgctatccacatgtcagttcgatattttttcatggtctttgagctaccttcttaatgaaaaggcgatgtgtctagatattttcttggtgtctggccctggtatggccattgttggcaaaccaaaatttagattagagctctcatttggtcacatagttcatcttgatgatcaataagccaaaaccttggccacaaaagtgatgcccctgattatggtaatgttttgggggggggggggggcatgccctactcagactaatcccacaaatgatgcctggaatcggtcagcttacagtcattctgggagtgatcgatgaaattaggaattgccactatgctttatacattgcttaccattgagccaaatgcatctagagtgatgcttgagcctttat

SEQ ID NO: 48311 - DNA, 226 bp, Zea mays
  Clone ID: MRT4577_144066C.1
acagctgacgcatgggcgggcactagcctccgtggagaccacagccacaccagagagcgcttctgtctccgtccgactgctgctccgcgcgagatgtaccaccactgattctgcgtgactcgggtcagtggagaatatcagcgatacagagcgggtatggagagctccaacgaaggagatccctaagttgccatccaccgtcccagtggatgcgggactgctatgg

SEQ ID NO: 48312 - DNA, 302 bp, Zea mays
  Clone ID: MRT4577_144067C.1
aatccgaggacgcctccggaggactctccccattccactcactatctacatcgatctcctctaacgtcacgttccgtggaccattatggcgaagggctcacagctggtccaccgtgggagtcatggcgatgctgtatgtcatctgctccgccctcgtgtcgggtacggctgtcagagccgtgctggcgtcagtcgcatcgtaggcgccgtcctaagcgtccaccagcacttccgctggtgcgggtgccacggccgtaagcggagcggcctacgcctctgtgcccactgccgggggctctctc

SEQ ID NO: 48313 - DNA, 1019 bp, Zea mays
  Clone ID: MRT4577_144068C.1
ggccctaggggccttttttttttttttttttaacattataaaaaatctcaacaattttctgccaagatgcatatatatatatatctggttgttacaatggaaggaaaccctagcaacatcactgtgacgagggaaagtttttttattcaatttttttttttttttttttttttttttttttttttttttttttgggcaaaacatgtactacatttttaccattacgaataataacgacaagatgttaaaaagggtaaacataacagataaaccagacttatagcctggccagcaggacaaccgataacgtgccaaaaacctcgaacaatagtgaaaattaagctatcacaggtagcttagctagggataagataaacggcaagcatgcgatgcgacacttagtcgacctcctccatcttgctttcaccagcgtcgtcctcaagctgaggcatctcagcctctgcctcaacaggctcgtcctcatcgatgctcagaccgagcttgagcatgcggtggatccggttgccgaaggtgttggggtcatccaggctgaagccggaggtcaggagagcagtctcgaacagcagcatcacgagatccttgactgacttgtcattcttgtcagcctcggcacgcttgcggagctcatccatgatagggttctctgggttgatctccattgtctttttgctcgacatgtagcccaccatgctcgagtccctcagggcctgtgccttcatgatcctctccatgttggcggtccagccatactcgccagtcacaaggcagcacggtgagtccacaacgcgatcagacaccaccaccttctcaactttgtcacccagaacctccttgatgaccttgcacagcccctcaaacttctccttcagctcctccttcctcttcttctcgtcctcagtctcatcaagcttcagaccctcctcggttgcagagacaagcttcttgccctcaaactccttgagctgaccaacagcatactcgtcaatggcatcaaccat

SEQ ID NO: 48314 - DNA, 429 bp, Zea mays
  Clone ID: MRT4577_144069C.1
cggacgcgtgggcaaaacactaaatgggtaaaaacagtaaacaatgagagcgagagttggaaccgatgatggataccggaggaaaccaatctcacagaaaccaatatcttgggtgttttttactggacaatcatagttagttgtgctcatcgttgtgtacatgaaacactgagtagtaagtcagctatgtttcacaaaacatatatcaaatcggaaccagtggtgagcgggtgtgtttcacaaagttaggtttggatacaagggtcatgtttgttttacatttaaatcatattttacgactgcactaccatgaaaaaaaaaaaattccatcaaattgtggcagaaaagagttaaaaccaatgaataagtctttcaatccagatatatctaaagcatacaaaaaataaaggggcggccgttttaaaggat

SEQ ID NO: 48315 - DNA, 223 bp, Zea mays
  unsure (1)..(223): unsure at all n locations
  Clone ID: MRT4577_14406C.1
acccaagagcagagtcgtcgtcgtcgtcgggcatagcggggttcaaggtgacgcggatcacggacgggcccgtgaagccggcgtcggcgacgcccgaggagacgctgccgcaggcgtgggtggaccggtacccgacgcaccgtagccaggaggagtcgatgcacatcttccggtcggacgcaggcgnagcccggccgtgatccaggcagcgttggccaaggcg

SEQ ID NO: 48316 - DNA, 320 bp, Zea mays
  Clone ID: MRT4577_144070C.1
cgggccggggatccaaacataatgataaaaatatatccaacactcatttcccacggaccacacgaggcatacgcacacgcacgcacactcccccactccctctccaccctgcttccgtttccggccggtgatggcgacgaccgccgccgcatccacgacgctccagccgctgtcaccgtccccacctcgcatcgcgagtttgccccggcgctggtgctctggaatcccggtgcgatccttctggtggagagcattcgatggtcaacgacgaacgaggatcactttattatgcgatgctgatcattttccttcttaatccc

SEQ ID NO: 48317 - DNA, 432 bp, Zea mays
  unsure (1)..(432): unsure at all n locations
  Clone ID: MRT4577_144071C.1
ccgtccgcgtgaccgccgtgggctnacgccaccanctcgagtaccctccatcttcccttctcaaggtaccgaaagttccgnaatctgttcgagtacctcngnntcgccgcccgtctggttttggccccccttttccacagccccgtcgcttgtctgtcagcagggtacctcnnccagagctcttcatnnctccatttcnncacggctcagggtgaatccaactggagttccatttcnncacgctgnngcctctattggcgttcgttctccttccaccagaaaaggatgcnnaccgccagaaattgggagtccccccagaacctggattgaccaagctcttgattgggccctcgccggaaaatgggagtccccccaaggcgccaactcaaccttaatcccttctcaacgagataagttgtcgacantcaatgg

SEQ ID NO: 48318 - DNA, 581 bp, Zea mays
  Clone ID: MRT4577_144072C.1
gacttttgaagggcataaactattttagtgatgctgatcattttgctctcatgaatgaacttatgcttatgttatctaaatatctaaactatgatgatctgtgaaagatcactcttaatttttgtcattaacttttcttgttaaatcttatataatatactatccttttatggagtcaacgtgttttttgagatgttgattaatattcgctacatatttatcattgtttatttttatcaatgacaaagcatggatacaatctaatcttatatatatcttgtaaggtatgtaaacatctacttttaacagacagtacgacacttgcataatgttcctcagtatcatcaggaagtattaacttgaatggtaaactcattgtcgaagttagaagacctggtggtgatactgtcatgtctaacatacttcacttagttgaagaagcgcagacaaaggtggtccctgttcaacgattggcggacagggtataatatgtgaactgattcctacatttatgaaagtttagaggtatgatattcaaagcattacatctttgtcctgttactatctcaaccatctctgtg

SEQ ID NO: 48319 - DNA, 310 bp, Zea mays
  Clone ID: MRT4577_144073C.1
gcgcgtgcgcccctttatctgaaatttgcccgcagagatcgccagtttctttcctaacacatatacccctttatatacccacaaccatgatcagtacatcactagtgatttttcttatctggaaaatcgctactgcccgcaccctattttttcttcggtggggtgtggcaccacccaactgggcgaatcaataaaacaacacgcaacataggtgaggaaggatctgcctctcgtgccactagcacaatgcaggcggactccggctccctgaggaacaggtactccttattcctgtacatcgtctgctcac

SEQ ID NO: 48320 - DNA, 568 bp, Zea mays
  Clone ID: MRT4577_144074C.1
gccgtggatctccttgtgtgccgcgtccggctccctgacgtgccgcggtgcccatcgccctgcgcgcgctctgtttcctcgcgcggcttcgtgctcgcctggccgttgtcttggatgcgcaggagtagtgtaggtgcttgcagttgggggatcctcgatatcgggctgggattagagaagacagtactgttccgtgcgtcgcttatccgatgctcgacggaatgtccaactgggaggtgatagcttcgtgtgtcggcgagccgtcgttttcctcgttcagtgtttgcgcggccttgcctgaaccgtgctgccatctcccgaccgttggctcttgcccctgcacgggcttgtcgtgctagtcaaccccgcctcgatcctcgtcgtcgatactgcgcttgctggtggccaaagctcgcgctaacctgctcgatcacacgtcgtcagctcgcttcatactcaaactcgtcgtcgcgtcgtgtgtgcatcactcgccagccatatgtgatcaaagacgtcaaccggaaaccatcctcgtgcttgcaactatcgcgtcgaattagtcagggta

SEQ ID NO: 48321 - DNA, 379 bp, Zea mays
  Clone ID: MRT4577_144075C.1
ggaaattgattgctgagacatgtggtgctgaagaggtcacaaaactacgtaggagtgcaagattgactgttgaaagagaggttgaagacacaccgctgtctgaaactgaaagtgaagaagaagcaccacaagaggaagatgttgactttgagtcggatcaagatgatgtgatcacagctggatatgactatgagctagatgcggaggaagacaatgatggctgatgggaggctttagctgccatcatctatcttatattagcactatctaattatcttatctatttgtctatgttgaaaatgaacttatggactattgcttttatgctttgtttggcatttgtgagaactatttctatttgtgctttgtgaaagtgttt

SEQ ID NO: 48322 - DNA, 520 bp, Zea mays
  Clone ID: MRT4577_144076C.1
ccggccgggactgaggatctgcagagacaggcgtcttcgtactcgcctatctccgcgagtcagaggtttaccccaattgcccccccttcatcccatttctacgccaccgacgaagctcaccccgagcaactatgccctcatggtagggcatgtcgatccacagtcggcgacggtggcatcgatgccggaaacgcgggccgcgatctgtactgtctcgaggatgagattcaggctgatggccgcatgcccggtgacgataccattgtccctacgtgatgatgctttcaacaccttcttcagtgagactggcgctgggaagcacgtcccctgcgctgtttttgttgaccttgagctcactgtcatcgatgaggagaggactgacacctaccgccagatcttccagcctgaggagctcatcagagacatcgaggatgcagacaacaacttcgctcgaggacactacaccagtggcaaggagattgtcgacctgagccttgaccgcagcaggaagcttgcagat

SEQ ID NO: 48323 - DNA, 383 bp, Zea mays
  unsure (1)..(383): unsure at all n locations
  Clone ID: MRT4577_144077C.1
cggacgcgtgggtttttttttttttttttttttttttttttttttttttttnttttttttttttttttttttttttntttttttttggaaaactaacggcctttttttcctgaaaaaatcagggcttggccaaagttctttattgggaggggattacttttggatggggctggccaaaaccttaaatctagggttaaaacatggtggaacaaacttgggtttttgccccctttttttaaaaacctggggcctcctttggcacaaaattgtggttgggggggggacttcccctgggggaggagggggggggggctctttttttttagcccccaaggaattttggcgcggtttgggtcctggttttttttgaaatcgggggggcc

SEQ ID NO: 48324 - DNA, 581 bp, Zea mays
  Clone ID: MRT4577_144078C.1
ggaaatcaatcaagaattacctatcaagtctcttcctctcttctctaaaccggcgaccaggagaacttctcctgtcgacgggtagctcggcgtgggggcataaccctgccggcaaccacgggtcaaggctacgatctacgtagccgaggtcctcctaccttgggcaataccgcccttgacatggagacatttacactgagggctagtctggcaatcatattttcccaagtgatttctattttcctaagaaaaattaatcaatttttccttagaaaaataagaatctcttgtaaaatagagttgccaaactagcgctgaaggtacaaactatagtcgctttattccgtcctctccaccttcacacatcaagttgatcgatctctcgatgggcatgggcatgcatctcatgaacgaagtagtacgagcaagcctgcagagtcaactgctctcctgcttcgtccctgtgctaatgagaacccagcctctggacatcaaccagctgatagagatcgccacggcgttggtgttgcagaggaagaaattgcctcctctgctcaatcagtgagtagtcaatttctgct

SEQ ID NO: 48325 - DNA, 138 bp, Zea mays
  unsure (1)..(138): unsure at all n locations
  Clone ID: MRT4577_144079C.1
gggtattaaatgccacccaaagcagcaatggcaagcctagaggcaaagaggcaaaaggcagatgccggaagggggaaactggaaccttcacactagattctccgcttgtaggagagagacatggatcanctatccaca

SEQ ID NO: 48326 - DNA, 976 bp, Zea mays
  Clone ID: MRT4577_14407C.1
cgcggtgggtgcggccccagcggttgtgggtccggccccggcggcctgcggccccggcggctcgcggcccccacacccggcctcggtggcggcacggacgcggcggctccggcctagcgcgagcgcatggcgcgcagccgcgcccccgacggcgcgggggcgagtttgcgcggcggcccgtccgtgagtgcgcggacccctgcgcgcacaggcgcgggcacagcctccggcgcgcgcgggcatgcggcccgcctgcgcgtgagcgcggactcctcggcgcggagctcggcctccggcgcgcaccgtcgtgcgcgggtgcggcctcccctgtgcacgcgggttagcccccacggcactggtgagccccaggctggcacgtgcacagccccggcgcgcgaacgcaggcacagcggtcccgtgcggctcccacgacgcgcagacgcggtgctcaacggtgcgctggcgcggccggccgggtcgcggccccccacggcggcgcggcctcccctgcgggcgggcgtgccacagcggcgcgggtgcagaggccccgggcggggcgggcgctccggccagtccctgcggatcgagcacccctgctggcggcaggcagactcgggcgtggccccccgacgcgcgggcacaaggcccttccagcgcgagggcgtggccctggcggcgtgggcacgctgctggcccagcagcgcgtgcgtgcggcttttccggcgcgagggcgcgcagcccctgcgcaggcgcttcggctaggcgtggtcatgcggccggcttgcctgcttgcgccttccgtcgtcgctgttcacttggatacaggcaagcaaaagtctgcatgtctcgagcgcaggagtggcagaaatgttcattaattatgaacttgtaagtctgcagttcgtaccttgtaaaatcagacttctctgatttgtttatttgaacgaatgctcttataaaattggtgaatttgtct

SEQ ID NO: 48327 - DNA, 978 bp, Zea mays
  Clone ID: MRT4577_144080C.1
aattcaatggcaagctttctgattttggattggccaagctcttgggtgcagggaagagtcatatcacaactcgagttatgggaactttcgggtatgtggcccctgaatatgccaacactggtctgttaaatgagaggagtgatgtctacagttttggagtgctactactggaatcagttactgggagggacccagttgactatggtcggccagctaatgaggtacatctggtcgagtggctcaaaatgatggttggcacgagaagagctgaggaggtggtggatcctgacatggagttgaaacctgccactcgggctctgaagcgtgcccttctagtggcactgcggtgtgttgatccggactctgagaaaagacccactatggggcaggttgtccggatgctcgaggcagaagatgtcccgtcacgggaggaccgccggagccggaggggccacagcggtaacgcagacagcgagtctaaggcaagctcaagtgagttcgagataagcagtgatcgaagagagttggggccgtccgcgaggttccagtcctaacccctgacgagaactcggttttggactagcgatgaacatcagatgagcggtgtgtgtggggggggggggggggggctggttggtaggaggtaggaaggccattgcatttcattttcgcgaggacatttgcattttgtactgtgtagagatcggaagggcattgcatttctggaggggtaggcattatcctttggtagtaggcagcttagaatgcagagggagatgactccccctgagacgaaagattcagacttgctgtcgtgaatcttggtgttctgttggtgcggacggcagcagcttcagcttgtacagacatttctttctctgtcgtttggttattaggacttgttgggtagtaggaacattaaggtctctttcgtaatgtgatgaatgacttgaaccatcaacctcttgtaatcttctt

SEQ ID NO: 48328 - DNA, 620 bp, Zea mays
  Clone ID: MRT4577_144081C.1
cagaaaaccttctatgtttcttcttgtttcttcagtttcattattccttggtgaaaaatatacaggctcctttggtgccggaagcaatgtggtttcattctccaacataaacacaactgttgacatgagtggccttgcatttggattgtcttggacacacaaaagtcctacatgaatacacctaaaagcttcatggagtggacaactttcagcaaccaatgagtccaccaatttcgttgcatttccctcttcccataacttccatgtctggaaaaatgtatatcttttttctatcaaattaatattttttatgtttattgaaaacttgagaatcccacgctacttacataagctataaggtttgggaagtccattataaattgagttgagataatcttcaaaccacttacaatctccaagagaagaacaccaaagctatatgtgtctgacttgatagaaaaggcaccacttgtcacatattcaggagacatataaccgctgcttaaacaatttcaacagtttgagttaaattaaagtataatagttgcattatcaagcattgaccagtacatgaattactcactatgtcccacaacacgggtagtgtttgctagttgctg

SEQ ID NO: 48329 - DNA, 345 bp, Zea mays
  Clone ID: MRT4577_144082C.1
gagttccttgagccactttttctgatttacaaatcactgtgtgactgcggggacaagggcatcgttgacggcagccgtctggacctcctgttctaggtgttcacgtcctgattctccctggtgaatctttacatgcggtaggaatcggatcgacacaccaacatcttcgacaccatcagcacgcacctttgtttcggcacacatcgcaagtgactaccggtcaagagacaggtgtcgctgatcacttaccttcgaggtaatcgttcaatgatgacatcaaaccttccacaaatcctccatattattgacgtcatccaattgatttaactgctcacggaaattact

SEQ ID NO: 48330 - DNA, 678 bp, Zea mays
  Clone ID: MRT4577_144083C.1
ggggggttttcaacggtcagtactagcggtagggctgcgccatgcttttcaagagctagacttttacgtccgcggggatacccgaaatattatatgccgcagcgttcccaagggtgttggcagccttcttggcagattctgcttcagccaggttcctttcgtcgattgtattacctacgttgtcttaggcggccttaatatagttatctgtttcttcgacggtctcagtctgccttctacgagcgttaccgcttccggtattcttgtccttcggcgtgttcttcttcctgccgttttcgtcaatattgcatccagggttggcaaactcgtcttcaatggtgttggcactatatctgtcagctttagaggtagtcgtcgtcgtcactgcccctactgcttctaactgttggtcactggcacccacagcatattcgttgtcatcctaatcatccgcatcggctttttcgtacacagcaccgatccttccatcgtcgttaccatctccgtcatcggggttccccgtactgtcgatcgtcttcttcacgacaccttcttgtttcctcttcctccgcgccatctccaccttctcattacctagctttctcaattccaccgttacagtggcacccgtcccccctccctgcccctccttattcagcctcacccacccatgtcagg

SEQ ID NO: 48331 - DNA, 1447 bp, Zea mays
  unsure (1)..(1447): unsure at all n locations
  Clone ID: MRT4577_144084C.1
cgggactcacagaccactcgagactcgagagaaccgcctcctgctactgccgctacctgccctctctgtctgccttcgctcccctcttctcctccatctaaggtttgccaccgtcgcccgatccgaggcagatgtcacccacaacagccatggcgaagctgtctcaggccccgtctaactcagggaccacgagggcctgcacctcgctgcctcgtcgacgtgctcctcgtcaccgccaaccgccccaaccacacgttcgactacgtcgtgcgcgctcgcttgtgacgccctgcgcaccctcgacgccgcgctaccgggtctccttgccgaggtcctcgggcacctctccgcgctcgccggccaggcaatcctacctcctcctgctcgcctccggcgcacgccatgccgtgtgcctcaggaggctcgcctctagtgtttccatcctggtggtagcatgcccgcccatccccttcatcatacctcctcacctgctcttgcctcccggcgtccatggcgccaccatcgaaacgtcagagacataaggaaggtgctcgctctacttctagaccgttcataggtgctcacacccgcagcggccatggagatgatggtcattcttgccaaggtcgcgtcggctatgctccagtgggcgccggcgattgcagcgcacattcaagtgcacttcggnggggatgctgcattcgtccaatgccatgctgctacactcgctactcactcctttgctccagttcccagatgcctttggagctgaggatgagcgcccgtgaggtgcaccatcaactcgcagtgtcattgttggctttgcattggctactcggctggctgagaaatctggtgcctggtctcacccattggttttaccctgtcgtgtttgatccccttgggctcaagggcaagaagctggattgtctaccttatgttgctactggtgttgatggggagaaggttgcagtaacaggcagagcaagtgagcaattgattaggctcaaaatatggaaaatccattttggaaatccactgcctacgaccaccatattccattgtcgccatgatctggcgagcctgtacggcgggatgagccagagccatgacgcaaaacctgatggaaccacgcgaagacgctcgtgagggatcaccaccaaataggcactagcgacaactgtgagaatctgataccaatttttaatatatcgtgtgatagccggaatattacggaccatgatagaagaactcagaacaaggtttgggaagaatggcatgaaaaaatgaaccagatgaaaagatagaagtgttcggaagtagttttctgttattttcgtggtgtccaactaggttgtccgctttaaattaaagctagttgtttgaactgccgcaactgtaatatatagagacaanaaacattatataaacattagaagtcggtacg

SEQ ID NO: 48332 - DNA, 257 bp, Zea mays
  Clone ID: MRT4577_144085C.1
aaacagcatccacttttaattgtttaatttcattatttttgtatctgaatttacttttaaagtcaaaaacaaactttataacaatgcgtttcctcggagtttgcatgttcatcgttgccactttggccattttggttgcttttgctccatctgaaaatctagccagtcgaagtaccatcatgaagcttaaaaagattgcagccttgtcgattttgttaaaacctaaaaagttgcttgctttgccattgccattgcct

SEQ ID NO: 48333 - DNA, 1290 bp, Zea mays
  Clone ID: MRT4577_144086C.1
atggcagcggcgcaggaggaagcggcggcggcgccgccgagcacggagagcgatgctaccgagacggaggaggcaccaccaggcggcgcggagagcgatgctacggcgatggaagcggcggcggagtactcgtggctccagctccgcttcgaccgcccccctcgccggctctaccacttcgcccgccagttccgctccgccacttcctctggcagcaatagtagcggcgagaacttcctcaagggcgtaaagtggtcgcccgacgggtcctccttcctcaccagctccgacgataactccctccgcttgttttacttaccggaggaagcgtacattgcggcggagcccgttgccgaggccgctgtcgaaagtgaagattcttatggagctttcattcaggcgaacgagggtgagccagtgtacgatttctgctggtacccgtacccagccacttgtgtatttgcaagcaccagtcgtgatcatccgatacacctttgggatgccaccagtggggaactccggtgcacataccgagcatatgatgccatggatgaaataactgctgcactttcgatttctttcaattcttcaggatctaagctatttgctggatacaacaaagctataagagtgtttgatgttcatcggcctggcagagactttgatcagtattctttactcaaggggggtgaaggaccaactggtataatatcttcaatttccttctctccacaaaatgggatgcttgctgttggttcatacagccagacaactgctgtgtatgcagagaataatatggagcctttgtatgtcttacatggccagcttggtggtgttacacaggttgtgaaagatccgtacatattatgttgggatattcgcaatactgtggacattgtttacaagttgtacagatcagctgatactactaatcaaagaatacattttgatattgagccctgcggtagacatctagccactggtgggcaggatggcatggtccatgtatatgaccttcaaggtggtcaatgggtaaccggctaccaagcagcagctgatactgtaaacgggttctcgttccatccataccttccatttgctgtaacatcatccgggcacagaagatttggcatgcaagatgagtttgaagacgagttaaacttggcaggggcagagccccctatttcattaggaaataggataagtgacattacagtccgaaatgatgagatacaacccatcaccaaaagaacacctagtggaactaacccctacatactatcatactag

SEQ ID NO: 48334 - DNA, 2364 bp, Zea mays
  Clone ID: MRT4577_144087C.1
ctggccgggtttgagttcttcaatatacattatataaactattttttgccaatttaaaactatcactatgtgttatattggactattgtgtgattagacattgccatcgtattatgaactataaaattggactattgtagtatttagaagcatgtaattaattcaaagactatccgacaagtatcagatatctgtatgtatccgtctgaataatatctgatatatgtgttctacccgtcccctttctctctctctttttggggacatcttgttgggttcaactttagcctgccccaacttgcttgggactaaaaggctatgttgttgatccgttttctacccgtccgaataattccgatcttgtgctatatctgacccgcacttttactacccgaacctgatcccgaatccaagtgaaaataattagggtaggatacgagatgacctactatccgcccgtcccgttttcagagttcaactgaaagctagtggcctaactttgagaattaaactgaggtatttgtttcagaaaaaaagaattaaactgaattaaaatcttcttgaatatttattcatggggtacctaattcggcacgaggtcgaaaccccagccccaggccgccggttgctttcgcttcgccggagaagagctgagcgcgatggcagcggcgcaggaggaagcggcggcggcgccgccgagcacggagagcgatgctaccgagacggaggaggcaccaccaggcggcgcggagagcgatgctacggcgatggaagcggcggcggagtactcgtggctccagctccgcttcgaccgcccccctcgccggctctaccacttcgcccgccagttccgctccgccacttcctctggcagcaatagtagcggcgagaacttcctcaagggcgtaaagtggtcgcccgacgggtcctccttcctcaccagctccgacgataactccctccgcttgttttacttaccggaggaagcgtacattgcggcggagcccgttgccgaggccgctgtcgaaagtgaagattcttatggagctttcattcaggcgaacgagggtgagccagtgtacgatttctgctggtacccgtgtatgtccttgtctgacccagccacttgtgtatttgcaagcaccagtcgtgatcatccgatacacctttgggatgccaccagtggggaactccggtgcacataccgagcatatgatgccatggatgaaataactgctgcactttcgatttctttcaattcttcaggatctaagctatttgctggatacaacaaagctataagagtgtttgatgttcatcggcctggcagagactttgatcagtattctttactcaaggggggtgaaggaccaactggtataatatcttcaatttccttctctccacaaaatgggatgcttgctgttggttcatacagccagacaactgctgtgtatgcagagaataatatggagcctttgtatgtcttacatggccagcttggtggtgttacacaggtgcttttttcgaaagatgggaactatctgtatactggagggcgcaaggatccgtacatattatgttgggatattcgcaatactgtggacattgtttacaagttgtacagatcagctgatactactaatcaaagaatacattttgatattgagccctgcggtagacatctagccactggtgggcaggatggcatggtccatgtatatgaccttcaaggtggtcaatgggtaaccggctaccaagcagcagctggtatgtctcttctgaacatgtgtttccagaggaggtttaacagtgtgtttggttgtgaacctggcaaaaggtgctgttccaggtggctccccaggccatcgatttccagctcctggtggctggatcgacctgcctgggcgagcgccccaggccagtctcccagccaagcatgccttagtctgtctctatttctatattatatccattttaatcttatatcaacttgatcttagatactgtaaacgggttctcgttccatccataccttccatttgctgtaacatcatccgggcacagaagatttggcatgcaagatgagtttgaagacgagttaaacttggcaggtgatgagaacagctgctctgtctggatgttttcttcctcacaagaagcttgaagcatttagtgaaaatattggatcaggctgaagctaagcgaagcattggatgcacattcaaatctattgtcactttgatgttcgtgtgcaaagagcatcgcggcattgaccacttcctgttgtgttggctgtaattggtgtctgcaaaatgcaaatgtattcactgagatctatagaattaatgacttatttttttt

SEQ ID NO: 48335 - DNA, 729 bp, Zea mays
  unsure (1)..(729): unsure at all n locations
  Clone ID: MRT4577_144088C.1
gggacacattacactcaatccccccagactctcgtttttttaagctttttcttcgttccatggcacaatgtctttgttttctcggcacttaattcttatcgcgtcgtcggccttttctcttttgttcatcgcattgtcgctagcgacggctatccagattcgcggtatatcgccccagatcgtacaaatcagctctgcgcaggctgctaggattccggatgatggagatgtggtggcggccaaggcgctgctgaatggtacggagtttgatcgtggagatgtgttcaatgggagcagcgttatatctggattgccgcttgcatcgactctcgtgaccatgacgttggagtccacggacactgcggcaacactcgtgtcctctaccctggatatggccattctatctactgccgcagtaaaaacgaccatttccactgtcttgacgaaaacgctcgcttcgactactttgaccacgacaatcgttgccactaccctggtgaaaacgcgcgtatccactacgacaacgaaagaaacagtacccaccctcatgaccgaaacacaagaaggtataatcggattcaccccagaaccccaaagcagcggcagctgggacgccgaaggagtcctaggccctaaactcacacccaaacccacaccatcacggggctccagcccccaaaccccgcggccctccagccccgcanatccccatccttgccctcacatacg

SEQ ID NO: 48336 - DNA, 430 bp, Zea mays
  Clone ID: MRT4577_144089C.1
aaaccactccacggcggcgttcgccgaccaggcattctaccgagctcaccagtcgcccgccgcgatcggatcatgcgactatctcgcgagagaggacgctcgcacaccgttgcggacaggactacgaattcacacgacgcggacttctatggcttcgggaggggcgcgagcaagggcaactacgtgtggtgacgagtcgtttcgccattcaacagcacggctaaacgaggaaagaatgtcacagcctttgcgtcgaacattgacccggacatcatacaatgcctactatgaccatctcctccccgatccgtatgcatactctcctcattgacgcacccaaaccacccctaccacaccttgttttttttttgccccccctcctcatcagaccataggatgaatgcgtacctccagctccgttgaaataaag

SEQ ID NO: 48337 - DNA, 339 bp, Zea mays
  Clone ID: MRT4577_14408C.1
gggacaaaaaattgggggctgggttttttactggccgcttgtttatttggacaagggaatttgcaattggccagggttgtacaaactttttttttacaaacaggggaaaggggggaatacaacatccggcattacacccccgggttaagcttgggcccttgggggccccattttttcagaaaaaagggctggaccccatgactgagcaactggtgagctgcatgcaggagccatcagtgggggttattggggtttgcctttttctcggggtttttcaactttggcattttgggcagaagggccgggttaacccccttggaaattttaccgggggttttg

SEQ ID NO: 48338 - DNA, 448 bp, Zea mays
  Clone ID: MRT4577_144090C.1
ctgtgattcctattccctcgcctgctcttctacactgagggagcggagcggggaactcaaaaaggccgtatcatccgagtcaaggaagccatggagcacataggaggctctggtgccagtgccctcatggggacccatgctctgcacaaataactgtggcttctctggcagggcggagaccatgaacatgtgctgcaagggcacacatgagtatgattacaacacaggatcaggccaacttcgctgcctcctgtatagaaagtagtctgaacagaagctacatcgacatgaagccgtttgtagctggcacaagcactgatgtagctgctgcccaagatgagttgccaacaatgaacgtgcaggaacccagttgtgttgctcgcacctgcgagggggtggcgcgaatatccaaagggggaacgtagggactaagccgtgcagtccctgc

SEQ ID NO: 48339 - DNA, 435 bp, Zea mays
  Clone ID: MRT4577_144091C.1
gggacgcgtgggccgacgcgtggacggacgcgtgggtatctgcttcttgttccatagtttttcttgcatggtacgtctcaccgatgaataaaatgtatgtatcagactaaaaaaaaaaaaaaaaaaaaacatcgacataattataagaacaaaccatactaaatctaccaatcccaagcacaatctcctaccataccaaccggattccctactatccgcgcaaatctagaaaaacaattccaccacataaacgaatcctgaatccaacttaatggacattatcctaattgccactacgccgacggtcaacaactgtataaaactagccaacaatgacatatagcccgcctaccataaacctaacatccacctaaaaaacctcatttaacactcaatataacaccgagggctccatgagattgacatcatttccgg

SEQ ID NO: 48340 - DNA, 360 bp, Zea mays
  Clone ID: MRT4577_144092C.1
ctgctgcgtcacctaaatcatccatcctatttgttgcatcacctgctaaagtataggggctgtcttttacacacatcgggtgtagtatattatgccacttaacataaaaacaatgtggccaatggatgtaacagctccaaactgacttgcctcctctttcaaacgactatcatggctatgatggcttctaaactgcacaacctggacctcttttataaaaaaaagattctgtcaaaaccctggcaagcaccacctctatctacatctcgaatcaaagacttatttaaagactcaccaattgcgccaatgtcctcagctacagctctttcccacgttaacgcttacaatgatatcattagt

SEQ ID NO: 48341 - DNA, 361 bp, Zea mays
  Clone ID: MRT4577_144093C.1
gccagtaaacgggcgaaacccattatttgactacgatgtggattaaacatcctactacaatggttcacatgcataaactaatactgtggagagaatttttatgggataatccttatgtggtcatccagatcacacaaggcaaatgattgtaggaatacttgttactggacaaccacagggcgtgtgatattgcttatccctgcccaccaggggatgtatggattcaagcttctgaggggcattaaaaaagcgcaagcttaccccttcctacgttatcaatgcgtcattgcttttgaagttgtacaaaacctagagggcttgtccaggaacttatgcttttgctgtagctctgcattagatc

SEQ ID NO: 48342 - DNA, 862 bp, Zea mays
  Clone ID: MRT4577_144094C.1
cagtccagtccagacgcccctatcgcgcggctgtacgcactgcacacgcgcagcccggcgctacccgcgtgctgctgtcgcctcgcctgtcggtgctcatccgcttcctctccgctccgctcgccgccggccggccgccgcaatggtggacccgcggcaggtgctggcggggttcctcaccctctccatgttcgtcatgctcggcaacatgatcaagcacgaccacttcacctccgtctccgagctggccgtggacgcaacaggcgtggagctcaatgcaatgaagatcgcagacaatactgaaataaccaaggctggagtggagctcgaggctactgaggagattaagccgtgctggaccaaaccaagcccaaaggatgatcagtctaacggttttgttaccttgtcattgactattggccctgaataccatgcatcacagattgctgatgctgtagtgattgcaaggtatctgggagctacacttgtacttccagaaatcagaggaaatgaattaggaaagagtcgaaaattccaagacatgtacgatgtggaaaaatttaagatgaacttggatggtgttgtcaaagtagtagataaacttcctgctgaattgaccactaagaagccagccgttattagagtaccaaacagggtgacagaagacttcatcctggacaccatccagcccgccttccaaaagaacagttacctacgacttgcaattattttctcttcagtaagtttgaaaccgaaagggacgaataacaaggacttggattcaactgcttgccatgcaatgttcactgggctcaaactgaacgctgaatattcagaagtggctgaacagatgctgggcagg

SEQ ID NO: 48343 - DNA, 296 bp, Zea mays
  Clone ID: MRT4577_144095C.1
gtggcgacaccgggcccaggagccacgacgaggacgggaggagcggcggacccgctgacgacgacgctggtaggcaagcgacgccgacggcagtggtggcagatgacaagaaagcaggcggcggcgacgacgacaagaagaagaggccgtggaaatgctgcgacgtgcccatctgcaccaggacctggcctccggtgtaccgctgcgcggacacggtggagcggtgcgccacactagccagcacagcgagcacggtggagatggcggccccgacgctaccgctgcctcgacacgca

SEQ ID NO: 48344 - DNA, 270 bp, Zea mays
  Clone ID: MRT4577_144096C.1
ctcgagccgaatcggctcgagggatcacacttatacaaaattctgcaattagtaacttgtagagagttgctgcttggaagaaaggttgtttaatggtcaagattgtgatgtctgggaatgcagcagtcaaaaggagtgattgggcctcattggtacaagtgtttttaacaaacagcaacagtacagagcattttgatgcatgtaagtggacaaaatcagaaccacattcctgggaattaatcttcccaatagaggtatgtggtcctaata

SEQ ID NO: 48345 - DNA, 359 bp, Zea mays
  Clone ID: MRT4577_144097C.1
ccactcgtgcggcgggtgctggacaggacaggtcgcaggatgatcatataaggagaacctatgggccggttatggcgatcgctggcggcggggcgcgccttgatggcgagtggctcaaggtcgcccagctcagggccctcgttcaggaggaccaccgcgccaaggagggggacagcctgacgctgcgccggttcctgcgcgcgcgcgggcactgcgtggtcaaggcaggggccatgctgctcaagttgctgaggtggcgggcggtggcggcgcccggtggcggctccgtgcgggaggagcacgtgcgcggggagctggagcaggacaagatctacatgggcgggtgtgttcaggaccgg

SEQ ID NO: 48346 - DNA, 998 bp, Zea mays
  unsure (1)..(998): unsure at all n locations
  Clone ID: MRT4577_144098C.1
gttatatggatttttaccnnnnnaaaaaaaaaaaaaaaaaaaaaaaaaaaaaaaaaaaggcacacaagccgccgctggtcatcttcccgcagttccatcttccgctcactcccttcatcgcgctcggcacacaggcgacggcggcggagctcatgctagggctctcagcgaaggcatcagctgcttcccctcccgcctctcgccaatcgcctcccgtcctccgcacaccggccggtgatcctgcgtcttttcattcgtaaatcatactccaggtatctgcatcgcaggggaaatggcaagcaaagcaggtggtgatggcaaagaagccataaacgagcaagtagttgccaacacttatgccaacatgcgtaccgaaatgaaccagctctataccaagatcacagagctggagatggaggtcagtgagcactccctcgtgattggtgcgatcgagccgctggacccctcaaggcgctgttacaggatgattggtggggtcctggttgaaaggaccatcaaggaagtcctgcctgctgtgaagcgcaacaaggagggccttgaagaagtgattgctcgcatgcatgaggcactggagaggaagaagaaagagatcaccgagtttgagcttaagtacaagatcaggatccggaaggctgacaatgacgcagaggacgaaggcggcaagaaggaaggcactgcacagggagtccttgttgggcctgctggacagtaaaacttaattagatggattttgtgtaaaagatgaggaccgatgtgaactgaagtagtttctttgtcacctcttcgggtgctgcagcaatccaagtttctgtttgttattgatgacacatcgcaaatctcccaggactagaatctctgttcgtgattccttttactatattctcaaaataattgtggattagtcatctgcatgacttcattccaaaaaaaaaaaaaaaaaaaaaaaaaaaaaagtactctgcgttgttaccactgct

SEQ ID NO: 48347 - DNA, 683 bp, Zea mays
  Clone ID: MRT4577_144099C.1
caggcggcaggagtgtatctggtggacacggcctggccggaacggcctaaccttttcactgcaggcacacagccgcctcatgtttctgcatctcccatcttcttcccgcagttccatcttccgctccctcccttcatcgcgctcggcacacaggcgacggcggcggagctcatgctcgggctctcagcgaaggcatcagctgcttcccctcccgcctcttgccaatcgcctcgagccctcgcctccggtcctccgcacaccggccggtgatcctgcgtcttgtcattcgtcatttcatacttcaggtatctgcatctcaggggaaatggcaagcaaagcaggtggtgaaggcaaagaagccataaacgagcaagtaattgccaacacttatgccaacatgcgtactgaaatgaaccagctctacaccaagatcacagagctggagatggaagtcagtgagcactcccttgtgattggtgcgatcgagccgctggacccctcgaggcgctgttacaggatgattggtggggtcctggtcgaaaggaccatcaaggaagtcctgcctgctgtgaagcgcaacaaggagggccttgaagaagtgattgctcgcatgcacgaggcactgtagaggaagaagaaagagatcaccgagtttgagcttaagtacaagatcaagatccgga

SEQ ID NO: 48348 - DNA, 376 bp, Zea mays
  Clone ID: MRT4577_14409C.1
cgttgctgtcgcttaattaaatgtttttaagaatacttaacattatcacaatgcctagtagagtcgtaaacaaatatgtgaggaagctacaagccaagccaaaaaaggttaaactcctttggaaatactgaaccactaaaaggaaatccgcatacttcagatcataaggacttaatcagtagaattaccgttgtcaattctatacactagtaaaattaactatttaacaattggccaccatcaatttaggatttaggaacaaaatgtaaaatctcaacacctcctcctgtctaaagcagcaatccatccattcaacttatgtagaattatatagttatacatacattgtaaattatcacataatcatggtcttttc

SEQ ID NO: 48349 - DNA, 420 bp, Zea mays
  Clone ID: MRT4577_1440C.1
accacttttattggaaaaaaaaaaaaaaaaaaaaaaaaaaaaaaaaaaaaaaaaaaaaaaaaaaaaaaccaaaaaaaaaaaaaaaaaaaaaaaaaaaaaaaaaaaaaaaaaaaaaaaaaaaaaaaaaaaaaaaaaaaaaaaaaaaaaaaggggggggccgttttaggggaccaaagtttacttccgggggattgcaaggtaatagtttttttttggggcccctaaaattaaattaatgggcgggggtttaaaaacggggggatgggaaaaacctgggggtaaccaaattaaatggctttgaaaaaaatccccttttggcaggtgggggaaaaagaaaaagggcccgaacggatggcctttccaaaaattggccaaccctaaatgggaaatggaaccccccttttaggggccattaaaggg

SEQ ID NO: 48350 - DNA, 149 bp, Zea mays
  unsure (1)..(149): unsure at all n locations
  Clone ID: MRT4577_144100C.1
ctctgattcttccntactacacatgcgtttgtttggtctttcatgtcgtcgtgttgtttctaatcatctctctctatcgatttctttacttgcagaaagcgtgcatccagatctagtgtccncgttctgttgtccccatccccgttctt

SEQ ID NO: 48351 - DNA, 437 bp, Zea mays
  unsure (1)..(437): unsure at all n locations
  Clone ID: MRT4577_144101C.1
tctgggctgagggaaggtggcctctgataaagtcacaaagggtcttcaaggaaccttctgaatgcgagcccaacatctccactactggcagagctctttcgacgcacttcctccggaatggaccgaccagttcgcatcaggcatccataccatagctgtgatccaagccgggcatggcctcctgcattttttttcctgcaagattatacccgaggacctgcacttcgtgctgcggatgcgacacatgttcgagtcactcggctaccagtcgggcttcttcctctcccagctcttctcgtcctcgcggggcgcctcgccgacgccgacgccgccattcccgctcaagcagccgccagcagctccggccgcgcgcgccccgccgcagctcttcngctggccgggccaccaccagccgcagcagctcccgtcgcccgcgg

SEQ ID NO: 48352 - DNA, 295 bp, Zea mays
  unsure (1)..(295): unsure at all n locations
  Clone ID: MRT4577_144102C.1
gggacgcgnggaatcgagttggattggttttttagangttctttttgacatatganatggggacatcatgtgtgttacttgtgaagatgaacgtaagaagaaagcggatccatttcgtttaatcgcatcctcaatgatctcaaggacctgcataatgatcctcccacctcttgcatcgcatgccctgttgcctaaaatatgttctactgtcatgcgactattattgggccatcaaatagcccatacgctgtttgcgtatttttcgtcactattcacttttcaccggactacccat

SEQ ID NO: 48353 - DNA, 229 bp, Zea mays
  Clone ID: MRT4577_144103C.1
gacataaacaacccaaaggggggggggtttattttctatgacacaaacaacacacccactgggatcatcacatgacaaaaacaccctgtttgaaccatgtaaaacaaagcaacgaccacgcacagaaataacccacaagtcagaaacatgctcaatccccccaccgaatctgaatacgctacacctattctaaaccaacgagcatgtcaaaaaaacccatcacgctggg

SEQ ID NO: 48354 - DNA, 305 bp, Zea mays
  Clone ID: MRT4577_144104C.1
aattcggcacgaggccactgtcttatagtacgtggctggtgtgccacatatctctacaactattaagagcctaatgtagactgcccccgcctctcccacgcccgcccgccgcaatccccaaccgccctccgcaatcccctaccgcctgtcgtgatccccgccgccgtggcagccgcccgccgcaacctctgcctagataaggatagggggcgccctcctccctcgatcatccgcacttgtgtagccatcgcgccatctacaccggccaccgccacacggaggttcgcctctggccttgcggcttg

SEQ ID NO: 48355 - DNA, 204 bp, Zea mays
  Clone ID: MRT4577_144105C.1
aaaaaaaaaacgcatacacatacacaaaaacatttacatttatatataaatttaaaacatcaaacgggaagggctaaacaaaagttcgagtaagaaaaaaaaaggggcggccactttatagagacaaaatttaccacctctttaattatatcccatatctctactgtggtgttacctaatttaaattaactgaccttgatctaa

SEQ ID NO: 48356 - DNA, 373 bp, Zea mays
  Clone ID: MRT4577_144106C.1
cccacgcgtccgcccacgcgtccggcttccctgcagccaaaatgacgaatgggttaccctgcttgaatcctttgccactgcgcttgcgtgctactactattccatgcaaaacaacgtgttcggaaccaaaattaaagttccgaacatcgctgtgatgaatgggtgaatcgtcacctttttctttgaaatagcaactgtatgctcgaagaacagctgtgctggtccagctatctgggtaccgtactccctaccccgattgaactgtatttgggtcaaagtaatgggggagatactctttccatgctaggatataaggtgtaactacctttaattctaagatcaagaaatatatttaattctctttatcaatttt

SEQ ID NO: 48357 - DNA, 388 bp, Zea mays
  unsure (1)..(388): unsure at all n locations
  Clone ID: MRT4577_144107C.1
cacgcgtncgtttacttggnatcctctaaacggccgctcgcgtactaggaatagcccagcgtccgcccacgcgtcctgcggagcgtgggtgccacgggggaggacccaaagaaggtagactgggcacaattgtccctattgtgagtgggtttattgttggggttaatatatctgnagggctgtttcttgggggggggggttatgaactcagaggtgtacttaggatcccgaactagaaagataaaattggggntatgaggtggttaatgagggaggtaactnatattaatgggggtgtggttagtgtnatgtatgaagtggggtataattgttgagttagatggatgaatgaatggagcaattagtagagagaggaggtttgtgtatt

SEQ ID NO: 48358 - DNA, 2912 bp, Zea mays
  Clone ID: MRT4577_144108C.1
gagtttgtacaatttttctgtaactaggtcatagctcgaggttgacttgggacaaacctaaaacgatatacaatttggaatggtgggagtgctaaacaacaccaatgcaaaaacaaacaaatggacaaatatatggtgtagaatcatctgatgacgtgtacattaaattgtaactatcttggaattttcacatttgttttgactttacagaagacaataaaaaccttgccgatggggtatatcctttttggccaagattttatggcacactaaatcatgtttgctgggaactttagggcagacgtatgtgattaatctaatctctagtactccatctgaaggtcttctgaatttagattttttttatgttccatacataagggatgaaaaaaaaaactgcaaaagctgtcacttgaaatctcggaggtagggaattatagcttcataagggctgatttggtgaccatgcaattggaggggatccatagtgtaggaatcccctttgctattcaaagtatcccttttaattttctggtcaccaaatcagccctacgtatgggggtaaactctgcaactttttttccctattcatatcatgaacttacggactgcttccatacaatctgatagtagaacctatcagctcttgttgtataactcaacatttgatactagaaatttcgagccacgcgcgcgcgcggcgactccgggctggggtctccctcttcccttccctcagatccaactccgtttctccattccctccctagcccagccagggaaccagtctcagtgaatcccgcgcccggatcaatctcgcccaaggaagcagctcttcacgacttgcttccagatccatccatccatccatccgaggttgggccgtgggggtgtcggtgcggtgggaaatggggaaggggatcagcggcgacgcccgcctcgccgcggcgccttacgaccagtgggtgctgctgagccccgccgggggctcgccgcgcccgcccgcgcgctacaagcatgctgcccaagtggttcaagacaagctgtacgttgtcggagggagtcgcaacggccgttctctatcggacgtccaggtttttgattttaagacatcctcttggtcagcgttaagccctgctagaggctcaaaacatcccaaccatgaaaatgatgccacaggtggatcgttcccagcattagcaggccacagtatggtcaagtggaaaaactatctcctggccgtagctgggagcacaaggtcgtcatcatcattaaataaggtttcagtttggcttattgatgtgcaagccaatagctggtctgctgttgaaacttatggaaaagttccaacagctcgagatggccaatcagtatccatacttggttctcgattactgatgtttggtggagaggataacaagagaaggctactgaatgatcttcatatacttgacttggagacaatgatgtgggaagaagtcaaatcagagaaaggtggtccagctcctaggtatgatcattcggctgctgtttacgctgaccagtatcttctgatctttggtggctcttctcactctacatgcttcaatgatctttacctacttgacttgcaaactctggagtggtctcaacctgatgcccaaggagcacacataactcctagaagtggtcatgctggtgctatgattgatgaaaattggtacattgttggcggtggagataatgcaagtggttccactgatacagttgtaattaatgcttccaagtttgtgtggtcagtggtcactagcgtctcagctagagatcctctagcttgtgagggtctcaccctttgctcaaccacagttgatggcgaaaaagttctaattgcctttggcggttacaatgggaaatacagcaacgagatctttgttttgaaacccaagccaagaaatttagtccaacctcgtcttcttcaatcagcagctgcagccgccgccgccgcttctgtgacagctgcctatgctgtaattactgccacagatgagaaaaccagagatattgttgctacagatgattttgatatcaagagagctcaacctgcaagtaattccaaaaagtttgttgctgaaattgatgtacttaatggagagaatggtaaactagcggctagattggcagaggttcgcgatgaaaactcaaaactaaaggataaattagacatgacaaacttgtcatatggtgaattagcaaaggaacttaaatcagttcaagatcaactagcagcagagggttcaagatgccagaagcttgagtcccaaattgctgctgcacggaagagactggaatctgctggttctttggagaatgaactagaagtattgcatcaacatatatctcaggtggaggaaaccattgcaactactcagagaagaaaatctgggggtgtttggaagtgggtggcgggtagtacagaggtctctgacgatgaatagttgacaagcagcttccgaacaggaaacgtaagcggaggatctgctacagttttgaggcagcttgtctgttgccagttgccgggtgcttcctcaaggtcttgctcatggttgatctcgaaaatatgtctcccgaaataatcttgtttatcttcttcggtggtggcacctggtagaaaattttcctgggcagtcttagacattaattcaacagtaaaagcataacatcatgcaagtataccaaatactgagagcgtatcgcattggattattagcagcgctttgtttttgtcgtctggtacctattttttggctggcggttattacaagagcggtctcatattataaattattatatagggcgttcattggttgtgacgctgggaattgaggaaatatacattgcttataccgtaaatttagaaacatttatctggtaac

SEQ ID NO: 48359 - DNA, 216 bp, Zea mays
  Clone ID: MRT4577_144109C.1
actattttttttgttttttctttttcgggcgcagttcaagcagaaatcgcacacggggagcatcttttcttttaaaacaaagcatgctcaactcgcggatcctagagaaggtatgagcccatcaggcggcttgaaaaaagagccttcctgcacccgggccttctcggtagccatggtcaacagggcgcttggacccccatccacgacagctaaggg

SEQ ID NO: 48360 - DNA, 749 bp, Zea mays
  Clone ID: MRT4577_14410C.1
gcacgagggccgccaaggccgctgacacctacgccgttggatgtttctgaccagaagctcctcaacgaactgagtgagcttgcggtgttgaaacgggcaaggattgagcggatgaaggctttgaagaagatgaagaatgccaagcaagggtcctcgggtggcaatttgtgccccctgatcattaccattatcttctgcatcgtcatactgtggcaaggtttcttctcgggacacgagtcggcggtgagtttccatggatcgcccgagtcctcagtcagggcacacagcagtctgatctccatcaggttctacaagaagaaccattccaatgtgagaccacccagcgagaccaccgcagcccctgataacgtagagacagtttcaaggctcctggaaccgtaaccaagcgagaagaaggctagctcggtgaccgaacgctgcgggccgcggccaccaccacaggtacctgaacggaaaagctcgccacattctgaagcctctcaccttgacgaccggggctgtgtaaatcttccgagaccgccactggcgcttcctcctcgagcccctgctgtaaaaatgaacggactcctagcgttttgtgcgcctgggtcgcacgctgactagtgaatctgttggcagttgtgcgccgcagcccgcaggccatggctctagtgacgagagcgacgcgagcaagctgtttgtatgtgtctgattacaataataaaaggtttcgcgctgtttaaaaaaaa

SEQ ID NO: 48361 - DNA, 257 bp, Zea mays
  Clone ID: MRT4577_144110C.1
gaaaccaaagacaccagctttgtttacacaatttattgtggcagttggtacaaccgaggacgacttaaaccaccattacacttttagacacattgtttttatagaggggggtttttttggaaggttttttattttaaaaaagacaaaacttttaatattttggaacattttgaacgggtttaaaatttttgggccaaagccaccggatgagtcgtcgatcgatcgatcgatcgatcgatgatgggcttaggtttttt

SEQ ID NO: 48362 - DNA, 461 bp, Zea mays
  unsure (1)..(461): unsure at all n locations
  Clone ID: MRT4577_144111C.1
cggtccggaattcccgggtcgaccacgcgtgcgggcggttgtaggagctacgaaattgggtgngctgacgcgccggggcgcggcggggtggccgtggcggggcggcgggctgtgggcgggagggcggttcttcgtgtggggcggggcgcgcgctgcgcggggggcgggcgcgtgtggggggggggtgggggggggtggggggggggggtgagaggtgccttttctctcgcctgcctctttgggattggggatcggactggattgttgacttagttcccaagttccttattggccttggtcngttggtgaagttgctgcttttccggaggtctctcgtttccttggcttgcccgtggttgggggatgctttgtctacnggggctgggtcgtctccgcggttcctttcccttgtgcgtaagccctggcctctatcttaatgccacctgtttgtattcgccgtt

SEQ ID NO: 48363 - DNA, 413 bp, Zea mays
  unsure (1)..(413): unsure at all n locations
  Clone ID: MRT4577_144112C.1
ggcgtggggggggggggtttatcaaaaaaactcaatcaaatattgattatttctaggaaacacacgttggtttgagggcaccattatcgagtcatctcatatgtaatctaaaagaggcaccttcaactatgggttgctgcctctacatgggggggggggggggagagaactggttgtatggcagcaattgttgctggtgtaggaagggggggaccaatgggttagccactaccaatggattaagtaactgttgtcgctgtngtaggtacgcagcagaattcgacagtatcagttgggtgaatggaagcagctgttgcaagtaggcaacaaggttttgccacaattaagtgagtgaaagctggatcaatctgttgcgacaattgattgtgcaggtatttaggtgcattgtccac

SEQ ID NO: 48364 - DNA, 563 bp, Zea mays
  Clone ID: MRT4577_144113C.1
attccgcagtgccggttccgaagacgatgactccgctcaaacgattccggacgcaatccaatacaaacgaacaagccgtcaggtgtcatggagtactgtactcatgtgtactgtattcctgatgccgccgcccgccgactttggcggtttgccggccctgcgaatgccaccgctcttcctagctggggtcgtacactctccacgcctcccacgtcttactgctcaccgccaccaccccgccgcctctatctcggtctgcgacgcgttggcccatccctgctccccgccatggtctctcgcccaccgagagttctcgtggcaggggaattccttttcgtaaaggggggaattctggaataaaaggtggctcggtcttaactgttgaggtttcagttgggaggaactacgaagacacctcatcactagttcatggttgcttatacagtgctcttataatttccataaggggcatacatgttatcatcttaggctcttagccatagtatgatagcagcccacatccctgtaagaattatgtggtgtaactctttgtgaagcaagtt

SEQ ID NO: 48365 - DNA, 830 bp, Zea mays
  Clone ID: MRT4577_144114C.1
tcggccggggtcgttccatatacttgatcaagattcgagtatatccctcttgaagccgggaagaattcagatcttttttggccttgaatacattgtcttgtctagagggaaggaaaagatatcaacctaaatcagacaaaaatgaaggaagctcaggtttctaagggcatggtggttacgatcaaggatgttgagattccacagccaggtcccaagcaagtcattatcaaggttgtagtgagcggaagtaatcctaaggactggaaactccttgaaatgggctatatgaatgatgccaacacaggcgacgatattgctggctatgtgcacagcgtcggctccgaagtctacgagttcaagccaggagaccgcgtcgcttccttccacgaaatgatgacgcctggcggcagcttcgcagagtatgccgtaggctggcaacacacgactttccacatccccaaatccgtgtctttcgaagaagcatctacaatccccctcgccgccatgacatcagcaatcggactccagttgcgcctcggtctcccggacccatggactcccgtgccagacggcaaaaagctacccctagtcgtctacggcggcgccaccgccgtcggcgcctttgccattaaaatagctcaaaaagcgaatatccatcccatcatcgccgtcgcaggccgcggtatctcctatgttgaatcgctactagaccgttccagaggcgacacagtcgtcgattaccgcaacggcgacgaagccgtcgtaaagggatccgagatgcgcttcaaggagaaaaccttacatacctttgacggggtgtccgaaaaggc

SEQ ID NO: 48366 - DNA, 374 bp, Zea mays
  Clone ID: MRT4577_144115C.1
tgctcggaattcggctcgagacgtgcctcacctgttcttgattagtagactgttagttctactgctgccttgctgttacatatttacagtgttcgcttctgtgggggttacaattgcttactcgcttactccgggtttggatgctaaatgggcttcaatgtacaaagccattatttcaattattgcactggtaccatattgactaaaaaaacaaaaaaacataaaaaagaaaaaaaaaaaattaaaaaaaaagaaaaaaaaaaaaaaaaataaaaaaaactaaaaaaatagagatacaaaacatagacacaaatacaaagggggggcccccttttttgaatcctttaccccggttatttaaatcccccccgttc

SEQ ID NO: 48367 - DNA, 303 bp, Zea mays
  Clone ID: MRT4577_144116C.1
gccgacctccactccagcacttaagcaagcgctcctgaggtcatcttccccataccctccccatcttcctctagtgtcggccgccaggttgtcttccccatccatcccatggcgccctggctctgctcgaccttcacaatgagctcgccctcagccatggcgggtgccgccgccacctcccccttggtgctcgccgagctcgccctcagccctacgtgcgcccctgcttcctcttcccagtgccgatgcccctgccttttcccccatctctttcccttgacgtgctcccccaggtcgcgcgcg

SEQ ID NO: 48368 - DNA, 643 bp, Zea mays
  unsure (1)..(643): unsure at all n locations
  Clone ID: MRT4577_144117C.1
gatagacattgtcccattatttcactgtaactgtgctttagcaacctgcatgctaccatgacacagattctccaacatgaaacatataaaccttgtacattgaagtatttccgaatattcaacccttcggtatccataggagattggagaagacttaaatcatcagaaaaatcaccagcaaaacatcagactttcctctcaatatcacaaccaaatgtgagcctcgaatgcaccggtccctactggtctagagtagatccttttactcagtatgtaatctgcagtactttcaatctaaggttcattcacatctgtaggatagcttccaagaactcttaaaaatgttgcaaactccttcagatttccaagagcattctgagtctttggatcagccattgatgcttcaaggtcaacataaaaaaggtaatcaaagttctttaagagtgaggaacagtcatcagatacccgaagaggcctttccttgtgtggacgactntcaatctttgtgaggttgatgtccctcagtgcanatacagcaagtgccttaaagagctgtccaggtccttcttctagtgaaaagactatgcttgtcttaaatggtttatcagtgcgaggtatgatggggttctcgagctagcatcat

SEQ ID NO: 48369 - DNA, 1808 bp, Zea mays
  Clone ID: MRT4577_144118C.1
cctcgaggatgttgggaaaatatactgactccggtccggaactccggatgtgtcggcgaccaggcaaagctccgtgtcctctcgtctcgtgtgactgacgaccaggtgggagggccataaggcctttagcgcggcggcggcaatggcgcccacggcctgcctccggacccccttcttccccgcccgtgcccgatccaccaacgccaccccgttctcgccacaccgccgcttttctctcaaatgcagcgcctccaacggtgacaactccaaccccaactccatctccatctctcccacctcgccgcctcggctaacggtgtcggacggcgtcgagtctgtggacgttaacgggttgcgtcgcccgccagcgcccgcctccgtccccgccgcccgcgatccccactggctgcctcgtccgctcacaagtgcggacgtcatggaggtggacgggaaggggctcaaggttgcttaccagggttgtgctggagcgtacagcgaagcagcagcaaagaaggcgtacccgaattgtgagactgtgccctgtgagcacttcgacactgcatttcaggctgttcaaaactgggtagctgatagggccgtactgccacttgagaattcattgggaggtagcatacataggaattatgatcttttgcttcggcatagtttgcacattgtaggagaagttcgccttgcggttcgccattgcttattagccaatcctggcgtgaagattgaaaacctgaaaagtgctatgagtcatccccaggctcttgcgcaatgtgagcacacattaacatcactaggaattgagcatagagaagctgttgacgacactgctggtgcagcaaagattgttgcagaacatatgctccaggacactggtgctattgctagttcgttggcggctaaactgtatggattggatgttcttgctgagaatattcaggatgacaaagataatgtcacccgttttatgatgctagctcgagaacccatcatacctcgcactgataaaccatttaagacaagcatagtcttttcactagaagaaggacctggacagctctttaaggcacttgctgtatttgcattgagggacatcaacctcacaaagattgaaagtcgtccacataaggaaaggcctcttcgggtatctgatgactgttcctcgctcttaaagaactttgattaccttttttatgttgaccttgaagcatcaatggctgatccaaagactcagaatgctcttggaaatctgaaggagtttgcaacatttttaagagttcttggaagctatcctacagatgtgaatgaaccttagattgaaagtactgcagattacatactggattagcaggaataggcaaaatggttagagttggtttcctgagcaagttaaaatgaggaactctattaaggtgatgctaacttttagtcttttacagagtaaaaggatctactctagaccagtagggaccggtgcattcgaggctcacatttggttgtgatattgagaggaaagtctgatgttttgctggtgatttttctgatgatttaagtcttctccaatctcctatggataccaaagggttgaatattcggaaatacttcaatgtacaaggtttatatgtttcatgttggagaatctgtgtcatggtagcatgcaggttgctaaagcacagttacagtgaaataatgggacaatgtctaagaacaccgccctttttttgtgacaatataataagaactgaataactgatgtttccgaaaaaaaaaaaaaaaaaagcggcccgaaatataagctc

SEQ ID NO: 48370 - DNA, 765 bp, Zea mays
  Clone ID: MRT4577_144119C.1
aattcggcacgaggggaacattctgcttcgccgtcccgcgaccgcgagcaccaccgctagcataaaccggcgacgcgctattaatccaacccaaaagtcaggcatcactgcgagccaagtatagcaggcgcggaaaggggccaagggggcgagtggagttgctgcggtgcccgtctatcttcggggagcgtctggggttgccggcggggaggccatggaccggggtcgaagcgagagcggcctgcggtcgcacgggtccggcaaggtctcctctcggccggggtcggggtcgcttgcattcccggaggagcaaccgatactagccgatcgcgacggcggcgaccgccgagaggttgtcgtgaagatcgatgggagcgggaacgggcacgcgccgttctccttccatggagcggacgcaggtgctgacggtggcggggggaaggcggagaatgcgacctccagcacgaactccacagcgaccacgccgcaggccgagagcaggtcgatgtcgagcgagaccaactatcctatgccaccggccaatgtgtgccggcgggaggggagctacgagttctggaacaatgacggcggcagcgccgaggcgttcagcttccagaaccgtccgccgcaggggccgcactcgtcgtccccttcaatatcgccgccgccgccgccagaagggggcggcatggacccacccgcccggctcaacggcagctttccccgggagcaggtggcgtccgacggcgagatgtcccttcgacc

SEQ ID NO: 48371 - DNA, 1803 bp, Zea mays
  Clone ID: MRT4577_14411C.1
tcattccaattaccagacactaacgcgcccggtattgctatttattgacactacctccccgtgtcaggattggataattagcgcgcctgctgccttccttggatgtggtagccgcttctcaggctcccgtctgggaatgggcccctaagggtgcttgggccctaaccctgctggcccccgtcgaaactactatgggaataaaggaaaatcgcaaggagtgtcatcacaacaaacaactgaagattgatgcagatgaaaatgatttaagattttgcttcagaataatctcacctgttaaggcatacacattacaggcagaatcaggggctgatcaaaaggactggatccagaaaattactggagttatcgcatcgctactaaattcaccattcccacagcagttgtcatatggtaatgtagcagcagagagtaacagatccacaagttctgttgattctttgtctattgaagataacaagagttcagagggacatgatgatatattcaaccttctgaggaatatccctggaaatgacagttgtgcagaatgtcgttcccctgatcctgattgggcatctctaaacttgggtattctgatttgcattgagtgctctggggctcataggaatcttggagtgcacatttcaaaggttcgatccttgagactagatgtgaaagtctgggagccagtaattatggatctcttccatgcactaggaaatgattacgctaattccatttgggaagccctgcttccaaaagaagatcaaggaatgaacgactcaaatggagctattctttttattgaaaagcctaaacctagtgatgctttctcaataaaggagaggtacatacaaacgaagtatgtggacaaactgctttttgccagagatcccgatcagaataccattaatattttggaagccataaggaaaaatgatgtgagagcagcatatcgaattcttgcaatagctgaagtcagtgctaacatgacatatgatgctttgagcaaagatgtccatcatgttcagccagtgacagacaagatgttacttgatccgatttcttgtgagataattcaggactctggaaaaccagaaggctgtctacaaggatttccatggccgaacaccattgcatcattgtgtccaaaagaaaaatgatgagctcaccaagcatctgctgaagaggggtgcgagaacgacaattaaagatggcggaggtctgactgctctggagagaagaatggaacttggagcgataactgatgaagacttattcatactatttgtgaggtgatgttgcaaacttgcaatacaggcctttggcaactagctgtttgtacctgatagcattgtattgtacccacctaatttagcttctggaaagaacatgatttctacacctgaagacaaatgccttttactgtaccacgatataacttatgggactgctgcgcttggctgtgttttaaaattccactggtcgacatgaccacatcgttggtttgtacaacaattataggcaatcacagtattcgattctttgagtatggttattgaggtatgagaaaaagatgtcaagcaagtaaggaaagaacacccgataatcgtgcatgcatattaccgttgggcaattttcttttttttattgcaattttacaactgtactgcatatggtcgacctgtaacaattattgaatttatgggtacgtgtatcctgcaagatatgaatcaacttgtaacagcatctccaagtatcgcttcaataaaaaagtgcaaatgcagcatagtttttcccgtg

SEQ ID NO: 48372 - DNA, 297 bp, Zea mays
  Clone ID: MRT4577_144120C.1
cggacgcgtgggcggacgcgtgggcccgcctctatcctttctctccgcacaaggtgcccctgccgcctagccgccatgaggaagccgacccgacgacgaggaacctcagcgaaaggcagctccggcggcggtatcattaaggcggcaacactgccggcgaagcagatggtcttgtccggctaccgtggcaccgtagacgcgtttgactgcctccccgacgacctcgtgctcgccgtgttagccggcatcgcggcgcgcgcccggtgccccgccgatctcgctgcagccgcgctaccg

SEQ ID NO: 48373 - DNA, 521 bp, Zea mays
  unsure (1)..(521): unsure at all n locations
  Clone ID: MRT4577_144121C.1
cggtccggnatatcccgggcgactccagtctcgctgcgtagcaagcaataaaaaagcacacgcaaggcagagcacaccatggccctctcctggcaagccttagccggcaaggccgggacacccgccgtcgcccgcccccttcaccgaggccccaatgccgtatggcgctaacaggccgggaaggccaagccggcagcggccgtccgcgaagcccgcggaacagccccgaccgcgtgctgcccctgggcccactggccggcgagccgccccagctacctgcacgggacgcagttcccgggcgactacggctggcacaccggggcgatgcctgcggacccggggaccctcgccaagaaccgggagctggaggcgatccactacccgctgggccatgctgggcgcgctcggctgcgtcttccccgaactgctcgcccgcaacggcgacaactacggcgaggccgtgcggttcaaggccagctaccanatcttcagcgagggtggactggactaccttgggaacc

SEQ ID NO: 48374 - DNA, 371 bp, Zea mays
  Clone ID: MRT4577_144122C.1
agaacacctaaaaagggcggggggtttgggaaaattttagttttgaaaaccgagattttagctgggtgggcaaacaactttggggttaaaaaaccccaggtttggggaaacccggattattcttccaaaactttggaaaaactttactcccaaacaccccctaaaattccaaacggggcctaacagttttaaaacgacagacggcccccaaaaaatttttattattatgcttggggagggaacaaaaattcaactcgccgcaacatggggaggtcgccggtatttggtataaaaaccttggtttttgggtccccactttggcgggcttaagtttggaccttgtacacaaaatccatttcagacaacacctt

SEQ ID NO: 48375 - DNA, 614 bp, Zea mays
  Clone ID: MRT4577_144123C.1
ctttttttttttttttttttttttttttttttttttttttttttttttttttttttttttttttttttttttttttttttttttagacaaaaaataaaggatattcccgaataaaaaaaaaaaaaaaaaaaagggaacattttcttaaaaacccggccaaaaaagggaagggaaacccggggaaaaagggaaaaaaaaaaaggggggaaaaaaccaaaacgggggggaaaaaaacccaaaaattccggaaaaaaaaaaaaaacttccccggggccagggggggggggggttttggaaacatggccccggcaaagggggcccggggaattggggggcacccattaatcggggcaaacacaaggaaaaggggggccaaaagggagaaaaggggcccccgccccataaaaaaaagcggagggggaaaggcggccccccgaatcttaaggggaaagaacttttcaaaaagggggaggggcccccaattcaaccattttccccccaaaaaaccccggcaccccaacaaaggggttttgaggccctcccatctcccaaaaatggaattggggaattggacaaagggcatcttaaaaggccccccgcggggccgcaccggc

SEQ ID NO: 48376 - DNA, 146 bp, Zea mays
  Clone ID: MRT4577_144124C.1
gtctattttgaaatcccgacgtccactacaattttatccaaaatagggaccgagcttacgaattatgcctgctgccttacttgttcatctctaatattcttagaccagcatttgttacaaagatattctgaacatttttattcatg

SEQ ID NO: 48377 - DNA, 441 bp, Zea mays
  Clone ID: MRT4577_144125C.1
ctcggacgccgccatgtgatggttctgcaaattcgccctttaggagggccggcggagtacaaattttttttttttttttttttttttttttttttttttttttttttttttttttttttttttttttttttttttttttttttttttttttttttttttttttttttttttttttttttttacatttttttttcttggtgggggggtcaaattttttttttgaattaacagtgtcgaaaccctgtgtgactatcatgaactacatgtatacggttgaagtcattaggcactatgtatagcactgttggattatctaattcatggctctaattcttcttggggtatctgggtgcattttaattgatcattcttgtactaatatcacttcaatatatttagtgtatcttcaagaacgattgagttaacaaacataatattcag

SEQ ID NO: 48378 - DNA, 192 bp, Zea mays
  Clone ID: MRT4577_144126C.1
ctgctccttgcgatcctttctttgatgagagggcttcattatctgcgctgcagaggaggcactactgggtgatgctgtgatgtcaagatgatcaactgacctatctgccactgactgagttactgggcacatacgtccactaaaccgaggacattattatagattccaacaatgctagcgtcagcgacattg

SEQ ID NO: 48379 - DNA, 336 bp, Zea mays
  Clone ID: MRT4577_144127C.1
accaatacatggcacaacgaggccaccattttattcgggaatatatatatctgtacatatgctactgtacatctctgcccggccaagatggccaagatggtaaggaacctgtgctcgaggtcgaagcggaggcggcggcggcagttcctgtttacagaagcagttcatgccgagcagcgttgctgctgccgccgcgccggttgcacaagctccagtggggcgagacctgagcccgtaaaccttactgggttcctctatcttcactagacactgtttctatcagctgtaagaatgttccccaactacataccggactcgacaagtggtaagcataac

SEQ ID NO: 48380 - DNA, 259 bp, Zea mays
  unsure (1)..(259): unsure at all n locations
  Clone ID: MRT4577_144128C.1
gcaattttgtgccatggcttcacttctgcttagatcttctgttagcctgtnttagttatagacttgcccgatttctcaggtttacagaagtgtcatttgtacagaacagccaagatcatcatgtatttagtggcaaagttttattaaaaaaaaaaaaaaaaaaaaaaaccaaaaaaaaaaaaaaaaaaaaaagggggggggggaaaaaaaaaaaaaaaaagggggaaaaaaaaaaacaacacctataacaacgggcggc

SEQ ID NO: 48381 - DNA, 441 bp, Zea mays
  Clone ID: MRT4577_144129C.1
agccgcgcgcagcccacgccggcctgggcgcgcgtgctgctgttcgacaaggcggtcacgcccagcgacgtcggcaagctcaaccgcctcgtggtccccaagcagcacgccgagaagcacttcccgctgaagcgcgcgccgccgtcggtggaggcgcaggcgcccaccaccgccaagggcgtgctcctcaacttcgaggacggggagggcaaggtgtggcggttccgctactcctactggaacagcagccagagctacgtgctcaccaagggctggagccgcttcgtcagggagaagggcctccgagccggggacaccatcgtcttctcccactccacgtacggctcggagaagcagctcttcatcgactgcaagaagaccaagacgacgacgcccgccaccgacggggtaccggtaccattaccagcaccagcggagaaa

SEQ ID NO: 48382 - DNA, 710 bp, Zea mays
  Clone ID: MRT4577_14412C.1
ggccgcttttttttttttttttttagaaactcatacctcaataaccatactcaaagaatcgaatactgtgattgcctataattgttgtacaaaccaacgatgtggtcatgtcgaccagtggaattttaaaacacagccaagcgcagcagtcccataagttatatcgtggtacagtaaaaggcatttgtcttcaggtgtagaaatcatgttctttccagaagctaaattaggtgggtacaatacaatgctatcaggtacaaacagctagttgccaaaggcctgtattgcaagtttgcaacatcacctcacaaatagtatgaataagtcttcatcagttatcgctccaagttccattcttctctccagagcagtcagacctccgccatctctaattgtcgttctcgcacccctcttcagcagatgcttggtgagctcatcatttttcttttggacacaatgatgcaatggtgttcggccatggaaatcctgcatattaatatccgcgccaaaaagtagaagaagctccaccattataggataaccgtattcgcatgcaaagtgcaataaagaacaaccttgtagacagccttctggttttcagagtcctgaattatctcacaagaaatcggatcaagtaacatcttgtctgtcactggctgaacatgatggacatctttgctcaagcatcatatgtcatgttagcactgact

SEQ ID NO: 48383 - DNA, 270 bp, Zea mays
  Clone ID: MRT4577_144130C.1
gctctgcactcagaaacgggtgtgacactaagtgagatagatataagtaaacatataatttatggtggcatctcatggtggagtttttgtattgcacattaaactaaagtttgaaattcaaacacaaatttaaaatttggaaactgaactaggaaaaaataggaaaaaaacaaaaggaatacaacagccacttgggtctgtttctctaccttagcgcacttcagttgcatggcccagtcccttttcacccatcatcgcgacaccagcaca

SEQ ID NO: 48384 - DNA, 665 bp, Zea mays
  Clone ID: MRT4577_144131C.1
gcggaagagagattttgcgcggcgacgcggcggcggatctcccgtcgggctgtggagtcggccccggccccgctcagttgcgcagaagacgaactcgacttcgtctccacgcagttccgttcgcgaccgaagacaaagcggggtcaaatccgcttcgcacgaggtaccccgctttcgattcgttgccttccgtatccgaccttggacggctccatcagacccacacggagacgctacgattcggcgtggtgcggccgagatctccccttcttaagcccatttgtgaatggcatcctcccaagaagataagatgaaggctttgatgaaagtccttgtcgactgtacagaggatgccacaaaatccctgggggggttagttgatcatgcattagaccacatgcatgacgaagaaatcctagctaggacattgtttgctatcaaagataaactagagttgcttcagcaggatgccttagaggcaaaagtccaagcgtttccaaaactagctaagtacgactgggatgacatcagtgttgatcctccctctccgtcaccccctccaacagttactgatccttctgttgacgaagaggagttctactgccccgacgcgagtgacgaatggtatttcagtgattcagataggtctacccgtaatagctact

SEQ ID NO: 48385 - DNA, 1326 bp, Zea mays
  Clone ID: MRT4577_144132C.1
atggcatcctcgacagaagataagatgaaggctttgatgaaagtccttgtagactgtaccgaggatgccacaaaatccctggggggtttagttgatcatgcattagaccacatgcatgatgaagagatcctagctaggacattgtttgccatgaaagaaaaactagagttgcttcagcaggatgccttagaggcaaaagtccaagcctttccagaaatagctaagtacgagtgggatgacatcagtgttgaacctccctctccgtcaccccctccaacagttactgatccttctgttgaagaagaggagttctactgccccgacgtcagtgacgaatggaatcctcttgggtcaggtgaagtcaatccttttcctgattccattccaccttccaatactagtacaccattgcagggttccaatactataccttcattacctgtgaacttggactcagatgctgaacacagtgttcatgacatcaatagtccagaaaagaatgcagctcctgtgcagaaacctaagaagtctaaggaacaaaactttactggacctgaagatcttctcctttgcacaacctggttgcaaataagcagtgaccctgttgtgcacactggccaacgtagggaggggctttgggctcgaattgaaaaaagatacaacgaacagagggggaagtttccttgtagagttaacagagcccttagcagcagatgggacaagattagagcagatgttagtaagttctctggctactacgcaagagttctaagagagaaacaaaatggcttaactgatgacgacaagacatcgaaggcggcaacattgtttgcacacgaggagaacaaacctttccagtacatgcattgctggcaccaacttaagggagaacccaaatgggagagcatttgtagtggacaatcgttccgcagattgaatgcaaatccaattggctctacaggaaaacgaccgtgtggtcatgatttcagtaaatcagagagacacaaacctgcatcttcctcatctccagagtaccttagccgtttgcaagaattaacagaaaaacaaattcagaggtccatagaaaagggtgaaaagaaagagaagtgctcagaagaagacagggaaatggagaaaaagaggttggaattggaagcacaaaaggtcatcatacgacaaagggaattgaaacttcaagaactagattcggctgaaaaaagattgcaaaggctggaggcaacaaatgaagaagatgtcgatcccgaagtctggattatgatgaaagaacaaaaaaagttgcaacaattcatatttagttttgagtaa

SEQ ID NO: 48386 - DNA, 580 bp, Zea mays
  Clone ID: MRT4577_144133C.1
aactgggagaagatatctttcattttcatgaggaacggggaagggtaaccacagctgcacaggccatcttcgcctgcagcaacgtcgacagcgccattgtcgtcagctagtaagtacatccttcgttaccgggataaatcattcctacccctacgttgcaccccttcggtgactactactctgcgtctccgactgtaatttcactacgtcaagactcaagaccctcccctacacgacggtttgattcttacttatgaactactactggatggaaggaagaagactactaccactaaattactaatcaggcaggttgaccttctctagcccagacgaaggcccaattccacaaggggctcacgtcgtgtccttgacgagcggcttcaccttgcgcttgtgcccgaagctgttcaccaggtccttgcgcgcgcaaaccgggaacaggtgaacgccgggcggcctcaggcgcctcaggacgtagggaaagctcagctgatcccgggacgtgaacctgaccacctcgttgaaccaggcgcacatgaagaggttggtcagcggcgcgtggtttctcacgatcact

SEQ ID NO: 48387 - DNA, 1090 bp, Zea mays
  Clone ID: MRT4577_144134C.1
gggtacctcgaggccggccggcattggcctcgaggccggcgggcatccccatccactctactttacaccgcaggcagtgagccagccactgagccacaaagctatctctgagcgacgtcaagcaccaccgaacgaccaccaccaccacctcgagctacaatctatggcgaagcgtctcctccgctcttcgtcccttcccctggccccggtgccgccgctgctgcttcttctcctggtaacgggatcgctcgcaggggcaaccgcgcttggcagcttccctggggaacgtcgtggtcgaagtctgcagcagctgccaaacccgatgcctcagcctgtcccgcagccgcagccgcagccagacccaaacgtacggccgcaaccggggccgccgaacccactgccaccacagccccttccgcaaccaaatccaaaccctcagccgcagccccttccgcaaccacagccaggcccgcagcctgacccaaacccacaacctcagcctcagcctcagcccctcccgcagccacagcctggcccaatcccgccacagcctgacccgaacccacagccacaacctcaacccttgccacagcctagcccgatcccacagcctggcccgatcccaaacccacagcccatgccgatgccagacccaaatgtgcagcagccacaaccacaacctgctcccaaccaaaatccacagccgcagtctgatcagctctccgggggtccacagccacttcccaacagcgaaccaaggatgttgaacccgcgatacaccatgcttttaagctttgctgctttgttactataatagctctgtaccatacagcagtttttttcgttgttttcttttacgcttgtataaatataataatatgcggagtagtattattattgtgattttttcttatatttttttgcgagagtgtacgtttgcagggcgcgcctgtatagtattttagcactatcgttataacgtgccttcattattgtatatgcagattgtgtaactctgtggcctgtacatctatacgatatatataataatatcatttcttcctcgaaaaaaaaaaaaaaaaaagcggcc

SEQ ID NO: 48388 - DNA, 412 bp, Zea mays
  unsure (1)..(412): unsure at all n locations
  Clone ID: MRT4577_144135C.1
cgctgagccgcatcagcgacttatttatgttcaagggcgacaccccgttctgcaacgaggtctgccgttactagcagatgcaccactacgcgcgagtacgcaaggcagtcggccagcattctgcggatgcagtaacagtctcatttgcagtgtagcatatgtggccttgtccgtgggcgcctaggcggacgtgtccttagccagctagtcagcactaaaagcaagcacatcgtcttctataaaagaggatgaggaggaggagaagaagcatgccctgctcgttgaagccgtgtttcagatgctagagatcctattggggtgtcatgtgttggaacnaatcctgnntttttctgcataactgggagcgatgaggattttgttgagtagtagcctcgcgagaagagcttgaact

SEQ ID NO: 48389 - DNA, 1120 bp, Zea mays
  unsure (1)..(1120): unsure at all n locations
  Clone ID: MRT4577_144136C.1
tcgaggnnccggccggaaaaaaaaaaaaaaaaaaaaaaaaaaaaaaaaaaaatccccatccactctactttacaccgcaggcagtgagccagccactgagccacaaagctatctatctctgagcgacgtcaagcaccaccgaacgaccaccaccaccacctcgagctacaagctatggcgaagcgtctcctccgctcttcgtcccttcctctggccctggtgccgccgctgctgctgcttctcctggtagcgggatcgctcgcaggggcaacagcgcttggcagcttccctggggaacgtcgtggtcgaagtctgcagcagctgccaaacccgatgcctcagcctgtcccgcagccgcagccgcagccgcagccagacccaaacgtacggccgcaaccggggccgccgaacccactgccaccacagcccctgccgcaaccaaatccaaaccctcagccgcagccgcagccccttccgcaaccacagccaggcccgcagcctgacccaaacccacaacctcagcctcagccccagcccctcccgcagccacagcctggtccaatcccgccgcagcctgacccgaacccacagccacaacctcaacccttgccacagcctctcccgcaaccacagccgggcccgatcccacagcctaacccaaacccaaacccacagcctgtgccgatgccagacccaaatgtgcagcagccacaaccacaacctgctcccaaccaaaatccacagccgcagtctgatcagctatccgggggtccacagccacttcccaacagcgaaccaaggacgttaaacccgcaatacgccatgcttttaagctttgctgctttgctactataatagctctataccatacagtagtttttttcgttgttttcttttacgcttgtataaatataataatatatatgcggagtagtattattattgtgattttttcttatatttttttgcgagagtgtacgtttgcgggggcgcctgtataggatttagcactatcgttctgatatcttgacgtgccttcattattgtatatgcatgattgtataactatgtggcatgtacatactatacatacgatatatataataatatcatttcttcc

SEQ ID NO: 48390 - DNA, 469 bp, Zea mays
  Clone ID: MRT4577_144137C.1
gttttgtgtcgccgttattgcgagggtgagaatagcagccgccgtccaaaaccccggtgcgccgacactaggcctgttcaagtgcccgcagggtgtcgcggttgcccattggtgacttttgcgccaacgtcgggtgacttaaaagttcggttgggccccattttttggtcggcttggttattgcacgccgaagccgccgggcgtaatcgttggggctttttactttataatttgcgaagggcaagcaattgaggactcaggtgttcaggaggtggaaactgttaaccaggagctcgttgaaggaagggagacagaattgatctacctgccaacccccacaacaggaggatagttagacaactgcaaccagaaatgaatcctccgaatcctccaccagctgggacagatccagtggttgccgctcaaatgcagatgctacagcagatggcaaacacaatgaatgagatgc

SEQ ID NO: 48391 - DNA, 1005 bp, Zea mays
  Clone ID: MRT4577_144138C.1
agcttgccggatctcagctcttttggtggctacagcagatcaacgaccgtagaatcgacatcgtcggcgcagccatacctgcagagatccagcagtctcgctgaaagcagtaggcaacaagagccggatattgtgtcggcaaggagcagcagcagtggcagtggagcagcgagcgagcgaaagaagcgggcgtccgaggaaaggacgagcaccgtgaagaagtccaagcaagagggctctaaaccatctcctcccaagcagcaacaagtgcctaaagtgaagatcggagagaagatcacagcattgcaacagatcgtttcgccatttgggaagactgatacagcgtcagtgctgtttgaaacgatcaagtacatcaagttcctgcatgaacaagtacagctactcagcgagccgtacacgaactcgagcaggagcaagggtaataaccacttcccatggggagatcatcgtgctgctgcagagacgagcaagcagggagatgaggcagagcacgacctgagtgacagaggactctgcctggtccctgtctcgtggaccccgcaagtctaccgggacgggactgccatggactactggacgccggcgtacaggggctgcctgtaccgatgagatgacaactccctcgtctgactagttgctcaaacattccttactgtcagtgtctggtctgcctctgcctccaagttgcacaggacggcagcgcagttgatctgcttaactatgttgcatgtggtccctagctagtttgtagtgctggtttgtattattgtttcatttgcagtgtcgtgtttgctgatttgtgctagctaatgagtactgaaggaattatcttgataaaaccacctttagcctctcatatctgtaacgtacgagatgctgcaccacagcataagaatgtgtttgcctgtttaaatgagctgctagtgattattacagaacttatatggtgtcggtcatctggactaatatatacgtttgtgcatg

SEQ ID NO: 48392 - DNA, 387 bp, Zea mays
  Clone ID: MRT4577_144139C.1
aacccttccgcaataccaaactatacaatcctacatggtttattaggccatccaggcaagcatcttacgggggttagcattaaccgtcctacaaccttacgctctattgcaacagccatccttagtgcatttgtatctccaaagaatcgcggcccaacaactacaacaacagttgctaccaacaatcaatcaaagatttgcaaaaaaccttgctgcttacctgcaacaacaacagtttcctacattcaatcaactaaatagcgtgaaccctgctatctacttgcacgcacaacagctactaccatttaaccaacttgtcgggagcccttatgccttcttactgcaacaacagcttctaccattccatcttcaagctgtagcaaacat

SEQ ID NO: 48393 - DNA, 264 bp, Zea mays
  Clone ID: MRT4577_14413C.1
gcaacaaggacccgctagcctatcttgacacaacaacaagttgcatggcgtcctaccagaaatctgaggctaaccccgcaacccttttacaactgaaacagccgataccctttgtagcaactggctttgacaaacccagcaagcttctaccaacaacacatcatcgcgcggtgccctcttttagattgcttattagctgccattcagaattgaagttttttggctgatgtatgtggcctcctagaaataagaagttatattccc

SEQ ID NO: 48394 - DNA, 343 bp, Zea mays
  Clone ID: MRT4577_144140C.1
tcaacgatggacagatcaaacgggtactggggtccgaggagccatgttaaacaaacctgttgatgagaaaaccatacagcgcttgactggggcagacaaaaagaagctaagaagaactgccaagggaaggtgttcacaagcttatgatgctgaccttgatgccatccttccttccaagggtgagataacagttgctaagcacccgaaccatgttcttgtatatggcatacaaggagagtatccaatgattcttaacactgacgcaagaggtcatgaactggttcctacagattatgccgctttggaagggaccccatatgttgccagcttttacgcttaaagg

SEQ ID NO: 48395 - DNA, 385 bp, Zea mays
  Clone ID: MRT4577_144141C.1
acccaaaaaagcaaccaccggggctgaaaacacatgggacgaaacaactggttgcaaaaaaattgagtcaagggtgacaaaaaattcggccatccattgttttaaacaaaatcctaacaaaaagaaaaggggctcccatagccaggaaagcctttgtttttatactaatgaacccccacaacagcccggggcctagggagttacaaaatttcccaaaacatggcataaaaaaaaatcggattttgcccgaaacccccactttaacataaaaaccccaccgcccttattactcctcccccacaatatttgggaaaaaccaagccttaccaaatcacccccaccaccggttttttagttctgttttttttaaaaatgatcacaaaag

SEQ ID NO: 48396 - DNA, 261 bp, Zea mays
  Clone ID: MRT4577_144142C.1
ccgagctggagttctctatgtacgcggcgcacgaggtttccatagctgtagctgagctgtagaactcgatcctcacgatcgacactagcctggaggactctgattgtgccttcatggtggataatgaggccatctatggcatctgtcgtagaaacctcgatattgagcgtccgacctatactaacctggataggttaatatgccaaattgtgtcctccatcactacttccctgagatttgatggacccctaattgtagacc

SEQ ID NO: 48397 - DNA, 989 bp, Zea mays
  Clone ID: MRT4577_144143C.1
cattgggtacctcgaggccggccgggaaagcggtgcgagcggaggaggcgaccgaagcgccacttgctttgcttgagtagcgaagcgcgagagcaatggcgtcgctgtcgtgcgcctccacgctgccctggacccccgcctcctacccgcggccctcggcggggcgctgcctcacggcttctcgccgggctccgtcgctggtcatcgtcgcccaggggaaggtcaagaagtaccgccaggtcatattgacagacgacatagaagaggtgggggagaaaggggatacactgaaggtgcgagctggattctaccgcaacttcctccttcccaagggcaaggctacacttctgaccccagaagtcctcaaggaaatgcagctggagcaggagagaatagaagctgagaaaaagcgggtaaaagaagacgcgcaacaacttgctcgagtttttgaaaccattggcgctttcaaactccctcgcaaaggtggaaaaggaaaacagatctttgggagtgtcacggcacaggatgttgttgacataataaagtcacaacttaatagggatgtcgacaagaagctggtgacggttccagaaatccgtgaaatcggagagtatgttgcagagatcaagcttcacccagacgtgacagcacgagtaaggctgaatgtctatgcgaaatgagctcagcagttacagaacctcgagcatttaagactttggcgaagcctgatgtttgccagtgcagagattttgctgaaagtgccaggtgctgcggtagacatgaggcctggtctggccgtgacttgcctggttttgatacacaattcactggctcactgcgcatcctattccctaccatgtgtagtcaagttttcaacaattatatctgttgattttgaggtggaaaatataaattgttgtaaagcacaatttgtttgaactgtagagcactacttcgccgaaaaaaaaaaaaaaaaggcccctagggcc

SEQ ID NO: 48398 - DNA, 1058 bp, Zea mays
  Clone ID: MRT4577_144144C.1
tgtgcgagcggaggagggggccggaccgaagcgccacttgcttgagtagcgaagcgcgagagcaatggcgtcgctgtcgtgcgcctccacgctgccctggacccccgcctcctacccgcggccctcggcggggcgctgcctcacggcctctcgccgggctccgtcgctggtcatcgtcgcccaggggaaggtcaagaagtaccgccaggtcatattgacagacgacatagaagaggtggggaagaaaggggatacactgaaggtgcgagctggattctaccgcaacttcctccttcccaagggcaaggctacacttctgaccccagaagtcctcaaggaaatgcagctggagcaggagagaatagaagctgagaagaagcgggtaaaagaagacgcgcaacaacttgctcgagtttttgaaaccattggcgctttcaaactccctcgcaaaggtggaaaaggaaaacagatctttgggagtgtcacggcacaggatgttgttgacataataaagtcacaacttaatagggatgtcgacaagaagctggtgacggttccagaaatccgtgaaatcggagagtatgttgcagagatcaagcttcacccagacgtgacagcgcgagtaaggctgaatgtctatgcgaaatgagctcagcagttacagaacctcgagtaatggactttggcgaagcctgatgtttgccagagattttgctgaaagtgccaggtgctgcggtagacatgaggcctggtctggccgtgacttgcctggttttgatacacaattcactggctcactgcgcatcctattccctatcatgtgaagtcaagttttcaacaattatatctgttgattttgaggtggaaaatataaattgttgtaaagcacaatttgtttgaactgtagagcactacttcgccaaaaacgacccttctttcttgtccgaaaaaaaaaaaaaaaaaaggcccctaggcctctctacgtctgcatccactacaaaaaaaggcataaaatttgctgagtatggggctcccatagagcgtatccagattggacc

SEQ ID NO: 48399 - DNA, 145 bp, Zea mays
  Clone ID: MRT4577_144145C.1
ggttggtgtacgaggactccaatgttttttatgagttcgcggagacggtgttcggggaggtttttagaggtcttagccagctccactatacgaccggtacgggtactaaaaagactgacatagctaaaggcgcccgttttaaact

SEQ ID NO: 48400 - DNA, 249 bp, Zea mays
  Clone ID: MRT4577_144146C.1
tgtacgcgtggggcaacggcagggaggaggggaacgctttcatccaggctcaggctcaggcccaggcccaggcgctgctgctcgccgccggtctgcaacagcagcagcagcacggccgaccctggtactcgcttcagcagggtgggcaccctctccagacagagcctcacggggtttattaccacgtcaccgtttgggaggcgaaaaccaacaacagctgggatgacgcacgctgaggaagcacgatat

SEQ ID NO: 48401 - DNA, 192 bp, Zea mays
  Clone ID: MRT4577_144147C.1
acgagacttgggaacttgagagacaagatagaagaagatacagaaacttgccgccggaacctttcctggcgagcagcacctctccctcgttcgtttgagtacgcacctcacgccatcggagatcctcggtggccacggggcacaacacgcatgcacggcagacggcgagcacacaactggcgaagggcagcg

SEQ ID NO: 48402 - DNA, 505 bp, Zea mays
  Clone ID: MRT4577_144148C.1
ggaccctcgagttcggccggctttccacattccccttgtgtgaccgcccgttacccaccgccgacgcggttctcgatgccagcgatagacgggccacaccgggcaggggctgagtcctgcacacatcttagcccgacgttaaggcaggtcctctgccggccgcccgacctcccctctaatgaacatggttggtcgagaccgtcatgcagaaggccgactagagtgagagtgtcgctgctacgatggacaagacatgtacggatcgtgtagacaaggaaggactgagtgctatgacaacactacaacgtgcaagacatgtgtaaggcaaatgcttgccgttcaatatggagcacaataattctacaagatgacaagaactgtacctcaagcaagacattgaatggaggtagatcagctaagctaataacgcatatggtgaagaactgaagctgcttatacttagatcctttgaacagaaagctcttggggaagcgcacgaactagg

SEQ ID NO: 48403 - DNA, 301 bp, Zea mays
  Clone ID: MRT4577_144149C.1
aagctattattattgttttcggtgtgtgaaaacccaatccttcaaccctacaggatcccacagggcggtcgcacctggcatcgtgcctttattacccttgctactccgacactcgtcacatcgtattacaacaggaacctttggggggggggtcggcgcataacatgagggcccatcacgcttcgacagcaagagcaagcgcaccttgctgtgtactctctggacgagcagaatcgaacgtgcatcccgctagcttcattgaactctgcttcttattagaaacagcttcaacttcgatcga

SEQ ID NO: 48404 - DNA, 475 bp, Zea mays
  Clone ID: MRT4577_14414C.1
aatattattgtttttttttttatcggaggcatggggcatggaaatcaggggtaccccttaatatcaaacacttttccgcttgaaattatcgatcgccaaataataaaaaaaagaaccatgaccacttgcgcgcttacttttaaagactgactctatatgacataatctcgattgaaagaaaaaatcttacaccctaaactcaaggccgggcggccacacacaccacactcttatgagccgatacccctgaggaaaccccaattttgaaaggcttcaggtggcgccttgggcttagtcagcgaaaaaaagggatcccgtccggtgtggatttgttaacaagcgggcggaaggacggatcataaaggagggctttggcacttggcaactgcaaaagggcttccttttctccggtcaaaagctccttgaagaaaaacctgacaaaaaacaaagggctggaacatccaggctccctcaa

SEQ ID NO: 48405 - DNA, 565 bp, Zea mays
  Clone ID: MRT4577_144150C.1
aaaaaaaaaaaaaaaaaaaaaaaaaaaaaaaaaaaaaaaaaaaaaaaaaaaaaaaaaaagaaaaaaaaaataaaaaaaaaaaaaaaaaaaaaaaaaaaaaaaataaaaaaaaaaataaatttaatataaaaaaaaaataaaatggggtggccttgtttttgggttttcaaattttctttcctggtgaaatccggggggttgctttttttttttgggcttctaaaaatatatttctttggccggttttttaaatggggggggggggaaaacccttgggcttcccaaatttttgcgcttgcagaatgtcccttttttcgccctttggattattgcataaagggccccccctgtttgttttttccaaacttttggcccgtttgaatggggattgggctccccccttttcctttcattttatgccgttggtttgtggggttttccgccggttttccctttttttttctaaggcttttgcccccttttgttttgctttttttcgttttttttaacccaagatcggaggtttttccttaggatgttttattggggggtttctttttggggt

SEQ ID NO: 48406 - DNA, 250 bp, Zea mays
  Clone ID: MRT4577_144151C.1
aaataaaaaatctatcctaagctgctatttccaatccaaaaaaaaaactaccacatcaaaaccattattaggcccggaacaccaacctgaccggacacacaccctcaccccaaccactcagggcaagccaaccaccataactgggtgtgctaaaaaacaaaaaaacgtgacaccaaaccaccacccttctacatcttgacgaaaccacacccacatcatacgataacaaccaaacaccccacatgccacc

SEQ ID NO: 48407 - DNA, 252 bp, Zea mays
  Clone ID: MRT4577_144153C.1
aattcccgggtctctagcttacagtcggcggccgcccttaggggctttgttttttttaaagaggggagggacccagcgcaaatgccgggcagtgaacagaacaatcgaaaaaataactataatcttactatggtctttaccaaagaataccacccaagcccattaaaggccctgaatacatggaccaaacataggagagtgtacaccaaagaaccttatcgaaatggcataaacgattaacaacgaagggca

SEQ ID NO: 48408 - DNA, 494 bp, Zea mays
  unsure (1)..(494): unsure at all n locations
  Clone ID: MRT4577_144154C.1
ggtgatggtatgcattagttgaacagcgttaagtgaatcgggcaatccagcggcagttgacgacgtcccaattgtaagtttataatttcagttgacaaaccacctggattaccaccccacattattatccgnttgaaatattagggggtagcagtggcacctgacaaaccatctgagttatcaaatgcaagctgctagaaaaattatggctcaatatgcagactaacataatcatcacttctcaagctatgaattagtaggttaaccctataattgctcaaaggagaaacagggaaactatggaaactatggaataagcaaatctatacattactaaagaagcgttggatctaactacaaatagaagaacatttagaacaggattaatgttcaatgtttctagattctagtatagataatgtcataacaacacatagaaaactgccaaaaatgacagcaaaattaatcattcacaaagcaagactggaataaca

SEQ ID NO: 48409 - DNA, 512 bp, Zea mays
  Clone ID: MRT4577_144155C.1
gccggccgggtcgggaacacagtacggacaagcctctcatcatcatggagtcaccaagctctccgcgctgctggtgctcaccatgctcgcgctctcctcatcgccgctcgctctcgcgtgagagaaggcggaaccggagtgacactcgtgcgagtgcggatcgccaccctcgaccggaggagtccccctgcctcccggcagaataccgtcagacccgctgcgccctgacagcataccataagcccccctgtctcctggcagtatacgcgtcagctgcccctgccgccggcgacactccctcccattgcgatcgttggaggaaaccctataccgaaaaacaagggacgccgaaacgtgtgtccaccgcctccgtgatgcacgacgccgacatgcacgcccacgccatcatcggacaagtgacgcatctacgagctcaaactcgacgactgccaggacgcatctacgaaacgaggagcacgtgcgctgacgactacgaccactgctgcccgctc

SEQ ID NO: 48410 - DNA, 876 bp, Zea mays
  Clone ID: MRT4577_144156C.1
ttgggaccctcgaggccggccgggaggaaggtacgtgtaatcgccgaaaaccccaccgccagtcaccactattcatcggccatggcccggcggtggctccaggtgactctcgccctcgtcgtcgtcacggcggcggcaacgacgctgtcctcagcccagcagacggcagcatcgttcccggccatgcccagctgcccgccggcgccgctcagcctgtccccgtgcatcggctacgtcttcggcgtcggctccgcgacgctcgcctcctgctgctcccagctccggggcttcctccaggcccaggcaccgtgcatctgcgccgcatccaagctcgcgcccagccccatcggcgtgttcctcggccaggcgcagggcatgatccccaacgtctgcgacctgcccagcccatgcgatgccggcgccgccggcgagggctccacgccgccggcgggagacacttcgcctgtgtctacgacgacgactccggcagctgaaccgtcggcgggcgcgcctgccgctgctgttccagacgcgtcaggagcaccgccggcaccaacatcagatgattctgccactgcaatggcaccggcaggcaccgcatcgaagctaccggaactactgcatgcagcaggcgcgacaagctccagagacgtggctgcaggcactgtattcgtcgctgtgtttcttgctgcacttgcaaccatgtatgtgtaactgttgtctgctaagctaccattagatcaccaaatgcgctgctgtaacgttatttaagagttcaaactgcaccctactgttgagcagctacaataaaaacgtttccattgtacagaaaaaaaaaaaaaaaaaaggcccctaagatcatggtattcacaaaaa

SEQ ID NO: 48411 - DNA, 144 bp, Zea mays
  Clone ID: MRT4577_144157C.1
ccacttgtctcctccactcccatggtgcatgttttcggtagatgtaccatgtaaaacacagtatgacgactttaataacaacagatccggattaggtaggacaaaactcttcactcttatattcggagtaggacttaacttttt

SEQ ID NO: 48412 - DNA, 266 bp, Zea mays
  Clone ID: MRT4577_144158C.1
cgccgaccaccggatcgcgcttgatgcacaagttccaatctagatactatatccggcccggggtgctagccccccttctcctcgtccagtaatcgactgaaaaggaaggtggccctcgtcactggtggcgccaccgacatcggcgatgccatcgttccactcttcattgagcacctcgccaaggtctgcatcacggacatccatgatgaaggcgggcaatacatgcgctacgccctgggaggtgacccacatggctccatgttcat

SEQ ID NO: 48413 - DNA, 444 bp, Zea mays
  Clone ID: MRT4577_144159C.1
cctttgtttttttttttacatggtgaacatgaagatattatttatctacatttgaaccaaaagttacattgcaaagtagaaaaaaaaaaaaaaagctggcaagaaaccaccattgggaacaaaccagtagagtgccattttttctttgggttattattaactcacccttttataccacatgatctgaagtttaaacagaagaacttgagagtagaaggtagaaacatgctctatatgctatagagaaaattcagtaaggccaagaccaaatggcttgatcttcctccggaattccaaaattacatgaaccatgaggggggtcggagtaatcaacatgttcaagcttgggaaaaatgttatgaggcagaagggtcttgctcaagttatcttcttcatcctgagacacatcagatcgatcaggttcgaacacataagaagaatcac

SEQ ID NO: 48414 - DNA, 588 bp, Zea mays
  Clone ID: MRT4577_14415C.1
aaaaaaaaaaaaaaaaaaaaaaaaaaaaaaaaaaaaaaaaaaaaaaaaaaaaaaaaaaaaaaaaaaaaaaaaaaaaaaaaaaaaaaaaaaaaaaaaaaaaaaaaaaaaaaaaggggggggccgtcccgaaacaaaaactaatttttttgggcggaaaccctccccctttttttttaacccgggcggggggtggcccctttggcatacgggtttccctttaattccgggggaaataaaccccgttgggcccggcccccggtttttcttaaaaaaaccaaattttttttggttccaattcccaaaaaaaaatttggaaatttttaaacccccaacggggaaaaaaaaaggggccccctggcttcaggagaaaaccaaaccagtttttaaagttgggccgaatttgccaacaattttttccccaagaagggttttaatatttttttcaacagaggcctgccccttttttcctttttcccctttaaaatttaaccctaagggaaagagcccttgcccccccccttttgggagggggccgcccaaatcccggtggggggccaattttggggccaaaaaccattgttggaaaac

SEQ ID NO: 48415 - DNA, 304 bp, Zea mays
  Clone ID: MRT4577_144160C.1
cgcgcatcctatagcaactagtgccattgtcttcgcagttgtagcaagccaacgagcctggcgttgcctgatgtacacaccaaaccaccgacatggtgcgcacgcacagccatgggaagggtatctattcatcggcgctggcgaacacgcggactcctctcatctagattaagacacctaccagcgaggtggcggagatgaacaccaaagatggcaaaaacgggcagaagacgggcgataatggtgttctgctccgccaccaggagggcaaccaccttgtcaagagcgttactgatatcaagaa

SEQ ID NO: 48416 - DNA, 670 bp, Zea mays
  Clone ID: MRT4577_144162C.1
ccggccgggagatacggttccgtcctcgatacgatccgccaagtgcgaccacctttccactgcctatcgaatccatgcgcgacgaggtccagacgaacatgatttccctgcagaagctccgatggcgaaatatcctcacgcgtcacaagcgtcggccatagaaaaatacaccattcgctacctgatccagcaggactgtcgcgatgacttcatacctcttcatattgctacctccaacatcctatctcagggagtggactgctgctacaagcacgtacatgtgggcaccgtcgccgccgccgcctcgaaagccgcctctgacgacgcgcttgccggctccgccaacatcatcgtcgcctccggagaggacctcaagaactgagatgtgcacttcaccaaggtcgaccaaggcactcttttccacctcatcttggctggaaactatctgaacatcacggctctactctacctgacctgacacactgttgctgacatgatcaaagcccagacaccagaacagattgtgaagaccttcaacatcaagaatgacttcaccactgaggacgaagaggacatcctgcaggatgaccagtgctccttcatactagagaggtgctggatctattgatgactaaggtttcgtggagtctactactatgtctactttatg

SEQ ID NO: 48417 - DNA, 227 bp, Zea mays
  Clone ID: MRT4577_144163C.1
gccgacggctctagggtttgttcttctcctccctcctcctttccgcattacccatcgcggcttctcttctccccctcgccctccctcccccgactcgcccatgtctcatcgatgtaccgtgacggggaaagattcgcaacatcgtttcccaattgtgtctgcgatgtaactctagcttcactgtctcctgaccgtggcctcatggatgcggccgctgagcttcgggc

SEQ ID NO: 48418 - DNA, 295 bp, Zea mays
  Clone ID: MRT4577_144164C.1
ttttctgagaaacatactgtgcgctaatactttattatatatatactaccgagaccctaaagggtcaaataaggttttctccaatccccaatcataaagatagccatcctagcacatggtgacgatgagtgatgaacaatatagacaagcatcactctggtaccaagatcatcattatattatatatataataggggcgctggtgtccttaacaaccaacatcggaaacagaaggcaggcagattagtgattgccgacagaggatccatgcagcaggccatccccgatctgcgtg

SEQ ID NO: 48419 - DNA, 1025 bp, Zea mays
  Clone ID: MRT4577_144165C.1
gtggttgttgcatcgtgcggtggagcttcggtagcgccctcgttatttaatggctcgcaggaccgtgcccggccggggctccgtgtaggtttattgcatacgtactagctaccactgttggtctgtcacgccggaggcaggtcgcagttattactttaacccggggccccatcggcgatggcggccaacggcggtgaccacacgagcgctagaccgcacgttgtcctgctccctagcgccggcatgggccacctggtcccgttcgcccgcctggcggtggcgctgtcggagggacacggctgcaacgtgtccgtggccgcggtgcagcccaccgtgtcgtcggcggagtccaggctcctcgacgcgctcttcgtcgccgcggccccggccgtccgccggctcgacttccgcctggcgccgttcgacgagtccgagttcccgggcgccgaccctttcttcctccgcttcgaggccacgcgccggtccgcgccgctgctcggcccgctcctcgacgccgccgaggcgtccgcgctcgtcacggacatcgttctggcgtccgtcgtcctgcccgtcgccagggagcggggcgtcccgtgctacgtcctcttcacgtcctctgccgcgatgctctcgctatgcgcctatttccccgcctacctcgacgcccacgccgccgccggcagcgtgggcgtgcgcgtcggcgatgtcgacatccccggcgtgttccggatcccaaagtcatccgtcccgcaggcgctgcacgatcccgaccatctcttcacccagcagttcgtcgccaacggtcgctgcctcgtggcctgtgacggcatccttgtcaacacgttcgacgcctttgagccggacgccgttacggccctgcgccaaggctccattactgtctccggcggcttcccgcttgtgttcaccgtggggcccacgcttccggtgagattcaggcggaggagacggcggattacatgagatggctcagcgcgcagccggcacggtctgtggtctacgtcagc

SEQ ID NO: 48420 - DNA, 140 bp, Zea mays
  Clone ID: MRT4577_144166C.1
ttttcgtgcacttggggaccgtcgaatcgatttggtagacagaggagaggaagccttgatgatgtgtcgtaaccagtacgacaccgacgtgacgacatggaggtcccaggggcggctgttccaggtggagtacgccatgg

SEQ ID NO: 48421 - DNA, 970 bp, Zea mays
  Clone ID: MRT4577_144167C.1
gggtaccggcgctctccctcgagttttttttttttttttttttttttttttttttttttttttttaatatcaaaataattcagtcagctcaatattaatgccttttcaaacaacctgcacaattatctcatggtatgttaacactaataagttgcaaaagaatacatttccagtgtactaaacatgacgagatcatagatctagataatgattcatctcactctttgatagaacaagtacataaaacccgttgagaagacattcttcctctaaagattggagctacttcatacataactcgacccctggaagtcgatgagaacccacctcatccctcaaccacatcaatgcagcctctctatcatcattacaggcacttaaaaatatctgtcgattgtcagagtccttgaacaccttataggctttgaccttctcctcctttatgacttccaatgtgtttagaactgctatgtaattcttaattgagaaatcatcacttcctctaacctccctttctcttgccaattgtgtcgcttcatcttcaacttgtttgtgtcgcttcatcttcaacttgtttgcttctaatttctagatcccaagacggtggaaattcttctccgactcgaaccggtgcaggaataatcggcgagaagtagccaccctcgtgccgaatcaaaaagcccccagcagatcgacgccgacgatccccttccgttcgctccaggctaggatattttccacccccgcctcgggccgaatttcataaaaagaaaaatgccattgaaaatacatgtcagcaactataaccatttaagcaaggtaaaccacacatctcacggtagaaccaaatttacaatttagtatatgccacatgactcaataaagagcaaaaaaactaaactttcactaccagaacaaaagagagaaggttgatattgatactaagatatccatcactgaaaatgcaagt

SEQ ID NO: 48422 - DNA, 698 bp, Zea mays
  Clone ID: MRT4577_144168C.1
cattgggtacctcgaggccggccgggatctctattcccaacgtctggacggcggctccgccggagtacactacctccttgggggcggcctattccataccgacctccgcctcctctgatgagagagagaacaaatgactcccaaggtcgatgagatcggcaatcatgcatggaactcggcactatgtagttgtgcctgggcgcgtggcagcacgaccgtatccagatcattgacaacgagcagtacaaccgcatcacatgcctcctacgacgccatctgcgactccgagcgccacgacgaatatgcaggcgaaagccagcatgccatgaacgccatcaacaccgactatgatgtccatggtatcattgagaagaggattactgctgactctgtgcagagggagattaagctgcggtccatgaaggtcattcgagcgcccggtgagaagccaatgatagttgtgcactacgatgtggaggagaaacagtttgcagccgaagagatctcctctatggatctcatcaagatgcgtgagatcgctgaagcttaccttgtaagcacgatcaagaatgctgttgtcacggcccctgcctatttcatcgactcgcagaggcaggccacaaaggatgctgggggtgattgctggcctcaatgtgctgcgtatcatcaatgacccaaccgctgctgctattgcctat

SEQ ID NO: 48423 - DNA, 283 bp, Zea mays
  Clone ID: MRT4577_144169C.1
ggggaaacaaccaaactttttaaattccaattccactggggatcccagttcaattcacggtttgaccttacaaaagggcaacttgttcataagttactcaaatagttagttttgggtgggtgagacatttttttaagaaaaaaagacatttacctgaaaaaaaacattgggggggtttgccggttttattacaccacgtatcatgtttttttgttaagggggactcccttgctggattgtggtaaattccaaatgcggttttgttgtagggtaggtattcttt

SEQ ID NO: 48424 - DNA, 541 bp, Zea mays
  Clone ID: MRT4577_14416C.1
gcctctgcttttgcttggatgctgctcccttctcccagcgaccaaatcgatcccgcgccatgtatcgcgccgacccctggcggggacgccttgccgtgctctcctcccacctccgtggtgaaagcttcgaggatgattatgggctgtagatctcttcgggatccgaggcgacgcccgaggcccgcgccgtcgcttttgacgaggtcgtactgggagataccgacaaagcgtcacgatgtcaaggtctcctaaaatggtaccgcgcgcgccaccgacttccagaagattatcactcggagaggacaacagggctcttaagatcttatgatactggtacacttagagtgccactgctcgctcgcccatctgctacatcgatgtagatgaaggaatccgtccctataaggattatccaatcaagaatatgtttgaatacacctcggatgagtgatgcgttctacatcctcattgtacgcacaacctgcctagcatctgacttctagtgacagctagtgaaattgctatttgtccatatactgct

SEQ ID NO: 48425 - DNA, 326 bp, Zea mays
  unsure (1)..(326): unsure at all n locations
  Clone ID: MRT4577_144170C.1
agccacgagcggcccaagcgcgccgcgaagcaaacnacgccgacggcnacggcagcggggggagaggcgccgacggccgccgagcngaagacagcggcggccgaggcgcaacccggcggcgcgcgagngaaggggngggncacccaggcccacaaaggcccgaaccacaacgcgcgccgcgngaaacggcaacaagacgaacagcaaacaacacatgaaccggagacggggagcggagagacgcncgcgncacaacaacacacacagaccggcagcaaaaagcaacggaacgcgccggacgcacncaaagcacggaagaaagaggc

SEQ ID NO: 48426 - DNA, 156 bp, Zea mays
  Clone ID: MRT4577_144171C.1
ccgcgggaacagttcggccaagccatcaagaccattgttggattcctgttaacaaagggcggcccgcattttcgcggcgtgccccccacgggggcagttttattttcttccatgaggactccacccgccttgaagtggtcatttttaacatagggc

SEQ ID NO: 48427 - DNA, 360 bp, Zea mays
  Clone ID: MRT4577_144172C.1
gaacttcaattccggcctcgacctacgcgtacggtagttaccaaagcactactgtacattctaataaccagctagcactatcagcaacaggctgtcatcatatcctaggacgtgcacctccacttatacaaccaccacaagaatgactaggaaccacatgcactccaatactcttactacgatacctaattatctacctccacagaccaatcctagtcctactgttacaaacacgaatacatggagcactatcacaagcaacacactcggctatgccgactccatctgcaaccgcacctttcaactctactagaaacacaatgcgacatataactccaaacacactcacactcacaagat

SEQ ID NO: 48428 - DNA, 415 bp, Zea mays
  Clone ID: MRT4577_144173C.1
ggagcaaaactttctctgcttttattacctcacttaataaggaaaagtccaagggggaacatggacaacctaaatactacgtttgggttctccaagcacaagagaacaccaaaaatccctccctttttaccgcaatgtatttaattgtttggacaataagggacggacatggggaagggagcccattggaatatcagctcggccttttttagcaggccaatctcatctcattggtgggataccgaattaccgccatgaggccccattatgcgcctcattgctgggggtggttagaccttgaaccaatggggattctggggggaccgccccaggaaggaaagaaaggttttttgaatttttgggggacatcggcgaggcccgggctaccttgggagggggcgaaaatttccctccc

SEQ ID NO: 48429 - DNA, 280 bp, Zea mays
  Clone ID: MRT4577_144174C.1
gtcaaatggtcccataatatctgtcccaaagtttggcatacatcggcccatataccttacttggaatgtcgacaaatgcggggattgtgttgctgtcctcgcgcaccatgaagtcaccaactccctaacaatcatcggctattctattcttcaaactgtcaatattcttatagcggctcatgtaccctattctcatcatccatcgatgcatctcagcctcttatgatacattgtactgctcactctgctcttcatggttatgtgacaccaggcctcttac

SEQ ID NO: 48430 - DNA, 359 bp, Zea mays
  Clone ID: MRT4577_144175C.1
gcctcacctcagatcacctcgccgactagggctgtgtaccgccgtggatcgcgccgtccccgccatggacgtctcacactcgggatcctcagtcgccggcgaggctccgacgacaggagagcaccaggtggggactaccatcgtcagggtctgctaccagggctgcgtcgtcctgcgcgccgaatccatgagcagactggaatgtatgtagccaaccgtgcttcacacaagattactcaactggcagagaacgtgtgattctgtcactctggatctgctgcggatacacatctcatttcggattatgtacgctatttcctcgaccaacacacaatccatcttggccaaccagctaccgt

SEQ ID NO: 48431 - DNA, 166 bp, Zea mays
  Clone ID: MRT4577_144176C.1
gttagcttgttacagcaaggaaaaatgattactactgcatgcaaaacacataaacacattgcgacaaagacactgacatgctagccacatgacctgagcacatatcacaggcagcaacaagtgcctaaacaaccgcttccctatcaaagatgcagctgaacttgac

SEQ ID NO: 48432 - DNA, 920 bp, Zea mays
  unsure (1)..(920): unsure at all n locations
  Clone ID: MRT4577_144177C.1
ctctgcctcaaggctgcaatgcaaaaacctgtcatccctacagagccctctgaacgtgactgctacttgcgcttctttcgccgagaagaggtcggctcctgtccatgccacggctgaggggtctgaggctggtgcggcggagcagccagaagaaccgaaacctgcgaccaagatcgaggaaatgccgctcgagtcgaagcagaagatgatcatggagcagagggcgcggatgaagcttgccaagaaactgagacagcggcgcaagcggctcgtccgcaagaggaagcttaggaagaagggcaggtggccaccgtccaagatgaagaagctcaagaatgtatgaacggcaccgccgtggacgaatgggtggcggccgtggacggggcaaccaaaactactattagagcaagggcattttccacggccgtattgctgtatgtttcctctagtcctcccagattttagtataatagccaatggtgcctgtaccattgcatcaattccgtgggattttgacattagtccttcagttttccctgggacatctttcctgtatttaaagagtgcatttttgatagctcatcagcatccagttacgcgtttcgcgccttggagtacttgagcgngacgccgccgaggtgggcggcgccgacgagggccccggcgagcgcgaacttcctcgactcccgcagggccttgagctggggcccgtagaccgggtcggaggcgatgaactagtagacgtcggcgtcggaccacttggggaggggctcggtgcggccgtagaccttcttgaagtagtcgaggaaggngaagttgctngcccagtgctgcccgacgccctagaagtcgcccaccgatccccatcgccgccgccggttcgcttgttgccccgggctgctgcggtcgggtctggaagg

SEQ ID NO: 48433 - DNA, 1179 bp, Zea mays
  unsure (1)..(1179): unsure at all n locations
  Clone ID: MRT4577_144178C.1
cattgggtacctcgaggccggccgggatgaaccatgtctccgttaggcccacatgtgaattcaggatcgaaatatgtgaaatttgtgggcacaagatcctattagggcctgttcgtttcgatccatatggattggttgaacggtattaggtgagtttgaatttatagcaagttaaaattctttataatcttttttaatctcatccaattcatatcaaaacaaggaataaccgggccttaagtggtttgccttttcgttatcactgttgttgcagcctcaaggctgcaatgcaagaacctgtcatccctacagagccctctgaacgtgactgctacttgcgcttctttcgccgagaagaggtcggctcctgtccatgccacggctgaggggtctgaggctggtgcggcggagcagccagaagaaccgaaacctgcgaccaagatcgaggaaatgccgctcgagtcgaagcagaagatgatcatggagcagagggcgcggatgaagcttgccaagaaactgagacagcggcgcaagcggctcgtccgcaagaggaagcttaggaagaagggcaggtggccaccgtccaagatgaagaagctcaagaatgtatgaacggcaccgccaccctgccttggctttgtgtcgtgtggtgccccgtttaccaatttcgctgttcagaacctgagacacgatgcctacgaaatataattctgtttccatgtaaaaaaaaaaaaaaaaaagcgaaaaaaaaaaagaaaaaaaaaaaaaaaaaaggcccctagttatggttacaaccaaggtgngatatggaggatatgaaaatggaggctggaactacaaccggaacagaggcggtggcggccgaggacgaggcaattggggctatggtggtcctggatatgaccgtggtggcagaggcgcaggtggccctggcggcaggggctatgttcgaggccgtggacgaatgggtggcggccgtggacggggcaaccaaaactactattagagcaagggcattttccacggccgtattgctgtatgtttcctctagtcctcccagattttagtataatagccaatggtgcctgtaccattgcatcaattccgtgggattttgacattagtccttcagttttcccctgggacatctttcctgtatttaaagagtgcatttttgat

SEQ ID NO: 48434 - DNA, 797 bp, Zea mays
  unsure (1)..(797): unsure at all n locations
  Clone ID: MRT4577_144179C.1
cttctttcccgcctctgctgctcaacagcctgtccgtctcctcctcccttatcctcttctacctccacctggcaggcactccccaccttgatgatggctcctcctgcctcccctcctctcccccaccgccgcctcccggcacaccccgctactaacggcgccctccgctttgcttcctccagcctccatccgcttctgtgctcctcgccaccgcccatgccgacgccctcgcctccccctatccgccgcagacggcgacgcctccacctcctccaccgtgtccgctgccaaccaacggggctcttccgcttcctccgtcctcaccttccagcaggccatccagcgcctccaggagtactgggcctccgtaggatgcgccgtcatgcagtgtagcaacaccgaggttggagcgggcacaatgaatcctctcacatttcttagggtcttaggtcctgagccatggaatgtcgcttacgtggagccaagtataagaccagacgacagtcgctatggggacaatcccaataggcttcagcgccatactcagtttcaggtaattctgaagcctgatcctggaaattcgcaagatctctntctgcacagcctttcagcaataggtattaacatccatgaacatgacatccgcttcgttgaagacaactgggagagtccgggtcttggtgcttggggactgggctgggaggtttggatggatgggatggaaatcacacagttcacatattttcagcagggtagactaatcaaaaagnggggattacttcatgactcttgctaaa

SEQ ID NO: 48435 - DNA, 1229 bp, Zea mays
  Clone ID: MRT4577_14417C.1
ccccacggccggccggccgcaacatgttgaactgtccttgcttctaaacggagtgagtagcgatagtgacgcagtcgtcttgccgccgccgtcccaaacgtccgcgcggtcgtcctcgatcttcccgtaccatcccgacgcgatggccgccggcgcgaagcccgataccgccgcgcccccgcaagcgccttcggcggcgaagggggtcttcatgcgccgcatcttccccttcctcctcgcgacgaacgtcttcatcggagtttatgtatttgccaagacctacaaaagagaccaggaaaagaaaaatgctcagactactgccgctgcagcattgtcatccccagcaagtacatctgccgaggctccagatcctgctcctgcacctgcgcccaaatcggttctcccacctctatccgaagatgagcagtggaatctgtacaaatggattctggaagaggagcggaagatcaaaccacgcaacgccactgagaagaagaagatcgctgaggagaaagctcttctcaaggagataattcgggataagtctctccctcgtttgtgatggttacatcggctgtccttctgatcttgattttttctttctctccacctgcagtccattgaggacaacatctgaaactatgtgccctgttagttagcaaaaccattagcatttctttgcactatcacatctcttcatttgacaataagaaggtcgagttgttttgctctgatgagaacttattgtgatcggggatgctcgggagatgttttggaagaagcttattgccttgtgaaacgttctaattgacctgctgataatgggtccagctagctatgctctgctattcttatgtaagatgtgaattgagctattcaactgctagtgtttttacatattccttgccccttttcatatggatcatccagaccctgccaatgctcctcgccttgctctgttagggcatgttcggtttgatctggagtgagggagattagagggattaaatcctctcctattcaatttaatccccttcaatccagataaaactgaacacattcttaaggatggtcaggtagtgtttggttccaaagtatagtagaatggaaccgctctgttttagtactgagactgtttggtttgaatcaaaatggaatggaacagttttaatattagaaaaaaaaaaaaaaaaaaaaaaaaaaagaaaaaaaaaaaaaaaaaagcggcc

SEQ ID NO: 48436 - DNA, 2811 bp, Zea mays
  Clone ID: MRT4577_144180C.1
cgggaagagcgcttggcgaggtcctgggtgactgactgaccacactagcgcagagcgcacaggagcaaaggggggcatcctctctcgcgcgcgcgccatggccaccaggccgggccctttgactgaatggccatggcaaaggcttggaaacttcaagtacttggtgatggctcccgtggtggtccacggcgcgcggcgggtgttggcgcggggctggggcgacatcgaccttgccttcgcgctcatcctgccgtcgctgctgctgcggatggtgcacaaccagatctggatcagcgccgcgcgctaccagacggcgcgcggcaagcaccgcatcgtcgaccgcggcatcgagttcgaccaggtcgaccgggagcgcggctgggacgaccagatcatcctcaacggcctgctcttctacgttggctacctcctgggtgactgactgaccacactagcgcagcgcgcacaggagcaaaggggggcatcctctatcgcgcgcgcgccatggccaccaggccgggccctttgactgaatggccatggcaaaggcttggaaacttcaagtacttggtgatggctcccgtggtggtccacggcgcgcggcgggtggtcgcgcggggctggggcgacatcgacctggccttcgcgctcatcctgccgtcgctgctgctgcggatggtgcacaaccagatctggatcagcgccgcgcgctaccagacggcgcgcggcaagcaccgcatcgtcgaccgcggcatcgagttcgaccaggtcgaccgggagcgcggctgggacgaccagatcatcctcaacggcctgctcttctacgttggctacctggcgatccccagcgcgaggcgcatgccggcgtggaggtcggacggcgccgtggcgatggcgctgctccacgccgggcccgtggagttcctctactactggttccaccgggcgctgcaccaccacttcctctactcgcgctaccactcgcaccaccactcctccatcgtcaccgagcccatcacatccgtgatccatcccttcgctgagcacatggtctactacgtcctgttcgccatccccatgctttcgactctctacatggggaacgcctccgtcctgggcatcgtgctctacatcgcctacatcgacttcatgaacaacatggggcactgcaacttcgagctggtgcccaggtggatgttccagctcttccctcccctcaagtacctcatgtacacgccgtcgttccattctctgcaccacacgcagttccgcacgaactactcgctgttcatgccgctctacgactacgtatacagcaccatggacaagtcgtccgaccagctgtacgagacctcgctcaggggagcggaggagacgcctggcctcgtccacctcacgcacatgaccgacctgcagtcggtctaccacctgcggatcggcttcgcctccgtggcgtccagaccgtctgccaccggcgccatgtggtggtacatgtgggtgctgtggcccgtggcgtggctgtccatggcgctcgcgtgggcctacgggtcctccgcgttcgtcgtcgagaggatcaaactcgggaagctgaggatgcaaacgtgggcagtgccaagatacaacttccagtacggcctgagctgggagagagaatcgatcaacggcctaatcgaaagggcgatactagatgctgatgcgagaggtgtcaaggtgctcagcctaggactgctaaaccaggcgaaacagctgaacggcggcggcgagctgttcaggcacaggtatcccaagctcagagttcgcctcgtcgacggaagtggcctagcgactgctgtggtgctcaggagcattcctcgtgacgcgaagcaggttctcctccacgcaggcccttctaaggtagcgtgcgccacggctgctgcgttgtgcgagaggggcgtccaggtcgtcatgaacccaaacaaggaatatgatatgctcaagtcacagattgcagatagcaaagcaagctatttggaacgacgctccgacaaccaccacacgcctcaggtttggctagtagacagcatcgacgacgaggaacagaagatggcaccgaaaggagccgtattcgtcccaatctcacagttccccatcaagaaaatccgcaaggattgcacctacctgagcactccagcaatgaagatccctgaaaccatgcaaaatatccatgcctgcgagaactggctgccaagacgggtgatgagcgcctggcgcatcggcgggatacttcacgccctggaagggtggaccgtgcacgagtgtggggacgccatggtacatgctgagaaagcatggtcagctgctattaggcacggattcgttcctttgacgaaagcctgaaagcctgcgagatatgtgtacgcaactctagacgccattcgacgatggctggaaaactacgtttcagcaatcggtagcacaaattctccccagctacagaagccgactatatggtctgcttgacgagtcgtccagggaggcacggcgtgatgaatggcgaccttgattccaacagcatatagtaactatatatatagttatgttgtggcattgtatgatgcaagtgcgagaaactgctttgtggctgtgtgggtgacatatacaattataataaaatgtcgatttggcttacctgtgcatggaatgatgagtagcatctatatctatgaaaagacgaggggaaaaaacacttctttgtttatcgttcaagatgcaaaaagaaaaacaaagattcgtctttgacagttcaaaaaaaaaaaaaaaaaactcgagagt

SEQ ID NO: 48437 - DNA, 566 bp, Zea mays
  Clone ID: MRT4577_144181C.1
gttctccataagcgcacgccgtcacggaatcactactcctcgccctcaatgtcttagctgctcaaaaccgaccagtcacccaccatcatcgacctatgttgctgactacctgcttgcttgctctgccctgagactccagccccttctgcaccaggacttggactgccattctgaatgcactgggctgtgaacccgacatcgaacaagacgtgactactcctgccccaactgagcgctaaggacgttacatagatcattgctggtgcaaggtataagccagcttgatacgcctctgcaagggcgggcgacccctgtagcagcaatggtgcccgctgctggaggcgctgctgcacctcgacgcacagattgagactctgcgccggcataaaagcaaagtgacgccgaatcgacctcaacgcgcccctaatactcctgtgcatcatcaacaactgctgcatgatttgcccagaagacttcacttgacccaactaagcttgggatcccttgtgcgctccatctcgcgagtatatatacgagaatgtcttcctgttgcaatattagcgaat

SEQ ID NO: 48438 - DNA, 295 bp, Zea mays
  unsure (1)..(295): unsure at all n locations
  Clone ID: MRT4577_144182C.1
gaggctacgacgtacgcatacggctgcgcgctcatggatgcaataggaaataatgagtcgcctgcctgatgggctagagcccggagaatggacttacctactggctgttatgactgaagctcggagaccgcttgggcgttgtacggcgtgcatgtacctgcgcctcacgtcgatgacatggacagattgaataaactgctcacgggcttggtgaaacaggagaggtagcatgacaagcactgcttgggagacttgacctcagtaagatgattctggctggnggccgtagattaca

SEQ ID NO: 48439 - DNA, 361 bp, Zea mays
  unsure (1)..(361): unsure at all n locations
  Clone ID: MRT4577_144183C.1
cagcgagaggaaagagaaaaaggaaaggaaaggacaaaggagcggcggcgaggncaaaggcgacgacggcaggggaccgggcgcggcgggcggcgcagaaggagcgggngcgccngcacaaccgcagggcgcncaaggacacgcacaacngggccgaccaccgccaccannacaaccaggacgcgaaggaacnccgggacgggggngaggccaaccgacacgngganaaccnggacgnggacgagaggcaaaaggacgaagcggaggcngagagcaggaaccggcaggaccccgggcccaacaaggaagcaggggcaccaggcgggaccaaaggcacaagaaaccacgcggcaccggaagg

SEQ ID NO: 48440 - DNA, 247 bp, Zea mays
  Clone ID: MRT4577_144184C.1
ccaaaaaaaaccaatcttttttaaaaaaaccccccccctgggggccaaacccatttctggcaaaaaggccgggcgcccccgacagcccaattcttttaaaaccgggaatccgggtgggtccttttttctcccccacaagaacccgcctcggcgaattctccgcccccggttctttcagggccccttgcccgcagttcagggcctagggttttgggttgggccacccaccggcaccgaaccggggggg

SEQ ID NO: 48441 - DNA, 288 bp, Zea mays
  unsure (1)..(288): unsure at all n locations
  Clone ID: MRT4577_144185C.1
cttgncgcgtgcgggaacccctnccactcccaccnaaaaaaaaaaaaaaaagagttcctatgagggttcgatcgggaaaccgcccagggcccgccccgcgagtggatggaagtgaccttcctggccaatgaggtgtcggacccgaccatttgcaagcttttttttgagggggggggggcaccacgccgcccccggagacctttgaattacgcctcggagggggggcgggtcttgcccaccatctgcggcggggggagtggaccaacgcgccgcccgtcgcggggcggg

SEQ ID NO: 48442 - DNA, 813 bp, Zea mays
  Clone ID: MRT4577_144186C.1
ctcgaggccggccgggaagtacagtttactacagcagccacagggttgctgctgcaccgcgtttccttcccaggtccaggtcgccggcatctgcagagagagaaagagagagtccatgaaactcaacaggaaacctccatccatccatccgcctggccggctcactgacgacctgtgctatcgcttcttggacttgcacacgaaagcagcggcagcaaggcaacgcagtgcatcagcgttttcgtgacttgactgggcgtacacggctaaagaaggccgatacggtacctcatctcttcccgaatctcaagcacttggtgtgtctttcttcggcggccatgctcgacggcggcggcgcctgggccgccttgctgctgtccttggccagcttctccatggcgcttatgaacttgcgcatgtgcctgatgtactccgggtacgtctccaggttgcagtgcccaccgcctttgatccacagcggctcatacttgtccttggctagctcccacagccgcttgccgtgagccaagtccacgatgtcgtcggctgtgccctgccatatggatggatacacggttggttcacaaagtcaacatatatacagacagtagaaactacttggtggtcagaatagaagcctactcacatgtatgactaacacagggcagtccacctgctttaattttgtcgatgttctgtaaaacacatgaaagttaaccagactaggataacaaggtcaacgctgttctgcagtaggagggagaatcatcaatcaaattatggtggtgcaaattacataccttgaagatgctt

SEQ ID NO: 48443 - DNA, 281 bp, Zea mays
  Clone ID: MRT4577_144187C.1
cccccccccccccccttggggagggacgattttcaaagctctataaaacattccccccctacatttgaagcggctgaggaggaccaaccaaaaatgtaccaagtttacaatggtccataaaaataatgcgggggcgtccccctccctggggtaaaaccaacaatcctggccttgcccaccttattaaggggggagcccctcccccggtaccttccaaaaaagaagattaaacaaattgaaaacttgttttaaacagacacaggggttgttttaaccaaagc

SEQ ID NO: 48444 - DNA, 473 bp, Zea mays
  unsure (1)..(473): unsure at all n locations
  Clone ID: MRT4577_144188C.1
ccccttccccgtccgcgcgagcaacctagctccatctgccccctcccgttcgccggtctcctccgcacgctcgcaactgctccctccctccgccgtcgcgcgcaccctccccctcgctctggacctctccagacgttggagttctccgtccccacgcctcgccggacccgccatcaccgcctcctcgttgggccacgaaaccctagcggcgcctgcagccccggataccgcgtcccgctcccttgcgcatccgcccgtgccctgctcccaccgacgtcgcctcctcgctgggccacggatcccctccggattgacggttgcgccgcctggccacgccgtcggatcggcggtgcagcgcgcggtgcaggagatgctggaggacccgctcggttggtggcccgggtgggagttctttaggctggccggtgacccggcggntcggcctgaacggntgatgaacatgtggggggcac

SEQ ID NO: 48445 - DNA, 912 bp, Zea mays
  unsure (1)..(912): unsure at all n locations
  Clone ID: MRT4577_144189C.1
ggccgggnaggacagattccagagagagagcacgcggcgcggccctgcccagccgagcgcctgcctgcaaggctcccctcctccctttcgcttcctccttcgatcggccccgcccagctgctgctgctattcggctcgcgcgcgcgccgcggcgggacccgggaggagcgccggtggtggtggccggcccgatggagtgggggtcagcggcgtacacggccgcgacgctggtgtgcgctgcggcggcgagcgtggtcgcgctcacgcacatctaccgccacctcctccactacgccgagcccatctaccagcggttcatcgtccgcatcatattcttggtcccggtaacgctctccgcccgccgctcacacccacaacaaaccctcgtggccaagggcgccctcgcgccagatctgtcgcctgccttcgctgtagcttttccgtatcggatgagctcgaggggtacggcccggtctgggttagtttcctggagaggttcccatgaatgttaggttgcgactgcgatggaattgaagtacaagtactcggtggaaagctttgctggtgcatgtgattctgactagaaggcgaatatagagccaccaccgtgcgctttgatgcgtgcaactgaattcactgatgttctgcggaggcgcatctgatcagtgtggatttctgcaacttgtagttttatcccgagtgttatgtttgggtcataggatatgtattaacgtgtatacattcgctctatcgttatggtccacaagtgaatctatctgctgcagctgtaagatggcttgcagtttgggaaatgtaagaccaagagtaatcatttggtacaacttctgcaacactaatgccaaacttccagcttggaaaatacgaacacttggtcaatgaaaaaaagcggcc

SEQ ID NO: 48446 - DNA, 583 bp, Zea mays
  unsure (1)..(583): unsure at all n locations
  Clone ID: MRT4577_14418C.1
cgtagcaaagaaaggaggcgattaaattgggcaactgcnagtctgttgtctcctcatctttcagtcttcgggttagtgcagtagtgtcaggcacaggcgctgagccgagtagagtagctagccgacagctgcacatcgtccttgaggagagacacagcatgttagtagttagcatctaatggatgcagccggagtttggtacccaggaaatgattcagtacggcagagataagataaatttgtgtaaggaaccacttttgaggataacggacagagagtgtatctgaccttattacgtcccaggcaggcttaactttcatcatccttcagagcaggccgtcttgctgaaagtaaaagaagagactgatgagtgatgacacgtggaggagaacttggaatctgaataataataatgcgtatactcttcatcatttgaggacgagacttgtttgggccaccgatgggcttccatttctcgtatgtgcgtgcgtgacattaaagggcaacctcttctgatgcagacagctcgctgctgcaactgctgctcggtcaatatcgatctatcatagagacgagcttatgt

SEQ ID NO: 48447 - DNA, 344 bp, Zea mays
  Clone ID: MRT4577_144190C.1
tacaaaggggacgtagagaacacaattctggatatccttggaggacttcggtctacctgtacctacgtgggggccgccaagctcaaagagctcagtaggagagccacattcatccgcgtgacccaacagcacaacacggtgttcggctaacctcggggatgttcggttaacctcggggaagcggaagcctcctttcgccacgcttcaccccatcccgcctccttatctgccctagcaggctgcctgctatcacagacgctgagactgagtcctcatcctgatctcggggcttgccctagtgcctgtgtggggcccagaaacagggtctcgaggggccatgggtc

SEQ ID NO: 48448 - DNA, 575 bp, Zea mays
  Clone ID: MRT4577_144191C.1
ttttttttttttttttactgggatgatcccccaacatgactttgcccacgatggtggtcagagtgtcagaacacatggcggagcggcattgtcggtgaaagcgcatggcccacatagaaatccaaacccggagcacgacaagtgctagatggcgtagagcatcgagtaaacatattgaaaccgcagatttacctgcgacgaggtccgaaagagctggccgcggtgcctgacgactccgccgtggtaccaccacaccgatgacagaattccgacgcaccgattgtcgctgtgcccgatgcttccatccatgacttcctcacgtgctccccatcctccctgaccagtcaccggggctggaccttgggcgatggcggcatcatcatgcagaccccaaggtagtgctccttgagcgagcgagcaggatggagttcacggtagaggaggccaccgcggtgcgggaagaggatggcatggcccaagaagtcgcggctgctagattatataggcagtcgaggaccaagtccgcgtggaagatgcggcacgaaggattatgtcgcctgtttgcgcatgaagcg

SEQ ID NO: 48449 - DNA, 779 bp, Zea mays
  unsure (1)..(779): unsure at all n locations
  Clone ID: MRT4577_144192C.1
gccggccgggctgcgaaggaggggcgggcggacagcggaggcaaggggcgcgagctcgccccaaggcgctgctgagggagagagccagccgctgcattgcgctactacattggccaggagggctcgccgccggggtaggctcggatctcgccgtctctggccgcccgtacctgctgccgcgtgcttcacttggtgccgctctccgcgcctactggcgggcggcctcgactccagcgcggcgtgatctggcgcgcgccaccgacgccgctcgcgtggggaggcctggatcttggcgcgccgcgagaccccggggaggacggcgacggcgcgctcatcagttgttcgcagtccgctgagctgctgccgactgcgcccggcggccgggagatctggccgacggcgcggcgctgcagatcccgtcctgcctgcgcgcgtgggcgcggctcactgctgctgtggaggctgttacgcgcggtggtggtaccgatgggctacgggtacgtggaacccttcctgcccccacagcagcaacagcagcagtggggctacgggcaaccgcacgcgcagctggctccgcggctgccggcttgcccgtactcgtcgtccgcctccgctccgccggtctccgcgtcctaccattcttcgcccccgccaacgtcgcctccgccgctaagcagcccacctccggcgtcccctttaccggagccatcgncgncgtcgtctccgccgccggcattggtgcctcctccgccggacgctacccctccgtcgcttccccc

SEQ ID NO: 48450 - DNA, 146 bp, Zea mays
  unsure (1)..(146): unsure at all n locations
  Clone ID: MRT4577_144193C.1
aggccggccgggacggtttaagtcgatncgccncaacagagcaataagattaacagtgtgctagtgctacagctacggnctagctacctactacggcgnanctagcagcacgcggcaacatganccgacgggcgggaggagagcac

SEQ ID NO: 48451 - DNA, 950 bp, Zea mays
  Clone ID: MRT4577_144194C.1
ccggccgggaacactgtgctcttggccgctacgcagattatttccctgttgaggactcgatcgattttgtttcgtcctgtcgatctgaatcttgatccgtctgctcgatcagtcgacgatcatggattcgacggagcctgaggtggcggctgcgacggtggagatgatgccgccgcacgtagtgtgcgtgccgtacccggcgcagggccacgtcactccgatgctcaagctcgcgaagctgctccacgcccggggcttccatgtcaccatggtgaacaccgagttcaaccaccggcgcctgctccagtcgcgtggccccgaagcagtcgacggcatcaccaggttccgctacgccgctatcccggacgggctcccgccctccgacgccaacgccacgcaggacgtccccgcgctctgctactccaccatgaccgcttgcctcccgcacctcctgtccctcctcaggaagctcaacagcgacgaccctagcagctctggcgcgccgcccgtcacctgcctcgtcgtcgacggcgtcatgtcgttcgcctacgacgcggcgaaagagatcggcgtgccgtgcgccgcgctctggaccgccagcgcgtgcggcctcgtggggtaccggcactaccagcagctcgtccagtggggcctcgtcccgttcagggacgaggcgcagctcgcggacgacgcgtacctcgacacggtggtccggggcacccgtggcatgtgcgacggcatgcggctgcgcgacttccccagcttcatccgcaccacggaccgcggcgacatcatgctcaacttcttcatccacgaggccgggccggctgtcgctcccggacgccatcatgatcaacaccttcgacgacctcgaggggtcgaccctcgacgccgtgcgcgccacgcttcctccggcctacactgtcggtccgctcctcctccaaacggcc

SEQ ID NO: 48452 - DNA, 233 bp, Zea mays
  Clone ID: MRT4577_144195C.1
cccaactgaaaccaaaacttgtggggaatttaaaacgttgacgggtgggggcatcatctttggagactccagataagaaatcttaatagcttacttggggaaggttttaccttaacattctctccgggtcaaacatttcataaaacggaaaataaaagcgattcatatttcattgtaaacccgaggagctggagcagaaacatttgccggggcaggtccatgttgggctttcg

SEQ ID NO: 48453 - DNA, 449 bp, Zea mays
  Clone ID: MRT4577_144196C.1
cccaccagaaaaagcactagattttccgaaacggttaccagagtcaacaattacgggccgggaattacttactactataaaaaaagaaggaaataccccaccttaatcatatgtaaaaaaacaggcccaaaaatgcgggggacatgggaaagcaaagccaagcagttttttccctcggcaagagccggcctcctacattacaaagggagcaccacaaacaagtaacattttcaccctccctacctgggggacaaaccccctaatataatctgggggccgggcgcggccggcctcctcccaatggccatttaatctacttggcggtgggcttgggcagggataaaacaaaaggttaggaatgcctaagaattaacaagggcaaaagtccgggacacacacaaacaggctgtttgaactgaaagtgtggtccaagccatcagccgaaaata

SEQ ID NO: 48454 - DNA, 210 bp, Zea mays
  Clone ID: MRT4577_144197C.1
cagtgaaggcaccatcaattattatgctcaacagaggattcaaaaagaggggaacattgacaaagataatctggtaattaaggcacgagttgaagaagaaaatactaacgaaaacacatgagcttaagctctattcacattaaaaaagtaatttgcaacagttgcatcaccaaaaccaccataagttaggatgcattgcccaattgctgc

SEQ ID NO: 48455 - DNA, 234 bp, Zea mays
  Clone ID: MRT4577_144198C.1
caaaatggcgagcgacaacacaagggggactttttatgatcgctccctgatccagaagcgtacacggcggcctcacggaatatcgctctaatggaccaactcccacgcgaagttgtgtcgtatcagaagactgtagaggccatgcggtgcaacaaggccaccggccaaattaatctgaggagcaaacacagatgttccagccgccgctagcactgagacctttaacgaccatgc

SEQ ID NO: 48456 - DNA, 318 bp, Zea mays
  unsure (1)..(318): unsure at all n locations
  Clone ID: MRT4577_144199C.1
acccactcgcccactatcaccaacnagggagctcgctcatcttattgcagatgtacttaaagaggcaggtgcaccatgtgttgattaagtcacncnncccncataanccaaccaaaaacgaaccccaaatatctgcccttaaatacagagtgaatatagtcatatgaactcctgatcgcatgaaaaaccttattgaaatgcgtgtttactgccttaaccaggtctcgtctgtggttctagatcaagcaaatagcatgctggatttggcctttgaacctgaagtcacggcaattttgagccaaacatcatctgtacacc

SEQ ID NO: 48457 - DNA, 439 bp, Zea mays
  Clone ID: MRT4577_14419C.1
attatatatagcaatatagcatataggagtcaataccaattaccaaacatagcaaatatgaatactggaactgtcacagactcacatttcagaattcagaacatgaactgaacatcagtcactactcactaactcactacttcatatgatgcagacttgcagacttactagttactatataaatgccaagtaggcaagtacagacttgctattgacctaaagtaacagatcctcatccaattgaaaagcagcaacactagtgggccttatttagctgaaaaccctaaggtattacactaatgggccttattaccagccgtccagtccacatccaaaacaggacaaaaccagctaatcgtccccacccaaactggatgactaatcccgtttagtcgacgactaatcggacgactggacgattagtcgacctgatcgggtc

SEQ ID NO: 48458 - DNA, 578 bp, Zea mays
  Clone ID: MRT4577_1441C.1
ctagattcaagaacacaggatgaaaagacatgtcatcaggaaaaaaaacatcaccaacagtcaacagatggggcataggtatcgtgtcgtgaccataattaaacaacatctggaatccaaaacacaaactatataggacattttccaaaccctcattcagaggatgcacaacattgaaaagctaatatgcagattattgaactgctaacataacccttgagtcgcaacaacaccataaagcttgagtctcccggaatccgttcatgccatcagtattcagtgggcgcgagatgaaggtgaagaagagaactgacagctcacgaacaggcacgtatcacatttcacgtgtagaggttgcagacactaaaagtaccactaagtcgtaagtccctcttatcagcagcagggcctcctagtacagcatcaaaagccaggttcgggtgaactttgacatgtaccgagtatgtcataccggtagtttctttttttctgaatggtaaaatctgtgaaaggtgaagcaatgaaatccctctcgaacaatggcgtgtgcgcccccaaagcggaagattcaccatgca

SEQ ID NO: 48459 - DNA, 287 bp, Zea mays
  Clone ID: MRT4577_144200C.1
cgtgggttttgttttttcaaggtgtcttatgtaggggttcttttatggacttgagcacataaactactcggagcagaacaagggtgtcttggatgaacgtcaagcgctggagacaccggtcgcatcaaacgctagaaagacaccatgcctctctaatcacggtgagcaagaagagctgtccacctaaatggctgtgatcaaggtgtctaaaaacattgagtggagagttagaaataagactgtaatgactttaggcaaggactaggtgtactatatcacaagttcaa

SEQ ID NO: 48460 - DNA, 206 bp, Zea mays
  Clone ID: MRT4577_144201C.1
ctggcgggaaaccccaaggcttaccgcgttcccccctaggggacctcccaatggcgggccacatgtacacctgtatttaaaaaggggcctagaaaaaaaaggaaaacaaatctgccaaatgggcgtctaaaaagactttagcgcagaaaccttacgggcctcccaccggacgaaaaaaacaaagagggggcaacaacaaagggctc

SEQ ID NO: 48461 - DNA, 372 bp, Zea mays
  Clone ID: MRT4577_144202C.1
ggggaggcaaaacccctggaaaacgggttaaaatccccaaaaaacaacgggccaaaccccaaaaatttgggattttgaaccttccggccaaaaaaaaaaccttccccaaaaaaaggccggttttaaaccggcccagggcccccccgaaccacccgttaactttccgccggtttccaaaaacccccccccggcgggaaacccccggtgacccgggaattactttggccacttccacggggggccccaacggggccaaagcgggccctgaacccggggcccagggtccttaaccgggtgagccccggcaataccacgggtgcaagggccggccgggcccttcggcgaatttccgggcccttgagcccgagcttt

SEQ ID NO: 48462 - DNA, 616 bp, Zea mays
  unsure (1)..(616): unsure at all n locations
  Clone ID: MRT4577_144203C.1
gntgtcggcctgcattactggcgcttcgttattctgggaatcatcatagatgcttctggtttaatgctattgataaaatactttataagattctttgtgggagctgcaactcttcacatcatgcacatcagactttgtgccatggagagctgttcaatatagattccaaagatattatggatatacatccctatgtatgggatatactcggatatctagcagtacattgcgacaatgagcatttttcggtagggaaatgtcagaataatttcttgcagggactgatatcatgtgcttgctcgctagcaacagatttaactctgaaaaaaatcccctcaaattgtctaaggaggagcaggagccggctttgagggcagttcttatgatgcttctctctcctagccaattcattttctctgagggacatcattttggaggcccaatcaaatgacaaaatggagtgtcaccatggttcgtgccagttatcgactcctcatattcatagccataaggtcattctgagcgtgagctgcgaatacctccgtgctttgttccagtctgggatgcatgagagctttgcggagactttcaaagttccgggcggatgggaagcact

SEQ ID NO: 48463 - DNA, 356 bp, Zea mays
  Clone ID: MRT4577_144204C.1
aaggcttggctggcggaccatcaagattattgacatttgccccctatgatggcggacaggaaactattcgggcccacctgactctacataacatgcctgggcgattggaaggatcctagaccaccaataactcatggtttctgcaatccatacaaattacattgattggactttggtcaaggcccatccaaacgaacgcacttaacaccctcaaactcctaccaccattgctgaagctgattaccatgaacgtggcccccaaaacgggccgctgatactttgaataccaaatgacattctgttaagctgatcaatcacccgcttacaaccgccaaatcacggccgtgattgggaat

SEQ ID NO: 48464 - DNA, 403 bp, Zea mays
  Clone ID: MRT4577_144205C.1
agaacaagacacaaaaaacgggagacgggaaactttacaaacattttatgcaacaaaaaggcaccattctgcttgaaaagcaccatatatatacctgccccgggatagggcttaaatcaaccggttattgaagcgcagatgctgctccctaccaggcaagaaaaatattcggaataaacatccaaggaattattgatgccggactgtgtgcgcatggaacggcgatagggcgcctattaggaatccagcggtccccggacccattcaggtcctgtataatgtgctgggccctgctgactgccgattccatagcgggtgacctacatgtacattgatcatgccacaggcttccacgcttagctttcaagcccgaaggttgttcttcttgggcgcttccacctgc

SEQ ID NO: 48465 - DNA, 554 bp, Zea mays
  unsure (1)..(554): unsure at all n locations
  Clone ID: MRT4577_144206C.1
gncgtccttttttttttttttttaaaacttcttcaattacacattcatagataatctttatcacagacagagcttttattcttataactacactttttaatagtgccgtctgtttttagttaaccacgcggacccaccaatcccttttgtaaactacaggagaaccacctgctgtttgtcaacaattaatttattaccgcttgcgctggggccattccttttgcttttaaagaaagagctatctttatggggcctatgcaggaccccttcctactttatttttcactccagtgccggagggggggcgcatctccttggacttgccatttgcggatggcggggtcgacggatccagctaatgccaagcctaaatccccgtgaccatggtttgccaccgcttggcaaactaggggtcaatcgaccccatcttctgcttaaccttgtcacacaggcagaaggatcacttttggactgggatggactccttgtggatggtcccgttgtggaagaacgagacgatgtcctcctgccccatgatgcccttgttttctttc

SEQ ID NO: 48466 - DNA, 202 bp, Zea mays
  Clone ID: MRT4577_144207C.1
gtctcggaaccaagcaagccgaaaaaaggtcgccgatccaggcatggggcaggagccgcgtcccgtgacaaactgcaccgaccagaatgcgccgcaccggggcggggtggtggctggctgacgaccggccacttgcgtgcggccgagtactagtacgttttcttggtaccaaagaaagtagtaattgattatcaccaccaca

SEQ ID NO: 48467 - DNA, 440 bp, Zea mays
  Clone ID: MRT4577_144208C.1
actggaagatgtgctcagcgagacagaggcagtgcataggttctaccctccttggaaagtcacactcgaggacgaactgagggcgtagcaggcgaagggtggccaggacagttacgactacgtgcccattggaagagccaaagggaaattagggatcttgaagacggcaagatcgtgggtcgagaggctgttggtttctagatagttgagcagtgtcattttgatgcatgttttcagtgaatgcactgagctgatgaacgtgtgacatgagaaggagaactcgaatcagagaagctgcagagagctgattcgaggatcctaggagcgtatgcatatgtgtgttatacggccgtcatgtgtgtaagctaactctgatgtgcctcttccctggtggctgtgtccacatgagatgactaacctatatagggaggattgggatt

SEQ ID NO: 48468 - DNA, 125 bp, Zea mays
  unsure (1)..(125): unsure at all n locations
  Clone ID: MRT4577_144209C.1
agnntcttgctgacgacaaccaatatgatatantganattctgtannaatgacggncntgttcttctagctnatgangtatatcaagagaacatctatnttgacnacaagaantttaactctttc

SEQ ID NO: 48469 - DNA, 244 bp, Zea mays
  unsure (1)..(244): unsure at all n locations
  Clone ID: MRT4577_14420C.1
ccggccgggcacaagtccgagacccggccagctgctttagtttgattccaaccacaaccatcagcagacagcagcttattaatttgattcggacatcgatcggttcatgctagccctgcggacggccgcgcgcacgcacgtacgttcaacggatagctagctagctagctagctgagagaccatggacagcaagctgngcgtgcagcacgggcaccaccacagccacaacggcgtctncaagcc

SEQ ID NO: 48470 - DNA, 166 bp, Zea mays
  Clone ID: MRT4577_144210C.1
tcggttactactatgactacgtaaatactcgcatgggctaactcgcggtggagggtggctctcacctggcccatttctacctcattgagttagtgctcagatatatcgctagccgctacttcgaccagatgatagtgagggcatagtggcataagaagtaccaggt

SEQ ID NO: 48471 - DNA, 1438 bp, Zea mays
  Clone ID: MRT4577_144211C.1
catttctagaataggtaggaaaaaaaaaagagggagcggtagagcgcgcgcgcgagagtgagtcgatctgtgtgtgagtaacaaagagtgagcgctacattaacagatagatagagggtgcgacacagaatgcattctgcgtgagtattagtatgcaagatctgtgggggctggtctgttcgcgcgtcagctagataacgacagatgtatataaaggcatgtgatttaggtcgctaaagatttgtctcacccaggcttttctatatacaccgccgtacaaataattgcacttagctctatatataggacactatatagcacgcatgcgtgcgcacgtgcgcgcgtgcgagcgctcgagatcgctctcgagagctctcgatcactctcactcattctcactcacagctcctaccttccgttagtctcagtgtgtgtgtgaagacgcgatacagacaccacatatatatatatatatatatatatatatatataaaatagtccttagggactgggtgaagtctgtcaattctcaggatgacagcttacttcaaccagacaggatggccggctaaagcaccaaagacagatgacaaaagaaaggagttcatagcttctcttcacaagaggaaaacagaattattcatggccctaattgagaaaaagttgcttcctctccgtccaggtgttcaaaggttaatcgatgaagctttaggaaaggcagttaaagttgcagtgtgcagtacatcaaatgagaaagctgtttcagcaatagtgtcgtacttattggggcctgatagagctgataagattaccatatttgctggagatgtggttcctcacaaaaaacctgacccagcaatctacatattagcagcaactacacttggagttgatccacaaagctgtgttgttattgaagacagtactatagggctcgcagcggcaaaagctgccggcatgaagtgtatcgtaacaaaaagcggctacactgcagaagaggacttcgagacagcagatgcagtgttcgattgcattggtgacccgccagaagtgcgcttcgatttggatttctgcgccaagttgctcaagaaacaatatgtgagctgaaagggggctagtgcaagtgatataccaagtacaggttcctgaatatggagaaagagtccatggcatgccaatgttggttcttcaagccatgacctgatactaggacttggaagtccacgttctacccaattgtaacttatagaatggcattcactactgcccacccagttggcagttgtaaatgtgttagtcattcaacaaactggaaaccactcgaataagggatcaccaagtccaaactcttcagtcaaagcaatagcaattgaggttacgagtcgaaaaaaaaaaaaaaaaaacccgcggccatccaactattataagtgggtgtttg

SEQ ID NO: 48472 - DNA, 553 bp, Zea mays
  Clone ID: MRT4577_144212C.1
gcattaaagctcgatctggcccatttttagttacttacttcccaggtcacggcgatacacagatgtggtacactttgggtcctggcaccagcatcggacctttggcatagaaacactgactggcgaaaaaaggaatatgggctctcctgaaacggtaacggttatcacagggggatgggatactaaggtatccggggcctactcaacaaatgttaatgatccagcggcgtatacgaaatcgctctacgctcttggggcccttctttcattaggacaggactgtcttgttccttatctgagtcttgacgagacccacgccaaactgagtatggaccatctgcacgcacttgtagatttgggagccctaggtcactcaccgagccaggactggcagctttggtgccgcctgtggccaccacaggtggtttgaaacatcaggacacaggactcaagcccttgaaccctgacgtacggtctttagccttggccggacaccgtaagacaccgacagattgggcgtaccatgagccattctttcatgcctgctaccgct

SEQ ID NO: 48473 - DNA, 341 bp, Zea mays
  Clone ID: MRT4577_144213C.1
cacacaggttgcactttaaatttatttaaaaccttttaatacacaattgaaacaacactgggaagggggaacaagcacaccccattacacaaaaatttagcattagcaaggaaacactggttacttaaaacatagaccaccaacttttttttgggtctacatgggcccaaaggggagtttgggacctacgggacaattgccttctaacattgccagcaggattggggaagcacaaaacttggggttaactggcaagacttacaactggggctggtggaataaacagccatttttgacgcccatgggctccatttggctggtgggcaaaaagctgttcatgg

SEQ ID NO: 48474 - DNA, 169 bp, Zea mays
  Clone ID: MRT4577_144214C.1
tgaatccgccgctggacgcctctgctttctgttccggtcgcctggtgccacactcatggggcgatctgaaaagatgcgctctgtctattctcctattacttatccatccgttgggcaagctgacctgcatggtcttatttctctgagtgtcttttgcggccaaactctt

SEQ ID NO: 48475 - DNA, 375 bp, Zea mays
  Clone ID: MRT4577_144215C.1
ccggccgggccggggtacctgggccatgcgtgccagcttaactcttttggaagcagtggctcgctgagtggaagtgacacatcgttcttctccaactttggaggtaagaatgttgcgggtgcttcggcggcgagtgcgaatgtggcgaacacggctggtgttggtaagatctagaggagttggcccttgatgaagattgaggtggtatgagcaggttggttgttcgaagtctggtttatcttctcctgtatctactttactccgtgattgtgctttgaattacagcttgcttaacaagcttctcagtaccatcactacccgtatatatgcaaatatccaccgtcatcacaaaaaaaaaaaaaaaaaaggccccta

SEQ ID NO: 48476 - DNA, 449 bp, Zea mays
  Clone ID: MRT4577_144216C.1
ccggccgggaacctctcacgaaccatccatcaactttcaatcccctcagcgaagaagcaccctaatcccttggtcagggccctttattttacgatactcccaaagtcatggctacccttcgtaccgatcttccaggtcccatcgggacaagaagctggagaagaagcccatcaagttctccaacttgcttctgggcgctggtctcaaccttttcgaggttaccaccctcggacagccgttggaagtagtcaagactacaatggccgccaacagaggcgacagcatggctaagtctttgggacgcgtatgggctcgtggtggtcctctgggattctaccaaggtctcatcccctgggtttggattgaagcttccaccaagggtgctgtcctccttttcgtcgcctccgaagccagatactacgcccgtgccgatggtgcctccccagttg

SEQ ID NO: 48477 - DNA, 385 bp, Zea mays
  Clone ID: MRT4577_144217C.1
gcgatgacgcgtagtaacggctcgaggaactgcgtgaacggcatcctaggcaacatccagggctacagcccggcctcatgcagggcgtccaggccgtcttccaaatgtcgtgcggcaatgttggcaacagccagcagggtggcggtgctagtggaggtgccgccgccggtggtgctgctgctggaggtgccggaggtactagtggatcgtctagtagtgggggtgccgccgctgccggcggtggagctaatggcggaggtgccagtagtgctggtagtgtcactggcagcgccggcaatgccgttggtgccagcggcggcaacaatatggccagcggtgtcactacggctagcggtacgacgagtcctaacggaggctcacacgt

SEQ ID NO: 48478 - DNA, 311 bp, Zea mays
  Clone ID: MRT4577_144218C.1
accaactcccatcattaaaagcacactagcgctccaacaatggccgctcaatagattgtgcctgcttatgctccttgggctttctgcaagagctgctacggccaccaatctgtcccacaagagctcacaagactcctatagcgtgcccttgtttccacccgtaccttctcaccagccggggtcataaggtatggtgaaaacccaaattgttcaagccctataggatccaacaggcaaatcgcagctggcatcttacctttatcacccttgttcctccaacaataatcagccctattacagcagttaccttt

SEQ ID NO: 48479 - DNA, 772 bp, Zea mays
  Clone ID: MRT4577_144219C.1
cacatatctagtcacttttgcatcttatagcaactattagttgtcatggtaaccttttttcttcattttttatctgagctaaattattctccaaacatctaaacacttaaacattctaagaaaatgcttatgtatttttttcattgatgtgcctaaaccctcgatcttttgtgactcagtggtacaccatgtttaagtgagcaagtaggtattaagaaaaaacatactagcaagcatgagcacaagcatatgatggccatgccttcatgttgttgtatgatttcattagaaattatgtgtatctggtaacaaaaataaatcacaaaaccacaaataatcaactaactaatccatatgtcacaggactgctaagaaacaatctattattctttcatgggagaacacaaagaaggcaatcatagaagctgagttgaaaaagaagaaagtaagtttgacgttttcatttgtcttattatacatcgttttgaaggatgatcataccatattcagaactctctctaattacaaatgtaagtcatttagaacatcaaaagaattccatatgataaattataaccacatgtcacaaagtatgacattttattgcaaattttactattataaataaatgtgtcatttttacttctattacaaagtgtactattataaataaaaaaacatatatattatcgaattatcaccaacctatgttgtaatatgtgtaacttaaacatttcttatatgatggtaaattaaagaagttacagactat

SEQ ID NO: 48480 - DNA, 466 bp, Zea mays
  Clone ID: MRT4577_14421C.1
ggttggaacctttgggctgatttatgtgcttgtggatgtgcgggtggatgtgcgggtctgactcgattttctttcttaaacttcgcccgatgtttctcttaaactacgtcagttgaaatgttttcttctaaactcgagtactaaactgatcttctactccttcgaaattacttatcttctttcaaacttctctagactaaacgttttcctctaaacacggagggtcggaggatgagcgaactgaaagaagaggttgagggggcgaccgggaccccctcctccaccccgttaaacataaactagtcatccgtcaaatgacacccgtctcggacaactcaaagcaatgatgagtaaacacaagactggcggactctagaaaaaggaaacaaccgacgagaaggactccttataataaataaaaaactaaaagggcttaactctaaaggaaacgcaaaaaatgacgaac

SEQ ID NO: 48481 - DNA, 208 bp, Zea mays
  Clone ID: MRT4577_144220C.1
caagaccagagctaggctccgcggtttagatgacggccgcttccctatgccatgtcataggaggggcggggcctgcaaacccagcctgcgtctatcctatgtctgactcgacttataacctaaccaaacgcagctgcagggtcctctatacaccttttacggacgaacacttttagcagcgcagctgcttgcctctgaaaaaacactt

SEQ ID NO: 48482 - DNA, 410 bp, Zea mays
  Clone ID: MRT4577_144221C.1
aaaaggatacaaggcctttgccttttttaatcaaaaacaacgggatcaaacttgttccccacaaaaaagggccgacctcccaagccaaacaaaaatattagttttttgggcctattattcgggggggggcctaaacccaaaacatttccataaaggttcccactgttaaagtccttccataaaccaaacggggtctacataagcggggtaaaaaatccccgattacccccccaaggggatcaaactacttttcccccccctcttttataacccaggcaagctttggtttgttattccccccagtggcaacattttaaattttcctaacaaaaagcaaaccgtttccaagccctttccaaaataccaaatgtttgttgccaagccagcccccctttgcccatgttataaaa

SEQ ID NO: 48483 - DNA, 664 bp, Zea mays
  unsure (1)..(664): unsure at all n locations
  Clone ID: MRT4577_144222C.1
gggtccctcgaggccggccgggacgctcgattcggccgttttccgcatccacggagccaggcgaccgccgccgcttccctactcacccttggccggcgacgacgagcgccaccacggcaggatgacgacgctgaggaacctcaagatcaagacgtcgacgtgcaagaggatcgtgaaggagctgcgctcgtacgagaaggaggtggagaaggaagcggccaagaccgccgacatgaaggagaagggcgccgatccctacgacctcaaacagcaggtgctgacaggtcctttgattctcagagcattcttctatcactactttttttctgttactgaactcacccaccctgccctagtgattgcaaagcatactaagatcctagtgtgttgcgttgctcccactggttgtgatctgatatgtttgtggcagtccttagcattgctcggtggnctttcagtctgcagctagttaggcccgtttggttccattagtcgttggactaaagtactanactatagtccctatcctgtttggtcgtaaggactaaacagattctaaatacattaaaatgcaacacataaagacncaaataccccttttcttgtttcacgtctgttttctagccaagcgcaatttgaagtaaatgttggccctttaatccct

SEQ ID NO: 48484 - DNA, 623 bp, Zea mays
  unsure (1)..(623): unsure at all n locations
  Clone ID: MRT4577_144223C.1
ntcattctaaaacttaaattttgaatcatctaaatcttgctcatcatttgaatatttaaataaaaatcattttatacctttagtcactttggtttagctcgtttaaggatgttcttttcttcgattctttgttcatacctattagaatatagtgtctctttggagttgctcgtaatcttgtatttctcttctctacaataaagcaccattaaaaaaaatctttatacttctttctttctaatctgaaaacatctttatatttgtaaacataacatggaaaggtatatctgacatcttgcatgtgaaggtttatccaatgagagccttattactcatcatccgttattgtcctatgtaaaagggaaggatgtgaggctgagatggaggaactctgccaccgttcgcgccaggtggagcatcgtgcaatggctagccttgtgccaagcttgtcttaccgcctccaccacccttttttacatccaagatcgcacctcgagattgcctgtccacgctgcaacagcttcaccctgttaacagggcatgtacaaccttacaccgttaaccttacaccgttgcacgatattagacataactaaatcataatataatacggtgggtgtgtc

SEQ ID NO: 48485 - DNA, 894 bp, Zea mays
  Clone ID: MRT4577_144224C.1
tgacactggtattcagcaccgtgatggtttccctaattggccagggtttgagtttgccttgggtggtgaaaaaattgcaactaagcaaaccttctccattggctcaaaaaattgccatgctccagttgaatttggtcacagctaaggccgcccaaggagagttaaaatatttgttagaagcgggaagtttacctaagtttttatatgaagaactattcgccgattatcaagctcgtattgccaactctgagcaagaattaagagaattttataaccagagaaatttaattttttccgagggcgaagtggaaaagaaatacattgatggcctatatcggcgtctctacatagcagaaaaaagtgccattaatgatgccttagcaaagggtatattagccgatgacatcagtgatgaatatttacaggtgttgaatgaaaaacttttagccctgcaggatgactgacgaacttaacggcagaggtaaccacaatttagttcgcttttaaaatttctcctgactctccaatttttggggaaactaaataaaatttctcccccatgatcggatttctaacggctcggttttagggacaagctaaaactcgaccaacaggctcttaggcactgatgtatagtggaaaaaggtaagtgctatgggagctgaatgttaatgaattttttagtaatttgtcaaaaatttttcacccccaatctattcccatggaaggcgatcgccagggtccagagggaaaagccccagtcccttggccgatggcagttcgtagtccggactggcattctagttgctacttttatcctcgctttggggagcctcgcaagccctagcctagccctagactataaccggggtaacttagtgggggcagattttt

SEQ ID NO: 48486 - DNA, 109 bp, Zea mays
  Clone ID: MRT4577_144225C.1
ctgagatcgcctcggacgtggaactgcccgttgacaagttcaacggcctcgacgagatgatcccgacaggcgctaggttcaacgacgaaggaatgtaccgttccatcga

SEQ ID NO: 48487 - DNA, 252 bp, Zea mays
  Clone ID: MRT4577_144226C.1
gagacaacggataacagaaatgtgcctagtaaacggctctccgtgtttctccggcgaacttcgtctacagctgtatgcgcatcaagcgttgttcaaccaggaatcaatcgagttggcattgtgttggaattttttttttatcttgtggcagctgttatgttgcaaatgtaagcctagtcatggtaacgactcatcaagtgcttgctcttgtgtgatttattgggagattggtatgatatttttttgcctgat

SEQ ID NO: 48488 - DNA, 848 bp, Zea mays
  Clone ID: MRT4577_144227C.1
gcattctaccatttcatgatgtcccttatttacatgtgtaaaatgatccacatcaataaaagtcaccccttcgtattatgaagcaaaataacaagcttacatgctattactgatatacttcctgttcttacagccaggatctcttggcctacgtgtagacagactccaggaagatgtccatcttttgcttctccatcaccgtcgttatcatgcagcctgctggaatgccacagcgggacaggagcatggtgatgagcgttccgcgtatgactgcaaccagggcagcatcccggagctcgctgcttctcacctgcacgtcgttatgcccgtcgcctgctgctggctgccacagcgggacacagagcatgtcggatgacgcaggcgcactatgacgaggatcgtggcgccgtgttcccgtgcgttcggcgactcctaacctgccaagacgacatggcccgtcacccaatacttgcaagcagggacttcttcatcgttgtgccgccggcagagaaggacgacgacgaggatctgttcaaggtgccccagtgttcctgccaagccctacaactacaagaaggctatataaattcaagtaggaatgcaggatggggtgcattcaactcatgcaggtggcaggttaatggaagtggccaattctgtggcgtggctgagatgattggacctgtcgatctcgacagaagtgttgattactggcagcaggataagttggagtggccagttccctgtgaagtggcgcatatttaaggatgaacctgaacaatcttgtgcggcgcatgcttgttgggaacaatggcaatgatcctgggcgcgagtagggtgggactcac

SEQ ID NO: 48489 - DNA, 169 bp, Zea mays
  Clone ID: MRT4577_144228C.1
cacacacgatgagagccgagagctagctacttatcgcgcgatggcgatgtccggttccaagatgatggcggacggcgacgctgatctggtagccctgggcctggccgcgtacaccgcgagcgctaggaacattaaagatactacgacgactaccctataagaaggacga

SEQ ID NO: 48490 - DNA, 279 bp, Zea mays
  Clone ID: MRT4577_144229C.1
gctgccgaaacttgtgttttgaactattatgtgtattatgaacttttgtttgcccgctctgggtatttttccgctaacatgaattaggactaggtcgggcctacacattgggttcagcacgtgccttggagtaaaatgcttccataggtattatcatcggtcaaaacttggtggctgggtatgcctttataaaccaacccattggtatcgtccaaacaaaccagcgaggtatttaccgggcgggagctatccgagcaacaatcattcctaactgagggt

SEQ ID NO: 48491 - DNA, 842 bp, Zea mays
  unsure (1)..(842): unsure at all n locations
  Clone ID: MRT4577_14422C.1
acctacanactcgtagccggccgcagggatcagcatcttcctcttcgccgctcaagtttccaagcgcctggctcagaatcttcatcccgtgggtggggctcactcgtcccggctccatttcttgccgatccaggcagacttttgacatgcgagactgatggcggcggcagaagcgagagctgcttggcaacgggctgccaaccgctgcttgtttcaggaggatgcaaagagagctccaaaattggcctgctgtccaccgacaatgcaacagcatgaagcaaacagcgggaaccccaccagtccgcgagactgccacatcccgaatttcatgcatttgaactggaacccgatgaactccaatcagccgatagatgcctggtttcttcagctgcagcccaatttcgggtgccacaaggtgctttctggtgaccatctgaattacatgggcggagaagccactgccaagaaagtggacagtttctcgccaatctctacgcttgacgacataaacacaaagaagagtgagtgcccttctgagctaccatggatggtttcgacggcttttatgaagcaaacatctgaagcaccttgcgaagggtgccctcaaacgagtctcaaatgcagaggaaatccgaatgacttccttcatgaggataaagaggttatggacttcaaaacttttgatcctttgtttccaaagaaaccaaagaaggcatgctatgagatggatccaccttgngaaacagagaggaagtgtcagccctggtggcaagtagctgatgaggaaggactggcttcgcttgttgcagaaagagcaatgcagcacattgagaacatgatct

SEQ ID NO: 48492 - DNA, 359 bp, Zea mays
  Clone ID: MRT4577_144230C.1
cgagtatcacccgscgcacgcgycgygcgagwcayytggggtgacgtgtattayttagagmaymggatagagttctccgctccgyagcatggacgcactagcttccgttgggtggtatggtgttgacgcaccaacwggcacgtgtgtacgtgggcgcwgctstgcgagtataktscggctctgggtaatcgactcwtcgtcwcacagcwcctatacatsctcgtyaagccgtgtctcttcgactacatgctgctagtctcgcgctcgcgctgcaggatgccgcgacacatcrgcgctygggggcacatgaacatcctcagatacagtgagatgtctgcagtagggggagtgatctgcga

SEQ ID NO: 48493 - DNA, 331 bp, Zea mays
  Clone ID: MRT4577_144231C.1
atccattctgctgagggcggtctgcgatgaacgcgccatgatcatcaggtcacggagcgtacctaggacgacgaccgagcagctcttgctgcaccagctagccagccagtgatggatgagtacaaagcgcagggcggggcgctcgtcgtagtaccggctgcggacgaactcttcagggggagagggatggccatcggagtcgaccacgagcacatgtaccactgactgggctttacgtcatgcaccgctaactggcgggaccaagacgctcttgacgacggggtacgtggaggccatttacaagcttgctcccaagagcagccctcgtgct

SEQ ID NO: 48494 - DNA, 606 bp, Zea mays
  Clone ID: MRT4577_144232C.1
ctctcctaccctaccccccgggcgtactcaacctcacggaagctgccccggtacgccccgcaaccataaacgcgacgcccagagaagatgtgagcgcgttaatgcctagcctcgtacgctacgagcatccacatatctaccaatccgcacacccggacctttcccggcctcggccgtctcacttcatcccatccacctgcagctagcagcggcctgccgcgcgcgctgtggatcataagcaagcttccatggagccgccaccttctccgctgggcgccggcgcctgcgctgtctgctgcatgtgcggcgaccgcggcctgccgcacgagctgctccgctgcaagctctgccgcgtccgcctgcagcacagatactgcagcgatctgtacccgagggccacggcgtacaggaggtgcaactggtgcctgagggagcccgcagaagcccacgcccaagcgcacgctcaagctcaaccggtggctagcaagaaggcggagaaacggaagatggtgcaatcaacggagacgtccacctccgacgaggaggcgcggcggcagcacgaggccggatgcgccactgctacgaggtccaggagatcggccgcgg

SEQ ID NO: 48495 - DNA, 247 bp, Zea mays
  Clone ID: MRT4577_144233C.1
aaccccgggtggcgacgtggcgtttggtggtgggttctttggcgcgcagagggaaccgacgcacgcccgccccctcccttccccgcccgccggccaacaacaacaaaaaaaagcaccgaaatccgccccgcgctcacccggaggccggatccagcgacgatgttcggcgactccgacggatccaaagacgccagcgccggcgggcccgggtccaactccaacccgccggagccgcctttcccaaacc

SEQ ID NO: 48496 - DNA, 477 bp, Zea mays
  unsure (1)..(477): unsure at all n locations
  Clone ID: MRT4577_144234C.1
tacgagcggccaccgtgtgatggatatcatgagaaattcgcccttaaacgtggaacacggcacgaagaaacaaaaaaaaaaaaaaaaaaaaaaaccaaaaaaaaaaatttaataataaaattttttttttttttttttttttttattttttataattttaattttcaaacacccccccacctttttttccccccccctttttttttgggcccccccccccttgtttttgggtcaccctttccgcctttttcccttttttgcttcccgggggttggttggggggttttccccattttttcttgcccggtcgggcgcccgttgggccgggttcccccccctgggtttgggcccttgtttggccgttttccccccccccgtgggccctttcgtgggggtnttttcttcctctttgggggcgttttctggtggttcttgcttcggccccaaatttggggnncttttggtattaattttttc

SEQ ID NO: 48497 - DNA, 462 bp, Zea mays
  Clone ID: MRT4577_144235C.1
attgattgagatttaaaaaaaaaaaaaaaaaaaaaaaaaaaaaaaaaaaaaaaaaaaaaaaaaaaaaaaaaaaaaatttatttaaaaaaggaaaaaattaaaaaaaaaaaaaaaaagggggcgcccgttttaaaggatccaattttacttccccttgcttgcaacgtaatagtttttttatagggccccctaaattaatttcattgcccgtcttttaacaacgtcgaaactggaaaaaccttggctttcccaaatttaatccctttgaaaaaaatccccttttccccagttggcttaataacaaaaaggcccccaccaatcccctttccaaacatttgcccaccctaaatggcaaatggaaccccccttgtaccggccctttaagcccggggggtgtggggtttacccccagggtaacctttacatttgccagcgccttagcccccgctcttttcctttttt

SEQ ID NO: 48498 - DNA, 380 bp, Zea mays
  Clone ID: MRT4577_144236C.1
aaacaggccagggggtttttatttatgaaagagggactggataagagtcccaataatcttaagggcccatacatacatgtacaagcggtttttccaaaggggagagagagagagaaaaaacaccagtccccaccctttgtccaaggaaaagcacacctaacatgaagtggaccaattttttgggtaaactccatcgtcggaggctgggctctgatcgagttccttttaaagctccgggatgaccggctccacagaagcataaatctaataactgaccttggcgatcttttaagggactgcttaaaccttttccgaataataatccactacctaagaaatgggttaaaccttttccactgttttttgcaaaaacccatttt

SEQ ID NO: 48499 - DNA, 637 bp, Zea mays
  Clone ID: MRT4577_144237C.1
cgcccactgggcttggacacacgacggcccagaacatttccttgcagctccttctgtcctccatccttgcccgcgcccttctggtgttctcccatgtagtcttctttgttggtgacaacagtggatctggatgcccacgccccccccccccccccccaagcaactccaagagactttacacatctttctagggattggagattttgatgaataatgtcctccgacagcttgtttatctggttatccaaatatagccatcttttattttggatttctcagtagtcaaagatagaaaacaagaatgactctctagagtgcacatgagatatagaaaaactgttggacagtggaaagatataggaaatgatttatatgcaaatgacactccaaatgatgatttagagagtgggttttagaatgactcttggagatgctctaatgaatgtgttcgctgaagcagcatggctttcgaaaaatacagggataaggcttgcctcgcttattccttctcccgactccattcttgtgggagccgtcagcataggtctcttttttttttgtaatcacagtagttttggatttttacgaagatctcttatggtttgtgactcgctgtgaatattgggtgttcaaagct

SEQ ID NO: 48500 - DNA, 306 bp, Zea mays
  unsure (1)..(306): unsure at all n locations
  Clone ID: MRT4577_144238C.1
gtaccggaacggaatggccgagccaaggcttccgaacaaataaattgtcgcctcctctggactggcagcattatgcgtctgaattgcctggggggtacttacggagcaaagccctaaacggctntttgttgtacgccagaaattctatgaattactcgagaatggtctcctacctgaaggtgttgtgaataactcgttggctgaattactgatgaagctagatgcggatctgaaacatgatatccggctctgggcccgacattatgaacacccgatgcgcgtgcgatcaaaaggtattcttcatct

SEQ ID NO: 48501 - DNA, 1679 bp, Zea mays
  Clone ID: MRT4577_144239C.1
tcgacattggccgggccgaggccggccggggaaacgcgaggtcacgagatatggcggacggcaagcgaggggaggattcggccgtggcgttgaagacctcgccgtcgtcggcggtgatggctgggggtttacgcggcgttagcaaccctctggaggagtggagcgggcgcgtgaaggcgattgaggccgggttccgcgcgtggatggcgaagcaacccatccaaatcgaggccgcggtgaccacggccgtgggggcggtgcagggcggggctctgggtgggctcatgggctcgctcacagctgacggcgggtcgccgttccccatcccgcagccgccgcccaacgccaacccagaggccatggcgtcgttcaagcaggcccaggctttagctggtggacccttggtgcaagcccggaactttgcagtcatgaccggcgcaaacgcaggcatatcttgtgtcatgagaaggatacgagggaaagaggatatccagggcagcatggcagctgctttcggttctggtgctcttttctccatagtgagcggaatgggaactcctaatccagtagcaaatgcagttacaactggtgttgcttttgcagtatttcaaggtggctttttcatgatcgggcagaaattctcaaagccaccaagtgaagatacatactactctcggacaagaagcatgctgcacaaactgggtcttgaaaagtatgagaagaatttcaagaggggtctcctcaatgatcaaacattaccactccttacggacagtgctctgagagatgtgaagatccctcctggacccagacttctcatactcgaccaaattaaaagggaccccgagctggttcgagcaaagtagcagtcacaattgtcgacagctggttctttctgggttgcatagggtttgaaagcgatgccgtctctagtttcttaataaactttctaggcaagcaagcaagaatttagttgtgctgtagttaattgttttttggccgatcagtttgcatcgatcctattaaattctgaacaacaggtatttatatgcatcttattcaaatttaaattggcattctcaacattatgcaaatatgttggaaacaaaaatgatggattttgaataaggtgcttgtggatacatgttcactatttaatcagaaatgcaaatcttcaccatgtgtttacatgcatctatttcacatttatatgggcctgcccaaccagcgtcctgacatttccgctccgtacggccggtgcgctctccgctgcgatcatccctccccgcccctgacggcccgtgctcggccagatgtgaaggtcccgcctcgtcccactcctctcgccctccaccatatcatctgggttgggctcgtcgcgctccccttgcctttcgtgttgtcagcgaccctggcctcgtccgggcctcgtgatgtctcgattggctacggtccctcccctcggtcctgcaaagtgaagtcacgcttggccacctctggtcctttctgagccgttctaggaaagtaagcaatgcctccgctgtgctgttgttaagcgttcttggccggtcagcttgcatctcgctgtgctgttggtacttgtgtttgcccgctccttttgcatctctcatttggctttccgcacgtgttgccatgctcaaaataaataaaaaccaccc

SEQ ID NO: 48502 - DNA, 357 bp, Zea mays
  Clone ID: MRT4577_14423C.1
tagacgcgtgggcggacgcgtgggcacaagtgtgtttgttgagaggaatgtgggctgaactgctggagaaagaaaggtgcatatatcaagctgtaaagttgggaacacatatacagccgccatatgaaaaattaaggataaaagaactcaaggaagtaacaaatagctttggaagggcagcattgttaggcgagggagcaattggacagctgaacaagggaagggtagagaatgcaaacctgattgccataagatggtagacattgcaccagagatgtttaatacaggatctaaagcaagtgatagatcttcttgaaaggttacgtcagccaaaggtagcgatgcacattggggcac

SEQ ID NO: 48503 - DNA, 1789 bp, Zea mays
  Clone ID: MRT4577_144240C.1
cattgggtacctcgaggccggccgggaaaaagctcatcaacaaagcctgatacgtaactactaggccgatcggccatccacagacccgtcttaactctacctgcctgccactatactatcagcctgtgcgagcgagaaatggacagagccgccaagcctcacttcgcgctcatcccattcacaggaaccatcagccacgtgatccccatggcagacctcggctgcctcctcgcggcccacggagccgaggtcaccatcatcactacgcccgtcaatgcagcgatagcacagagccgtgtcgaccgcgcacagtcacacggtgccacgactacgatcacggttaccgcagtcccgttcccggccgcggacgccggcctgcccgagggctgcgagaggatggacctgccccggtcccaggccgaggtgcctcgcttcttcgtggccaacaaaggcttcggtgaggcagtgtcgcggcactgcctcggcgaagcgctgcgccgtccgagctgcgtcgtctcgggggcgtgccagacgtggacgctgggcctggcgcgccagcttggcgttccctgctacgtcttccacggtttcggcgccttcgctctgctctgcatcgagcacctgtacaggcacaggccgcacgaggctgccgcgttggccgacgacgagctgttcgacgtcccagcgctgccgccgcctttccggctcaggctgtcgcgtaggcagctcccgccgcatttcatgccgaccacttccgtcgccgggaaggcgctgcaggggatccgggatttcgacatggccgcggacggcttcgtggtgcacaccttcgaggagctggagagcggctcgacggcgctactcgcggaggcgacgggcaaaaaggtgatcgccgttgggcccgtctcgctgtgctgcgcgccaagcctggatcctcggctcgtgtcgaacgatgatgcgaggcgatgcatggcgtggctggacgccaaggcgcccaagtccgtggtgtacgtgagcttcggcagtttcgggcgcatgccacccgctcagctcatgcagctcggcatggcgcttgtcgcatgccgctcacctgtgctctggctcgtcaagggcgccgactccctgcccgacgacgtcaaggattggctaagagagaataccgacgcagacggcgtcgcaggcagcaagtgtctggtggtgcgcgggtgggcgccccaggtggccatcctggcccatccggccattggcggcttcgtgacgcactgtggatggggctccattctggaggctgttgcagccggtgtgcccatggcaacctggccctttttcgcagagcaatttatcaacgagcagctcatcgtgcacgtgcttggcgttggggtgtccgtcggtgtgacgaagccaacagaaaatgttttgaatgctactactgacgccgccggtggcagccaaggggaggctgatgccgaggtggggatggaacaggtgaagaaagccatggatacgctgatggatcaagggcctaaaggggaggagaggaggaggaaggcccatgagctgaaactgaaggcgaagagtgctttggagaagggaggatcatcctacactaatctggataatttgatcctgtcttttctttgaatgtcaccatgtcttacttttgcgtcccagcatacatgttttgtttgcctctgagtgtcatactatggagatttatttactctttatttattattactatggtcatttgtttctgtcgagtaaagttattgtattctagacgaaaaaaaaa

SEQ ID NO: 48504 - DNA, 339 bp, Zea mays
  Clone ID: MRT4577_144242C.1
cgatttccgtgtggacgcacgcgtgcggtgggacaccttccactcttatacacagactcttgtgtgactactaatcacataatttcggtgtacatgacaccgtgggtgatggaattcaaataaaagacaacgatgatgaacaagatgaaaatgaacatgaggatgcatgttatgaaggacaatatgaagagaacatatcaaagactacctgcatcagacacggtcctggaagtggtctcacaaactgggaaggaaatcaaatgggaaggtgaaacatctgggaaaacattgcttggagaaaccctatttaaataaccttatattagggaactaaaaatt

SEQ ID NO: 48505 - DNA, 148 bp, Zea mays
  Clone ID: MRT4577_144243C.1
ggccgaccacgcgtccgcggacgctaggcagactcgcgggtagattttgagtgtccgcccagaccgtaaccataggcgtaagtgtaaactttcaaccggccacggaaacgtaaatagcagaattacatagaccatagacacactacta

SEQ ID NO: 48506 - DNA, 493 bp, Zea mays
  unsure (1)..(493): unsure at all n locations
  Clone ID: MRT4577_144244C.1
cgaagtcattacagacgaagagcgcgggggtggtggatcggcgaatcggagactcgacgtcgcgcccgacggcaccatccgctacgacgacttcatcctccgcatcgtcgccaaatgatcccggccgttatcgctgctgcggccggtgcgcctccgcaccgccgccgtgcccttcgcccgttccgcgcgccgcgtccgcccgtccgggggcgggggagccacgagccccgtccttgcgatggcttccgccgggggaggcagcggtgccccgaccacgaggactgcgcttcgtgatctctacgagctccagggcctgtccccgtggntccacagcctttgccgccctgtctcagacttgctgccccttatcgcccgcggcgtccggggggtctccagccgcccctcgctggtccgattggccatctcattgcccagcgcntttgatgctcggttgatgcagctctttttggggggactgggtgcggagagcgct

SEQ ID NO: 48507 - DNA, 344 bp, Zea mays
  Clone ID: MRT4577_144245C.1
cccacgcgtccggttactcgtgccgagcacttgatctcggacgaatgcatctacttcaacatggagaggatttagctgtaatcacatggcctaagtattctctaggacctccgtagtgctgtgatcaaactaaacatcgtgattcatcgtgaccgtaccagttctgactccgacggtcgacgccaccggaaagcccccgatggggccgaccccggttcctcccgccgtcgggacgcaacaggctgctctcgccgcccaagccaatgtagcatagccagatgagccgacggataccgagccaggtcccgccagttcaaccgttatagccaatgcttttgccgaag

SEQ ID NO: 48508 - DNA, 469 bp, Zea mays
  Clone ID: MRT4577_144246C.1
aaaaaaaaaggattcgggggggggcccttgttttaccccccttaacccccccaaaagggggggaaacaggggaaaagttaaaagttgttaaaaaaaaacaacggggggggccgtttaaccgacctaaacctagaggttttggcccaaaagttaaaagggcctccgggcccataaaaaaaaaaaaatcctaaggtcccaaggaaaaagcccggtttttaagggggggggggtttaaaaacaagggggcatatttctcctacgggggttccggggcggaaaaaaaaatttttgtccaagaaaaattgcccccccggccccaacggggggggggggccctttgataagcccctttttttaaggagttaccccgggggaaccgggggggggcaacctacataaacttttgggccattaagcccctttttttgagaagttaccccggggggaaagggggggggcaaccccccaa

SEQ ID NO: 48509 - DNA, 313 bp, Zea mays
  Clone ID: MRT4577_144247C.1
ggtcgaatgatttcattgcttttactgattaaacttaatatatttctacacaggacaggcgtgtgattacaatttagtacactaaggaagcagatgggggccgtgaggcatcgattgattgggtacagccaaatctaacaaccactgctgtgctgcagcaattcctctcgcggtggcggcctgccggggcggggcgctgcctgctcctccagacctccagctgaagatgcctcgtcaacaggcgcaccatgatatctttgcttcccttcaagaacgtgaccgaccgaccacgcttatatcttctgcttcaatg

SEQ ID NO: 48510 - DNA, 454 bp, Zea mays
  Clone ID: MRT4577_144248C.1
acgagcggccgggccggcgggctctcggggagatgatgcagtttgagatcatccgaccgttggatgatgccttggaggcggtggacgacttgttcgaggtgccactcgcattccaaaacaacacgctgtgatggatccttcttataagaacgattttttcttattgtcctgtggggcctgttttgtgcaaatggtagacctcacgaggaccggaagcgccccccgctatcgtgctacatcaacgaggtgtgctccatcgtggcctgtgttcgtgatcgatgagaagaggataaacggacaagtgccactcggacatgagtgtttcggaagccgtatatcttgctgtgggtgcctctacgagatgctgctgcgattggttgtagcgcctcagaactttggtcttaagattgtcctcgtggacagggcgagggagtacctatgccgcgaccactct

SEQ ID NO: 48511 - DNA, 921 bp, Zea mays
  Clone ID: MRT4577_144249C.1
cgacggacgaacgcgagatcgatcgagctactaaagctgcaaggccacgacacgcgctgttgttctcatcagctgctgctagttagctagccatggtggccggcctcgaagatcccgccattgacccgaccgcgctctcccttgcgctccctgcatcggcaccggcgctcaataaggaggactacatcgccatctgcctcgccgcgctcgccgggacccgcaagttcgggctcggtcgggagaaggaccagcaccagcacaccaagtggtgcccgacgacgacgacaacccacgcgccatctgcgcagcaggagcttcggttccggtgcgcggtctgcgggaaggccttcgccacctaccaggcgctcggcggccacaagtccagccaccgcaagccgacgacgccggagcggtacgccgccgcccttggccaggcggcgacgacgacagcggcccggggcgaccactccgacgagatcacggcgtcgtctctgtcggggtcggcggctagcggcgggtaccaccggtgcagcatcaggcgtcacggctccgaggaactttgaccgctcgctgatgccaagcgcggagactactgggatgacgtgttgggttcgagatccggaggagccggaggtgcagagtcctctgccgatcaaaaagcgcaggattttgaattcatccttgcgccactctcccagcatcgggaatcataggtcattcaattctgggaaaaaggaaagtgggtgcagagttttttcccgattaagaagtgcatgatgtaaaactgactaaacaccaaaaaaaaaaaaaaaaacgtttcatgtaaaaatggatctacgccatcgttgtgtcgttaatttaatttcttttaattaggttctgtttttctggacataaattcgttcaattcattgattcgtc

SEQ ID NO: 48512 - DNA, 397 bp, Zea mays
  unsure (1)..(397): unsure at all n locations
  Clone ID: MRT4577_14424C.1
ccccaggcgcccgacgcaagggagaagacggaaagcgacgcggcgcgagcgaggagggccaaggcgaagaggggaagcaccgcaccaggacccaaggaacgccgccgccgccncagaacaccgcgaggacgacagggaccaacacgccgaccagcacatacgctacaaccggcacgccgccgggcaacgacagaacaacgcaggccccccagacagcggcgaagagccccacgacacaaagccgcggcagccaaggcccgaaggacccaagcccgaagaccaccaagaaaccggacgccaccgccagggcggcagacaaggcgaagcccgcccgggcccgaaggcgaagagcacgagcccgaagcacccgacgacgcccacaaccgcgacgcagacg

SEQ ID NO: 48513 - DNA, 131 bp, Zea mays
  Clone ID: MRT4577_144250C.1
cagctacctcgtcgccaccgtcgtcatggctccattcgtactcctatacgagaggcgagtaaggcccaagatgaagccgctcatcttcctcaagatcatgggatcgagcctgtagtcgaccagaacatgta

SEQ ID NO: 48514 - DNA, 386 bp, Zea mays
  Clone ID: MRT4577_144251C.1
tggctctggacctttgggctgatttatgtgcttgtttatgtgcttgtttagtctgtctgctttcactcgactaggctgagtattcagcagtgattcgtctgactactagcgcagagcgctggcaggcgctcgctctctccggcggtcggccgtaatggctacggtgatgctgctctgctgggcgtttccgtcgtcgtcgcgttcgggtgcgtcggcgcttcgtcttcctgtggtgggtagtccggattaggagtcggatactatgcggggtgatgggtggggtaaggcttccgataatgggtggtcgtcgatgtcgctgtcggattgtatgcttggtcttgggccttagctttggtatgagcattcgcctggtaagactgatacgt

SEQ ID NO: 48515 - DNA, 857 bp, Zea mays
  unsure (1)..(857): unsure at all n locations
  Clone ID: MRT4577_144252C.1
gccggcctgttcgggactgcgactgtcagcttcgttcagttcatccgtgtgttcttgtttgcgaggtcgagagagaggatgtcgtgctgcggaggcaactgcgggtgcggctctggctgcaagtgcggcaacggctgcggagggtgcaacaagatgtacccggacatggctgagcaggtgaccaccaccaccacccaggctctcgtcatgggtgtcgcaccatccaaggggcacgccgagggcgggttcgaggcggccgccggagctgaggacggcgggtgcaagtgcggcggcaactgcaagtgcgacccctgcaactgcggcaaatgagctaggtgctccaccctgcaggccggccggaggaagctagctaattataaagctaaataaagtatagcggcgtcgctgtgtgtgtttcgactttcgagtcagtcagttgcgtgccatggcatgctctgagtctgagatgatgatgatgcctgatggcggcgtcgtgtcctgtaatcctcccctgccccctcgggcgcttctggcggcgagcaatgtgttgtgttgtgttgtgtgggtgccgcacgctagcaggctagccatgtgccctgctgtgttgtgtcaccatccatctataatcttatccataccccaccttttgtgtgatgcgtgtaccctttcctgatgggggtggccgggagtataaggggggtgtttggttcctctcctaatttttaatcgcgtcagatgtttgaaggctatttttaagtacattatacatgtatactaaaaatcttaggagagcttttagtgaggctctatgcgcanaaaaaaaaaaaaaaaaaaaaaaaaaaaaaaaaaaaaaaaaa

SEQ ID NO: 48516 - DNA, 1013 bp, Zea mays
  unsure (1)..(1013): unsure at all n locations
  Clone ID: MRT4577_144253C.1
gtgcgcttcgttcagttcagttcatccgtgttcttgtttgcgaggtcgagagagactgagagargatgtcgtgctgcggaggcaactgcgrgtgcggctccggctgcaagtgcggcaacggctgcggagvgtgcaacaagatgtacccggacatggctgagcaggtgaccaccaccaccacccaggctctcgtcatgrgtgtcgcaccatccaaggggcacgccgagggcgvgttcgaggcggccgccggagctgagaacggcgvgtgcaagtgcggcggcaactgccagtgcgacccctgcaactgcggcaagtgagctaggtgctccaccctgcaggccsgccsgaggaagctagctaattattataaggctaaataaagtatagcggcgtcgctgtgtgtgtttcgagtcagtcagtcagttagttgcgtgccatggcatgctctgagtctgagatgatgatgatgcgctgatggcggcgtcgtgtcctgtagtcctcccctgccccctcgggcgcttctggcgcgagcagngtgttgngttgnggttgngtgggtgcagcacggtagcaagctagccatgtgcccctgctggggttgggggcaccatcccattctataaaaaaaaacctaatttctatacccccgggaaaaaaaaaaaaaaaaaaaggggggccccggaggcccaaaatttttgggcccccctttagggggggggggttttattgggcccgcgggggcggggaaaaaagggggggaaaaaggtgtgtttcctggggggaaaaaaatttttttttcccccccccaaaaattccccacaaaaaaaaatatatcgggggggggaaaaaaaaataatttttcccccccgggggggccccccctagggggggggcccccccccccccacaaatttttttggggggcggcggcacaaacccccccccccctttttttttggggggagaaaaaaaaaaatttgtgggggcgggcgccgttcgtttttttaattaat

SEQ ID NO: 48517 - DNA, 141 bp, Zea mays
  unsure (1)..(141): unsure at all n locations
  Clone ID: MRT4577_144254C.1
attacatagaaatagacgcatttgtttaccacttcaagatatcctggaacttgcaacaaccgtgtcactgcggtacgatacagacataaagtcataaaaaatcacagacggaggggcacagatganagctgttttttagcc

SEQ ID NO: 48518 - DNA, 807 bp, Zea mays
  Clone ID: MRT4577_144255C.1
actgcgactgtgagcttcgttcgttcagttcatccgtgttcttgtttgcgaggtcgagagagagaggatgtcgtgctgcggaggcaactgtgggtgcggctccggctgcaagtgcggcaacggctgcggagggtgcagcaagatgtacccggacatggctgagcaggtgaccaccaccacccaggctctcatcatgggtgtcgcaccatccaaggggcacgccgagggcgggttcgaggcggccgccggagctgagaacggcgggtgcaactgcggcgccaactgcagctgcgacccctgcaagtgcggcaagtgagctaggtgctccaccctgcaggccggccggaggaagctagctaattataaagcttaataaagtatagcggcgtcgctgtgtgtgtttcgagtcagtcagtcagtcagttgcgtgccatggcatgctccgagtctgagatgatgatgatgcctgatggcggcgtcgtgtcctcccctggccccctggggcgcttctggcgagcagtgtgttgtgttgtgttgtgtgggtgccgcacgctagcaggctagccatgtgccctgctgtgttgtgtcaccatccatctataatcttatctatacccgacaacacagcacactgctcgccagaagcgccccagggggccaggggaggacacgacgccgccatcaggcatcatcatcatctcagactcggagcatgccatggcacgcaactgactgactgactgactcgaaacacacacagcgacgccgctatactctattaagctgtataattagctagcttcctcc

SEQ ID NO: 48519 - DNA, 1152 bp, Zea mays
  Clone ID: MRT4577_144256C.1
gcggactaaaaacacaaacactgaaaaggagcaaggacaaccggcacgaaacacagttgaggttgaagaagatgagagcgaatcttgctcgagttctgatgaagatgattcgtggcactcggatgatcctaaggtgggacctgaggaaaggaaggctgctcggaaggaaaacaagaagaaagtgaaggaagagaagagggaggcccgcaagaccaagatcccaaaagctgagaagaagaagaggaagaaaatggcgaaggcaaaatgcaagcggtagcgaatatctatgaacaatccagtagttaactccgagcagtagagatggataacttcatcgtgaatcaaacaagatagcttcgttcgttcagttcatccgtgttcttgtttgcgaggtcgagagagagaggatgtcgtgctgcggaggcaactgtgggtgcggctccggctgcaagtgcggcaacggctgcggagggtgcagcaagatgtacccggacatggctgagcaggtgaccaccaccacccaggctctcatcatgggtgtcgcaccatccaaggggcacgccgagggcgggttcgaggcggccgccggagctgagaacggcgggtgcaagtgcggcggcaactgccagtgcgacccctgcaactgcggcaagtgagctaggtgctccaccctgcaggccggccggaggaagctagctaattattataagctaaataaagtatagcggcgtcgctgtgtgtgtttcgagtcagtcagtcagttagttgcgtgccatggctggcatgctctgagtctgagatgatgatgatgcctgatggcggcgtcgtgtcctgtagtcctcccctgccccctcgggcgcttctggcggcgagcagtgtgttgtgttgtgttgtgtgggtgcagcacggtagcaggctagccatgtgccctgctgtgttgtgtcaccatccatctataataatcttatatctataccccaccttttgtgtaccgcgtgtacccctttttccctgatgtctgttcccgagtaccaagggggtgtttggttccctctgctaatttgtaatcccatcagatgttttcagtccaaaaaaaaaaaaaaaaaaaaaaaaaaaaaaaaaaaaaaaaaaaaaaaaacccccacacccggc

SEQ ID NO: 48520 - DNA, 162 bp, Zea mays
  Clone ID: MRT4577_144257C.1
atacgaagtaccttagtcagggggcattaaaaaaaacatccggtccattaatataatctagcaagctggttgtgaaacccatcgttgggcctcaaaaaccatgatggtctcacctgtcctgcaagagtgatacaactataaagtcgcactccgggcttacta

SEQ ID NO: 48521 - DNA, 759 bp, Zea mays
  Clone ID: MRT4577_144258C.1
ccggccggggtccactccactgcgactgtgagcttcattcattcagttcatccgtgttcttgtttgcgaggtcgttagagccgatgtcgtgctgcggaggcaactgcgggtgcggctccggctgcaagtgcggcagcggctgcggagggtgcagcaagatgtacccggacatggctgagcaggtgaccaccaccaccacccaggctctcgtcatgggtgtcgcaccatccaaggggcacgccgagggcgggttcgaggcggccgccggagctgagaacggcgggtgcaactgcggcgccaactgcagctgcgacccctgcaagtgcggcaagtgagctaggtgctccaccctgcaggccggccggaggaagctagctaattaaaagctaaataaagtatagcggcgtcgctgtgtgtgtttcgagtcagtcagttagttgcgtgctatggcatgctctgagtctgagatgatgatgatgcctgatggcggcgtcgtgtcctgtcctcctcccctgccccctcgggcgcttctggcggcgagcagtgtgttgtgttgtgttgtgttgtgtgggtgcagtacggtagtaggctagtcatgtgccctgctgtgttgtgtcaccatccatctataatcttatctataccctaccttttgtgtgatgcgtgtaccccttcctgatgtttaaagatagcaatgggtacccactacccaaaacttggtgggtttttcccaaaaaaaaaaaaaaaaaaggggcggcc

SEQ ID NO: 48522 - DNA, 1471 bp, Zea mays
  unsure (1)..(1471): unsure at all n locations
  Clone ID: MRT4577_144259C.1
aaactgcgactgtgagcttcgttcgttcagttcatccgtgttcttgtttgcgaggtcgagagagagaggatgtcgtgctgcggaggcaactgtgggtgcggctccggctgcaagtgcggcaacggctgcggagggtgcagcaagatgtacccggacatggctgagcaggtgaccaccaccacccaggctctcatcatgggtgtcgcaccatccaaggggcacgccgagggcgggttcgaggcggccgccggagctgagaacggcgggtgcaagtgcggcggcaactgccagtgcgacccctggcaactggcggcaagtgagctaggtgctccaccctgcaggccggccggaggaagctagctaattattataagctaaataaagtatagcggcgtcgctgtgtgtgtttcgagtcagtcagtcagttagttgcgtgccatggctggcatgctctgagtctgagatgatgatgatgcctgatggcggcgtcgtgtcctgtagtcctcccctgccccctcgggcgcttctggcggcgagcagtgtgttgtgttgtgttgtgtgggtgcagcacggtagcaggctagccatgtgcccctgctgtgttgtgtcaccatccatctataataatcttatatctataccccaccttttgtgtaaaaaaaaaaaaaaaaaaaaaaaaaaaaaaaagtgagcttcgttcgttcagttcatccgtgttcttgtttgcgaggtcgagagagagaggatgtcgtgctgcagaggcaactgtgggtgcggctccggctgcaagtgcggcaacggctgcggagggtgcagcaagatgtacccggacatggctgagcaggtgaccaccaccacccaggctctcatcatgggtgtcgcaccatccaaggggcacgccgagggcgggttcgaggcggccgccggagctggggacggcgggtgcaagtgcggcggcaactgcaagtgcgacccctgcaactgcggcaagtgagctaggtgctccaccctgcaggccggccggaggaagctagctaattataaagcttaataaagtatagcggcgtcgctgtgtgtgtttcgagtcagccagtcagttgcctgccatggcatgctctgagtctgagatgatgatgatgcttgatggcggcgtcgtgtcctgtcctcctcccctgcccccggccctggggcgcttctggcgagcagtgtgttgtgtgggtgcagcacggtagcaggctagccatgtgccctgctgtgttgtgtccccatccatctataataatcttatctataccccaccttttgtgtaccgcgtgtacccctttttcctgatgtctgttcccgagtaccaaggggtgtttggttccctcttataatttctaatcacatgagatgttttcggcccatctgctaatttttaccccccaaactaattatattaaaaaaaaataaaaataggnagggcggccac

SEQ ID NO: 48523 - DNA, 571 bp, Zea mays
  Clone ID: MRT4577_14425C.1
ggccgcgggttttttttttttttttttgatgcaattctttctttctagaacttttgtcttgttcttgattcccatgttcctgcccatatcatccgtccctttttacagtcatcatcattccgaggtaggtaagcaaatcccagacgcctttttctctacctccaagaaacgacacccagagttgctccttagatcaggttcatggcagatacctcagatagtgtaagttacaatgagtcgaccaagttttctctacttggtgttttactcgattcgctatgtcattaagccgcgctgtcgtacttggcgttgtgggtggcaatggctcggccactagggtcagtctgcttggaccaggtgggagtccagcgcatgacagttgacgcgcagtgaggggggaagtgctcgtcaaacatgcatcggtaccagtacgcctccttggtatcagggatatcgttgccccactcaggcttggggttcttcatcatctcatcagtgacctgcttctcagcggtgtccttgagggcgtcgatccaaccgtagccgacaccatcagagaactgttccttct

SEQ ID NO: 48524 - DNA, 1225 bp, Zea mays
  Clone ID: MRT4577_144260C.1
ctgtgcggcgctcgaggcggccggtccgggactgcggctgtgcgcttcgttcagttcagttcatccgtgttcttgtttgcgaggtcgagagagactgagagaggatgtcgtgctgcggaggcaactgcgggtgcggctccggctgcaagtgcggcaacggctgcggagggtgcagcaagatgtacccggacatggccgagcaggtgaccaccaccaccacccaggctctcatcatgggtgtcgcaccatccaaggggcacgccgagggcgggttcgaggcggccgccggagctgagaacggcgggtgcaagtgcggcggcaactgccagtgcgacccctgcaactgcggcaagtgagctaggtgctccaccctgcaggccggccggaggaagctagctaattataaagcttaataaagtatagcggcgtcgctgtgtgtgtttcgagtcagtcagtcagtcagttgcgtgccatggcatgctccgagtctgagatgatgatgatgcctgatggcggcgtcgtgtcctcccctggccccctggggcgcttctggcgagcagtgtgttgtgttgtgttgtgtgggtgccgcacgctagcaggctagccatgtgccctgctgtgttgtgtcaccatccatctataatcttatctataccccaccttttgtgtaaaaaaaaaaaaaaagggcggccgccctttttttttttttttttgcacgagacaacgtatctgataccattatttcacataattcaattcccaaccttgaagctagaagaacaataatgtaatgtgttcttgcacaagttattcataataacttattcatttcatcatttgtgtgctagtttagtttatttgtttctcacgtacgtgtctcctggatcaactatataggtacgtatgtttgagcagctcgatggagctcatgggcagaagacgacgttgtagttggtgccgccggggcaagtgtaggtgctggtggcgtcgtccttggggtagctgtaggcgtccgggcagagccccttgaagaacttggagtagtcggtgggcccgcagttgtccgtcgccgagccggtgcagcagtactggtccgtcttgaacacggtgaaggtggccgcgtcggcagcggccgcgaggaggaggaggacgacgagcgggaagaggtggtggaggacggaagccatttcgtctgtctgtgactgtctgctagctgctctcgtgc

SEQ ID NO: 48525 - DNA, 754 bp, Zea mays
  Clone ID: MRT4577_144261C.1
ctactgtcgtggaccgatgatgagaaggaccctcagtatgaacggtcagtcgaggcactgtctgttctctctcagtccattgacgcgaaaggacgccagctggaagtggtgaagatccacgtccctgggcctctgtacatgacaaaagaagaggcagagggtgttgtttcaacggggcatgctgtgccgagggaaccaggcacgagattggccgcctcgtatgtgaacttctacatcgccaatggcgggattgtagcaccttctttcggcgacaacaagtgggacaaggaggcatatgcggttctccagaaggcgtttcctgatcacgaggtggtgatggttgaaggcgctcgagagatcgtgctgggaggcgggaacattcactgcatcacgcagcagcagcccgtgcgcccgtcgtcctaggtgcaaccgacgtcgacgcgaaggcgatgaagagcatgctggtagcgtcattttgtatactactagtatttagtaggtgaattgatctcgctctagagatacaaaaataattcccgtttcctccaggcccatgtgacgcagaagcgtccaggctgcgctaggagagaaaacggcgatgtaggacgagcgcgtgagtggggtaatcaaacaatttcttcgtgtagcttggctgaaaaaaaaataagcaaattacccactccattctaaattataagtcattctaactttcttgaagagttaaagcatctcaattttaactaaagttatagag

SEQ ID NO: 48526 - DNA, 1519 bp, Zea mays
  Clone ID: MRT4577_144262C.1
ttttttttttttttttttttttttttttttttttttttttttttttttttttttttttttttttttgccaggaatctgatttaacttagagcatcatataattatcctcaaattacaatataaacccagtctcagaacatgctagaatgaatcaaaaaggacggtttacatcgcctacgtctacagcaaaggacgtctgcaaagggagaccatcatcccaacgagcctcagccatgatgcaggagaagctcgccatcctcgtcacaagatgcgcctacttagatctctgcctcattttccggcgcttcctcttgagcctccgcatcctcttcttcttccacttggcccgcatcgcgtcggcgcaggtggagcgcgcgagcgagctccctgtccctgattgcggcggctgagtactagttcggcacgcgcttcgttcgttcagttcatccgtgttcttgtttgcgaggtcgagagagaggatgtcgtgctgcggaggcaactgtgggtgcggctccggctgcaagtgcggcaacggctgcggagggtgcagcaagatgtacccggacatggccgagcaggtgaccaccaccaccacccaggctctcatcatgggtgtcgcaccatccaaggggcacgccgagggcgggttcgaggcggccgccggagctgaggacggcgggtgcaagtgcggcggcaactgcaagtgcgacccctgcaactgcggcaagtgagctaggtgctccaccctgcaggccggccggaggaagctagctaattataaagcttaataaagtatagcggcgtcgctgtgtgtgtttcgagtcagtcagtcagttgcgtgccatggcatgctctgagtctgagatgatgatgatggctgatggcggcgtcgtgtcctcccctggcctcctggggcgcttctggcgagcagtgtgttgtgttgtgtgggtgccgcacgctagcaggctagccatgtgccctgctgtgttgtgtcaccatccatctataatcttatccataccccaccttttgtgtgaaaaaaaaaaataaagaagaaaaaacagatgtacttgtctggacaaaagtccatgcaaaaatgaagaaatatctatgttctcctaatctattgacttgtgcagacaaaatcatctcatacaagaggtgatgattgaagactactgaattgcttctgcattctaaaaaggataagatacccagccttcatcgatttcatgtgcgcaggctgcatccatgtctgcatcagcagactccgtcgcacctgaaggtaaggtaacttgtgctttcaacaattaataagttcgttgtgtaaccaacctaggccaccttatagattgcctagccagacagctaccagagatattgggagacttagctgacagaactggtgatggtgatagctctgcttccatcactgctgattctaggtacagcctccgcctctttgtaacttgttgctgtagtctatttattaagtattccctttgctaagatttaccac

SEQ ID NO: 48527 - DNA, 359 bp, Zea mays
  Clone ID: MRT4577_144263C.1
aaaaaaaaaatttgaataattgggactaaaagaaaggaaaacgtttttttcaagggaaagggggcccccaggccccaggctgggatctcaggacaaacttgggatttttattaataaggatgaaagaggggcccgatgaccctttcagggccaggcaattttggtttattccaaacaagacacaacggcctttaaggggagggaaatttaaaaaaagactcgggaaccattagggggcagggaagcgatccccgatccactccaatgtccaaaggccgccagggatccaatttcacttagggcctggaaatttgagaaggagccacaagttcgggcattttcttccaccccgggacctg

SEQ ID NO: 48528 - DNA, 111 bp, Zea mays
  Clone ID: MRT4577_144264C.1
aataacaaacaggtttagccagatggcgttttacaaaagaggccctgcctgattggcttttccaacacttcctaaacctgaatgtaaaatgggaccccccttgtaggtacc

SEQ ID NO: 48529 - DNA, 350 bp, Zea mays
  Clone ID: MRT4577_144265C.1
gggggatccaacacaaacataccaaagtttaccgggaacatatcccatgtaaatgatccatacgtgtacatatatgcatgttttaaatttaaacccatcgtttaacaatgtcagtcactaattactgaacaaagggtccatatttaacatgtgcatatttggcccagatgaatcatatgtttttgatacattggcgaccctgagactcaaatgactgccaagttcaagaacccttcctgcatcttattcctaatataaatttcgaacaaggcctcaatagaaaattaaagaaaattcactccgatccgtgccggggtgtccctgaagattcttcgcataaagaggaacct

SEQ ID NO: 48530 - DNA, 373 bp, Zea mays
  Clone ID: MRT4577_144266C.1
catacattcatattaaatataattgaattacaggtggggcgtaatataattttttggaataatatacatacacatgggatcacactctgatctgggccaaacatcatgcaaataaacaggactgctaaactggctagcaattgccctatgaaaaaatgactgcaatggtcaccatctgtcaagcacccataccacagaaatcctgtccccaaccactcttttgacaaaaagaacttaggaccactggagtactaccaaaagtgatactaaaaaataccgtctaaagcaaaacagaatgcgaacggaaggccccactccgctagaatggatagccgatcctccaattatatggtactgactgaactgcatatac

SEQ ID NO: 48531 - DNA, 283 bp, Zea mays
  Clone ID: MRT4577_144267C.1
ccggccgggatcctacgccccggacattcactcacccacctagctagtcatcactagtctcgttcatccaccagagacaacaatggccatggatacttgcttcacagctcgagagctgcacgtcaccgctggcagcaacgacaggctcgtcggcggcaacctgatgctgccggcgaaccgggcgctcccggctctgtccgtgggaagcgtcgccacgtatcgctcacccgacatctgccagttcaacacggcctccgacgaagttgtggtggttcactgaaac

SEQ ID NO: 48532 - DNA, 340 bp, Zea mays
  Clone ID: MRT4577_144268C.1
gctgaactactcatgaactggactaaacaccacatctaggcatagaacgcttctaacactcgggttaattatgcgacgaaactcaggctcatgggacaccaactaacgtggtcatctttgctgacaaacaaacattgagaatgggcttgctaattgaggatactacatgttgggccgcgagagttcagaaaactggagagtctagaggtgacacttactattggatgttggaacgcaaatcatgcaagggtaccaatgggatcgatggattccgttctttcctttgaaaagcatgaccagtgaatggacaaacccttctaacggaaagacgagtgccaca

SEQ ID NO: 48533 - DNA, 322 bp, Zea mays
  Clone ID: MRT4577_144269C.1
cacacgcgtacgtagaccaactgctgaatgcacaacaaaccgcacaacaacccgagggagacgatgagggcgctggttgttgtggttgttgttgtgagtgtcacttcgagccctacatgcaggcattcgagctgccagtgacggtggcaggcacatctaccggctcatgtacatccgccagctcatgtgcaacttccagctcaggtgcctcttccagcgcatgtccaaccgccggcgcacgtgcagctgccagtgcacgtgcatgtgccggtgcatgtgcatctgccggctcatctatggcagtaaccatgtcaatagccta

SEQ ID NO: 48534 - DNA, 293 bp, Zea mays
  Clone ID: MRT4577_14426C.1
ccattctattccgattcagaggcgctcgctccccgtgcccgagccacgcaagccgagctcaatccccagaggccagagacagctgctcggcgctccaagcgatggagcacaaagagaccattgtcagcgctgcgcgagcacatctccacccgaccgccgccgaccccgtttgtcactacgcttctacaagttcttcgaggataacgtggggattctggtcattgagggggcggactttatcgggtcgcacctggtggacaggctcatggagatcgagaagctcgaagccattg

SEQ ID NO: 48535 - DNA, 315 bp, Zea mays
  unsure (1)..(315): unsure at all n locations
  Clone ID: MRT4577_144270C.1
cccggtttcgacccacgcgtttctttcctctccggcagtgatgatgccgccgggggggttgggggttcaaagactgggcaacttcctgaaanagtctgacaagggaatccggacatgaggaagaccactttcatcatgtgtcaataatcccgtagattgggtcacatctttatctactgggctccttggggataaatctgcccaatcttttgggggggggggggggggctggccccctgtttcaaggacatgtggtcaccgggtcgggccctcgctgaatggctggtggacactgttttcccccctccatgaata

SEQ ID NO: 48536 - DNA, 574 bp, Zea mays
  Clone ID: MRT4577_144271C.1
gttcccccgcgagacctgtccgaatcgcgcccagcgccctcgctgggagtgtcggcgagggccctcccgagctcccctagattcagacaggagatgccgtgctgaactcacctaccgcggaaggggaacagtgcacggacggcggagccgatgtcgacggatactcaccgaagccgttcaagccgctcgcgtggctgccccgtgcgggccgctacgccgacgccgagcatcggccgctcttcgcgctctgccgggatgctgatcgccgccgccgtcgtctcacatcgactccccgatgcgcctgctcgctcgcatcactctcacctcacatctccaccgagaggagccgactcatcgtactgcaacaacaacaatccgatcgcactcgcgttcccgcaggcgagccagcccactcaccgggacgagggcacgcgtctattcctctgcgtgaaggggtcgatgggtcttctagcgagaacgagctccgcgaacatcgtcaccgagaggtgccggtgtcatcctgaacctgctggggcatcgcctcatcgagcgcggtgacagcgtgatcgatctt

SEQ ID NO: 48537 - DNA, 630 bp, Zea mays
  Clone ID: MRT4577_144272C.1
cctcgaggccggccgggagagatctcacactcaattcatcatcacaattagttatcacagatatttatcacagtctattatccttgatcaaccccacctacaatctgacacctacctatctaaattcgcttccttttacgcccctggcgctttattactactactaattactctttaagctcttatacgcgggcctttataagcatattcttatatagctgttacaagcaacaagcagaaggatcctctccctgggtatgacgatgaatggttgggaaaccactggggatcccaacgggcatgatcatcgcggggcattagaatcacgtgacttggcatctcgccaagacgtgacatctggccaagaagacagatgccatgacatctggagatgtcaaggacatctgaagcatccctagatgccgggacattctagagatgttacagatgtcaggaccggaagcaatgaggatataaggatggatggatttcattatttactctcgttgtggtcaactcaaattgtactttcttactagttactttacttaacaagattgttacctgttggtctatagcgatatagattaatagttgtcaaaccttaaaaaaaaaaaaaaaaaagcggcc

SEQ ID NO: 48538 - DNA, 512 bp, Zea mays
  Clone ID: MRT4577_144273C.1
gcagccgatagaagaggtgtgatacctgcttcaggcttttctctcagtgcactgcagatttgggaagtaatacgtgaaaataaggacctcaaccttcctgctcacgaggtcatggttgctactgttcgatgtgaagagattgcaaatgaaaacctcaaacagtttttgtctgataagggttggttggatctaaatgcagctgtagaatctggtctgccaccaagcttcggaatgaggctcagtgctattctcgactcttatctatccgagtatgacatggaaaccatgtattttgatgaaggtgtacgagctgctaagcggcaacaattggaatcttcaatgctagatcacgcatatcctgttatcgagagagtaatggagcacctgcatcttgtggctctcgacaaattcaaaggtgacctcgaacaatcattaaggcatacagaaagatttgcagaatcagttcgtcggtgttctcaaacttcaatggcagagtttgatgctggaatgac

SEQ ID NO: 48539 - DNA, 239 bp, Zea mays
  Clone ID: MRT4577_144274C.1
tgcatgcactgcagtgcgtaagcagactgtgcgtgcctgcccacgcaattcgacagcacaccgatctcgatggagctgtgatcgtgtccactcgatcgagagatcgattgatgcttgagattaaatttgtagtccacattatatataagagatacagcttaaactaaatttattccatcaagcacgaccgccgcaccaccgaagtcgtcgccgtcaagtacagcgagcgtggaaaaagg

SEQ ID NO: 48540 - DNA, 226 bp, Zea mays
  Clone ID: MRT4577_144275C.1
gtataattaacaatggccaaattaaatattgatcggggaagggtcaaaatggaactggcagccccaggggcaacgggaacagggccaacttttcaacaagagaatgagagagcgtttccccgtcaacccgaaagggttatttaaattaaacaaaccccagggggggggtgggtatttctaacaacaccaagccttctgtttggagccccacgccccttttaaggat

SEQ ID NO: 48541 - DNA, 312 bp, Zea mays
  Clone ID: MRT4577_144276C.1
cggacctggcggacgcgtgagccgtatactattgatcatcccactctccccgttatcttcttcctgttatataggcgtcccgcagcagtagctgatcagtgcagcggcgaagaagcagcagcagaatgctttccgttccaggagcagcatgtagccgttgcaggctcgtcgcagccactgcgtgcttcctcctcgtcctcctgctgctgcatgtgcgcccagccacggccaccccgaccccgccccgcgccttcttcgtcttcggcgactcgctggtggacagcggcaacaacgactacctgtccacgacgg

SEQ ID NO: 48542 - DNA, 320 bp, Zea mays
  Clone ID: MRT4577_144277C.1
attacctatttaccacggggctaaaccccaggggagtcggaaccaaatccaaattccatggcaaaagttttgcttcacaaaaacctaatttccattcaaaaaggtcccgggggcaaacctgtttacccaacaaaacagataaaggggggcaaaagcggaacaaaattttggggggcccttcctttcggaacaacaagggccaacataagggaaaccccccgagcggggggcccaaacaataaaaccggcaatagtgattaccacttaacaacaaggccccaggcgtaagacgaaaaccccccttgcagaagggggaaccc

SEQ ID NO: 48543 - DNA, 349 bp, Zea mays
  unsure (1)..(349): unsure at all n locations
  Clone ID: MRT4577_144278C.1
acccttcgagcgggggggggaacacacccagggttgtatattataattgtngggctgacacaagtagcaaaggcacagttgacacaacaaatcacttacaccggcatatagcttggaacagcgcatggctcgctctcccataatagagcgcatgcttagtacaaaaaattgttatccagcaggatcccaatcgtttattttaagccaagaggcagatttggcatgtccctcctcggaccaatgaatccctgtttcatgcctgtagaaggcctgacattatgggcgatgatccccctcgcgagagcccgtacggcgttaaaatgcttcaccctatacaggcccttaggga

SEQ ID NO: 48544 - DNA, 2056 bp, Zea mays
  unsure (1)..(2056): unsure at all n locations
  Clone ID: MRT4577_144279C.1
cctcggcgtcggatgggctcgacccaacacccatttccaccggcctcctcttccccccgcctcgccagcccgaattaggagctacgacgaatctaccgggccgagctcgccagctggcctccccgagggcgaggccctatcggctgccgttcccccattgacagggagctcagccccgccaccgccgcggctgcggcgtgtggacgtaaccggagctcctcgcagccgctgataagatccgaagggttcctaggctttttgtggcgggaggcgactggttccgtcgggtggtccggtgagcatggcggggcccaagtttgggtcgttcaaggcagaaaagggggactcagcggcggctgcaggcgcggcggcgcagaggagggacccatacgaggtgctcggggtggggcgtaatgctactgagcaggagatcaagagtgccttccgccgcatggcactcaagtaccatccagataagaattcagacgaccctgttgcctcagagaagtttcaagaggccacattctcctataatatcctgtcagatccagacaagaggcgccagtatgatgcatcagggtttgaggccattgaagcagatagtcaggaactggagctggacctatcaagtctcaatactgtaaatacagtgtttgctgctctgtttagcaaactaggtgttccaatcaagaccactgtctcggcaacagttttagaggaggcattgaacgggtcagtagagatttctcagcttcagctgggcaaatctctatgtaggaaggtagaaaagcagtcagctcacttttattctgtggacataacagataaagaagccaaaatgggcttagtttgtagagttcattcaacttctaggagtaaatttaagttgctgtattttgagcttgaggacaatggtggattaagccttgctttacaggaagatagtgcaaaaactggaaaagttacttctgcgggcatgttctttctaggctttcctgtgtatcgatttgaacaaaataattcagctgctgctgcgaaggatcctgacagtgctttctttaaaagattggatggctttcaaccttgtgaagtaaatgaactgaaagcaggaagccattattttgctgtatatggtgacaatttctttaaaagtgcaagctatactattgaggttgtatctggtgaacccttctctgctcaaaaagagaagctacgaagtgtggaggcaaagataattgcaaaacgatctgagctgtctaaatttgagtctgagtatcgcgaggttttggcaaagttcactgagatgactagcagatatgctcaagaaatgcaaacgattgatgaccttctaaaggaaaggaatgcaattcatgcatcctataccaacaacccaactctgcagcggagttccagtagcagcaaagggaaatcaccctctaaagggtccagaagtgaggatgaccaaactgtaaagaaggaaaagaaatccaagagccagccaatggagggatccaaaagcgatgatgagggtcccgaaaacaaaaaggaagaaacgcctaaagatcggattcgaaggaagaagtggttcaacattcatttgaaagtggacaagagaaggccctgctgataactgcgatatatcatgtgctcctcaagatctctgctccaagtacaaggaaaaattcccatttgacgtccaggaagatgcatcttgtcgatcatgatcaagcccattctatttcctgaaaagtcaggaacctcgccagcttcaaaaatggtgtatgtaccacttagttttggacccctagtcggatactgttgtatttatctcaagttggacggttatgtacaatacagaccttagtagtgtgatgtccagaatggcagaatccaattcagatttgttcaatttgtttgatgttgtccgtgtcaaaaaaaaaaaaaaaaaaaaaaaaaannaaaaaaaaaaaaaanaaanaaaaaaaaaaaaanaaggaaaaaaaaaaaaaaaaaaaaaaaanaaaagnattttgggttgttaccactgtttaagggg

SEQ ID NO: 48545 - DNA, 260 bp, Zea mays
  Clone ID: MRT4577_14427C.1
ggcaaagggcaaaattttttttgaaggaagaattttagaaaaacatggttggttttcctcaaagggctggcttttaagcttatggggagaaaaaattaacccaattcccccctttggttggaggggtggggaaacgaattcattggaggaccacaatttatgaaggttttgaaacatttttagggggagggcccgagggaacaattttgggggggccacggacatttccggtggggctacccgggtttttaaagggcttg

SEQ ID NO: 48546 - DNA, 365 bp, Zea mays
  Clone ID: MRT4577_144280C.1
gatataactaatgttgtctcacgaatcacgatagggcatagcaagcttcttggaaatatcatcccgctttctgcttgagggaaacactgatgctcatctgaatattgattatgcttataccgttcacaactaatgtcattacagcctttcttcaagtttcttggtgcttcactgattctgatgcatgtatggctggatccatttttaggtacttcctgatgatatccgtcgagcgttgcttgttattgtcgagtgttgcatgaagcgagattatttagcagcaatggaccaatatatcaagttggcaatcgggaatgcaccttggcccattggagtgactatggttggcatccacgagcgttctg

SEQ ID NO: 48547 - DNA, 475 bp, Zea mays
  Clone ID: MRT4577_144281C.1
ggagactgtagtacggttttacgctctggcgcgcatcttctagctacacagttcctgccccactggggaccatcgtgccactctactcggcgtccccgcgtatcaaccgtgaccgtgctttccatgaggggcgcatacccatacgcctgatctggagcaaccccagggggttctctgtcgcaagaccgctcaccacggggaacacacctgacgagccaggaaacatgttctggaaaaacattgagctagcttaccagacacccaccgaagccatacaaggaacctaccttgatgacagatctccatccaccggaactgtgtctataaccgggagcatgatgcgacccaacatgccacagggctaacatgaatagctccattattgctcgcacgaactattctcacttacccaagaagtaccagaggtgtgcgaagagacactggcacattcctgcacacatatcaccatgcttcc

SEQ ID NO: 48548 - DNA, 416 bp, Zea mays
  Clone ID: MRT4577_144282C.1
cgcgatttatattttttctagttctagattcgctagcgcggtccttggttttttttttattcccaacagatatgacttttttgggtattgaagacctacactaaatgcatacatacaaagtcatcaatgaaacgagcttacgacaacaacacatgaaacgggtgagtacgcacggggtatgctttactcaaggaacccaacactggatctgttgcaatgcaacaatatgcttacgtcactcagaaatggcgaaatgcaacctagaccacatgcaatgtgccatttattgcttaatataagcaggtgccgcccccccccttgaaagagaaaagcatatatccatactgttgggcaaaaatttgaggcctggttacaaaaagaatccccaccaaaaatgaggttcattttagatctca

SEQ ID NO: 48549 - DNA, 270 bp, Zea mays
  Clone ID: MRT4577_144283C.1
tcgcccacgcgttcggccacgcgtcttaccacgcgtacgaccacgcgtccgatgaagagggttcttctgctctggcctactatctacgagagacaccccgttcggatccactacttgctgatcttcttggtcggacgttgcaattccaccatgctgattctggctcgtcaacatatcgtgctgacctttgatcctattggtcgtgcctcagacctgatggttctttttcttcagaatacgaatgagcgtcttctggctttgtgatgaaac

SEQ ID NO: 48550 - DNA, 127 bp, Zea mays
  Clone ID: MRT4577_144284C.1
gacgcacgcgtccgaactgaaataacgtcggcctcaaatcgagatggtcgaacaagaggatacaagcttacatgtgcattcatgctaaggcagtgctcttctatagtgtgtgtaacattcaattaat

SEQ ID NO: 48551 - DNA, 667 bp, Zea mays
  Clone ID: MRT4577_144285C.1
tgggacctcgagccggcggcagcagttcctctaagatcggcgtacatgcgcctgagccacccgtctcctcaagctccgtacccgcgcggccgatgtggttctcgtcctcctcacgctcacgccctcgcctgacaagacgctcgtgggccccatgagctgccagctgctgatcgagcacaccacctacatcgtcatcgtgatcacgccgcacgacgagggggacgtgatggtcttccaggaccactacatcctgcacttcgccaaccataatatgcttcgacctgcccttctcctgtcgagtgcggtacatagctcctcctgcgaacgcttatatcacctctggctacgcaatactcactccgacctcacgtttcttcgacatcgatcaggtcatcgacggtgggatgatctactgtgctgcgaaccccatctccaacgtcgtcatggagacggcactatagggatgacctcctataattgtagctaactatacaccaccaggctccggacacttgtgccaccacagtgctataccgcccgcatcaagacatgagacgagacgtctccatacattctagctatatatatatatgcatgcatgcatgtacttatccctgtgccaaactgagtatattctatattactagatttaatcacatatgaaaaa

SEQ ID NO: 48552 - DNA, 724 bp, Zea mays
  Clone ID: MRT4577_144286C.1
acgagcaaaaatgaaccagttcatctgttcatgcacaaacacgaaacatcacggaatgaccatcaatggaccatgcatggtctttcacaatgctaactgcattggtcgagcacacgaggaggagccattcaaaccgctatgtcgttctgcgtgcgagccttcaaggaattcgccttcacgcaactgctccatgggccggccaatcagagagctcagggccaagtcgtcccgtcctttgaaccggctcaattgcctcgtattctcaccttcgtttcgtagcaaccgtgacactgatttgtcctctaagcacgcgccatatcagttcacaagctacttgttccggttgctatcggccatcgccatgtcgtcgtccctgtacaagcagctgggcctttcgggagccggctccccgctctccggccgccacctcgccctcctcgtcctcggcgccggcttcctcgcgctcaccgtcttcgtcgtccaccctaacgagttccggatccaatctttcttctcaggcagcagctgtggcggccgtcccggcacggacgcagccgccgccgcagtcgccagtcctcacggtgacaccaccacggagaaggaggagaacgcacgggcggacgacgtgcgcgtcctcatcggcatccagacgctgccgagcaagcgcgcgcggcggcacctgctgcgggacgtgtactcgctgcaggcgcgggagcacccgccg

SEQ ID NO: 48553 - DNA, 657 bp, Zea mays
  Clone ID: MRT4577_144287C.1
gtgctttcttagaggtgggttggattctcctccacctccggttggggttgggggtcgtgagggtctccggggttcagtttcgtgggtgagcggatcgagatggtggcgttggatgtggagtaccgctgcttcgacggagggctcgtctggaccacggacgaccactccctccacaacgacttcagcacctacggagaggacatctagtccaagatcatcctccatcgggagacgcagaggtcccgcggcttcggcttcctcaccttctccacggaggaggagatgcttaacgccatcgaggtgatgaacggcaaggagatgcacggccgcaacatcactcgttgaacgagggccagaccctcggcggcctgggacgcttcggcggcggctcctacggcgtcggccgcgtaggcggcagtgctacggtggcgcgcgcgccgtgatgctccggcggctacggcgctggaggaagctacggaagatgccggcggcagctacggcggtgatggtggcggctacagttgtggcaaacgagtcgtttgctacgcgtaacttcgaaggagaactgaacgaaccgagcggtggggcccgctcgattcataattatcgctcgtatctataccgagatgtttacgctagttcagagagattatcatc

SEQ ID NO: 48554 - DNA, 510 bp, Zea mays
  Clone ID: MRT4577_144288C.1
gggggggggaacagaaaaaataattacagggctgagaccaggtttggaaggtggtggtttctggcccaaaggggggaggggggggggcaaccaagccgaaagaacaacaaaggggggggggggggggatttaattttccaaccaaccaaccacgacctggaaacaaaacttttttttgggcctagacgggcagaggttttttttttgaacacaccaaaagggagaacaaaaactaaaatccctggtggtcaaacgttcactttaagttgacgcgtttttttggggggcgttgtggacgaaaagtccttggttgacctggtggactttatgggggtttttaagaggtgccccggggggagggccccccggagggaaagcttgtcggggaggaccccgccggggaccacggggggcaggagccttgggtttgaaccgggacgggcccgggttgggccccttacgcccaggaggggcagggaggcgggctgggaccccaggtgagttcccccc

SEQ ID NO: 48555 - DNA, 795 bp, Zea mays
  Clone ID: MRT4577_144289C.1
tgggaccctcgtacccggccgggccgggcgggctagccgcctgcctctcctcctccagagctcgtcgccaccggccaccgccaccctcgatcacgccgtccgtcgaggtaaagttagtctccacgcccctttccctccgccctagtcctccgtagctctccgccgcgtcgtccgtcgaggtaaggtaaggtcagcatggtgagggtcagtgtgctcaacgatgcgctcaagtccatgtacaacgctgagaagatcggcaagaggcaggtcatgatcaggccgtcgtccaaggtcatcatcaagttcctgacggtcatgcagcgccacggctacattggagagttcgagtacgttgatgaccaccgatcgggcaagatcgtggtcgaactcaacgggaggctgaacaagtgcggcgtcatcagccctcgctttgatatcggcgtgaaagacattgagggatggactgcaaggctgctcccgtccaggcagttcggatacatcgtcctcacaacttcggcaggcatcatggaccacgaggaggcccgccggaagagcgtcggaggcaaggttctaggtttcttctattgaagaagctgagaatctttgttatggcctgcctgcctgtcttactctctcagactagagtacctgttattttactttaatatgtctctctcagactagagcgccttcttttacttgaatattggtgactgcattggtctttcactttaaagtcggtgactgcattgatcgaaaaaaaaaaaaaaaaggcccctagggcctcgagctcag

SEQ ID NO: 48556 - DNA, 483 bp, Zea mays
  Clone ID: MRT4577_14428C.1
caatgccataaacttagcaatcaccagtgcctgatgaaatcaatgggcaggtgcttgaatatatctatcatgaagatcatagtctgtgatgaaatgaaagggagggggataaatcattgattctttggaagtattggactgggcaataatgtattgttggggcacaatgcatcatagtgagtgtagcattgcacctggtaatgctgtatcgcaagtgcagcatgtggcattctaattatataattaaatcttcatggtctataccctaatttgcataggttgtcttctactattatactgatctagagatggtacatgacatgatattcatagagttcttgttcataatagggatctaaagatcttgtatctgacaagcctctgggctagatgttgtaactcaaacggatgggatcaaattctatctggcatggctggacgctcaatacattcaccaaggcatgcataatcaaatgctaatat

SEQ ID NO: 48557 - DNA, 220 bp, Zea mays
  Clone ID: MRT4577_144290C.1
ctgggtcttaagaacattagctccatgtactgcagagcgcaaaaaaacccactcgacaccatgagggtgttgctcgctgccctggctctcctggctctcggtgagagcgccacctccacgcatacaagcgagcgggtgcagttgccagccaccgccttctgttcatgtaccgccgacggtgcatttgacagctccggttcacactgccacctccggtgca

SEQ ID NO: 48558 - DNA, 632 bp, Zea mays
  Clone ID: MRT4577_144291C.1
ctcctcctccagaggtcttgcggcatcgggcaccggcaccctcgatcacggcgtccgtcgaggaaggtcgaatggtgagggtcagtgggctcaacgatgcgctcaagtccatgtacaacgctgagaagagcggcaagaggcaggtcatgatcaggccgttctccagggtcatcatcaaggtcctgacggacatggcgcggcacggctacattggagagttcgaggacgttgatgaccaccgatcgggcaacatcgtggtcgaactcaacggcagggtgaacaagtgcggtcgcatcagccctcgctttgatatgcggcgggaaagacattgacggatggactgcaaggctgctccccgccaggcagttcggatacatcgtcctcacaacttcggcaggcatcatggaccacgaggagggccggcggaagagcggcagaggcaaggttctagggttcttctatggaagaagctgagaatctttggtatgggctggctgcctggcttactctctcagactagagcacctggtattttactttaatatggctctctcagactagagcggcttcttttacttgaatattggcgactgcattggtctttcactttatgatcggggactggcttggtc

SEQ ID NO: 48559 - DNA, 1791 bp, Zea mays
  Clone ID: MRT4577_144292C.1
gtggcctcgtcgctgcattcaactcaatacagaaaccctggtctgaaagccctcactccaaatctcgcgcactgtcagctgacgccaccgcctgcgccagccctcgccaagccggtgaaaacctcgtgccctccgccgcctccgcccgcctcttccagagtaccgcggtctcatctcctcccgggacgggcatgcagagcacggctgccatcggtctcgttcggccatgcgccgcgcggccactccccacctaccctagcccacggcgcggcgccggcgcgtgcagcggcgccgcacagccgatcctcgcgccccgcggcctctgcctctccgcccgcgccagcctactgccggactcgccgctggaggaggagtaccggagatgcagggccggccggcacgtggccgcggccgggaaggtggcggcggctgatggggccgtagaggaagcggggggagggctcgtcaagacgctgcagctggggtcgctcttcgggctctggtacctcttcaacatctacttcaacatctacaacaagcaggttctgaaggttctgccataccctataaacatcaccacagtgcagtttgccgttggaagtgccattgctttgtttatgtggatcaccggtatccttaaaaggccaaagatttctggtgcccagctttttgctatccttcctctagctatcgttcataccatgggcaatcttttcacaaacatgagccttggaaaggttgcggtgtcatttacacatactatcaaggccatggaacctttcttctcagttctcctttcagcaattttccttggggagttgcctacgccttgggttgtgttgtctcttcttccgattgttggtggtgtagctttggcatcccttactgaggcctcctttaactgggctggattttggagtgcaatggcttcaaatgtaaccttccagtcaaggaatgtgctaagcaagaaacttatggtgaagaaagaggaatctctcgacaacattaatctattttcgataattacagtcatgtcattcttcctgttggccccggtaaccttacttacagaaggtgttaaagttagtccagcagttttgcagtctgctggtttgaacttgaaacagatatacacaaggtcattgattgctgcatgctgcttccatgcataccaacaggtgtcatacatgatcctcgccagggtatccccagtcacacattcagtgggcaattgcgtcaagcgtgtggtggtcattgtgacctcggttctgttcttcaggacccctgtttctcccatcaactcactcggtaccgggatcgctcttgctggagttttcctatactcgcaattgaagaggcttaagcccaagcccaaggctgcttgatcatagacctttgcaggtccatccaatagaacttttgaagttatgctatgccattggaatgattagtgagtgccgtagttagaatgatgtttaaagaagagctaccacttcagcagataatttgtgacttgcttgcattttttggacggatttgttcgtgtattaataattttgcagtgacgatacttctgttgtgctgtttataatcttctgaaactgaactgagttgttgcaaaaaaaaaaaaaaaaaaaaaaaaaaaaaaaaaaaaaaaaaaaaaaaaaaaaaaagggcggcccggacgcgcgtgacacttaattaagatagtagataaaatagtttggagccaaggttaatttttgtattgaaatttaaaaatggtttttgttgccttttaattttctaagc

SEQ ID NO: 48560 - DNA, 896 bp, Zea mays
  Clone ID: MRT4577_144293C.1
ctcgaggccggccgggccggcagggctagccgcctgcctctcctcctccagagctcgtcgccaccggccaccgccaccctcgatcacgccgtccgtcgaggtaaggtcagcatggtgagggtcagtgtgctcaacgatgcgctcaagtccatgtacaacgctgagaagatcggcaagaggcaggtcatgatcaggccgtcgtccaaggtcatcatcaagttcctgacggtcatgcagcgccacggctacattggagagttcgagtacgttgatgaccaccgatcgggcaagatcgtggtcgaactcaacgggaggctgaacaagtgcggcgtcatcagccctcgctttgatatcggcgtgaaagacattgagggatggactgcaaggctgctcccgtccaggcagttcggatacatcgtcctcacaacttcggcaggcatcatggaccacgaggaggcccgccggaagagcgtaggaggcaaggttctaggtttcttctattgaagaagctgagaatctttgttatggcctgcctgcctgtcttactctctcagactagagtacctgttattttactttaatatgtctctctcagactagagcgccttcttttacttgaatattggtgactgcattggtctttcactttaaaatcggtgactgcattgatcgaattatctgagccggttcttcagataaaaaaaaaaaaaaaacacaaaaaaacatggctagttggcacaacccttagttgcccatggtaatttgagcagttcggattactaaaaagattagtcacggacatcttattttcccaaggtgctcaaacagtcaaactaactgcaccttggggtcctacatttcgtgcgtgcaaggcaaatgcgctgcaattcgcaagt

SEQ ID NO: 48561 - DNA, 1607 bp, Zea mays
  unsure (1)..(1607): unsure at all n locations
  Clone ID: MRT4577_144294C.1
agccggtggaagcctcgtgatctccgccgcctcgagccctccgcgcgcctcttccagagcaccatccactcttcggtggcgaggccgcgggcccctcgagacgggcaatgcagagcgcggctgccatcgggctcctacggccatgtgccgcgcggccgctcgccgcctacactagcccacgccgcggcgccggcgcgtgcagcggcggcacccagccgatcatcacgccccgcggcatccgcctctccgcccgccccggtctcgtgccggcctcgccgctggaggagaaggagaaccggagatgcagggccagtatgcacacggcggcgtcggccggagaggaagctgggggagggctcgccaagacgctgcagctgggggcgctcttcgggctctggtacctcttcaacatctacttcaacatctacaacaagcaggttctgaaggttttgccataccctataaacatcacaacggtgcagtttgctgttggaagtgccattgctttgttcatgtggattactggtatccataaaaggccaaagatttcgggtgcccagcttttcgctatccttcctctagctattgtccataccatgggcaatcttttcacaaacatgagccttggaaaggtggcagtgtcatttacacatactataaaggccatggaacctttcttctcagttctcctttcagcaattttccttggggagttgccgacgccatgggttgtgttgtctcttcttccgattgttggtggtgtagctttggcatcccttactgaggcctcctttaactgggctggattttggagtgcaatggcttcaaatgtaaccttccagtcaaggaatgtgctaagcaagaaacttatggtgaagaaagaggaatctctcgacaacattaacctattctcgatcattacagtcatgtcattcttcctgttggccccagtaaccttacttacagaaggtgttaaagttagtccagcagtgttgcagtctgctggtttgaacttgaaacaggtatacacaaggtcattgattgctgcattctgcttccatgcataccaacaggtgtcatacatgatcctcgccagggtatccccagtcacacattcagtgggcaattgcgtcaagcgtgtggtggtcattgtgacctctgttctgttcttcaggacccctgtttctcccatcaactctctcggtaccgggatcgctcttgctggagttttcctatactcgcaattgaagagacttaagcccaagcccaagactgcttgatcatatacatttgtaggtccattcaatagaactttggaagttatgctatgtcattggagtgatcagtgagtgccgtagttagaatgataagcctctccgttttgttaccagttgggtggataatttatgatttacttgctagcatttttggacggatttgttcgtgtattaataattttgcagggatggttttcgttgtgctgtttgctgtttatagacctgaaactgaactgcgatgtttcattggaccatcttcaattgtgacaccaaattaagatagtagatacaatagtttggagagatatttggaattaaaaaaangtattt

SEQ ID NO: 48562 - DNA, 476 bp, Zea mays
  unsure (1)..(476): unsure at all n locations
  Clone ID: MRT4577_144295C.1
acctgcaaatgttacaccacataaatccatgggaacgtttagcctagctaggaaccgaggacacctatggcgtggagcaaactcaaatgattctttatggcttgacttcctctgctgctgcaggagctgttaacttcttcttgctctcttctgtcttagcagatgcttcatttttgttagcatttttaaccacattatattaattattcccaatatcgtggtcattagaaacttctatgttcagtttcgagaaggcatatcaccaaagttattaattgcagcattttcatcatcctcgccctgccattagtaccagcaaaccttaaagaacacaggtggcttgcactgctgcttaagcatccttgaccaccaccgggtcttaggtttctttatcaggaaccatatggtacttggggcaacagctgntttgctctcctccaattcacagcatcaaacaggtgaatgacaaactcata

SEQ ID NO: 48563 - DNA, 351 bp, Zea mays
  Clone ID: MRT4577_144296C.1
cgactccatcttcgcggtagctgcggaccgccgttcagtcgccaatatgcagctgctctctccgcgcccaggagctacacaccttcgaggtgaccggccaggaaacggtcgccccggtcaaggctcatgtagcctcactggatagcattgccccggaagatcaagtcgtgctcctggcaggcgcgcccctggaggatgaggccactctgggccagtgcggggtggaggccctgactaccctggaagtagcaggccgcatgcttggaggtaaagtccatggttccctggcccgtgctggaaaagtgagaggtcagactcctaaggtggccaaacaggagaggagaagaagag

SEQ ID NO: 48564 - DNA, 399 bp, Zea mays
  Clone ID: MRT4577_144297C.1
gagataatcagaggatttgattttggtaatattagtagagatacagagagtagaaacaccacattgctcgtggactggccaaaatttcaactaaaacacggcattgcccttcagcgtgccacatataggaagtggaggcgggggtcctcggagccggcctccagctccttacatcggtgcgcaaactccacgtagggtcgccaggttccattccattctttgtgaagcaaactccactggcagtgcatatcaccaaatcgctgcatacagttatcctgattacgtacgtgcagacgctcgcttctgcaagcaaagcaagcagcaagatttacctggggctgacaagcaagcaacaagccaaccggtaatacattatcacgagggcaagagcgccagcat

SEQ ID NO: 48565 - DNA, 300 bp, Zea mays
  Clone ID: MRT4577_144298C.1
gattattgacttcaccacaccccttgcctggcctgtcctgaggctcagcagtgcatgacttctctaagataacttcacagtcatccagtcccaacacctgctcttgcctggtaggaacaggcgaagtgtcagccctcaatgttgggtacttagacccaaaccaataaatggtgagttttgaacaagaactaccatcatgcaggcttcttgcccagctgaccactggccccggggtgcctgcctggctggtcttcatcacctgaggccaccaggctcaagccactgctgttgcattacacc

SEQ ID NO: 48566 - DNA, 454 bp, Zea mays
  unsure (1)..(454): unsure at all n locations
  Clone ID: MRT4577_144299C.1
gcgagcgccacgccgtccgtnngatggcatgtaaaatgggactcgttaatagttgtctgnaattttggtgtatgcacgtgttaacagcgcgagatctggagttatgggactgcgagaagnactggtgacttatccgttggaatgggcgcccagaaggtgcatttgagcanctaaacccttatgatcactaagggcttgatgtgttttaaagttttggaaattttcgatgtcgggaaacttnactcacagggaacgaattccttaatgagtaccctgacttccacttacaaagccgctgttcggtgtgagtgcagaaaggggattacggcctacnaattccaagagcataactttcacgcaaagcttnnntccgaagcttcttcaagaaaatgcttggcaagcaaggactcctatcccaaaagaccaagacnnttctncnngaaatattagaaac

SEQ ID NO: 48567 - DNA, 234 bp, Zea mays
  Clone ID: MRT4577_14429C.1
cggaagacttcgcttcctgtcagtggatgtaggcgacgatgtatagactccgcaagctttgagccagcactgaggtcgtcctgtcccggcccttgctccaaaggtgctggcatgcttcaggctcctgctccgaccgattggagagctgagtgatccttccaggcggatttgaagagcgggcgtacagattgaataagctgtagttcttttgtgaatgattttataaaatgttgg

SEQ ID NO: 48568 - DNA, 2857 bp, Zea mays
  Clone ID: MRT4577_1442C.1
gcagcggcatatttcctctccgccaggcagccccaccgggcaacgggcccccacaccacgtgacatccgtttcgtacggcctcccccacaaaactcaccctctctctctcctaacgaagaggagagggggcagaagaaaacctcgcgcgggggaggcgcgagaggaatcgcgggggccggaggagcagcggccggtggaggtggcgcgcgcggtggccgtccgagatggagtacatatcccctgagagaaatctggaggggacttgtggagatcctgggccgttatttgccgaccaaggtggcagcttgttggaccacttgggttatcaagggggaggaattccacaacatgagtctccaacactggatcatggacttttggttgatccagctggtgcaattccgtatttatctacagattctccgcccttcatgaatgatcaaatcacttgcaatgttataaaatctgcttcagctagtccagaatcttgtacaaaacaacctcaagaacctcttaatgtagaatctgatgtacagaatgacgcagctgaacaaaatgttcacaatagtaactctgaagaacagatcacttctctgggctgtgatgtacagcagaacacagaagtaattgatgaactgttgcctccaaagcttcctgaaagcagtggtaatgatatatcaaactttcaaccggaaactacatattctgatgcctaccatggtgactctttgttaactgaaaatagttgtaatagttatcagcttaacaatagtggtgctcctgctgctgatattccaaactctcctgcacttcagatggaaaatgaggagatgggaaagttacatgagacttctcacaatgaaaacagtgggtcagaggatgatcaaatgaatggtaggaagccttgccccattagtggtcgagacaatgagaagtttaacacttcagctgtacctccctcttgggaacagacaaaacaaaaaaatcctggtaccagaaatggaagttcaactccagacgatcaatttgattctcctccagacaggtttgcaagattggaaagggacacaccatctccagatgggagagtatcccctgaaaggtttgcaagactggaaagggataccccacctccagacggggatatatctcgtccaggtgaaagttcacatgtccattctgagacgatggagatggagccagaatatcgcgccaatgatgataccccacctccagacgggaggatgtctcctccagttgaaagttcacatgtccattctaagaagatggagtcacaacaccgtgccaaagatgttggtgagttagctcgttttgaaagcccacaggtaagacatcggtcccgatcttctgaaaaacatgaccccagccgcaaaagaacctcttcaggggagttgtctccacatgcgcgtcagaattctcctgtagaaaggaaaagacggagagagtctcgacatggtgatgggtcacctcgacagagatctgcatctccccgaagaagatctacaccccctcgaagaagatctatatcccctcgaagatcctcacacaagaggagggaatcaccaagaaggggagactcacctaggaggaggcactcacctaggaggagggagtcaccaaggaagagagactcaccaaggaggagagactcaccaaggaggagggattcaccaaagaggaggagggactccccaaggaggagggataggtcaaaatcaaggtcaccttcaagaaaacatgacacttctagacataaaaaagaacatgacagatctcggtccaggtctccccactcaagggatcatcacagacgatctccaagaaggcattcaccaagacgcagatcacccccagccagtcatcgccatcattcaccaagaagacattggtcaccacctgccaacaggaagactggattgggtaagcctggaaagaatctctttattgcaggatttagctatgccaccactgagcgagatttggagaagaaattttgcaagtttggacgtgtaacaagtgcacgtgttgttcgtgataaacgaactggagattcccgtggctttggattcttatccttggataaggatgaggatgctgatgcagcaatccgtgcttgtgacgagactgagtggaatggaaggatcattcttgtggagaagtcaaaagcacctgcatggtgaatcttccgctttgggggcgcacacgccattgttcgagagggatttcattgcttcacctttcacagattttaccattcagaaaaaaagaaactaccggtatgacatactcggtacatgtcaaagttcacccgaacctggcttttgatgctgtactaggagtaagagtattaaataatgcacttccttgctgatagttgttgaaagaataagatgtaacgttgcaccttagcttgtttcagggccctgctgctgataagagggacttacgacttagtggtacttttagtgtctgcaacctctacacgtgaaatgtgatacgtgcctgttcgtgagctgtcagttctcttcttcaccttcgtctcgcgcccactgaatactgatggcatgaacggattccgggagactcaagctttatggtgttgttgcgactcaagggttatgttagcagttcaataatctgcatattagcttttcaatgttgtgcatcctctgaatgagggtttggaaaatgtcctatatagtttgtgttttggattccagatgttgtttaattatggtcacgacacgacacctatgccccatctgttgactgttggtgatgttttttttcctgatgacaaaaaaaaaaatcctgtgtttttgcccccggttcttg

SEQ ID NO: 48569 - DNA, 474 bp, Zea mays
  Clone ID: MRT4577_144300C.1
atggcagatgacaaggatgtctatccgctcaccggcaatgacgaccttcacgcggcagggcttgtccctgatgatgaagacgacatttggggagacgttgctgccttgctcggcatcgatgccagctctgctacgatcgatgtcgacgtcgacgacagtggtggagggccgcgaaggcaaccgagaatctggtcggctctagcagcaccgatggtggtactggtacatcggttggagtatgatcttattgttgctcgaactaaattatgttggttgattactaggcttgaccttccattagatatgtggtatggcaatgcgaaggaggacgataatagtgttgttagtcattatgttaatgctaattgggagttacagaaaagggtgattggtcttattaggcttatagaggttaaacatactgttgaaaacattgttgaaaggattgttgttgtagttaaggagtattgttga

SEQ ID NO: 48570 - DNA, 445 bp, Zea mays
  Clone ID: MRT4577_144301C.1
ccatgactgcatttatctgcttgcgtaagcctgtgctttactgtatttggtcacacaggcacacaatcacattcaatatgtattttgcacttagtaaccaggttcccggatcaatgagatcgaggaacgggaacatggtacatggtacgctactaaaactaggttttaacactacgggatcgagattgttcccacgttcctggaacgaggaacgtggccgcgtttccagttcccggttactaagattttgcatgctgacacaagcttggtatttctaatttgcaataatagcaattatgacgtgatctagtgagcattgtgctaagactacaaaataacgagtagatttactttttaacgtggataatggtgcttttaccatgaggaatcaggttgtcccttgccttctttgagtgagattggtacaggaatacaggatgcatgg

SEQ ID NO: 48571 - DNA, 238 bp, Zea mays
  Clone ID: MRT4577_144302C.1
cggctcgagatcacctccttcccacgcagcgagaggatgaaaccacgacgcggatatacacagacgtagtcagctagccgcttctacctccctctccccccacgactgcgcgctgcagcgagaactcgttcctgctggggaactgcgccggcgtgcatgggaacgccgatatcaacacttccctcagtgcgcccaattcctcatggaccgccggctctcagagcgtcacaagaacgcg

SEQ ID NO: 48572 - DNA, 217 bp, Zea mays
  Clone ID: MRT4577_144303C.1
ggaagctgccagcccagttcacccctaatgatggtgtgagatgtgccttctccttcaccaggatggactcttctcggctcaggctctgctggtggaaagcgattcactgtataaactttttcttatgaaaaatatggcatcaaccaccatggattactacaagatccatttgcgcttctgggagcagaacagccattgcggccccaggaggggaact

SEQ ID NO: 48573 - DNA, 712 bp, Zea mays
  Clone ID: MRT4577_144304C.1
gggggggggttatgcaatttaattgaaagcaaaaccaaaacaaaaacaaccggccaaaagcggacggcgggaaaaggggggcccagcccggccccaggccgaccaggggcccccccgagcccacaaggcccgaggaaaccccaagaaaatcttgctaaaaccaggggcaaccaggggcccaaaagggcccccccaaaaaccgggcacggcaggggggcgggaggggggcaaaaaatgaccgggggaaaacggggggaactagcggggaaacgaaggcggaaggaaaccggaaaacaccaaccccgggaattacccggggaaaaggggggccaaaagaaaatcgaaaaaaacccaccccccacccaggagcggacagggggtaaaaaaagggcaaaaaccaacaaacccccgggcccccaaaaggcagggagaaaccggggaagccccggcgggacccggccggcccccgggggggcccaaagtaggccaagagaagcgggaaaaaccgggccccagcggggacgggggaccgggagcaacaaaaaccccaaaccaccccaacaacaaaccgggaaaaagggggagcagggggccaaaacggacaaacccaacagcggcgacggtaaaccccgacacgggaacaaggagcaaaaagaaaaaacggggaggggggggaggcccaaggggcccaggccacaaacacaaaaagacc

SEQ ID NO: 48574 - DNA, 201 bp, Zea mays
  Clone ID: MRT4577_144305C.1
gcgcaccacggccgaggcgaggcggcggtactcgaagtagctgaggccctggagttccttatcgcgatcgccgccgccagtggtcaccctaccacaacgaccgcggccgggaccgtgaccgggtcctgcccgtccgtagcggcgggggcgcctggtccgatgacgacgacgacgacagggaactttgattttgtagctacg

SEQ ID NO: 48575 - DNA, 361 bp, Zea mays
  Clone ID: MRT4577_144306C.1
aaaaaaaggaaaaacccccggaaaaaccaacccggggtactagctagcacacaacggctagctaaacagtacaacgagcaaagggggacgcaatataccacgggaaagctaaaacacagacagcaaaggcaaaaaagctgctagcttgaccgccgccggaacaagcaaaacatctgaacaaccgcatccacagaagaaaggccactaaaaaaacttacatcgaagtaaacaacccgaaccgttcaccggacggggaaacaagggggaccaggaagccaaaccaagggctgaaaccaaaaggcgaaccgcccccaggctggaggaagccattcacaaaaaaaaacggcgcgcaaaaaacaac

SEQ ID NO: 48576 - DNA, 312 bp, Zea mays
  Clone ID: MRT4577_144307C.1
tcacaaaaacccacaaaggggggatattaaaacttttttcccccccacacccccaaaacagctcaacaccatctccccaagctcacaagccccataactactttcttccacaacctctcaccagcggtgctaccgatgtcaaaacccaatactcaaccctacaggatccaacacgcaatcgcagctggcatctcacccttatcacccttgcacctccaacaatcatcaaccctattacagcaggtaccctaggagcatttaaagtcacaaaacatcatctcacaacaactacaacaacctgggctaacaaac

SEQ ID NO: 48577 - DNA, 798 bp, Zea mays
  unsure (1)..(798): unsure at all n locations
  Clone ID: MRT4577_144308C.1
cagcgccctcggcacgaccgccggattcgcctctgggtggggttggttttgtctcccccaccaccctacccacccctctcctctcctccaggcttggcttgcctcgcgccgtgtgtccctccaccgcccgccatgccgacgaggcttgccccccaccgccgatcgcacacggtcatatgattgcaatgaatcctgacatggtactactgtcttggaaacaaatggagaatggaagtggtgcggttgtaccttctaattcttcagataggtccgacaggtctgataaacctttggaccaaaagacaatgcgacggcttgcccaaaatcgtgaggcagcaagaaaaagtcggctgaggaaaaaggcatatgtgcagcagctggagagcagtaagctgaaacttgcacaactggaacaggaactccagaaagctcgccagcagggaatcttcatttctagctctggagaccaaacccatgccatgagtggaaatggagctttgacttttgacatagaatatgctagatggctagaggaccaaaataagcagataaatgagttgaggactgcagtgaatgctcatgcaagtgatagtgacctacgacttattgtagatggcataatggcacactatgatgaaatattcaaggtcaaaggtgttgctgcaaaggctgatgtgtttcatatactttcaggcatgtgggagacacctgctngaaggtgcttcctatggcttgnnggttttcgtccatctgagcttttaagctcctagcgaatcacctcgagcctctaactgagca

SEQ ID NO: 48578 - DNA, 574 bp, Zea mays
  Clone ID: MRT4577_144309C.1
ggttcataacggtacacatagacaagtccactagaacagcccgccagaatccattgcttgtgcattataaatttagccgaagtaacttctctccccttgatagcaataggtttctctatccgtgtcttatagttccatatacgataccggtccccttcttgagccatcattatccatggcattgttggatgcacatctaagccccacggtaaccttgctttgtgtatgatctcggagtcagctacgagaacaacattcagctccatggccggttgcagaatttggcctgtccttgttccatcgaacatgtcataagtgacatctgcgctcgttgtaccctgaaccacggtagtgcccttcacatagactatgtcgtcgacggggtctgctggcacaggctctcgtcgtgcaattcttgttataacaacttgccgcattgactgtggtgatagaacttctatgttcggcactggaatgtaatttgctgtatggttcaatgaccacatacagaatgccacatggtgatctgtaacgttacggatctctagtgtgcttgacacctcttgggcaaccg

SEQ ID NO: 48579 - DNA, 2543 bp, Zea mays
  Clone ID: MRT4577_14430C.1
tgggggtattgaagatggaaattctgcatcagaatatattgacactcaaggctatgagttatcggctgatgcacgggcccaagcagatataaaatttacttatgttgtttcttgccaaatatagggactacttaagcaaacaaaaccactttttgccgcagatattgctctcctactgcaaagaaatgaggctcttcgggttgctttcatacacgaagaggaaatcatatcaagggacgcgtgggctacaacaagagagtattattccaagcttgtgaaggctgatgttcatggcaaagaccaagaaatatactgcattaaattgcctgggaaccccaagcttggtgaaggcaaacctgagaaccaaaaccatgccataatcttcactcgaggagatgcagttcagacgatcgatatgaatcaggataactacttggaggaagcaatgaaaatgagaaatttacttgaagaatttcataatgctcatggaaaacatggcatacggaagcccacaatcctaggtgtgagggagcatgtattcacggggagtgtctcttcgctggcgtcatttatgtcgaaacaggagactagttttgttactttggggcaacgtgttcttgcttacctcaaagttcgaatgcactatggacatcctgatgtttttgatcggatatttcacataacccgaggtggcattagcaaggcgtctcgagtgattaatataagcgaagatatatatgccgggttcaattcgactttgcgccaagggaacatcacacaccatgaatatatccaggtggggaaagggcgtgatgttggcttgaaccaaattgcactatttgaggggaaagttgctggaggcaatggtgagcaagttctcagccgagatgtgtaccgtctgggccagttatttgatttcttcaggatgctaaccttctttttcaccactgttggttattatgtctgcacgatgatgactgttctaactgtgtatatcttcttgtatggaagggtttatctggcactctctggccttgactactcaatatctcgccaagctaggtttttggggaacactgcactagatgcagctttgaatgctcaatttttggtccagattggtatttttacagcagtgccgatgataatgggtttcattctggagctggggctgatgaaggctgtttttagttttattacaatgcagctccagttctgttcggtgtttttcaccttttcgcttggaacaaggacacattactttggtagaacaatccttcatggcggtgcaaagtatcgtgctactggaagaggttttgttgttcggcacataaagtttgctgaaaattataggctctattctcgaagtcactttgtcaaagcgcttgaggttgctctcctcctgatcgtttacattgcatatggatacacaaaaggcggttcatcttcatttattctgattactatcagtagttggttcctcgttatgtcctggcttttcgcgccttacattttcaacccttctggtttcgagtggcaaaagactgttgaggactttgatgactggacaaactggttactttataaaggtggagttggtgtaaagggcgacaacagttgggaatcttggtgggatgaggagcaggcgcatatccagacattcagaggacgtattcttgagacaatcctcagccttagatttctcatgtttcagtatggcattgtgtacaagcttaaaattacagatcataatacttctcttgcagtttacggcttctcatggattgtactctttgttatggttcttcttttcaagctttttactgcaactcctaggaagtcgacagccttgccgacttttgttaggtttctgcagggcgtccttgctattgggataattgcaggaattgcccttcttatcgtgctcacatcattcactgttgctgatttatttgcaagtgcacttgcttttatagcaaccggctggtgtgtcttgtgtctggccgtaacatggaagagggtagtgaaagtccttgggctatgggattcagtccgtgagattgcaaggatgtacgatgcaggaatgggagccatcatctttgtgcccatcgtcgtcttctcatggttccccttcgtgtcaacattccagtcacgtttcctcttcaatcaagcgtttagtcgaggtctggagatctccctcatccttgcagggaacaaggcgaatcagcagatttgaaaggccctgccgcatccatcgtatttttctgttgtatattctgggaattactgagagctgcttagttagtttgaacaatttaatgagctcgatttgaatgacaaccttctacataattgcccctgtaatttgtacactaattatgcggagaggcagctacggcagtagagatgagctgatgtatgtcgatttgatcttaaccaaacctctctttaaggctacgacggttcagtaggcctgcactagtatgttgcacccatccacgtgacatggcatcttcattaaaaagaaaaaaaaaaaaaaaaaa

SEQ ID NO: 48580 - DNA, 425 bp, Zea mays
  Clone ID: MRT4577_144310C.1
ggccgcccttttttttttttttttttttttttttttttttttttttttttttccaaccgagccgggatcctccctttgcgttttataacttacaaaaaacaagctcgtataataatattattacaatatagtacttagcaccggggaaatagagtcgaaaacaagagacaacccgaacggttgaagcatgatcctccgttcccgcctatgactacaagccgtccggggagaaaacaaaggctccaccgggatgccgtcgttttttgatcggacggccgaaacattcttgggcggggccggccctacacgcctgcactgcccttggtcaagccgggcgacgacgaggagatttgaagaagcgacagcggtgcggacggaagcgaggaaaatttgaaaaggtgatgacacggagccgagccgagcca

SEQ ID NO: 48581 - DNA, 753 bp, Zea mays
  unsure (1)..(753): unsure at all n locations
  Clone ID: MRT4577_144311C.1
agtccgtctctccgtcctctcctccccaccctcaccctgccctcgcgcccgccgccgcgcacacgccaggtcctccttccgccgttaacaagcacgctccatttccaactaattctctcttacccttccgcctcgctcttggggctgctgcaagtgcagatccgtctagactgactccgattggtttcggcttcttcgcttctccttctcgatggagaatggaagtggtgcggttgtaccttctaattcttcagataggtccgacaggtctgataaacctttggaccaaaagacaatgcgacggcttgctcaaaatcgtgaggcagcaagaaaaagtcggctgaggaaaaaggcatatgtgcagcagctggagagcagtaagctgaaacttgcacaactggaacaggaactccagaaagctcgccagcagggaatcttcatttctagctctggagaccaaacccatgccatgagtggaaatggagctttgactttcgacatagaatatgctagatggctagaggaccaaaataagcagataaatgagttgaggactgcagtgaatgctcatgcaagtgacagcgatctacgacttattgtagatggcataatggcacactatgatgaaatattcaaggtcaaaggtgttgctgcaaaggctgatgtgtttcatatactttcaggcatgtggaagacacctggctgaagtgcttcctatgggctggngggttttcgtccatctgagcttttaaa

SEQ ID NO: 48582 - DNA, 1928 bp, Zea mays
  Clone ID: MRT4577_144312C.1
accccgccgggagcaccaccaccaaaccgattgcacaaggccacgcggcttctggaagcttccttcccttgccttgccttccctctcaacccaaatcgccacggctcctccgcccgcagcgccctcggcacgaccgccggattcgcctctgggtggggttggttttgtctcccccaccacccacccacccctctcctctcctccaaggcttggcttgcctcgtgtcgtgtgtccctccaccgcccgccatgccgacgaggcttgccccccaccgccgatcgcacacggtcatatgattgcaatgaatcctgacatggtactactgtcttggaaacaacttccaccaacggtcgatcctgtgaaacactaagacacccgttgccactggaaaggagagagcaaagtgatttgctgtctcctggcgatcgttgctcgtgaggcctagtgatggcagatgctagctcaaggactgacacctcaattgttttagacgacaacgacaagaatcataggatggagaatggaagtggtgcggttgtaccttctaattcttcagataggtccgacaggtctgataaacctttggaccaaaagacaatgcgacggcttgcccaaaatcgtgaggcagcaagaaaaagtcggctgaggaaaaaggcatatgtgcagcagctggagagcagtaagctgaaacttgcacaactggaacaggaactccagaaagctcgccagcagggaatcttcatttctagctctggagaccaaacccatgccatgaagtggaaatggagctttgacttttgacatagaataatgctagatggctagaggaccaaaataagcagataaatgagttgaggactgcagtgaatgctcatgcaagtgatagtgatctacgacttattgtagatggcataatggcacactatgatgaaatattcaaggtcaaaggtgttgctgcaaaggctgatgtgtttcatatactttcaggcatgtggaagacacctgctgaaaggtgcttcctatggcttgggggttttcgtccatctgagcttttaaagctcctagcgaatcacctcgagcctctaactgagcagcaaatgctgggtttgaccaacctccagcaatcttcccaacaagcagaggatgcgttgtcacagggcatggaagcactgcagcaatctttggcagagactttggctggatctctcggtccagcaggttcttcaggaaatgtggcaaactacatgggtcagatggccatggccatgggcaaactcgggacgctagagaattttcttcgccaagccgacaacctgcgacagcagacgttgcatcaaatgcaacgtatcctaacgatccgacaggcttctcgtgctcttcttgcaatccacgactatttttcacgattgcgcgctttaagttctctgtggcttgctaggccacgtgaataacgaagggccgtcagtattttgagttccctctgccttacggtgctgctgcgtcgttcgcagcgatgcatcacagatctttggtggtactgtttttgttgtacaattacttttggccgctgcttggtccaaattgtactcaggtgggtgtacaagtaggtcaatataatcctgtaagttatggtgatttatgggtgtgttagcaatgcaataataattagagagggcaggatcagggtttctgttgtttgtactggttagagatttagtcctaatgtaacttcctgggacatggggggcggaatgggaagagagtaacaagaatcttcctttggttactgtagtatatgttggtattgttgcatcccatttgctcattttgctgttaggagaatgattattctgtccaataaaaaaaattttgagtaatgttgtttgtaacccccacatgattatggatatgactgctagttccttccc

SEQ ID NO: 48583 - DNA, 845 bp, Zea mays
  Clone ID: MRT4577_144313C.1
tgggtacctcgaggccggccgggacgtcacttcctcccagtccgtagcatccacccagctccctgcatcttccatggtcgcttctccagcgttcctccagctcatctaggttcaaccatcgtccttgttccttctgccctggacgttggtttggagctcgttagccatggtggccgcccacgcgcacctcctctgtctgcgctcggtctgtggttctttgcatcaccggaccgcaccagtgcttgtccatgtttccctggtggtcggcgttcgctcggaccgagctccggcctccggctacactcaccagccacgctcgctctgcgaccacctcgtcgtgtctcattgtcggctcttcggcaactctgtccaagtaacaacaccagcctccctggcgctcgtctcctcgtccagcgcccctcggttcctcgacctcgctgcgcggtatcgctgtctctgctcacccctgtcgccgtgcagctgccgggtcgtcgaacactgctctcagctcgccatgggctcgccgaactcgccccatagcgtctcaatcctcccctacgccagcatgccaagtcactgtcacgggaatccgccttaaagcactgttgtgttcctcgtccgccgtgctttggagccgcgcggtcgacctccatgcttgttgcgctcatgttgcagtttgagagaagatccaaagttgtttggtagagaagaaagcgaagccgcacaatcgacgacaatcccgaacgtaaattcatcaacgttctcacgaatattgagtcgcgtttgatactggtgagctgatttgctacttttgctatgggttagataaatagattaaaggatat

SEQ ID NO: 48584 - DNA, 361 bp, Zea mays
  Clone ID: MRT4577_144314C.1
ggtgattgctcgtgagttgaagatagaagagacaccggtctccaaagtcatgacccgaaaccctgtatttgttctcgcggacactcttgcagtcaatgcgttgcaaaatatggtgcaaggtaagttcaagcatctgcctttcataaaaaatggcgaggtcattgcaattctggacatagccatgtgcctatatgatgctagtgcacagatagtaagggccgcggagaaagatatagcaattgcctctgacatcgtgtggcgtgaaaagcattagtgagcaggttttcctgatcctaacaattttattgaaacacttttagaacggatgcttaagccatgtctggctactattatctgttgt

SEQ ID NO: 48585 - DNA, 127 bp, Zea mays
  unsure (1)..(127): unsure at all n locations
  Clone ID: MRT4577_144315C.1
aatttctccaccctttacaccncccatcncatctcctcccttcctcngttcctcccgtttctgcctacttgcttcccacgccagggcccnanctccnacctaaggtttnctctctcgccgccgcccc

SEQ ID NO: 48586 - DNA, 705 bp, Zea mays
  Clone ID: MRT4577_144316C.1
ccggggacgtccatcacgcagcctcttggcctccgcgaccgtcccctcgcctcccctttcgaggagcgaggggctgtatgctgggcgccgtcgtccgtgtcccgggcccgatcctacctttcctgcccgggccgacgcgccctctcctccgccgccgccactacctcccgcccgagacgcccatggcctcggccaccccttgcgatggcggcaccgggaagcccgacgccgcgccggctcccacgcccgcgccaacgccgctgccgcccgagaagcctctcccgggcgactgctgcggcagcggctgcgttcgctgcgtctgggacatatatttcgacgagctcgacgcgtacgacaaggccctcgccgcgcacgcggcctcctcaggctccggcggcaaggacgactctgctgataccaagcccaaagaaggtgccaaatcctgaagtgcgcctctcatgtgtaatgacctcttctgctctgaactgaattagattgctggcgtctcaccagattcacatacgccggtaccaattcttagcactcgagacattacaatactcttgtgttcctgctgtgttatatgctagattaagatgctttatcaattcagcctccttattgtgtaacaggaggaagttatgaaacaaaaaaaaaacgacagcaacggcgacagcaacggcgacagcaacggcgacagcaacg

SEQ ID NO: 48587 - DNA, 593 bp, Zea mays
  Clone ID: MRT4577_144317C.1
tttccattcccagctgtcgtgcagggcagcaggaggcgaggaggtcgactcgtcgcggacagccgaggccgatgacctctccagctgctggacgcaacacgggaacgcgcaaacgcctctcctctgtgcgtaccggactaccggtaccgcgcgttcagtttccacttccacccgcgtcgtccgtctctctccgctcagcttgaggtgtccggatcacggcggttgcaacctgcagccgcaccagcaagccgctgctccctctcctaaccggccgctgcagctgccatgtgggagtagaagtgccagccagcattgatttcttccaaccgcctcgatgcgatcgctcaccattccctccttgtaccgccatggcagaccagccggaggagatgccggcggcgccggccatccgcctggggcctccgcacccgtacctgaagacccacgggggcaaggtcgcgaggctgcaccggctggacgggccgtgctgctgctcatgccgcgctcgacgtcgggctcacctcgtcgagccgttccacgcttcgtcggcgaggacatgttcgcggaccttccgtacccgcttgagagcaaca

SEQ ID NO: 48588 - DNA, 145 bp, Zea mays
  Clone ID: MRT4577_144318C.1
caaaacaaatggccactgcgtataaaaacgatttgaatagtttgggatgatgcccgtaccagctcatcacaaaggtgggcaaataaaacttgcatgaaatttggaagctttacttggatacaaccaaaccaaaccaatccaaacc

SEQ ID NO: 48589 - DNA, 495 bp, Zea mays
  Clone ID: MRT4577_144319C.1
agccttaatcagacccgctgcgatattaaaaggaattaaaaagtttgtcatatgccgtgaataacaatatgtgaggatttacacacaacgaagggaggaacctaaaataaaacccaccatgagcaccaaaagtggaagtcaaacctcatagtctgtgacacaccatatttggggcgaatgccttttttaaacaaaggaagaacggtactacctcactcaagactgttttcaaagcatgcatgctccttttatcgcaaggaccactgtttgtggtggcactgtttgtcttgaggacatctgggcaagagagtccctgtttgcattatttgtaattgctggagtaacaggtcaaggggatacttaccatacaggttgaggacacctgaacattggcgatgcacatggagagttgatcgaattgaggtacgtttcaaaagggtacccttaactctttgagtggggttcacaaatggacgggtgggaaactttttgcct

SEQ ID NO: 48590 - DNA, 751 bp, Zea mays
  unsure (1)..(751): unsure at all n locations
  Clone ID: MRT4577_14431C.1
gcggtatacaccccggttgactagcgctgatttgctccctctccagctccggctcccagatcgagacggcggcggcggcggcgatgggcgcccacccttacgtgccggcgagcctggacctcccgggctacgtgccgctgcgcctcacccagctcgagatcctcggggcctacctcggcacctccctcttcgtcctcgtcgccgtctggctcctctccgggagatgccgcaggttgtccggcaccgaccgcctgctcatgtgctggtgggcgttcaccggcctcacccacatactcatcgagggccccttcgtcttcacccccgatttcttcaccaagaccaaccccaacttcttcgacgaagtctggaaggagtacagcaagggtgactccaggtacgtcgccagggacaccgccaccgtcaccgtcgaaggaatcacggccgtgctgaaaggccctgcctcgctgctcgcagtctatgccattgcatcacgcaagtcctacagccacatcctccagttcgccgtgtgcctcggtcagctctacggatgcatcgtctacttcaccaccgcctacttggacggcttcaacttctgggccagtccgttctacttctgggcatatttcatcggcgcaaancagttcatggggttgtgataccngttgctgatcgccacaagggagctgggaagaggatctgcgcagcgattcatcaaagtgagaagatcaagactaagtaattcctgcagcag

SEQ ID NO: 48591 - DNA, 378 bp, Zea mays
  Clone ID: MRT4577_144320C.1
aaatcactgtccttgccggtgtcgacaagctcccccatccaaagcaagcaccttgacacgtcactggtggcactcatggtgacgatgccgctcaagttggcataagcgtacgcggtgcaggagcagttgcggtcgcactcggcagcgcactcctcaaagcttctgttcctgacgtacaggaacttgtcgggcaccttcatccccggcaaggccaggaaataatgcctcctcccgccgccaccttcgccgccgccgccgcacgcctgcagcgcttccttcctccggcaccctctggagaagtcgcggaagaagccgtcttccggctcgaacccgtcgaggcacttgcactcctggacgccgccgtcgcgccccgtggcg

SEQ ID NO: 48592 - DNA, 236 bp, Zea mays
  unsure (1)..(236): unsure at all n locations
  Clone ID: MRT4577_144321C.1
ccaaaaaaaaaaagggagggggggggccngnaggatagggagcgagaccgaccagncgggngaccgccgccgcaacgngggcgaacccgncnccctcgacttttttttaccctttgagggctttccctttgtgtgggtcgcgggggcantctcttcccctcnttccctctgtaccatcttggagtaccgtgacttcgctggcgcgcggatcgactggaaggagactccagagcgca

SEQ ID NO: 48593 - DNA, 268 bp, Zea mays
  unsure (1)..(268): unsure at all n locations
  Clone ID: MRT4577_144322C.1
cgttcggagctaacgtccctaaactaaaaaatgaagtcttgctagctatggcctccgaacaacctgacgacacaaggagacaacaggtcgacgatgacgctcctggacaacgngattgaaactatagcatctgcattggcgacgctggtgccattcccttactattgagtgttctggagacatataatctgcatacccaggaacatgctgtgactgcacttgtgaacctctgtatacacgaagataactagacgagcattatatcatc

SEQ ID NO: 48594 - DNA, 422 bp, Zea mays
  Clone ID: MRT4577_144323C.1
ttttgcgtccgcccacgcggccgcaacattagctggtgttcccgatgagccgggagatactccagggaagtctgagcaaggcgagcggagggaggtgcctctcaatgatttgcaaagttataaatggagcttgaccatgcgccctttcttgctgatgacaacgatctgttacatcggaactgatacatttgtatattactaaccatgaattttgtctaccgatgtagacaagctatggaaatgagaatgtcctactgactaaaggatcttacaactttgggcttacagcacatatgggagaagattctcgaagaaacggctgccataaacaggctgccttgactgagatcttgattggagtcctactgctcggagttacatatgtcacagattttgctagcctgtggacaataaggcattgt

SEQ ID NO: 48595 - DNA, 1278 bp, Zea mays
  Clone ID: MRT4577_144324C.1
gacctgtagacagtactctagtctctagtccacgaaatcctcgtacttgtgagttgtgctggccctcgactagcgtgttgtagcacactagcgccacagtaatcgagagtgctctcccaggtcgaggtggtgtaggtgtttggcggagcagccggggcgttagaatctgaggaggagaagatggtggtgctggtggtggccacgacgtcggacccggcgtccattgggcccgccgccgccttcctcgccatgcccggatggtcccccggcccgcccatcgccgaggcgatggagagttttactaatgggaatgttcgattactgaagcatgagcgtagcattgtcgcagaggatgatcttgaccagcgatggcaggaagccactggagagtctgtttctgaggtcatattcctcagcaaacacactgcagtctccaaacgtccagcactcacagtgcatccaattggtgtgccacatctgaaggaggatgaaaccccaccccaaggaggaactcctggatgggcagcaattccaagtcctcgaattggaccttggctccggttgatgcaaaagatagctgtagaacaaggccttgttccagagtttgaggttacgcttgaggctactcaccatggaccagttaccagcacacccaccatgtttgttgagataggaagtacagaagaccactggggtcgacaagatgctgcacaggcaattgctctagttctatggaaaggtcttggtctggaggatggaaatgctgttggaacttggcagaggaattgtgaaaaggttctattaggtataggaggtggtcactatgttcctcgtcacatggatattgtcatcaaagatggtgtatgggtcggtcatttactctctggttactccttgccaatggacatgccgtcacaagtaaatgtaaagagttctgaagaggttgctggaatgtggaagcactccatcaaagtttcttatgaagcaacaaaggcagcatttcctggtggtgaagttatcgcacatcttgatcacaagagcttcaagggctggcagaagaatgctgttacatgcttcttgcaggagcagaacatcaggataggaaagcctagcgatttcctgtgacgtgctgcgacagcagtgctggacaggacaggtggaagaggctgtgaatgcttgagctgatttccctggtcacgccacgcgcgcgctgaataaatatgagacgtatagtaagactcgatccttaatgcggttcaagagcttgaatttgccgtt

SEQ ID NO: 48596 - DNA, 596 bp, Zea mays
  Clone ID: MRT4577_144325C.1
ggaaaggaaaatgttcctttgctattcctatttttgagagctacttgaataaaagggcatcagacgaggaaacatatgatcttgtgagggaaggtgttgttattttcactggtgctctggccaaacatctatcaaaggatgatcccaaagttcatagtgtcattgagaagttgttagatgtccttaacaccccatcggaggcagttcaacgtgctgtctcagattgtttgtccccacttatggtatccaaacaggaagagggtcaaactcttgtttctagactcttggatcggatgatgaaatgtgaaaaatatggtgagcgacgtggtgcagcttttggccttgctggtgtggttaaaggatttggaatttcttccttgaaaaaatatggcattgctgcaacattgcagaaaaatttggaagacagaatgtctgcgaaatctcgtgaaggagctttacttgggtttgagtgcctgtgtgagaagctcggcaaactatttgagccgtatgtcattcaaatgcttccattcctacttgtgtctttctctgatcaagtcctagcagtgcgtgaagctgccgagtgtgctgctcgggca

SEQ ID NO: 48597 - DNA, 564 bp, Zea mays
  unsure (1)..(564): unsure at all n locations
  Clone ID: MRT4577_144326C.1
ccacgcggcggagatctcgttcccgtccgacgcgcacatgggcgacggtgtggaggattatgcccatcaaattgccgagatgattgggttgcgtaatgagttcaatttcaatgaggctggagtcaggacagtccttgacatanaatgtggatttgggacctttggggcacatctttttgagagagatctcttgaccatgtgcattgctaactatgaagcatcaggcggccaagtgcaaattacactagagagagcgttcctgcgatgattgggtcatttgcgacgaagcagcttccatatccctatctttcctttgatatggggcattgtgcgaaatgcgatatcgaatggggcaaaaatgatgggattttcttacgtgaagtgaacaggcttttgaggcctgatggggattttgtgtggacatcaaatttgaatacacatagaggcttgcgtgacaaagaaaatcaaaagaaatgggcagcgcattcctgactttgctgaggggctttgtggggagatgctgtgacaacaagatgagacaattgtgtgggaaaagacaaataa

SEQ ID NO: 48598 - DNA, 1119 bp, Zea mays
  Clone ID: MRT4577_144327C.1
gccctcaacagggcaacggcgcccacgggcgtcaccgtcgtcaagtcttttacccaaaaagcccctagcacaatgtcaggccaagaccctgatcaaagcaagcgacctccgacatcgtcattgtcctgaaaccccacataaacccttgcagaggggcatcgacgcgccgactgcgcagcagccgcacacctccgtcggccaccatcccctctgttaaggcacacagaaaccgagcaccaccgagccgtgagcaacacactgccacgcaccggaaccgttgccggccctggcagacgtggccccgaagcaagcagacgctagacgtgagtgtcacgcaactcgccgccaacgacaaatggcgccgcacccccgtcagtcagatctgacaggagcagctgcgacgcggcggatctaaggtgctggcgagcgcaccacagcaggcgccgcaggggccaccccgctggcccaccgccgctccaagccgacgcatccatggccgcgcgccgagctaacctgcggcccgccaaacacgccgttgtgcctgcccccggcagcgacaccctcgtcatcctcctcggccggatccgccaagatgccggcgccggaacgtgcccacgggaagggaggtcggagcacagatgggcaagccgagcaccaacccactgccccagatctagcccgcgcatctcactggcgccagcagcaacacccgcaccaccagcccgccgctcaccaccagcaccgtcggaccgtccaccacagccatggaagacgaggaaggccacgaaactggtctccaaccgactgtctgccaccggaaagcgccgccgggagctgccgcgccgcaccaccaaagacgcccccaccccagccatggaggcgagatctgcgccagtgccggactaatccagacaagggatctcgaagcaggcccccacgggcaccggcgaaaaggacccagcagcacgcacatcacccgccgccgtccttgccctctgcgtgggcatcccagccacggtctcgggcggcggcgaggacggggaaggccggcgatggagggctggggcggcaggtgcaggtccgcccgtgccgcccctgggcggccgacgcgggggagac

SEQ ID NO: 48599 - DNA, 418 bp, Zea mays
  Clone ID: MRT4577_144328C.1
taccctcgaggccttggccggccaccaccacacaagaagaggcccccagccagccagtcccagctctccactcgagaaacctccagtccagctccacccttcgtccactccagacttccagaggcaccacacacaccatggctcccagcaagcttgcggtggtcgtcgccttggtagcgtctctcctcctggtcaccaccagcaacaccaaggctgctccgggcacctacccaccacgggatcctccgccgcaccagatcgtcgaccccgccaaagactgcgggggcgcgtgcgacgtgcggtgcggcgcgcactcgcggaagaacatctgcacccgggcgtgcctcaagtgctgcggcgtctgccgctgcgtgccggcgggcacggtcggcaaccagtagacgtgcggcaagtgcta

SEQ ID NO: 48600 - DNA, 685 bp, Zea mays
  Clone ID: MRT4577_144329C.1
cgaggggccggccgggagtccaccaccacacaagaagaggcccccagccagccagtccacagctctccactcgagaaacctccagtccagctccacccttcgtccactccagacttccagaggcaccacacacaccatggctcccagcaagcttgcggtggtcgtcgccttggtagcgtctctcctcctggtcaccaccagcaacaccaagcttggcctgttcgtgctcggccaggctgctccgggcacctacccaccacgggatcctccgccgcaccagatcgtcgaccccgccaaagactgcgggggcgcgtgcgacgtgcggtgcggcgcgcactcgcggaagaacatctgcacccgggcgtgcctcaagtgctgcggcgtctgccgctgcgtgccggcgggcacggccggcaaccagcagacgtgcggcaagtgctacaccgactggaccacgcacgttttgtatgatccgaccccgtcggcgtagatgtgcgagcctgtagctagtacttctagtgtatctttgtgttgacgttgatgtgctctgctgtttgtttgttgctagtacttctagtgtatctttgtgttgacgacttgacgttgatgggtctgtgttcctgtgtaaaaaaaaaggagtgtgcgatgcgtttcccgtagcagtaaaatccatctgggttggacc

SEQ ID NO: 48601 - DNA, 269 bp, Zea mays
  Clone ID: MRT4577_14432C.1
gtggtatataatagatcaaggttctgacccaccccaaatacaaaaagcaccgcaaatcatatcaaaaattgcacattggcacacatgagaatatgcgttccactatgcataccaaaggagcacatattccggttcttcacgatctgggcatgaattttccgattcagaactgtgcatatatcaatataggcccctagtactaccacagaagccagcatctggatgctagcatcaatggatgactcaaggttgcacctcaggctaacatt

SEQ ID NO: 48602 - DNA, 286 bp, Zea mays
  Clone ID: MRT4577_144330C.1
cgcacgcatccgactacgcgtccagcactcagcctcacggtcacgtgtgcagcgctgacgcctgcggccctacgccaggtgtccagggcatctccggccgattcgccggccaccaacagtccagaacatcaaccgagatatgcactgactgtggtatccgggggacgaactctgccggcagcccaatgtggtggaggaccaccagtggtcgctcatgtcatccacgctggcagatatcaccacgtccacgggccagaggaccaaccagctcgacgacccaagtatg

SEQ ID NO: 48603 - DNA, 1012 bp, Zea mays
  Clone ID: MRT4577_144331C.1
ttgggcacattgatccaacccagatggattttactgctacgggaaacgcatcgcacaccttttttttacacaagaacacagacccatcaacatcaacacaaagatacactatagaagtactagcaacaaacaaacagcagagcacatcaacctcgtacatctaagctagatagctacaggctcgcacatctacgccgacggggtcggatcatacaaaacgtgcgcgccagtgtgggcagtggcgcgcccgccgcccatggactcatgctgctctcatcaaggacaaggagtcacgggcacttggtcttgttgccgtgcgtggtccagtcggtgtagcacttgccgcaggtctgctggttgccggccgtgcccgccggcacgcagcggcagacgccgcagcacttgaggcacgcccgggtgcagatgttcttgcgcgagtgcgcgccgcaccgcacgtcgcacgcgcccccgcagtctttggcggggtcgacgatctggtgcggcggaggagcccgtggtgggtaggcgcccggagcagcctggccgagcacgaacaggccaagcttggtgttgctggtggtgagcaggaggagcgacgctatcaaggcgacgaccaccgcaagcttgctgggagccatggtgtgtgtggtgtgcctctggacgaagggtggagctggactggaggtttctcgagtggagagctgtggactggctggctgggggcctcttcttgtgtaggggcccggagcagcctggccgagcacgaacaggccaagcttggtgttgctggtggtgagcaggaggagcgacgctaccaaggcgacgaccaccgcaagcttgctgggagccatggtgtgtgtgttgtgcctctggacgaagggtggagctggactggaggtttctcgagtggagagctgtggactggctggctgggggcctcttcttgcgtggtggtggactggcgaaggccgaagctggccagggttaaatagccataatagtgaatgtgtct

SEQ ID NO: 48604 - DNA, 1290 bp, Zea mays
  Clone ID: MRT4577_144332C.1
atggcgtcccatattgttggataccctcgcatgggccccaagagagagctcaagtttgccttggagtctttctgggatgggaagagcagcgccgatgatttagagaaagttgcctctgacctcaggtctagcatctggaagcaaatgtcagaagctgggatcaagtacattcccagcaacaccttctcgtactatgaccaggtccttgataccacggccatgcttggtgctgtcccagagcgctactcttggactggaggcgagattggcttgagcacctatttctcaatggccaggggaaatgccactgtccctgctatggagatgaccaagtggtttgatacaaactaccactttattgtccctgaacttggcccaagcaccaagttcacatacgcttctcacaaggctgtttctgagtacaaggaggcaaaagcggcttactttgcagccaatgctgctgctcaggcctcaaggagatcatcacctagagtgacaaacgaggaggtccaaaaggctgcagctgctttgaagggttctgaccaccgccgtgctaccactgttgctgctagattggatgctcagcagaaaaagctcaaccttcctgtccttcccacaaccacaattggttcattccctcagactgtggaactcaggagggtccgtcgtgagtacaaggcaaagaagatctccgaggaggaatacatcagtgccatcaaggaagaaatcagcaaggttgtcaagatccaagaggagcttgacattgatgtgcttgtgcatggagagccagaggtgatccagattgatgaggcagctctaagggagggtctgccactgcgcaagtcagagcatgcattctacctggactgggctgtccactctttcagaatcaccaactgcggagtccaggacaccacccagatccacacccatatgtgctactccaacttcaacgacatcatccactccatcatcgacatggacgcagatgtgatcaccatcgagaactcccggtccgacgagaagctactgtccgtgttccgcgagggtgtgaagtacggagctggaatcggtccaggtgtctacgacatccactcgcccaggatcccctccaccgaggagatcgcggaccgcgtcaacaagatgctcgccgtgctcgacaccaacatcctctgggtgaaccctgactgcggtctcaagacacgcaagtacacggaggtgaagcctgccctgaccaacatggtctccgccaccaagctcatccgcacccagctcggcagcgcgaaatga

SEQ ID NO: 48605 - DNA, 574 bp, Zea mays
  Clone ID: MRT4577_144333C.1
aaaaaaaaaaaaaaaaaaaaaaaaaaaaaaaaaaaaaaaaaaaaaaaaaaaaaaaaaaaaaaaaaaaaaaaaaaaaaaaaaaaaaaaaaattttttaaaaaaaaaaaaaaaaaaaaaaaaaggttttttttttggccggaaccccctttggggggattttttgaattttcctttaaattggggggcttttgttttttttttttaggggcccatttcccctttttggggttggttttaaatttatttggccccttttttaaaaccccttttttgggaaaaccctgggtttccccaatttaatccctttggaaaaaatcccctttttcccagtttggttttttccaaaaaggccccccccttttgccttttcaaaaatttgcctaacttgaatggtaaatggccccccctttttgggggcctttaagcggggggggtttggtggtttcccccaaggggcccctttcttttgccaggccccttgcccccgcccctttggtttttttcctttccttttaagcccattttcggggttttccctttaagtttttaattagggggttccttttagggttcc

SEQ ID NO: 48606 - DNA, 1000 bp, Zea mays
  Clone ID: MRT4577_144334C.1
gatccaacccagatggattttactgctacgggaaacgcatcgcacactcctttttttttacacaggaacacagacccatcaacgtcaagtcgtcaacacaaagatacactagaagtactagcaacaaacaaacagcagagcacatcaacgtcaacacaaagatacactagaagtactagctacaggctcgcacatctacgccgacggggtcggatcatacaaaacgtgcgcgccagtgcccagtgggcagcgtggcgcccgcggcccatggactcatgctgctctcgtcaaggacaaggagtcacggcgcacttggtcttgttgccgtgcgtggtccagtcggtgtagcacttgccgcacgtctgctggttgccggccgtgcccgccggcacgcagcggcagacgccgcagcacttgaggcacgcccgggtgcagatgttcttgcgcgagtgcgcgccgcaccgcacgtcgcacgcgcccccgcagtctttggcgaggtcgacgatctggtgcggcggaggagcccgtggtgggtaggcgcccggagcagcctggccgagcacgaacaggccaagcttggtgttgctggtggtgagcaggaggagcgacgctaccaaggcgacgaccaccgcaagcttgctgggagccatggtgtgtgtgttgtgcctctggacgaagggtggagctggactggaggtttctcgagtggagagctgtggactggctggggactgggggcctcttcttgtgtggtggtggactggcgaaggccgaagctggccagggttaaatagccatagtagtgaatgtgtctgccatgcatcctgggcgcgcggtcaatgacagagcgccacacttgtgccgctgcgttggtctagtctctagtggtcgacgcgagagcggcagggcacagggcagggctgggtcatgggggctgtgcaggcgctgagctgcattccaccaagtgaccgtctgaccgaggggaggctgggagcttttt

SEQ ID NO: 48607 - DNA, 2810 bp, Zea mays
  Clone ID: MRT4577_144335C.1
gggaccctcgaggccggccgagtcccgtgttcatcatcgccagttcaccacccacctcccactcccagttcaccccgtcgtcctcggcgccaccactcctcgtcccccggcgctactcccccgctccacggtccaagggtaagcgcgcctccccaccgctcccttgctctatatagcccttcccactccaccgctcgcccattccttcgcttccgctgtctccccgcgcctcccggatcgcctcggcgcgcgaaagatggcgtcccatattgttggataccctcgcatgggccccaagagggagctcaagtttgccttggagtctttctgggatgggaagagcagcgccgaggatttggagaaagttgccactgacctgaggtctagcatatggaagcaaatgtcagaagctgggatcaagtacattcccagcaataccttctcgtactacgaccaggttcttgataccacggccatgcttggcgctgtcccagagcgctactcttggactggaggtgagattggcttgagcacctacttctctatggccaggggaaatgccactgtccctgccatggagatgaccaagtggtttgatacaaactaccactttattgtccctgaacttggcccaagcaccaagttcacatacgcttctcacaaggctgtttctgagtacaaggaggcaaaggcgctcggcattgatacagtcccagtgcttgttggaccagtctcatacttgctcctctctaagcctgccaagggtgtggagaaatctttctctcttctttcacttcttggtagcattcttcccatctacaaggaggttgttgctgagctgaaggcagctggtgcttcatggattcagcttgatgagcctacccttgttaaagaccttgatgctcacgaattggccgcattctcttcagcatatgctgaactggagtcatcgttctctggattgaatgtgcttatcgagacatacttcgctgacattcctgctgagtcctacaagaccctcacatcattgagtggtgtgactgcttacggtttcgatcttatccgtggagccaagacccttgatcttatcaggagcagcttcccctctgggaagtacctcttcgctggtgttgtagatggacgcaacatttgggctgatgatcttgctgcatctcttagcactcttcattctcttgaggctgttgctggcaagggcaaacttgtggtgtcaacctcctgctcactgatgcacaccgctgttgaccttgtaaatgagactaagctggatgatgagattaagtcatggcttgcatttgctgcccaaaaggttgttgaggttaatgcccttgccaaggctttggcaggccaaaaggatgaggtctactttgcagccaatgctgctgctcaggcctcaaggagatcatcgcccagggtgacaaacgaggaggtccagaaggctgcagctgctttgaggggatctgaccaccgccgttctaccactgtttctgctagactggatgctcagcagaaaaagctcaaccttcctgtccttcccacaaccacaattggttcattccctcagactgtggaactcaggagggttcgccgtgaatacaaggcaaagaagatcaccgaggacgaatacatcagtgccatcaaggaagaaatcagcaaggtcgtcaagatccaagaggagcttgacattgatgtgcttgtgcatggagagccagagagaaatgacatggttgagtacttcggtgagcaattatctggttttgcgttcactgccaacggatgggtgcaatcctatggatcacgctgtgtgaagccacccattatctacggtgatgtcagccggccgaaccccatgactgttttctggtccaagatggcacagagcatgacccctcgtcccatgaagggaatgttgactggtccggtcacaatcctcaactggtcattcgtcaggaacgaccagcctaggtttgagacatgctaccaaatagctcttgcaatcaaaaaggaggttgaggatcttgaggctgctggtattcaggtgatccagatcgatgaggcagctctaagggagggtctgccactacgcaagtcagagcatgcattctacctggactgggctgtccactctttcaggatcaccaactgcggagtccaggacaccacccagatccacacccacatgtgctactccaacttcaacgacatcatccactccatcatcgacatggatgccgatgtgatcacgatcgagaactcccggtctgacgagaagctactgtccgtcttccgtgagggtgtgaagtacggagctggcattggccctggtgtctacgacatccactctcctaggattccctccacagaggagatcgcagaccgcgtcgagaagatgctcgccgtgctcgacaccaacatcctctgggtgaaccctgactgtggtctcaagacacgcaagtacacggaggtcaagcccgccctgaccaacatggtctcggccaccaagctcatccgcacccagcttgccagcgcgaaatgaggtcgtttgatagctccatggtctgatagcgcggaatgagccagttgttttgaataatttgggtgttaccccctgttccatggtgttagtgttaggttagcctctcattggtgagatacgccgtttcaagatgtgttctaagtttggagtgtgtgttttcctttgggctatgtttctgggggtatgtgtgtgctttggttataaacagaaatgaaatatgcagtcttccaattgtatcaaaaaaaaaaaaaaaaaa

SEQ ID NO: 48608 - DNA, 345 bp, Zea mays
  Clone ID: MRT4577_144336C.1
caaaaaaaaaaacaaaagcgtttccccttttttttggataatccaaaagttcacagggccacaaattttttataggaaggggatgtttaacacaggttccccgcccctttaaaagggatccccaacatgcttcatagtttattacaaaagcgcaaacaacatagggaagaggttaatttcaatggttaaaggcgccgcaatagcattttgggccaagcccaggggattcatatcttaacttagggggcaaattccaggttttaaaattttttttgaaggaattttccaatcctggggacaaaccaagggcttaataatttcaggtttaagttttgaaccaaaggc

SEQ ID NO: 48609 - DNA, 1047 bp, Zea mays
  Clone ID: MRT4577_144337C.1
ggggatacaattggaagactgcatatttcatttctgtttataaccaaagcacacacatacccccagaaacatagcccaaaggaaaacacacactccaaacttagaacacatcttgtaacggcgtatcccaccaatgacacgctaacctaacactaacaccatggaacagggggtaacacccaaattattcaaaacaactggctcattccgcgctatcaaaccatggagctatcaaacgactcatttcgcgttggcaagctgggtgcggatgagcttggtggccgagaccatgttggtcagggcgggcttgacctccgtgtacttgcgtgtcttgagaccacagtcagggttcacccagaggatgttggtgtccagcacggcgagcatcttctcgacgcggtctgcgatctcctcggtggagggaatcctaggagagtggatgtcgtagacaccagggccaatgccagctccgtacttcacaccctcacggaagacggacagtagcttctcgtcagatcgggagttctcgatcgtgatcacatcggcatccatgtcgatgatggagtggatgatgtcgttgaagttggagtagcacatgtgggtgtggatctgcccacgcgtccgcccacgcgtccgcccacgcgtccgcccacgcgtccgcggaggtcaagcccgccctgaccaacatggtctccgctgttaagctcattcgcacccagctcgccagcgccaagtgagcacctttttttgcctttttcgtttccgaggagggcgtcgtcgatgccaatttgtttccaataaacagggctccccccctgtgccccccgttttgttgtgctccgtctgtggttaggttactagtttttttgatctcgcccccacgcggtacctgttttactatctgtttggtggtttttgaggcaagttgcccgtgtacttgtatcgtaaaaaccgagtgggacatttgcatcgtttcatctgccaaaaaaaaaaaaaaaaaaaaaaaaaaaaaaaaaaaaaaaaaactcgagaaaaggccgcggtacc

SEQ ID NO: 48610 - DNA, 2793 bp, Zea mays
  Clone ID: MRT4577_144338C.1
ggaccctcgggctggccggggatcacctttttataaatgaaacccacgaacccctcagatttcccgtgctcatcatcaccagttcaccacccacctcccactcccagttcaccccgtcgtcctcggcgccaccactcctcgtcccccggcgctactcccccgctccacggtccaaggaaagatggcgtcccatattgttggataccctcgcatgggccccaagagggagctcaagtttgccttggagtctttctgggatgggaagagcagcgccgaggatttggagaaagttgccactgacctgaggtctagcatatggaagcaaatgtcagaagctgggatcaagtacattcccagcaataccttctcgtactacgaccaggttcttgataccacggccatgcttggcgctgtcccagagcgctactcttggactggaggtgagattggcttgagcacctacttctctatggccaggggaaatgccactgtccctgccatggagatgaccaagtggtttgatacaaactaccactttattgtccctgaacttggcccaagcaccaagttcacatacgcttctcacaaggctgtttctgagtacaaggaggcaaaggcgctcggcattgatacagtcccagtgcttgttggaccagtctcatacttgctcctctctaagcctgccaaggggtgtggagaaatctttctctcttctttcacttcttggtagcattcttcccatctacaaggaggttgttgctgagctgaaggcagctggtgcttcatggattcaacttgatgagcctacccttgttaaagaccttgatgctcacgaattggccgcattctcttcagcatatgctgaactggagtcatcgttctctggattgaatgtgcttatcgagacatacttcgctgatattcctgctgagtcctacaagaccctcacatcattgagtggtgtgactgcttacggtttcgatcttatccgtggagccaagacccttgatcttatcaggagcagcttcccctctgggaagtacctcttcgctggtgttgtagatggacgcaacatttgggctgatgatcttgctgcatctcttagcactcttcattctcttgaggctgttgctggcaaggacaaacttgtggtgtcaacctcctgctcactgatgcacaccgctgttgaccttgtaaatgagactaagctggatgatgagattaagtcatggcttgcatttgctgcccaaaaggttgttgaggttaatgcccttgccaaggctttggcaggccaaaaggatgaggtctactttgcagccaatgctgctgctcaggcctcaaggagatcatcgcccagggtgacaaacgaggaggtccagaaggctgcagctgctttgaggggatctgaccaccgccgttctaccactgtttctgctagattggatgctcagcagaaaaagctcaaccttcctgtccttcccacaaccacaattggttcattccctcagactgtggaactcaggagggttcgccgtgaatacaaggcaaagaagatcaccgaggacgaatacatcagtgccatcaaggaagaaatcagcaaggttgtcaagatccaagaggagcttgacattgatgtgcttgtgcatggagagccagagagaaatgacatggttgagtacttcggtgagcaattatctggttttgcgttcactgccaacggatgggtgcaatcctatggatcacgctgtgtgaagccacccattatctatggtgatgtcagccggccgaaccccatgactgttttctggtccaagatggcacagagcatgacccctcgtcccatgaagggaatgttgactggtccggtcacaatcctgaactggtcattcgtcaggaacgaccagcctaggtttgagacatgctaccaaatagctcttgcaatcaaaaaggaggttgaggatcttgaggctgctggtattcaggtgatccagatcgatgaggcagctctaagggagggtctgccactacgcaagtcagagcatgcattctacctggactgggctgtccactctttcaggatcaccaactgcggagtccaggacaccacccagatccacacccacatgtgctactccaacttcaacgacatcatccactccatcatcgacatggatgccgatgtgatcacgatcgagaactcccggtctgacgagaagctactgtccgtcttccgtgagggtgtgaagtacggagctggcattggccctggtgtctacgacatccactctcctaggattccctccaccgaggagatcgcagaccgcgtcgagaagatgctcgccgtgctcgacaccaacatcctctgggtgaaccctgactgtggtctcaagacacgcaagtacacggaggtcaagcccgccctgaccaacatggtctcggccaccaagctcatccgcacccagcttgccagcgcgaaatgagtcgtttgatagctccatggtctgatagcgcggaatgagccagtttgttttgaataatttgggtgttaccccctgttccatggtgttagtgttaggttagcctctcattggtgggatacgccgttacaagatgtgttctaagtttggagtgtgtgtttttctttgggctatgtttctgggggtatgtgtgtgctttggttataaacagaaatgaaatacgcagtcttccaattgcatcaccatatctgcattgtcatgccctacttggagaggggaatgccatgtgctattgcacacatgatacatgtataca

SEQ ID NO: 48611 - DNA, 2875 bp, Zea mays
  Clone ID: MRT4577_144339C.1
tttttgggtacccctcgggccggccgggatggcaccgacggatttggcagctgggaaatgggatctcaccagatcccataagcgcgcgccacctaacgcagacactgcatcctctacaaatgaaacccctgagacagtcagacgtcccgtgctcgtcatcaccacccacatctcagttcaccccggcgtcgtcctcttcccccggcgctactctcccgctccacgttccaaaggaaagatggcgtcccatattgttggataccctcgcatgggccccaagagagagctcaagtttgccttggagtctttctgggatgggaagagcagcgccgatgatttggagaaagttgcctctgacctcaggtctagcatctggaagcaaatgtcagaagctgggatcaagtacattcccagcaacaccttctcgtactatgaccaggtccttgataccacggccatgcttggtgctgtcccagagcgctactcttggactggaggcgagattggcttgagcacctatttctcaatggccaggggaaatgccactgtccctgctatggagatgaccaagtggtttgatacaaactaccactttattgtccctgaacttggcccaagcaccaagttcacatacgcttctcacaaggctgtttctgagtacaaggaggcaaaagcgctcggtattgatactgtcccagtgcttgttggaccagtgtcatacttgctcctctctaagcctgccaagggtgtggagaaatctttctctcttctttcgcttcttggcagcattcttcccatctacaaggaggttgtttctgaactgaaggcagctggtgcttcatggattcagtttgatgagcctacccttgttaaagaccttgatgttcacgaattggcagcattctcttcagcatatgctgaactagagtcggcattctctggattgaatgtgcttatcgagacatactttgctgacattcctgctgagtcctacaagaccctcacgtcattgagtggtgtgactgcttacggttttgatcttatccgtggagccaagacccttgatcttatcaggagcagcttcccctctgggaagtacctcttcgctggtgttgtggatggacgcaacatttgggctgatgatcttgctgcatctcttagcactcttcagtctcttgaggccgttgctggcaaggacaaacttgtggtgtcaacctcctgctcactgatgcacaccgctgttgatcttgtcaatgaaactaagctggatgatgagattaagtcatggcttgcatttgctgcccaaaaggttgtcgaggttaatgcccttgcgaaggctttggcaggccaaaaggatgaggcttactttgcagccaatgctgctgctcaggcctcaaggagatcatcacctagagtgacaaacgaggaggtccaaaaggctgcagctgctttgaagggttctgaccaccgccgtgctaccactgttgctgctagattggatgctcagcagaaaaagctcaaccttcctgtccttcccacaaccacaattggttcattccctcagactgtggaactcaggagggtccgtcgtgagtacaaggcaaagaagatctccgaggaggaatacatcagtgccatcaaggaagaaatcagcaaggttgtcaagatccaagaggagcttgacattgatgtgcttgtgcatggagagccagagagaaatgacatggttgagtacttcggtgagcaattatctggttttgcattcactgccaacggatgggtgcaatcttatggatcacgttgtgtgaagccacccattatctatggcgatgtcagccggccgaaccccatgactgttttctggtccaagacggcacagagcatgaccgctcgtcccatgaagggaatgttgactggtccagtcacaatcctcaactggtcatttgtcaggaacgatcagcctaggtttgagacatgctaccaaatagctcttgcaataaaaaaggaggttgaggatcttgaggctgctggtattcaggtgatccagattgatgaggcagctctaagggagggtctgccactgcgcaagtcagagcatgcattctacctggactgggctgtccactctttcagaatcaccaactgcggagtccaggacaccacccagatccacacccatatgtgctactccaacttcaacgacatcatccactccatcatcgacatggacgccgatgtgatcaccatcgagaactcccggtccgacgagaagctactgtccgtgttccgcgagggtgtgaagtacggagctggaatcggtccaggtgtctacgacatccactcgcccaggatcccctccaccgaggagatcgcggaccgcgtcaacaagatgctcgccgtgctcgacaccaacatcctctgggtgaaccctgactgcggtctcaagacacgcaagtacacggaggtgaagcctgccctgaccaacatggtctccgccaccaagctcatccgcacccagctcggcagcgcgaaatgagtcagatttggtagatccatggtttgttgaacacaaaagccagcagggccatttgtttcgaataatttgggtccttactcctgttccatggcgttaggttagcctcattggtgttggtggggtacggcgttacgtgtccgtgttctaagtttggagtgtgtgtttctcttttaggctgtttttgttggggtttgtgtgctttggttatataaacagaaatggagtacgcagtcttcgaatccccaggggggggggggggggggggggggggggggggggggggggcccgggggggcccggggggggggggggggggggggggggggggggggggggggg

SEQ ID NO: 48612 - DNA, 769 bp, Zea mays
  unsure (1)..(769): unsure at all n locations
  Clone ID: MRT4577_14433C.1
gaagccgttaatcgttggcccaaaactagagaacatggtgaaatgaccaaaaaaaatactcacctggccgtgggggagcaagtcccgcgtcatcgacgagtgggcaatcgaaactgcctccctaaagttgttgaggatgcgatcgacgatctcaagtctcctatcaacccggtcagaggccgcctcgatgaggtgccacttctccgcctccatctcttccccttctgagcgcttgaggatgaagggggaggtcccatgacattctccaggtccaggatcagacagcgcgggtaatgcgatcctaggggaggaagaagtagcaatgattggcgaaggctggctccagggttcggcgaccaccacgagcaatgttgccccggacggtctgccctgccaccgcgatgactgaaggcaagaggactggcggcagtagaaacaaggagacagcttctgtatccgacgcgggagccccgcctgcagcgacctccatggcccatcggacatcctttgggctggacgtagctacgtctacgtgtgccctcgggagagccatgttagagatagctaggctccccaggcacttgtcaggcaaacgagtagttcgacacacctgcaccgngagaaagtgatcgccgcagcaccggacagacctattggataaaccgaaagagccgctctagccgcaacggntggtgtaggagcccagnaggcaagacgcccccctcgccgcaaggatcccatccttcacccatcctgtgtggcacatatg

SEQ ID NO: 48613 - DNA, 482 bp, Zea mays
  Clone ID: MRT4577_144340C.1
ttgggtacctcgaggccggccgggatatgctttctagattcgtggaggcgaagtgcaaaagtaagtaggccaggtaagccggagcccttatttgaggtctggctcgtttgatgcagattcagtgaaccccgctagctaagtagacgccaagtcgtatcgtactacatcgggatatcctatcctgtcatacgttgacgccgcggtcactatcgtagcggaaggacaaaccccccatgactgtaaatgaccattcagaaagtacggaacgcacgcctcacatatcatcggctgctccaaacccgaaatcccatttcatagtggacacgcgtgctccgagcggacgccctctgcactgggagacacgtacgacgtgcgggaagacttcgtgccgagccacaggagacttctagttgtcgcaacggagacgctgccaggctccactccgcgggggtcctacgctatctacaatgaagatcggaggc

SEQ ID NO: 48614 - DNA, 379 bp, Zea mays
  Clone ID: MRT4577_144341C.1
ataaatacatgcaagcaatacatgcggcagggggtgaattatacgtgttgtgggtagacactaagactcagaggaagcgaaacactcatgcaaaacgcgggcaatagaggacctaaaactacaactgaacgatgtacataaaacaacggctgccagagtcagccagaccccggaagcatcccctggggagacatcgcaccctgaggatgcaaatcacgctgaaagagaaagattggaaacaatgccgattgaagaactgaaagggaaaaagaagcgaacattgcttcccaagcaaggaaaaaacaacccacagttaatcctaactaacagaaacgtgcataaccctgaactagcaatgaccaccagacaagaacgctac

SEQ ID NO: 48615 - DNA, 402 bp, Zea mays
  unsure (1)..(402): unsure at all n locations
  Clone ID: MRT4577_144342C.1
ggccggggtgatcattttaaatccccattgatattttctttctcctgcactgccatccctaatgtaacaatataacctacaaccaaaattataatataacaactcaacttcccacaatcctccctctacaacacaataaaacccacctcattctatcataatatcattccctcttcacaaataaccctgcccaaaaccccaanccctcttctctntcntcctcctctccttacatcatccactaaatcnccaaatactacnatcctaacaataaaatctaccttactaataaaatctntaacctctctaaaataccttattacctcaccntatatttccctctatactatatatacaacccttttctccttaccaacaaaccaaatcacttccccaaatacc

SEQ ID NO: 48616 - DNA, 148 bp, Zea mays
  Clone ID: MRT4577_144343C.1
cccacgcatacgcggacgcgtgggtattttagctacacgttgttatcatatccacatggggtgccccacggtcgagtatataaagcctaggtggcaccccttcagaactatcgaccctattacttaaccacccacatcaactctctgc

SEQ ID NO: 48617 - DNA, 365 bp, Zea mays
  unsure (1)..(365): unsure at all n locations
  Clone ID: MRT4577_144344C.1
cggaatcccggggccgcccacacccttccgggaacctcctaactttccaccaattcctattgaaggtccaaaaagtaccaaaaagtcggggggccataaaaaatcgtgggaggcaccancctttatccacccttaaaccaaaaaccaaaaaccttctggagcctcccaggaccaaagtttcgataaactaaatgatttaccaccccttagtgttgttaattttagggaagaggaagaccagttcctgcctgcccttaaggaaaaaagccttgcctaacaagaagcccgaaaatttccaaaggaggaagaagaaattcttttcctacttaagggtccacttttaaggaaactaccaaaaatccttc

SEQ ID NO: 48618 - DNA, 325 bp, Zea mays
  Clone ID: MRT4577_144345C.1
accacgcattcaggtgttcttggcaacagtggcgagcatttatgccaaaactctagtgtctgatatacatgataccagttgtactctttgacacgcaaagatttactatgcaattgaccacctaacgaccagagttatccgcaagctttacaagtcgctttatcaaatctccacttgactgcagggaccattgattgatgctctgaatgacaataatcgtctatgctggtgcaacataaatttgggcttaagcatcgagatgatggctactggtcctactgatgcattctagcattcgcctacatactactcaatacatattgga

SEQ ID NO: 48619 - DNA, 459 bp, Zea mays
  Clone ID: MRT4577_144346C.1
cccttgggccctgggcaaaccccagggggcgcaaaaaaccccagaggggaaaaaaaagggcaaaaaaaaaacaaacaaaaaaaaaaagggggaaaaacaaaaaaagggggggggggcaaaaaatgggccccccgccaacaaaagggggcccccccccccccaactggggggcaccccccgcccccacggggggggggcccccccccctttccggggaaccccccggttgtacgggacccgcggggggggaaaagccccgaaagcccgctccccccccagaaaaaagaacccccccccctgggggggaaccacacccgcgggggggggaccaacttacggggggcggaaggaaccttcgggggggggaaaagactcccaaggggccccagaggtccggaagcgtacccttgacaggggaaaagggccctggaaaagaaaggagagcccggcaacccaagg

SEQ ID NO: 48620 - DNA, 143 bp, Zea mays
  Clone ID: MRT4577_144347C.1
gatccgagctctccatctacgacgcgttcagtcatggcgggaatggcaccctaggtgtctcagcttgatgctaagcactatgatcctaaaatgcatgagctgctgagcactgctgagactgaggaagtcctcactttatatga

SEQ ID NO: 48621 - DNA, 491 bp, Zea mays
  Clone ID: MRT4577_144348C.1
aaaaaaaaacattttatttatgccagaattttggggatttacaacggaaacctgttgattcacaagggtcaaaaaaaggggggggccgccgggtttgtcatctcctcacgggagcgggggttgtcctagtagcaaaacattgtttttttttttttttgagccctggcaatctccttggtggcgatgttcgcgagcagttccttttgcctgataagagccttgggcaaagccttttttgttacaattagttcagcttccaatgcatccacacgacgcacaggagggttaagcaacttttttttttcgcaagggatttcaaaagggtttttttgaagcatttggacctttttttaaagctttcccagcctttgcaagaccacggggaataggggggttttagcgaacccagggaatggcgaaggaggacggaattcctttttttggacggggtccggatacaatgtacagtagcttttttttgacccgccttt

SEQ ID NO: 48622 - DNA, 249 bp, Zea mays
  Clone ID: MRT4577_144349C.1
acaacagaaactactgcgaatgagcttgtattattcaaaattcaggtacaatcactgtgtctaccagaaattcaatcacccacagtcacaacattcgttgcatgctttcgagcgctttattgcataagcgatggattacacggctattgctgctatttttccactgattgtctttctcagagtcatgtcccctaaccagtccccgacttttaagaggcgcctagcctagccttcgaagccgtaaagggt

SEQ ID NO: 48623 - DNA, 582 bp, Zea mays
  Clone ID: MRT4577_14434C.1
ggggacgcaccgcgagcgcaagcaccatccgttgacagaagctgagcaagaagaactccacagcgtcgacatatggcggcaccagctcttcttttcggccgacagctgcatgggccaggccccgtgcagttctggtcgatctctcaggatcagtatggcgcaaagaaggtcgcgcccttagtacggcacaggccaacctacagcccaggcacccaaactggggccgacattaggtttggttccgcgactaaccgtccataccgtacctctatagaacgctcccatggaccactatggctgccacccgctgagtcattatgacccatacggcaccgggggctttatcgagccaaaatggtaggcctatcgcgaggagatcaaaaggcgctacgtcatgttaggggcggggggcgcaatcagctgatactatttttgcatgatctgcatgatgcacaatgataccatactatagcggtatatatacagtcgaatcacgaccaggggcaactacaattactgagaagactcctacacgctctactttatcataattgggctgatgaggtattgcgaatacctgcg

SEQ ID NO: 48624 - DNA, 225 bp, Zea mays
  Clone ID: MRT4577_144350C.1
cccacgcgtccgcagctgtcgatccaattgtcacttgctctccctccaacaagctaattaaggccggtcgtcatccctcttctagctcgttttattatccatggcggaggagaagcaccaccaccaccacctgttccaccataagaaggacgaggagcaggaggaccactcgcgggcggggttacggaactcccgcgagaacaggaggccaggtgacgaggtggt

SEQ ID NO: 48625 - DNA, 344 bp, Zea mays
  unsure (1)..(344): unsure at all n locations
  Clone ID: MRT4577_144351C.1
ccacccttctactggaaagttacattcttttttttttgtaannnaccattgacaaacaccacaaataagcccgttcctttacatttcacaaaagaaactttacaccaacgcattacatttaccccatcaaaaaaaaacataaaaccgtcttcctttaatccccatagcgaaaaaaaaacatatgcaaagcttgatatatctacaccactcttcacatgaaaatacccacattgtcccactaaactatattactccccccttttcactaaggatctcctgacaacaaaaaaaaaacatgtgccaatcttatccaccactgaacaacctgacccatgttttttttt

SEQ ID NO: 48626 - DNA, 737 bp, Zea mays
  Clone ID: MRT4577_144352C.1
cttcacgttttgagtgggactgcagctttcagtatggtagtctggtagaggaggttgatggccacactgcaatactataccataggctgcagctggattggttcccaatgtttgtttggcctcgtgatctttgttatgtgcgctattggcggcgcaatgatgatggaagctatgttgtgttgtttcaatccagagagcaccaaaactgtggtccacaaccaggatttgtaagggcacatattgagagtggtggcttcaacatttctcccctgaaatcccgtaatggaagaatccgaacacaagtgcagcatcttatgcagatagatttgaagggctggggggttggttatgtaccttcatttcagcagcattgcctacttcatatgctgaacagtgttgctgggctcagggaatggttttcacaaagtgatgagagtcaagtgcttcctaggattcctgttatggtcaacatgactcaatctgtttcttccaagaaaggcagaaaagcacaagagagtactacacaaaccggcattcagatggatccaagcagacattccacagttcttgaggaggagtctgatgaagatgacgaatttctgatacctgaatctgaaccagagccatcaaatcttgaggatgctgcagatgttaggaagtcagggcgcattggagaggattcagatctgattgatttatctggggtttgtggggatttacgtgggggtgaccggggt

SEQ ID NO: 48627 - DNA, 309 bp, Zea mays
  Clone ID: MRT4577_144353C.1
acgacccggactggtccttctaagttcaggcgggccacaaccactatcaaattgcaagcttcaacttcttcttaacgtatataaccatcttcaccatgaacctaattctatcaacacttctccactacattatctatcaagttccctataatttaccagcatgatcctcattaccttctattccaaaacaaacgatcatccgctggatggttaactgcctctacatcgcctttatcatcttcttcctgttcacttcgtacttccataaccacacgtatcctcaacatcataaactgtaacacatgctta

SEQ ID NO: 48628 - DNA, 354 bp, Zea mays
  Clone ID: MRT4577_144354C.1
tagcattcataaacacaccaagcgatgtgcgctagcatcaacctaacaacaagggctaccaagatattcgccctccttgcgctacttgcccttttagtgagcgcaccaaacgcgttgattaccacacagagctgacttgcccctagcgccatcatggcacagccactcccaccaggtacttcaatgggcttataacattcatccgtgcctgcctacaggctacaactcgcgcttgctgatagcgtctcacaactaccaattgccctattgcaacatcaatactgggcacatctcaacctacaatccattgtaacagcacatcaacaacagtttctgccatcactgtagccacct

SEQ ID NO: 48629 - DNA, 1333 bp, Zea mays
  Clone ID: MRT4577_144355C.1
gtgagaaatgtcattcagcaggagaagaaaatctgaacccatcgcggacgcttccacgcgaccaagcagccacgcggcgctggtctggccggccatgtcctgcctcgcggcgccgccggctgcaccgccaaaggcgggggagcgcatgctccgcgccgccgctcctttgcgctcgccttcgccgtgccggggcctgcattacgcggtgcgggggactgtagggcgagaagccgggtgcggccggcggcagctggcgctgctgcggtgctccccagctggcgagtccagggcgtccggggacggcggcctttccagcttctgtataattgaaggtccagagacgatcgaggactttgctcaaatgcaatcgcaggagattgaagacaacatcatgagccgacgcaacaaaattttccttctgatggaagaggttagacggttgcgagtgcagcagcgtatccgaacttctgaaagcaaagatgccaacactgaaggaaatgaaatgcctgagattccatcaactattccatttatgcctgatgcgtcaccaaagactatgaagcaactctatatgacatcgttctctgtcatatctgggataatcatttttggaggcttgatagccccagtacttgaactgaaactagggctgggtggcacatcttatgaagattttataaggaccttgcacttacctcttcaattgagtcaggtagatcctatagtggcatcattttcaggtggcgcagttggtgttatctcagctttaatgttggtcgaagtgagaaatgtcaggcagcaagagaagaaaagatgcacatattgccatgggactgggtacttgccatgtgctcgctgttctgctagtgggatgttattgaacacaaagcagttttcattattggggcataatatgtggtcaatgaaaggaaggtgtcagaattgttctggagctggaaaggtgatgtgtccgacgtgcttgtgcacaggaatggcgatggcaagtgagcatgatccacggattgacccttttgattagtttgatatgacaatacgctttttgtctgtttcgtggaaaatatgttgccgataacagcaataaactcatgtttgtatgtacgttatgtttgttactacgtgatcacttgagaggagttgagtgcaacccttgtccaaaagaggacactacaaatgtaggcttgtctgaaccacagaataaaaatcgtctgtctcacccgtatttttactttcttaaaaaaaatccccctaagttctatctattcccttgtgatattactcagtataatttatatcttaaaagagccatccagtg

SEQ ID NO: 48630 - DNA, 142 bp, Zea mays
  unsure (1)..(142): unsure at all n locations
  Clone ID: MRT4577_144356C.1
ctaaggtttatctgctcgangaatggcctctgtgcaggtctcccgcccggggggggttaccgcggccttctctgggaaggggaaggcctccaccgatgcgctccggctacactctacaatgaccttcggtgagggcttgccg

SEQ ID NO: 48631 - DNA, 412 bp, Zea mays
  Clone ID: MRT4577_144357C.1
cgggccggggtcatttcgccttcgaattacgggcccctaccagactgttttgccggcaccgacaccccctcctcgccttcctccggcgagctcctcgtcggagcagggccggccgacgctaccgacccatcacccacaacaggccttactgccgcgtggcccagatccgcgcgctccccgccgatccagatccatggttcgccccggcgcgctggggggcgccgtcacggtggccgatctgctcgcggccgcagagtcgagcgcccgaggaatctacctcccgcggagcctcccgcacaagtccaacgtcgctgacgacctcaacgagaaggagaactcccttaccattcatacccaccagacatgccctaaatctgctacagacttgcattatcggcagccacaatacagc

SEQ ID NO: 48632 - DNA, 366 bp, Zea mays
  Clone ID: MRT4577_144358C.1
agcgtccggtccttttaagcagtagcttttttgcagctggatcccggtgcttgagtttgaatcgcaggagtatcctgttggtcttcttacaaagttggtgtgggtggtggtgtttcccagtagatgtccttctcaactgcagagtttgcatgctgtgagccttcacctgaagcccaaacaatatggcattgtttattacgacatcttctttcagacggacaagattgatgaagcttttagcttgaaaaatttgccagcagaaaaactaacttctctgactgtttagagtggcttctgtttacagtatttgaagacagaatatcaaggcgaagtgcttcaaaaaatcaggcttcacaaaaaactgat

SEQ ID NO: 48633 - DNA, 886 bp, Zea mays
  Clone ID: MRT4577_144359C.1
cccacgcgtacggtaagttttactgtgattcttactaggatatgcgacgtagtatatacattgtgagaagtaatacacatggccaacttggtcatggtgacaccatagacagggccactccaaagcttattgaattgtttgaaggctccactccggtggtgcagattgcagccggtgcaagctacacgtttgctgtaacagatgacggaacagttcattcctttgggtcttgtactaattactgccttgaacatggggatcagcatgatgaacttcttccacgtgcaatccaatcatttaagtggagaaacattcatgtagtccgtgtttctgctggagatgagcatgccgtggctcttgatgcactaggatatgtaagtctatatttgccctgtttgcattccaaatatatattgttaatgattgttctcctgggaagggcaggtctggtgcagtggcgagaggtatctcactgagtcaccagtcgtgggtttttcgaagcagtctctccacatttgcgggtgaaggcttgcctcagtttatccctttctcagaccacttatgtgggagcctccggtactgggtctgcccttttttttctgtctaggcataataataattatgaagtctgaactttcacaggtttatacatggggcaaaggatactgtggagccttaggccatggtgatgagaatgataaaactagcccagaattgatcagcagcttgaagggccaagttgctgtgcaggtatgtgcaaggaagagaaagacatttgttctcacggacaagggctcagttgttgcatttggatggatgggctttgggagcttagggtttcccgaccgaggaccgttggacaaagtaatgaggccccgcgtccttg

SEQ ID NO: 48634 - DNA, 366 bp, Zea mays
  unsure (1)..(366): unsure at all n locations
  Clone ID: MRT4577_14435C.1
cttccgccaagggttnnntgtttccttggccggttccttttcccccgacctcaaactctaaccgggcggtttccgttgccggaaggggggccaaccttaacaagccggtccttcatccgccaccatggggaagacccgtggtatgggagctgggcgcaagctcaagacccaccgcagaaaccagatgtgggctgacaaagcatacaagaagagccacttgggcaatgagtggaaaaaaccttttgctggatcatctcacgccaagggcatcgttctggagaagattggtattgatgccaagcagccaaattctgccatccgtaagtgtgcccgcgttcagctggtgaaaaacggaaagaagattgc

SEQ ID NO: 48635 - DNA, 293 bp, Zea mays
  Clone ID: MRT4577_144360C.1
cttcaacgcatctcaggatcttgcttcaccatctgatagtgatggccatgggacgcatacagcatccattgctgctggcaatcatggaattcctgttgttgtggctggacatcaatttggaaatgcaagcggcatggctcctcgtgcacacattgctgtctataaagctctttacaaaagctttggtggttttgctgctgatgttgtggctgcaatagatcaggcagctgaagataatgttgacattatcagcttgtccattactcctaatcggaggcctcctggactcgcaa

SEQ ID NO: 48636 - DNA, 302 bp, Zea mays
  Clone ID: MRT4577_144361C.1
actccaacacccagaagcaaaaggcggaaggggtgggggaagggaagaaagccccccgacccaaccacaggccaaaaacgaccgccagaggagagacagggcccgggcagagaacaggggcacgagaaccaaaaaaggctgaaaaccacaaggcaaacgaccaacaccaagagaagggcaagcacgagaaaagacaaaagacggggacgaaaccggagcagagaggaaaacaaagcaagcaaacaaagggacgaagaggacaaaacgacagaccggaaccaagcagcgaccagggaggaaaa

SEQ ID NO: 48637 - DNA, 184 bp, Zea mays
  Clone ID: MRT4577_144362C.1
aaacagggtaacccggtattatatttaatggatgcctgaaaaggcccgactaaattggaacacccttttaacatctaatgtgctggagatattgtctccacagaacctaactttcgcgtaaaaaaaaaaaaaaattctcggtttcaaacctcacaatttttatgggttggacccaaaatacggg

SEQ ID NO: 48638 - DNA, 360 bp, Zea mays
  Clone ID: MRT4577_144363C.1
cacgcgtggatttgatacgtatttgggatgacgcgcccatgttgtggcgttatgaactgatggagaagctggctgaacggcgctcttgataggtggttcatgagcgtctgtggagcaggcaccatctaaggagtgtgcagctcatgttgctagaggacttgggtcctcggagacgtggtggatactaagccggctgcggcattatacgtggcataatgctgaactctgtaattcagctactaggtacatgcgataggggaactacatttaaatgtggaagcagacgacatgagaaatgataacgctaaagttcttcgctacatgaagcctttgcaggttgaagatgtgggcctaagacag

SEQ ID NO: 48639 - DNA, 513 bp, Zea mays
  Clone ID: MRT4577_144364C.1
aaaacatcatgaattttcaataaaccaacagcttatctactctaatcgacaatgctcaagcaaacaaacaaatgtgtggctattaactcaaccaactataaccttacaacttggctttgtgctgtatcctggcaccgagctgaagtctctcgacaccataagccttcaataactcctcggtcttggctctctgcatcttaatcgtagcagttgcctccgcgctgcgcttgttctcgttgcgtcccatctgctgcagatgcacctcatctggtccatcagacagccgcaacgttctgataccagcccacatgtacgccaatggggtatcttgagagacaaccgcaccaccggaggcctggatagcacggtcgataacagtgatccgctgcctgaggaatgaaaacctttgcttctgcgatctccttgagggccttcttgcgacctaggtcgtccatcttgatggctgcgcttgaaaacaatgaagcaaggtcgcgtccatttcaatgcaagatt

SEQ ID NO: 48640 - DNA, 273 bp, Zea mays
  Clone ID: MRT4577_144365C.1
ataacaagcatacgattccttcactccattatcaaacggttacaaaaggtgtaacttttatacacagcagagtgattacctaagaaccaaaacaatatccacgtgagttgtcaccctattaaaatcctttccggttcaatgtcattgcttatttaagtaaaaaaaaagaggattgaagccacacaaggtgtttaacacaagaagaaggccgggtgcccatataaaatacaccttttgcacacccaatgcctttttcccgggaaaaagaatttt

SEQ ID NO: 48641 - DNA, 615 bp, Zea mays
  Clone ID: MRT4577_144366C.1
gcgcccatccctggtcaaccggaggcggagtccgcggacgacgtcggagcagagcaaagcgggcagaggcggaggcgtacgactacaagggcgacgctcgctgagccgagttctggtccaacgtactcacccagacgaagctcgcctaccgccccgacttgataaaacagttgaacagctggttctacacaacggttcattatccataaactaggaagacagcgatggtcatttacccattgcactcaagcagaaacgaccgatggagggggttaaacttggtgatgaagcgctaacggccgggaacatggttgacgatctactggccggcgagcagccttctaagaagctcataggctgattgacagcttaagaagcctttcaagtgatcacacgacacgcactgatacataacgtccatcagcgattgcttgctcctgtctgtttatcaagggagtgctgtgtattttgaaaaaacacctagcctactgctgctgctgtatatactgtatatggcatccatagtaggcttagggtgttgtacatgcagtactcatgacaaaacacaatcttgtgacatgctaacaggtcacgctggggtggaggctatacttg

SEQ ID NO: 48642 - DNA, 254 bp, Zea mays
  Clone ID: MRT4577_144367C.1
gcccgcagattcccggattcgcacgccacgcatccaggacgttcgggcgaattaaagctcctggcgctggacccggagaatctagtcactccttgggacgacccgtccgacgaaaagatccttgcgaatttcctcacctcgcttatagagtacctctacatcgcccacagcgatgtcgatacgcttgcgaacaacaataacataatgctggattccaaagcgcggctagtgcacgcgctctcagaggcacgtct

SEQ ID NO: 48643 - DNA, 919 bp, Zea mays
  Clone ID: MRT4577_144368C.1
gactcggaccaacaagcagcctcaggacaggccaggagattctcctcgagagctcctcctcctcccggatgccatccccgtgacgctcccagccgcctctcccgacgccatccccacgagcgccttctccgacgccgtctccgctccgccgcattctccgacgccgtctccgctccgccgtcttctccgacgtcgtcaccttcccctcgacaaggtagtgtggctaccggagagttaaatttcacatcaacctttgttgatcttcctccaccttcagctccatccaggagtgtgtctggacaaagtctcaatcccttgagtactaattcacttgatttggatggacaagaaaccacaagtgtcttcaatctatcttctgatgctcaatctgtcctagtcaatactaatgaacccactgaagctcaatttgtcccatctaatcaagaatcaagccagagagaaggtggcagtgggagaaagcgtaagcaaagccatgttggattagctcttgaaaattatgtggagtttaaaaaggtccaaaatacagaaacacttgaaactcttaaagaacataagaggcaagaggatcaattttctattagcaagtgtcaggttgaattgaaaggaatggatggattaacagccgtggacaaatcatatgctttggtgctttttgaatctgcgataaatcgagagattttcttaacaacaacagagcatgatgttagagaaatttggctcaagcgcaaaattaggttgcttagaagcagtgtgcagtgatgcgaggcatggatgcgagagtgcaaagtggaagcaacacatgaagtcgacatggaagaaggaaaatgcaatgacagtccacatgaaacttgtgaaaaatgactattaccaagtgtctggctgaattgaaaggaatgga

SEQ ID NO: 48644 - DNA, 341 bp, Zea mays
  Clone ID: MRT4577_144369C.1
aaaggaaaagggcctgcacaaaacccttttttaggggggaaggggggtaaaaacctttcaccatttttggccaaaaaaaagggaaaccccttttgttgggggaaaacaaaaaatggtccctcgggaaaaaaaaaggttgccccccccatttttggggggattccccccaaaccccgggcccatgtttgggaaccccccccattgggggcccaaaaaaatttttggtccccccccgcccctgaaaaggccacataagaagtccctccaaacttttaaaaacccccaagtttgggcaccgatttcaatggcaaacttctttcgggggttagggcccctttaaa

SEQ ID NO: 48645 - DNA, 1068 bp, Zea mays
  Clone ID: MRT4577_14436C.1
atggctaggctagctgatctgcaaaggcagatagacgacgcctctgaagaagttggccatcttactcaagatgagcagaaccgaaggcctcagcacagagagcttcaccaagagggctttttcaacgaggatgactgcagaactgtaggctacaccttggcctctgtcttacaagccacctcaactccccatgtacgacagacactcagatccgaagcagtttctgatgagctacgaagcaacgatatcttcctatggtggcaatactgcagtcatggcgaagtctttcgtcatggctgtcaagaatgttgcacaaacctggtactcctctcttgggccaggaacaatcacatcatggcagaagctgaaggatatgctgattaccagtttccaagggtttcaaacgaagccggtcaccgctcaagctttattccagtgcacccaagatcacgaagaatatcttcaggcagaagggaggaagcttacaggttctatgaaatagccaggggcttcggagggagaattcatcctagacatgtcagatcgattcattccactcagaatggtgacaggggaagccagcagcagaggccgcaatattcctcccaggcttcggggcagcagcagagctatcctcggcccccagctccaaggggcagaggtgccagatgcttcagaggaagatttggggatcagcccaggaaaatttattgtctattctgtggtgaggacaagggccacaccaccaggatgtgccatgtcaccatccagaaacaaaaggaaatagcagaagctgcagcccaacagagccagccgaagcaagttatgcatactgcttcgtaccactcgccttatattccagagtatgtggggaaccaccctgtagcttctgtcgcttcggcaagccaacctcaggcatcttggcaacaacctccacctccaccaccaatgcaacgaggccagcagccagaggggagtcagcatactcaacaccaacgagacttcagagaagagtccgaagctcgcacagtcaatagtactgtgccagaatcaaagcacatttactaa

SEQ ID NO: 48646 - DNA, 736 bp, Zea mays
  unsure (1)..(736): unsure at all n locations
  Clone ID: MRT4577_144370C.1
aggccaggagattctcctcgagagctcctcctcctcccggatgccatccccgtgacgctcccagccgcctctcccgacgccatccccacgagcgccttctccgacgccgtctccgctccgccgcattctccgacgccgtctccgctccgccgtcttctccgacgtcgtcaccttcccctcgacaagaactgcattggtgcaatcgacggcacacatatacccatcaccatagcagaacatagggctgctccatatagaaacaggtagtgtggctaccggagagttaaatttcacatcaacctttgttgatcttcctccaccttcagctccatccaggagtgtgtctggacaaagtctcaatcccttgagtactaattcacttgatttggatggacaagaaaccacaagtgtcttcaatctatcttctgatgctcaatctgtcctagtcaatactaatgaacccactgaagctcaatttgtcccatctaatcaagaatcaagccagagagaaggtggcagtgggagaaagcgtaagcaaagccatgttggattagctcttgaaaattatgtggagtttaaaaaggtccaaaatacagaaacacttgaaactcttaaagaacataagaggcaagaggatcaattttctattagcaagtgtcaggttgaattgaaaggaatggatggataacagccgaggacanatcgtnacgcttggtgctttttgaatctgcgataa

SEQ ID NO: 48647 - DNA, 270 bp, Zea mays
  unsure (1)..(270): unsure at all n locations
  Clone ID: MRT4577_144371C.1
gggccaaaataaaattatgtgggcgtgtgagtttantatttgtggtccatagggggttggangcgncattnctttgtttttntgttctttgggtgtgcttcatcaggcatagggttttcttcctggttactacntanatttggggggctgntanntaaaanggttncaaacttncaattncctctngtgtanggttaggcanttancccatgtgtgtgaatattanacatcaccattctttacttaatgggttggtgaaccatccggagc

SEQ ID NO: 48648 - DNA, 1259 bp, Zea mays
  Clone ID: MRT4577_144372C.1
ccctcccccccccccccgcgtccgctccgttggagccgaggtcccccgcctctgattcactgcacacctgtaacataaattcttgagactcccataaggtgggctcaggaccccagtccgaaggtgtacaagggaacactcgttgatggaacgcgggttgccataaagagagcagagcgcggatcaatgcaaggtgtggtggagttcaagaacgagatcgagctgctgtccagggttcatcacaggaacctggtgagcctgattggcttctgctacgaacaaggggagcagatgctggtgtacgagtacgtctccagcggaacgctgagagaaaacttactagtgagaggaacgtacctggactggaagaagaggctcaggatcgcgctcgggtcagcgaggggacttgcgtaccttcacgagctcgccgatccgcctatcatccaccgggacgtcaagtccaccaatatcctcctcgacgaccacctcaaagccaaggtcgccgacttcggcctctccaagctcgtcgcggacacccagaagggccacgtctccacgcaagtgaaaggaacgctgggttacttggatccggagtactacatgacgcagcagctgtcggagaagagcgacgtgtacagcttcggggtggtgatgctggagctggtgagcgggcggcagccgatcgagagcggcaagtacatcgtgcgcgaggtcaagctggccatcgaccccaacgaccgcgaccactacgggctgcggggcctcctggacccggcgatccgggacaacgcgcgcaccgccgggttcaggcggttcgtgcagctggcgatgctgtgcgtggacgagtcggcggcggcgcggccggccatgggcgaggtggtgaaggacatcgaggccatgctgcagaacgaggtctccgggcccgacgggaccaccagctccgccggctcctccgccaacgacttcgacggcgccggcgccggagcgaggtcgcacccgtacagcgacgtcgagatcacgagaggctcgtacggggacaacgcgtcggactacatgccctacttcgaggtcaagcctaagtagaccttccagtttcagacttgtatagcttgtgagatacattgtatagatttgtattatatttcacgtttaaattctttggtttctcgagcttaatttttatcatgctactcccgatctatcatgacgcaaactgtacatcccccgaaatttcccaagataagtgttctgtcctttcc

SEQ ID NO: 48649 - DNA, 359 bp, Zea mays
  unsure (1)..(359): unsure at all n locations
  Clone ID: MRT4577_144373C.1
cgnggnattgattgtttgggacttttttctttctttcagtcggaagaaataatatgcagtgtattgttcgtggggtggtataattgtggttgctgcagtgttagccccgatttaaaaaaaaaaaaaaaaaaaaaaaaaaaaaaaaaaaaaaaaaaaaaaaaaaaaaaaaaaaaaaaaaaaaaaaaaaaaaaaaaaaaaaaaaaaaaacaaaaaaaaataaaaaatttttaaatagagtaaaaataaaattaatttaatgggngaagtataacaacgtaaaaaagtggaaaaaaaacttgaagttacccaaaattaaatgccttaacacaacatacccccttttcgccagactggcgata

SEQ ID NO: 48650 - DNA, 781 bp, Zea mays
  unsure (1)..(781): unsure at all n locations
  Clone ID: MRT4577_144374C.1
attgggtacctcgaggccggccgggacactctttccattcttcaatacttgcataacatggctcgttccagtgttaatgcgtgggcatcttcattcgccctcctctacctagcccggccaggcaactgtgttcaccttgatcgaaccagtgcccgatcaccgtgtgagccgcgtccctgcctttgctgccaccgtaccgacctgaaccgaggagagagatgccgtatcactgcccccctgtgcacgacggacggatgcatttggaggagtacgatctcgccactggacgcgagcgatcgcttctacctgccgcacgtcggactgcgccatcgtgctgtaatgctcctgagtcgagatggacgaccgacaccatggccgagttcccctggcactactgctacaacgaccacttcttcgaaatcttctgcatctacgtgttacgaggagcacatgttctaactcccagacgcggactgccctggcagctctgatacggttgcgacggatatgtttaaccatattactactgcaacatgtatatttattcgacaattgccagccgcggtgtgcacattcatcattacagacagccatgctctctcttttctgagnggagatgtagtctaagaacacttgaatgtgatccttgtatgaggcggacagacatccagcaacaataccactagtatcgccacaacaatttcagctgatgctcttctggcatcaataggacttgggttccctacctcagacgcagagtaagcatcaaccccgactgttt

SEQ ID NO: 48651 - DNA, 610 bp, Zea mays
  unsure (1)..(610): unsure at all n locations
  Clone ID: MRT4577_144376C.1
ccggccgggacgacaccggctgataacttgacgggtgaggaccgaaacctaggacgaggaaggagttcagcaagcagtggcgaagacgcaacggcaatgcgtctgatggcagcccggagtctcccggccaggtcgctaaggataacgcgtccgacgatggacggcaactctaaacttccatcttgtgaattgtgatgagcccatgccttggatggctgcctcagaaaatcagacgtcaggacgaggaagtcgcatgcgccgctgagccgggctgaaggcatccggagacgctgcggagccgcggaggaggcatcgcccaccgagtaccgaccgtgtgattccgtgaggtgccacctgccacgcacgnntccatcgacgttggtggtggctcgcaggagcggctttggacccaaggttcaccgtcctgctgaccacgcggaagccggcgcgcagccatcggggcttgccgacccgttcggcctaaaattcgcgtgtagaagagtgacctcacgtggtagagatgataatagattgtgatttaaatgtttctttataatttattaagttttaaattatttctagcaaaaaaaaaaaaaaaaaacccgcgncc

SEQ ID NO: 48652 - DNA, 480 bp, Zea mays
  Clone ID: MRT4577_144377C.1
ttttttttttttttttttttttttttttttttttagggagatggtttttttttttttttttttttgggcaactccaaccttccataatcaaaaaatctacccctccttaaaggtctgacacaaggggacccgaaaaaggaaaaaattcacgcccttgtcatgaagaaaaacctccaaaaaaacaacttgggatgggaatatttggtttttttgaaaaaaacccaaagctctccccaaacttggccccacaaagctgttggctcgaagcctccccaggaaaaccctaaaaggcttaagctggtggaaacaaaaaggcttttactttaaaaattggggggaccccacaaaaattgttttttcctcacacgggtccaaaaattggaaaggcccccataaaattttattcaccctcattattgcccccccctttcaaattcccccacaaattgggggcccagaataaggggacaagctttttgt

SEQ ID NO: 48653 - DNA, 286 bp, Zea mays
  Clone ID: MRT4577_144378C.1
cacgcattcgcaggatataaagcacaatgatctaccaacaatgcacgctaaaataggggccttctgggctgcttgtgctttttgcaggtgctactacctctaccatgcacatacactgctcacacgctgctatagctgcctttactgcgcttacctctcaccaacgacgattatgggctccgaaaacccaatcccttaaccctacaagatccagcaggcaatcgcagctggcatgttacctttatcatactacgctccttcaacaacaaacaagcgctatacacca

SEQ ID NO: 48654 - DNA, 406 bp, Zea mays
  unsure (1)..(406): unsure at all n locations
  Clone ID: MRT4577_144379C.1
tcgcgatctatatgatggtgttaacggcaatgtatacgttgttcaggtttgcattatcatttatgcccaaggtatatccatatgcaaacctgaacaacgtatacgatggcgttaacaccaacggatgcaggcctaacgtccgctcttgaggaactgcgcgggcgggcgcgtacatgcgncgacaacgccccgcgctaggggcacccggagaaaaacactggccgtcgagatccagcaacaccctcgtaaacgccgggcccggtccggatatggttccaccctgccctatacggagccgccctccggctctgcgtttcatggccgtcccccctccccgtgggaagcgtgcggccgctccagcgggccccagcctacgagcgcgggcccgcgacggtatagccctttt

SEQ ID NO: 48655 - DNA, 1515 bp, Zea mays
  Clone ID: MRT4577_14437C.1
atgccgccaaagaaagcttcagcaacaggggctgccgctctgcagccgctggaccccaaccaggagaccctttctcttcgggaggcccgaagccagaagaggaaggccaccagtccaacgcctcaggaggacgacttggatcaagagatcaggaatatggagatgctccatcagcaggtgcaaaggaagaaggaaaagatggctcggctagctgacctgcaaaggcagatagacgaagcctctgaagaagttcgtcatcttgctcaagatgagcagaaccgaaggcctcagcacagagagcttcatcaagagggcttcttcaacgaggatgactggtatgaggatttccatcatggaaattttgcttttgatgatgcttctcctctgtcagcagaactgcaggctacaccttggcccccgtcttacaagccaccccagctccccatgtacgacggacactcagatccgaagcagtttctgatgagctacgaagcaacaatatcttcctatggtggcaatactgcagtcatggcgaagtctttcgtcatggctgtcaagaatgttgcacaaacctggtactcctctcttcggccaggaacaatcacgtcatggcagaagctgaaggacatgctgattaccagtttccaagggtttcaaacgaagccggtcaccgctcaagctttattccagtgcacccaagatcatgaagaatatcttcaggcgtatgtccgaaggttcttccgcctgagggcacaagcgccaacagtgcccaatgaaattgtcattgaggccatgattaaggggcttcggccaggaccttcagcccaatactttgccaggaaaccccctcagactctggagaaactgcttcaaaagatggatgaatacatccgcgctgacaatgactttcgacagagaagggaggaagcttacaggttctccgaaatggccaggggcttcggagggagaatccaccctagacatgtcagatcgatccattccactcagaatgatgacaggggaagccagcagcagcggccgcaatactcctcccaggcttcggggcagcagcagagctatcctcggcccccagctccaaggggcagaggcgccaggggcttcggaggaaggtttggggaccagcccaggaaaatttattgcctattctgcggtgaggacaagggccatactaccaggatgtgccatgtcaccatccagaaacagaaggagatagcagaagctgcagcccaacagagccagccgaagcaagtcatgcatactgcttcgtaccactcgccgtacattccagagtatgtgggtaaccatcctgcagcttctgttgcttcggcaagccaacctcaggtgtcttggcaacagcctccacctccaccaccaatgcaacgaggccagcagccagaagggagccagcacactcatcagcaacgagacttcagagaggagtccgaagctcgcacagtcaacagtactgtgccagagtcgaagcacatctactag

SEQ ID NO: 48656 - DNA, 604 bp, Zea mays
  unsure (1)..(604): unsure at all n locations
  Clone ID: MRT4577_144380C.1
tcgcgagcggctgccttttttttttttttttttgccaatttgaatatatttatttcatttacattgatacagtattagaagggactgaatataattatggagactgctgcaaacatttgatgccactaagtattctattaagcatcaggcatgcacagtagttaccttttaaagtttctcatgtatatatcttaacacatatatcttaagctacaatatgtttaaagcatttagtcattttaaacccaaatattttaattgacctatgtctaaatggagaaaaacagaaacttcctcctgtctcaatacccgatggcaatattaaaccttactccccaaattgatatttaaacttatttatgtcatctttaaaattccaaaaataatgaaaagtcttatcattactaaataagaagtacgattccccggcagcagtctacccaccacacacttacggcatgccaagcctttggggattacataagagtgatgtgctggtggctacagatgacaataattgaagagatcagtctcttctttttattctggatctccttattntaaactaaagcttttcattaatacaaataaaaaaatctttttt

SEQ ID NO: 48657 - DNA, 278 bp, Zea mays
  unsure (1)..(278): unsure at all n locations
  Clone ID: MRT4577_144381C.1
cgagaacggaaaacaggagtcaatggccatttaaaaggcataaggaaaataaagtaacagcggggaacagccaacacgggggggttcgacgggaccccaacctacagaacccagcatatctctcctttttcggacggggcccgggggccggaaaaatgggccgctaaggccctccccccgggggggcggggggcnggcggggtgccctggggcttgggggggcccccctgggcggggggggggccngggggggggcccccggtgggcccgggcggggg

SEQ ID NO: 48658 - DNA, 252 bp, Zea mays
  Clone ID: MRT4577_144382C.1
ctcggcgccagggcgtaccgccatcagcgcatccacagccgacgccgaaatcctcgctcgcccccaaatcctcccccaccgcgcccttccatcgacgacggactacccacgctttcgcatctcctgagctccgaagggccccgctatcctcgcccaatctcatcgcccttccatcgacgcccttccagcacgattgccacccgacgggacagtcgatgccgcctgcctcctgattcgctcctcctcatccgg

SEQ ID NO: 48659 - DNA, 156 bp, Zea mays
  Clone ID: MRT4577_144383C.1
acacagataaaacagttcttttttataagaagcaaacaacaaaggccgtgctcattcagacccttcaagaaacacacacacgaagggtctgaatgagcacggcctttgttgtttgattcttataaaaaagaccgggcttatctgtgtaataaataa

SEQ ID NO: 48660 - DNA, 574 bp, Zea mays
  Clone ID: MRT4577_144384C.1
ggggtggggggttttttttttttttttttttttttttttttttttttttttttttttttttttttttttttttttttttttttttttttttttgggaaaggggcatatttttttttcccccctcagggcccgggcagagggtctttttttgggggggggcacggccccccaggggcatacaaaaaggggccatgcccaggggagggaaacctttttttgcccctttgggggcaaaaaccggcctccccattcaaaacttttgggcctcccatggggggggtcggggcatttcacggggggccctttaatatggggttgggccaatggggcccattcaaaagggggtcccggttacaaaaaattttggggggtaaggggggccccggaaaaaaaaagcttcccggcccaagcgggggggatcccccgaaggggggatctatttgaagggggccccaggggggctacacaaattctcgggggataacttattgggcgggttattattgggggaagattcagctttccccacgaaatttttcaactccgagaagaagtttttggaaaagcgggggaa

SEQ ID NO: 48661 - DNA, 371 bp, Zea mays
  Clone ID: MRT4577_144385C.1
acggactggttatagatcgtaggacatacacctttcacacttagaccctgcgtatgaactgtattcgcgcagagacaacttgcttatcaggaagatcacggagctacaatagactgcatcatgggccgaccccatgctgctgatgctcagaaagcatattaatgaactgtacaagcacaaaaagggctacccttacaacctgatcatcgcatgactgcaatgtaacgagacctgcggaaacaggcttgctagagcctttaataaggctcctgaccggacttttttccattaaactggtgccaacagctcttacaacactgtcgttccttgtggacgtacttgtacatgaaactgcgatgatagccaacctt

SEQ ID NO: 48662 - DNA, 474 bp, Zea mays
  Clone ID: MRT4577_144386C.1
acgggaaaaaaaaaacttacctgggtaagagggttgcattattatcaaattcgggggggccaatttttggattttccccttttttttttaattgttgctggattttgcaaggggatgtttcaaggcttaacttatggtttgggaaatgccttccactggtggtggttttggaactaaactacactttttctgggggcatgggatttttccgaagaaaacaaaaagcattccccttttctgtaaaaagggcaaaccatttttttttaacaaggaaattaactttgctctttttaaaccccccccccaaaaaaagtgccttaacacatcactagctagttggtaataaccatcacccttcgatctgcatggggtgctgaacacaaaatcctctgctatgccctaaggagtttcagccgtataaacccctgtcgaaaaccaaacaccttctggggtgggagttactagggatctaat

SEQ ID NO: 48663 - DNA, 728 bp, Zea mays
  Clone ID: MRT4577_144387C.1
acttacgatctcggaatggccgactcctccgcgccgcactccaacggcggcgccggcgccgaggcggaggcggtgccccgttccctggcgccgccgcggagggtggcgctggtgacgggcatcacggggcaggacgggagctacctgactgagctgctcctgtccaaggggtacgaggtgcacggcctcatccgccgctcctccaacttcaacacccagcgcctcgaccacatctaccacgacccgcacgcgacgccctccgccgcgcgcccgccgatgcgcctccactacgccgacctctccgactcgtcctccctccgccgcgcgctcgaccacgtgctccccgacgaggtctacaacctcgccgcccagtcccacgtcgccgtctccttcgaggtgcccgactacaccgccgacgtcaccgccacgggcgcgctccgcctgctcgaggccgtccgcctctcctcgaagcccatgcgctactaccaggcggggtcctcagagatgttcggctccacgccgccgccgcagagcgaggccacccccttccacccgcgctccccctacgccgccgccaaggtcgccgcgcactggtacaccgtcaactaccgcgaggcgtacggcctcttcgcctgcaacggcgtgctcttcaaccacgagtccccccggcgcggcgagaacttcgtcacccgcaagatcacccgcgccatcggccgcatcaaggtcgg

SEQ ID NO: 48664 - DNA, 577 bp, Zea mays
  unsure (1)..(577): unsure at all n locations
  Clone ID: MRT4577_144388C.1
aggtacttttttttttttttttttttaagcgcaaagctttgatgatgagctcattaattagtaatcaggtacatgtacaacaaactcgatcctggtacgtactactactgatcgacgatgctactacgctactagctacgacctcagatcgcatcatcgtacaggtgacagcaaaagttaacagcaacgtaccaaatcgctctggctatcatcatcgatggctagctcccgatcgatcgatcgatcgttcaaggcagaaaaactctccgtgtcgtcatcattcagtggtggtgatgatggtggccaccgtcgctgctgtgaacgaagggtgggaacatgtcctgcaggagcccagcgtagtcctgcgccatgaagtgctgcatccggagcggagcgctagcagcagcagcaggagttgccgccgcagcggtggcagtagcagtggtactaccgccggccgccgctcccacacctggcgatggcggcagcccagccgtgctggtcgtccgccgccagcgccacgtggcccgacatggcggcagcgttcacctgctgcagcccggcgnccgccgtcgcc

SEQ ID NO: 48665 - DNA, 418 bp, Zea mays
  Clone ID: MRT4577_144389C.1
ggaaaaaacgctgggctttgggggcctacaaaacacttattattaaaaaaacgggaaacattccagggcagaagggccaaccgggcccaggataaacccctacaaaaaaaaagggggggataattttaaacccccgggcgggcagaacaaaagaaagggggcccgaaccgggccaattttgggggaaacccggggggggattaaacccagcagcaaatgggaggggccccggttttctaaaagccccccgggggggagtaaaggggaatggtggggaaagggacccaatttttttgggttgggggccaaccagccccaggggacagcctaaaatttatgggggggggggggggggggggaatcataaataggggagcatggggggggcccccatgggcatgggggcacccgggtaggg

SEQ ID NO: 48666 - DNA, 347 bp, Zea mays
  Clone ID: MRT4577_14438C.1
gaggagcacgaggacgaccgaggcagtaccaaagaaaggcgcgggtaacttggaggctgtactgctgctgcgtagcaaattcagtggctgcatgattcgctctcatgaaagatgaaacgtcctgccgctcgcagagacgctcggtttggattctgggctgccgtggctagctaaagaaccagaggttttttttttcctttccctacgacagtattgggggcaggagaagaagaagctgtttgctctctctgagtctcaggtggcgttgatctttcttcttcgtcttgttccccgagggagaatggcaaaagtatatgttgcagaaccatccaagtcagttacttaca

SEQ ID NO: 48667 - DNA, 704 bp, Zea mays
  Clone ID: MRT4577_144390C.1
ggtaccctccgggccggccggggaatgctcctctctctgtgatgccgctagttcgactgcggcatccacccggcgtacaccggcatggcggcgctgccctacttcgacgaaatcgatccgtccgccatagacgtcctcctcatcacccactttcacttggaccacgccgcatcgctgccgtacttcctggagaagactacgtttaagggccgtgtgtttatgactcacgccacaaaggctatttacaagctgctgctctcggattatgtcaaagtcagcaaggtgtccgtggaggatatgctgtttgatgagagtgatattgctcgatccatggagaaaatcggggttatagatttccaccagacgttggaagttaatgggatacgcttctggtgctacactgctggccatgtacttggtgccgctatgttcatggtggatattgctggcgtgcgcattctttacactggtgactactcccgtgaagaagaccgtcacctacgagctgctgagctcccacagttctccccagacatttgcattatcgagtccacttacggcgtacagcaacatcagccccggattgtacgtgagaagcgctttactgaggtcattcacaataccggttcacagggggggcgtgttcttatcccggcatttgctctgggcagagcacaaggactggtacttatcctcgatgagta

SEQ ID NO: 48668 - DNA, 579 bp, Zea mays
  Clone ID: MRT4577_144391C.1
ggacatccaagtttttttttttttttttttctcttaaattttttccaatttccggaatactgaaaagacgggcttagggaacaccctgccaaacttgtacttagggagcgccaatgttctgttctggcctgcatgccgccgcccagctactaggtttagtgatcaccctgtcaggtcactgaggggcggcactagttgaacaaacgaatcagctgcacaatgcctgccgcactgcgaacgtgatcgttttgctaatcatttgctctgcgctcctacatccttaattacttcctttcgcaagggaaatattattactcccctggcccctactatgcacaaggctagcaccactatcagttcaacaaaactagggcggcatggtgtcagttagctcccgcctcctattgaatctccaatagcaaaacggcatgcagctgactagttccgtccagtagcaactgcctcgccgcaaaaagaccttataccgactagcctgtgcttcccgtctgcctcttgccagagcttgaagcccctcgaaggagctggtttatgagaagggtttccagctggcaggcaacg

SEQ ID NO: 48669 - DNA, 2475 bp, Zea mays
  Clone ID: MRT4577_144392C.1
cctcgaggccggccgggcctggattcctgatccggtcgggccagagaggttacgactacgagcccgccggccgccgcaccaacgaaaccctaaccccgctcgctgattcaggaagggcgggaaaaccatggcgtcctccgccgcggcgccgagcggcgcgccaccggctgcgaagcgccctgcctccagcggacgggagggagatcagatggtcgtcacgccgctgggcgccggcagcgaggtgggccgttcctgcgtccacatgacattcaagggccgcaccgtcctcttcgactgcggcatccaccccgcgtactccggcatggcggcgctgccctacttcgacgagatcgacccgtccgccatagacgtcctcctcatcacccactttcacttggaccatgccgcctcgcttccgtacttcttggagaagaccacgttcaagggccgggtgtttatgacccacgccacaaaggctatttacaagctgctgctctcggattatgtcaaagtcagcaaagtgtccgtggaggatatgttgtatgatgagagtgacattgctcgctccatggataaaatcgaggttattgatttccaccagacattggaagttaatgggatacgcttctggtgctacactgctggccatgtgcttggtgccgccatgttcatggttgatattgctggcgtgcgcattctttacactggtgattactcccgtgaagaagaccgccacctacgagctgctgagctcccacagttctccccagacatttgcattattgagtcgacttatggtgtacagcaacatcagccccggattatacgtgagaagcgctttactgaggtcatccacaatactgtttcacaggggggtcgtgttcttatcccggcatttgcacttggcagagcacaagaactgttacttatcctcgatgagtattggtcaaaacacccagagctccataagattcctatctattacgcttcccctcttgccaagaggtgcatggctgtataccagacatacataaactccatgaatgaaaggatacgaaaccagtttgcacaatccaaccccttccatttcaagcatatcgagtccttgaatagcattgataactttcatgatgtgggtccttcagtggtgatggctagtccaggtggtctccagagtggtctctctaggcagcttttcgataagtggtgcacagataagaagaatgcttgtgttattccaggttatgttgtggaggggacccttgcaaagaccattatcaacgagccaagagaagtgacactggctaatgggctcactgctcctcttcatatgtcggtccactatatctctttttcagctcatgccgatttcccgcagacaagcaactttttggaggaacttcggccaccaaatattattctcgtgcatggagaagcaaatgaaatgtccaggcttaaacaaaaacttattactcagtttgatggtacaaatacaaaaattgtgtctcccaagaactgccaatcagtggagatgtacttcacttgtgagaagatggccaagactattggcaggttggcagaacaagtaccagaaggtggagagtcttccagtggcctacttgtcaagaagggattcacatatcagattatggctcctgaagatctccgtgtgttcacgcagttatctacagctaacatcattcagcgtatcgcggtcccttactctggatcttttgaagtcataaggtacagactgaaacaaatatacgagagcgtggagtcagcaacagaggaatctgatgttccgacgttaatcgtgcatgaaagagtgacggttcgcctggattcagaaagttatgttacactgcagtggtcgtccgatcccatcagcgacatggtgtctgattctgtggtggctatggtcttgaacattggtcgggagggccccaaagttgttccggtcgaagaagcggtgaagaccaaagaggagacggagaaggctgctctaaaggtggtgtatgctcttatgacatcgcttttcggtgacgttaaagtcgcagaggaagggaaatttgtcatatctgtagatgggaatgtggcgcacttggatgggaggagtggcgatgtcgaatgtgaaaatgctacgctgaaggaacggatcaagaccgcgttccgtcgcatacagggcgccgtgagaccaatcccactttcagcctcttgataacttgtttgacatttcccatttgaacaaagtagcattctctgtttacaccagagtaccgggttttttttccctctctatcgaaaggaaccccagatgccttgtacggcatgctactcaagaggatttgattgttgatctgggattgcctctgtaaaatcacctgtaacattgtcatcctaacttgaaccacctccatcgttttcagtaaatttctacttaattttctatttaaaaaaaaaaaaaaaaaaaaa

SEQ ID NO: 48670 - DNA, 420 bp, Zea mays
  Clone ID: MRT4577_144393C.1
aaaacgggaaaaacgaccggccccgttaaaaaggcagggggggggggggcgggtgttgggatgattgaaacaaaaggggcccaatcccccaggaaaatttaattccccggggggggggacatttttaggggccaaaaaacaggggaggatccccccctttcccaaaaaaccctgggggtagctgtttcaccccttccaaaaaacgggggggccccacttgaacttttccttcccctggcacttaattttgagggcgccgctgaaaaaggggacttttttttggtgggggggggccgggcccccaaggaatttgggggggaactgggagttgcccaaccccacggggggggcccccccaaagggggctccacggggggccaacccttttttgggggtaaaccccttgggggccttgctttt

SEQ ID NO: 48671 - DNA, 267 bp, Zea mays
  Clone ID: MRT4577_144394C.1
cctcgcaacggatgaacgctggacgcggtggcagcgccatgacccggggtaaccagcgttgaggcgcccggcagaataatatgacggagcagagcgactcggttaagggacagagccgatgatgacgggggttgtggtagcgcgcggaatcagagggagtcggagatcatggaggaggagcagcaggaagcacagcggaagatgcagggaccaagtagctctgtggcttcgtgtacaacactcttggcttcgctgtgtggctggagc

SEQ ID NO: 48672 - DNA, 404 bp, Zea mays
  Clone ID: MRT4577_144395C.1
ggtaaccccaggaggagtatgatctcacgacaggctggagaggggacgaagcccatgcgcgagccgacgataccgtcttcgtttcctacctacgcgttcgagggatgctaacagcagtaggagctaccacggttggcttgaacggccgtgaccaaatggtacgatgatgcaagcgagggtgagacggacgataaactctgagcttgcgcatttaaaggcgagaactagtgcgcaacatgtgtcatgctgaactgtctacattagaaaggcatgcttacatgacaggagagacggttatgcctctgatatcggatactatgcaaggctaacatagtgtgctattgctgagaatgaatctatagcatgagaacgatgcactactatgcagagaatgctgattactt

SEQ ID NO: 48673 - DNA, 363 bp, Zea mays
  Clone ID: MRT4577_144396C.1
ggcacgccctttcttttttttatttttggactttaagaacatttcctacgtgctgcattcagagacttttagggaaggtcttgtgactacaacacagatcattgttgatgtggacagggtgataaccgtcggcctacctgactgtaaaatgaatctaggctgtcttgtcgcccaagtgatctagagcatatcaacagccctgcgtggtcagggatgatactttgtatagccggcttctgcaagcaagtggaaccggttctttggtactcactttggaacccaagctccgacaatagggctgtttcggacacacataaatctgaggacctgattaattccccattgcattatttaatgatggtc

SEQ ID NO: 48674 - DNA, 187 bp, Zea mays
  Clone ID: MRT4577_144397C.1
catcttatgggtttcttttagcagagaaagtgctgacagattgtcaaagtaaatcagcagacgatcccagtccggtcacactaggaacgatagcccatctgcatgatataatactcctgagagtatacaaaaaagagttggctagcttgggctcgcgcaactagtatggagccccttcacgggtcct

SEQ ID NO: 48675 - DNA, 338 bp, Zea mays
  Clone ID: MRT4577_144398C.1
aaaaacggggcgacccacgcgtacgcaacaagcaacatcaaacgtacaatttattatcaacaataaaccaacaacaacggcggggatattataaatcctgatgctccttactcaatctgcatgcaacgctaaagctacaattattactcaatgctgacaacctcctatagcttacattatttcacaataccttccatcaatgactgctaaagtatacgaaaacccagctcttcaaccctatacgctacaacaagcaatctcagccagcaacatacatttatcacccttcgatcaacaatagccagccttatctttggtgccatcacagactcaaacca

SEQ ID NO: 48676 - DNA, 281 bp, Zea mays
  Clone ID: MRT4577_144399C.1
tgcactttgttgccaggactgttttgtagtcttagtgctttgttgtaatcagattcatcttgtccttatattatagccgttagcaaagtaattcaaataaaattttgcagtttgtttgcaatctgtaaacagttttaacattatttttttgctctaaatatgttctctcattagttcaaaggtcaatgtgcactgaatatgttttaccttaattcaaggagattatgttcttctttatttttgggaaaacaaagattatctcagatttgaccttcatccgt

SEQ ID NO: 48677 - DNA, 252 bp, Zea mays
  Clone ID: MRT4577_14439C.1
tttgaaattgcctccttctacgactatacagaagtacctctcctactttaactgccccggaagagatcgctctgtgctacgcctacgtgcgtaaaggcctgctcttgcgccgatcctactaaaccaatacgccagagcctgcgcggagagttcctgacactgaagaagcccggcgtgtgcgttacatgcaggggatggccacattgagacctctacccgaggtacaccattggcacctgcctcaccgagaca

SEQ ID NO: 48678 - DNA, 630 bp, Zea mays
  Clone ID: MRT4577_1443C.1
gttcgtgataaacgaactggagattcccgtggctttggattcttatccttggataagagatgaggatgctgatgccagcaatccgtgcttgtgacgagactgagtggaatggaaggatcattcttgtggagaagtcaaaagcacctgcatggtgaatcttccgctttgggggcgcacacgccattgttcgagagggatttcattgcttcacctttcacagattttaccattcagaaaaaaagaaactaccgcttgtttcagggccctgctgctgataagagggacttacgacttagtggtacttttagtgtctgcaacctctacacgtgaaatgtgatacgtgcctgttcgtgagctgtcagttctcttcttcaccttcatctcgcgcccactgaatactgatggcatgaacggattccgggagactcaagctttatggtgttgttgcgactcaagggttatgttagcagttcaataatctgcatattagcttttcaatgttgtgcatcctctgaatgagggtttggaaaatgtcctatatagtttgtgttttggattccagatggtgtttaattatggtcacgacacgatacctatgccccatctgttgactggtggggatggtttttt

SEQ ID NO: 48679 - DNA, 339 bp, Zea mays
  Clone ID: MRT4577_144400C.1
ggggcacacaaatttttgggacagtttttatttgttgttacagggcaattttttttttttgaacactcaggtgggaataaaattacagggggaatcctcaaatccaaacttttttgggggaatttttttttcctgacagaacttttgttttaaatgccaaagctccaacgatttttttattggatccgcaagacttttatttaccgttttcaatgtttagaaaagggaaaacaaaactggatctttgcctaaggaccctgttagagctgaaaacaaaattttcctttcctgcaatcggcgaggttagccgtccaattgcccacccgttgtttataactt

SEQ ID NO: 48680 - DNA, 1578 bp, Zea mays
  Clone ID: MRT4577_144401C.1
ctcgaggccggccggggacacccttggtcccaacttacaaagcacagagaagacctacaccgcacctgcacacaaggtagcaacatgaataatccccaaaaccctaaagccagtgctccttgcaccttgccatcggagcttcccaaagaagcagtggcgaccgacgaagcaccgccgccaatgggcaacaacaacaacacggaatcggcgacggcgacgatggtccgggagcaggaccggctgatgcccgtggccaacgtgtcccgcatcatgcgccaagtgctgcctccgtacgccaagatctccgacgacgccaaggaggtgatccaggagtgcgtgtcggagttcatcagcttcgtcaccggcgaggcgaacgagcggtgccacaccgagcgccgcaagaccgtcacctccgaggacatcgtgtgggccatgagccgcctcggcttcgacgactacgtcgcgcccctcggcgccttcctccagcgcatgcgcgacgacagcgaccacggcggtgaagagcgcggcggccctgcagggcgtggtggctcgcgccgcggctcgtcgtccttgccgctccactgcccgcagcagatgcaccacctgcacccagccgtctgccggcgtccgcaccagagcgtgtcgcctgctgcaggatacgccgtccggcccgttccccgcccgatgccagccagtgggtaccgcatgcagggcggagaccaccgcagcgtgggcggcgtggctccctgcagctacggaggggcgctcgtccaggccggtggaacccaacacgttgttggattccacgacgacgaggcaagctcttcgagtgaaaatccgccgccggaggggcgtgccgctggctcgaactagcctagcttctcagttccccgtgtacaataagaggggcggtcgcggcgccgcgccgcgcccttgggttgggccgggcgctatgctgcagtttggtttgtaaactaacgagcctagggtagctggtgcacgcgcgccacctcgccggacgtcgccgtcgtcgtcggcatggacttaaccggcgggccctgttgttatttctcaagtttgtagccaacgcactgttcggtgcgttccataatttaatttaccatgttgctctcgaaaaaaaaaagaaaaaaagaaaaaaaaaaaaaaaaaagcgtgggcggcgtggctccctgcagctacggaggggcgctcgtccaggccggtggaacccaacacgttgttggattccacgacgacgaggcaagctcttcgagtgaaaatccgccgccggaggggcgtgccgctggctcgaactagcctagcttctcagttccccgtgtacaataaagggggcggtcgcggcgccgcgccgcgcccttgggttgggccgggcgctatgctgcagtttggtttgtaaactaacgagcctagggtagctggtgcacgcgcgccacctcgccggacgtcgccgtcgtcgtcggcatggacttaaccggcgggccctgttgttatttctcaagtttgtagccaacgcactgttcggtgcgttccataatttaatttaccatgttgctctgg

SEQ ID NO: 48681 - DNA, 475 bp, Zea mays
  Clone ID: MRT4577_144402C.1
ggaaaaaaaaagggggggaggtttaattgggggggcccgggtttattattaaaaaaaggccccaaaaacccccaagccaaaaggggcccgggttttgcccccccaattaaagggccggggccccccacccccctaaaaacaaaaataaaaaacctgggaagagcttttttcgggaaccggggccacccccccaaaccattttttggggtccaggggaaaatccgggacccccagccctttttcccaagggttttgccccccccacgggtaaagaaaaggggggggccccccccaaaaaaaaggttaaactttaaaaaagaaaaaaaaccgggaaccttgccccccaggggaaagggcaaaattagtctttaaaagacgggcccccccctgaggggggggtttttaaggaacaccacaaacccaaaccggggggagtatcctttggccggcggggcgggtttttggaccccctttt

SEQ ID NO: 48682 - DNA, 151 bp, Zea mays
  unsure (1)..(151): unsure at all n locations
  Clone ID: MRT4577_144403C.1
gcgtaagggaaaacaaagcctgacgcggaggacagcacggctaagccatagaccagccgggggaacgaagagnagaagcagatcggagcacgcagcaacggcgatgtatagcgtgctgataagctggtgagaactacggtaccacggatca

SEQ ID NO: 48683 - DNA, 329 bp, Zea mays
  unsure (1)..(329): unsure at all n locations
  Clone ID: MRT4577_144404C.1
cccacgcgtccgcccacgcgtccgcggacgcgtgggcgacacaggaactcgcagcagccgttagcgccagccgaagcaggccgcagccatggccgcccccgcaacgacgacctccctgctgagcacgctgccgcagctctcgtcgttctcggggaagagctcgcctccgtccgtggtgcacgtggcgcgccgggcgccgacggcggtggtggctgccaaggggtacaatgtgcagatcctggtggacgagaacgagggggaggagtncattttccgccggttccggcgggaggtgatgcgcgccggtgtgctggtggagatcangcgcc

SEQ ID NO: 48684 - DNA, 552 bp, Zea mays
  Clone ID: MRT4577_144405C.1
ccgccgcctccccctcctcctcctcttcgccgccgccgcgccaccgccgtcagccatggcaccaaagaaggagaaggccccggcggcgtcgtcgaagccggccaagtcgggcggcggcaagcagaagaagaagaagtggagcaagggcaagcaaaaggagaaggtgaacaacgcggtgctcttcgaccaggccacctacgacaagctgctcaccgaggtgcccaagtacaagcagatcacgccctccgtcctctccgagcgcctcaggatcaacggctcgctcgctcgcagggccatcaaggacctgatggagagggggctcatcaggatggtgtcaatccactccagccagcagatcttcaccagggccacaaacacctgatttacctcatgtgttggctgcctgttttctagtccagtagactgagatgtcgctgttatattgacgttcattatgttcagcgaggcactttggcactcgtgccacaagtatgttgaattgcttttgagtttttggtacaatctaagacgcaatgaaatctaccttatact

SEQ ID NO: 48685 - DNA, 451 bp, Zea mays
  unsure (1)..(451): unsure at all n locations
  Clone ID: MRT4577_144406C.1
ctgtattgcctatctacagatcattgcattcggacaggctttcttaccgcttaacgactatgatgcatgctagttgcagtgccaaatatggccatgtaatctgcataagcctgccaggctagaccaacccataagcatacatataacccagggaaagagcttacaactgctcacaagccgattcccctggccgccgtacccaagaacacctcaccacgcattgctcaatgatcntcatattctagctcgtcccngctcgcctacctcctgcaccaggttgcatctcgcacacaagtactcactacagtggagacccgaccaagccctcatgccttctccttacagcattcgcgcacgacgaaacaaataagacaaagtcatggatgctagccatagagccgtctgacaatacatgcctactcctattcntcttcacccatatnncttctcc

SEQ ID NO: 48686 - DNA, 436 bp, Zea mays
  Clone ID: MRT4577_144407C.1
cctcctccccgccgccgccgccgtctcctcctcttcgccgctcccgctcccgccgccgcgccaccgccgtcagccatgtcaccgaagaaggagaaggccccggcggcgtcgtccaagccggccaagtccggcggcggcaagcagaagaagaagaagtggagcaagggcaagcaaaaggagaaggtgaacaacgcggtgctgttcgaccaggccacctacgacaagctgctcaccgaggtgcccaagtacaagcagatcacgccctccgtcctctccgagcgcctcaggatcaacgggtctctggcacgcagggctatctttgacttcgttgcccaccccactcatcaggatggtgtcaatccactccagccagcagatcttcaccagggcgacaaacacctgatttatcattatcatgtgttctgggtctgttttt

SEQ ID NO: 48687 - DNA, 146 bp, Zea mays
  Clone ID: MRT4577_144408C.1
gtgggcgtcggccgtcagcaggtcaggctgcgagggctggctgattgtttgtggagttggtccacgtagaaggatggaagtatgaggatgtgtattgattatcgatcgttaaatgaagtcacaatcaagaacaagtatccactccc

SEQ ID NO: 48688 - DNA, 280 bp, Zea mays
  Clone ID: MRT4577_144409C.1
tttgcgaattacagcgggaccacccgtatttcacctgccggttcgtggtgttgttacaaataccccccccgcagggggcgacaggaaggtttttggagaccaatgtcccttccattcccaagggttacatgatgagggattcacatttttacaaagtatttaccgagtttttggctttgggaaaaaaaaaagaaaaaggaggggggggctaaaattatcaacttttttggggagaatttcaaaataacccgattgccctttatggtggggggggggtccc

SEQ ID NO: 48689 - DNA, 395 bp, Zea mays
  Clone ID: MRT4577_14440C.1
ggtccagaattaccgggtcgagcccgcgtccgacctcaagaagccctcgctccagcttacccctacacgttccttggtgcaagtcgctgcatcagaagcccgccgctctccggttaccacgctgaaaacgccgattctcttcttcacgcctacaactttcagactcggcaggcgaagtacgccaaccgtctcaaacatacgtgatcgcctcctcgcaaatatgcccgagactagcgttcaacgcgtagaccctcagaagttggggaggatcacgttccagaagtcggaagacttgatcgatgaatgggacatacaatacgacgacgcagagggtgatgctgatgctggaacgctgaaacaggcagcccatgagcttatgagcacgaatacccccg

SEQ ID NO: 48690 - DNA, 381 bp, Zea mays
  Clone ID: MRT4577_144410C.1
ctacgttctactcccactcgcggtcgcggtagccggcggcggcagcagatgaaatggggcaggccatggcttcatctatttcgtcgaccccggctggcgtacgcgagatgcagaatgatctcgaggtccatgccaacgcccttagcaagatccagaatgacattgtcaagaaccaccacttccgtaagcagtacaccatacaggtctgacagaacgagctcgtcctcaatgagctggagctgctcatagatggcgccaacgtgtacaagctcatcggaccggtgctgttcaagcaggacctatctgaggtcaaggccaacgtcaagaagcgcatctagtacatatccgtagagctgaagcgtatggatcggccgctcaaag

SEQ ID NO: 48691 - DNA, 173 bp, Zea mays
  Clone ID: MRT4577_144411C.1
gttaggaactaataggggggggtgcttttttagagggcgtgcacttttattctggggacaaacacaacaccctagtggaacctgttaaactatagagctccatatggtataaaaccgctttgcccccctcttactttatgtcatcattcagcttttcgttgagctagctgcag

SEQ ID NO: 48692 - DNA, 454 bp, Zea mays
  Clone ID: MRT4577_144412C.1
attagtggttcactgtccagtttttttttgttcgttaacctgcggggggggaggcagggaagcccgggcccccggggggggccccacaaaaggggggggggggggggggacaaagcaccccggaaacagggaggggccacagcggaggcccggcacgccggggcggagaaaacaagccaagaagcgggccggacggggggggaacaagcccggcggcggctggctgagggcatccaggaggagtgacggcttaggcagcgaagaaccagggggagccaaaggggtgtgagcgggctgattagtgaggagacccgaaagcaagtgattgagcaatagttttggcattttaggtgaaaggaagaggcgggaggaatcagggggcaatagttggaaaggtgctttatggagcgagggaacattggtagggaaaccagagccgcaggggacgggttga

SEQ ID NO: 48693 - DNA, 717 bp, Zea mays
  Clone ID: MRT4577_144413C.1
aggtccttccgcccaaacgcaaaggctctgctctttctgcccccctcctcctccgagatcccatccatggcggcggcctcggcgtcccgcccccggatctaaaaccccccacacagccattgcgggatctgtgactggtgccccgacagctgcacgggtcgcggcagccaacccagttcgttgccttgctaagatttgccttgccgctgcgtgtcctaggtgtgtggcgggcggtagtgggtttacttctccctggttcgtccatggttccttgaaatgggtgtctgacgcgaggggaggtcagcgctacggactgcctgccgccgccatgtggaagcagttccttggcaagctctcggggaagtcgccgaaatccggcggtggcgggggctggggatctccgccgcccaagtccccaacgtcgtatgacgtgaatgggaggcagtgggactcgatgcgggcgtctcctccgctcgcggctattgccggagcggagggggagacaagggaggacgtgttcctccggaagctgaacgtctgctgcgtgttgttcgacttttccaacgaccggggccgggactctccggagagggagagaaagcggcaggtgctcatgtctctcgtcgactgcctcggcacggcggaggaacctctcacggaggcgatggactccacctgggtgcgtatgttcgccctcaacctggtcaaggtcttccc

SEQ ID NO: 48694 - DNA, 307 bp, Zea mays
  Clone ID: MRT4577_144414C.1
aactcaccaaaagaaaacaatcaggtgctgaggcgctttattgaacatccccaacttcgtcttaatacatgcacatcccgcccacgccttaattattaaaaaatctattctaacccggtggaccgccttccacagtatattgcttgttcctgcccaccctcaaatgacatttattggtgggaaccgccgcctattgtgtccagacatcttcttagccgacagtaggtatgaacgcgtgacacataacggttgagatagatccggaagcacatcggccccggcgcaaattgagattccacccttcaat

SEQ ID NO: 48695 - DNA, 507 bp, Zea mays
  Clone ID: MRT4577_144415C.1
gcagggaaaaattgaagattatccttatccagctgagtactcgcataccaaacgggttattgctcatcaaatgaaagctagcgcaacaccatacacggatctgccatagcgttgacatggatacctaaaaatgtcggtgcattccatcacaacctattggacgctgcatgagcatacagattgggccctccacccgctgtctccgtttagccatgtccttgcacatgccataacacacggtagaaatttcacgttatttgcacatcaaaatgggcaaacgcactcgacttcctcagatcacgaccatatccgttctagcggacgcctgacccaccttgaggagactcaccctcacgcgacctgttctttactgccttaaagaactgccatttcccatgttagggcctgaattactacttccttgcataccaacgcaatttcacagccccattgcccttcgactctgcttcacacaaacattatatggaatgtccattgggcctggtg

SEQ ID NO: 48696 - DNA, 541 bp, Zea mays
  Clone ID: MRT4577_144416C.1
gcgcccgccgcgccgctatccggctccggtacctgctgctgctccggctcccgcagaccgactcccctgcctgcgaaccaaaccacagatctgctgcagaagtcgtcattgccttcgccaagccaaggcggtgaacgctacacaccctgctgctgctgccgttccccatcgaagagggccctgtgcacaagaccacccgctagagccggtgcctccctgcagagcgagatatcaggcccgggctagacgactatatgcatcccaagctgggctatctaccaccgcatcactactaagaggtctaccagcgccttgattcgagtggaaggatgattcaagataggtaaatacagatagaaagcatattgacacatcagtgtatggagatattaaaggatatggcgatactcgttactgcgtatactattcggacactgctccatatgcaaccaatgataacaagctgaagctcgacaccaacatacccatatgcctacctacatcatgggagacagctactagcaattaatatggactcact

SEQ ID NO: 48697 - DNA, 221 bp, Zea mays
  Clone ID: MRT4577_144417C.1
tgccacacgttctctcccaacttacctccatagactcctgcactaaataaagggctattgggaacattttacattacacatgacatcagctcacatcactgtatcacgcaactcaacttgcctgcctactagaaataacttcttctcttgcttactactcctagcactcttcctactcttctacattctcttctacctattatacaatctaatcatacact

SEQ ID NO: 48698 - DNA, 576 bp, Zea mays
  Clone ID: MRT4577_144418C.1
gctaaaaacgttctttaaccaattacatatcctggttttgaacttaccctcttagaaaaatatgaggcaaattattcacaggcatcggtatgccctaatgaacctttgagctacattaaataaaataagatggacagggaaacaagaaaattaagcggggacccgggccccccacacagcacaacgcaacgggggtccccctttaatagatcgccagcactgcataccattcataatatataggagctgcagctctacaaacaactacgatagctcccagaccatttgaggtatgtacagaacccatgaggtctcttatagctttgaaactatcaggggcagcaaacacacaagcttccaacttcttgatgaacccatggatgtgctcactgatttcctgcgctctttcctgctggatgaagtgcccattgcccttgatgaccaccatctcctcaagcatgggcacgtccctcttgaacccgaccttgtggatataccagcccactccagggagatggaacgccaggtcaccgtgcccaacgatgaacttgattggaacttgcacctttgctcctg

SEQ ID NO: 48699 - DNA, 176 bp, Zea mays
  Clone ID: MRT4577_144419C.1
ctatcgggggcaggggggacggattagcccttttggaccaccccaccctttaattttttttcagggttatgcacgggggcacatcccccccccttttttattcatatatgggggagaaacataccctgcgccccttttgccttccacatataaatctgccaactcttttttattta

SEQ ID NO: 48700 - DNA, 1233 bp, Zea mays
  Clone ID: MRT4577_14441C.1
atgccaccaaagaaagcttcatcgataggggttgccgctctgcagccgctggatacgaaccaagagaccctttctcttcgagaggcccgaagccagaagaggaaggctaccagtccaacacctcaagaggatgacttggaccaagagattaggaatatggaaatgcttcatcagcaagtacaaaaaaagaaggagaagatggctcggctagctgacctgcaaaggcagattgacgaagctactgaagaagtgcgtcatcttgctcaagatgagcagaaccgaaggccccagcacagagagctgcaccaagaaggcttctacaacgaggatgactggtatgaagatttccatcatggaaattttgcttttgatgatgcttctcctctatcagcagagctgcaggctacaccttggcccccttcttacaagccaccccagctccccatgtatgacgaacactcagatccgaagcagtttttgatgagctacgaagcaacaatatcttcgtatggtggcaacactgcagtcatggcgaaatctttcgtcatggcagtcaaaaatgtggcacaaacctggtactcctctctttggccaggaacaatcacgtcatggcagaagctgaaggacatgctgattaccagtttccaaggatttcagacaaagccggtcactgctcaagctttgttccagtgcacgcaagaccaagaagaatacctccaggcgtatgtccgaacgtatctacgtctgagggcacaagcgctaacagtgcccaacgaaattgtcattgaggccatgatcatggggcttcggtcaggaccttcggcccaatatttcgccaggaaaccccctcagaccctggagaagctgcttcagaagatggatgaatacatccgcgctgataatgattttcggcagagaagggaggaagcctacagattctccgaaatggccaggggcttcggagggagaatccaccctaggcacgtcagagcaattcattccactcagagtgacgacaggggaactcagcagcagaaaccgcagtactcctctcaggcttcgggacagcaacagagctatcctcgacccccagctccaagggcagaggtgccaggggcttcgaaggaagatttggggatcagcccaggaaaatttattgtctattctgcggtgaggacaagggccatactaccaggatgtgccatgtcaccatccagaaacagaaggagatag

SEQ ID NO: 48701 - DNA, 304 bp, Zea mays
  unsure (1)..(304): unsure at all n locations
  Clone ID: MRT4577_144420C.1
agttaaaaggtaccacagctatgcgctgggtngcgattttttttttctcgcagcaaaaaaggatacatctccccgcttgncgaggtcggattcagcnttcctatcttcccaagctcggcgacagcanaaaaccagagatcaactcccatgcctttaagggcnaccaccccctcccaacttgccttgatgatagntctgcttacctgttgcgcgcaactgcacntcctctgggctcccgcccggcactctcgtccgtcctccctcgtacgccctccctgngcagcgtngagcttggcttcctgcg

SEQ ID NO: 48702 - DNA, 666 bp, Zea mays
  Clone ID: MRT4577_144421C.1
ctagttacagttttgcgaaacttatcactaaaattctggctaacaggttagcccctgagctggataaaatggttagcacaaatcaaagtgccttcattcggggtagatgtattcatgacaactttattatggtcagtcaaactgccaagatgttgcatcagaaaaaaatccctgcaattttcttgaagctggacattaaaaatgcctttgactcactgcattgggcatttcttctggaaattcttcgacacttgggttttggacaagttttgtgcaatctgattttgaacctgctatggacatcttccactcaagttcttgtcaatggagtgcctggacagcctataaatctcaagcgtgggttgagacaaggtgatcctctatctacccttttattcatcctagtcatggatgttcttaataacctattcatcagggcagatgaatgtggattatcacacccccttgctggcagaaacattagccaaagggtttcaatgtttgcagatgatgttgctgtgtttgtaaaaccagtttctgggtacttagtggtggtcagagaaattctgaggtgtttcggagttgactcaggtcttcatactaacttgcaaaagagcttctgctacccaattcaatgcaatattgagagggctgcgctggctgttc

SEQ ID NO: 48703 - DNA, 458 bp, Zea mays
  Clone ID: MRT4577_144422C.1
aaaaaaaaaaaaaaaaaaaaaaaaaaaaaaaaaaaaaaaaaaaaaaaaaaaaaaaaaaaaaaaaacctcggtcgcgacccccttaagggggccttttctggggtcctttcgggggggtccttccaatttcctttgtatagggcccccttttccctttcttttgggggcttttattgccctttttttgggtttactacccgttttttgggaaaacctttccgggtcccaccttggtaaacccccggcgaatccccttttaaccccttggggtttcacccctttggcccctactgaggtacctttcaaaaggccgccccccctcaatttggaaagcctgcgccctgtttggtcgcacattgaacgggccctttgggggtatttacgcggggtttactcgcattttcaccgccccagagccccttcctttaccaccctttcctttcttttttttcccgttt

SEQ ID NO: 48704 - DNA, 355 bp, Zea mays
  Clone ID: MRT4577_144423C.1
acaaacccctgtcatagcaaatttataataaagggggggggggatgaagtttgttgcctgcccagggatgaaaccttgggctatgccaggattgcaaccgggggggggattttagaaattcgagcccctgccggttgcagggagaatgtgacgatatcgaagggggggggtaaaaagagggttagggggaaatgggcgggggggcgggaaaggtgaggaagctgcctaagggctaacagaagcaagggcaaaaaggggggaagcctgtttcttagggaggaaaaaattcgggactggaaggttcaagggcccgagaaacgcataatccttgaacgcggggggggccaccgggaag

SEQ ID NO: 48705 - DNA, 169 bp, Zea mays
  Clone ID: MRT4577_144424C.1
acattactccagaatttagtcacttttctcatttctctacccaaaattttacatgagagtgtctttttcaagaaggctagaacctaacctttccattttgctgttcctccgaatcaacgtgttctatcccttcttcctctacctctgatactcttttgatgtcttcccc

SEQ ID NO: 48706 - DNA, 280 bp, Zea mays
  Clone ID: MRT4577_144425C.1
cccactcgtccgattacccttcacctgactcttctctaaataaaaacacactcaaagtgggtcaatataaatatgctaatgcaacaaaaaaaaaatcaaacactccaaaatatttcaatattcctgatcttcatattgttaatctagtctcatactacactcttaaatttacttacaatccttataagattaacttctctacaatttcttgctttgaaaaccacatcattattcaaaattacaccaatctttactcattcaaatttccaaccctgcttta

SEQ ID NO: 48707 - DNA, 366 bp, Zea mays
  Clone ID: MRT4577_144427C.1
gccacctgcacctcatacaagccgccgcgaccgagcgagcgaagcgtgccttcccgcgcctacgccgaaaccctacctcctctaacgccatggccaccgtggcgctcactccgcaggcggacttatccaccgagtacggcggcgccctggcttttgccacacatgctgcgttttccaccaaacttggtacgccagctcagcaccaatgcacgacgcaactgcagaaacatcggcgtagcgcaaatcgtccacgccgcgtggtcagactgtctcgatgctcgtcgccttcgcggcggacgatgagagcgcaattcctaacactaaggatgcgcatgcgtccgacgctgtattggacgagcgtaatct

SEQ ID NO: 48708 - DNA, 502 bp, Zea mays
  Clone ID: MRT4577_144428C.1
cgttcgtgaagacctccggtcccggttaggggagggggagggggagggagaggcaaagtcatggcctacggcaccggctacggccaggcacaacccgcacataactgatgccttacccgatagccttcgacatcaagctcgtcttcgagagccaatgcagccgcacaccatgaggctaagactatctctataacggaggctgttcctctatcagacaaagaaaggggctctcacatcaaatacatacaattcttatctccaaaacatggcctaaccacacatgaaatcgattaacacttacataatagtgcacatattctaaactcattactacggataccgcttctacacatgagaaggttggcatgcaaaatcaatcatctggtgaacaaacttatcactctttatgtattatgccactagcaactaatggacatgattaacagacccctattaaaagtgcaccataaactttatatatgtaaaactcactaaaggtttt

SEQ ID NO: 48709 - DNA, 1262 bp, Zea mays
  Clone ID: MRT4577_144429C.1
ctcgaggccggccggggaaccgttctgtggcggtggtgttctggtcagccggcgatggcgacgccgacgccgatgggggcggtgcgtgtggagagggtgcgggggaggtcggcgcgtccgcgctgcttcgccaggtacccgctcaagctcatcgccccgtccagggtgggcccctcctcctgtgacgccgtctggctctacgccctcacctacggcggcggcatcgtctccggggacaccgtgtcgtgcacggtcagcgtcggcgacggctgtacggcggcgatcaccacgcaggcctcgaccaaggtgtacaaggctgtgggttcaaaatgttctgaacagttgctagaggccagagttggggaagacgccctgctggctgttattccagaccctgtaacctgcttctcaaccgctcggtaccaccaaaagcaagttttccatgtttctgtcaattcaaacctggtacttgtagattggtttacaagtggccgatacgagagcggagaaagatgggattttagcttctacaaaagtgtcaaccatattttcttgggagaccagccactctttattgactcgactttgttggaacaaagctcgagttatagcattgctgaacggatgcgggagtacaatgtggttgcgatggttgtgttactggggccaaagctgagggacatccaagacaagatgcaagacgaagtgaggaagctaatgtcggggcagctgcgccctcccactgccggcggaagcctctacactacgagatcacagcgtccccgaaggccaccactcgtggcctcttgcagcccgttcggccgcacgggaacaggcatggttgctcgggtagccgcggtgagcacggagctggcgtacatcttcctgaggcaccatctggccgcgctggagccattccttggcgctcccccctacgcggcgtcatgaagctggcggacagactgagggaagcgctggtgaacgctggtgctgaaagagggatccttggtccctcgagtttgcattgggggggggggggagtgaaaagctgcaaaatggttgggtgtagtcagctggccattcgatgaaagaattttgagggtgattggagtttctggttttggttggctaaattccacggttggagtgaacgtgttgcaattcgttgggtggtatagtgttgcctcgacctgacagtgacagtgtgaagcagacgcgtttcatttgccacactatgatggtaataaaataataataataac

SEQ ID NO: 48710 - DNA, 1272 bp, Zea mays
  Clone ID: MRT4577_14442C.1
atggctaggctagctgacctgcaaaggcagatagacgaagcctctgaagaagttcgccatcttactcaagatgagcagagcagaaccgaaggtctcagcacagagagcttcatcaggagggcttcttcaatgaagatgactgaactgcaggctacaccttggcctccgtcttacaagccacctcaactccccatgtacgacggccacttagatccgaagcagtttctgatgagttacgaagcaacaatatcttcatatggtggcaacactgcagtcatggcgaaatctttcgtcatggcagtcaagagtgttgcgcaaacctggtactcctcccttcggccaggaacaatcacatcatggcagaagctaaaggatatgttgatcaccagttttcaaggatttcaaacgaagccggtcactgctcaggccttattccagtgcacccaagatcatgaggaatatcttcaggcgtatgtccgaagattcttacgcctgagggcacaaacgccaactgtgcccaatgaaattgtcattgaggccatgatcaaggggcttcggccgggaccttcggcccagtactttgccaggaaacactctcggactctagagaagttgcttcagaaaatggatgaatacatctgcgccgacaacgactttcgacagagaagggaggaagcttatagattctccgaaatagccaggggcttcggagggaggtttcatccccgacatgtcagatcgattcattccacccagaatgatgacaggggaagccagcagcagaggccgcaatattcctcccaggcttcccaggcttcggggcagcagcagagttatcctcggcctccagctccaaggggcagaggtgccaggggcttcggaggaagatttgtggatcagccaaggaaaatctattgcttattctgtggtgaagacaagggccacaccaccaggatgtgccatgtcaccatccagaaacaaaaagaaatagcagaagctgcagcccaacagactcagctgaagcaagtcatgcatactgcttcgtaccactcgccttatatcccagagtatgtgggtaaccaccctgcagcttctgttgcttcagcaagccaatcccaggtatcttggcaacagcttccgcctccaccaccaacgcaacgaggccagcagccagaagggagtcagcatactcaacaacaacgagacttcagagaagagtccgaagctcgcatagtcaatagtactgtgccagaatcgaagcacatttattga

SEQ ID NO: 48711 - DNA, 850 bp, Zea mays
  Clone ID: MRT4577_144430C.1
ggcatgagcaagctgcagcagacgctggtcgacaccctcatgaccgtcgacgtctccccggacggcgccgggggcggatacgcggggcagcagatggcctgcgccgtgggcaagctcgccgacctcgtcgacttcgtggacaaggcggaccacctccggcagcagacgttgcggaacatgcacaagatcctgacgccgcggcaggcagcgcgcggcctgctcgcgctcgcggactacggtcagcgcctgcgcgcgctcagctcgctctgggcggcgcgccccagggagcccgcatagtcgtaacgagacacccgcgacggcgacagcgacgggggagaggaagcggcattgcaggcacgtgcgcgcgtggttgcctttggctgccgcccagcggagcaagaagccatgacgcggcagacgccggcctgcgatcagtgcctcggttcctcccactcccagctctgcatctggtattctggtacgggcaaccggcgtgttctgttcgctctcggaatgaaacctgaatcttctaatggttacagcagtgaattaggctttggatttgattgacagatcgaagaaattacaagtgtaaatacggtagacaaagttgtttgggtagtagaacagacgtgtactgttcagttaatgtttgtctcggtcaacctgtaactaatacgtcatcttttttttcttgtcggtgaggatgtaaacagatcatgtgaaagatgtacaacgaacaatctatggaaccagagttagacgggcatgtatcctatgcaatcatacatctcctgcaatcgagtaatttgtattattgattgtaaaccatgtgctgataatattaaaa

SEQ ID NO: 48712 - DNA, 349 bp, Zea mays
  unsure (1)..(349): unsure at all n locations
  Clone ID: MRT4577_144431C.1
ccggaacnnaagggccganccaacccacaccgtaccncgaaagaccagcaaataaagctggacatttctctttcccgcttaccttcaacgcattctcagggtgggagctaccaaagatgactggtaccgatttctggtatggaggttctccgtatcattaacgagcccactgctgctgccatcgcctacggtcttgatgccaacgacaagcaggagaagaacgtcctcatcttcgatttgggtggtggtaccttcgatgtctcccttttgaccatctccggtggtgttttcgccgtcaaagccaccgctggtgacacccatcttggttgggaagattttgataacaccc

SEQ ID NO: 48713 - DNA, 621 bp, Zea mays
  Clone ID: MRT4577_144432C.1
agacgacttacggattagggagggagaattatatctactatcgagaagggacagtgcacaagctagcgatggcggcttcatcgttgatgcacactcgtgtagggcgcagtaacttttttctattgagattatcgacttacaagtatcagcaaaaatatatgctggatgatgccatgatctggaaagcaacaccggaggaggaacgagagggggcatgggcatcaatgataacaagcatccctttcggattactatccttttactcaattgtgtctgtgaacagtgcaaatgaacaagccgtatctatctcctatgggagaatatcttagctgctaatctgaatgctgtgctagtgtctgaggcgattcaaaacatctacagcaaagtcgactacgcgtgaccacataaaaatggccgcgtggacattctccacgatgctgactgctgcggaatcatacttctcggcaggaataatgtgaatcgccgcgctagtgctggtgtagtcaatgacagccagcaactgtgctcgccaacattatatgctttcttcatacagcaagaaataagcacgctacatgtaactgctcaaaacataaggactgtggccgtgctgctagacgg

SEQ ID NO: 48714 - DNA, 510 bp, Zea mays
  unsure (1)..(510): unsure at all n locations
  Clone ID: MRT4577_144433C.1
gaacaattatggtaataataaatcggttaagaattgaaaaaaaaaaaaaaaaaaaaaaaaaaaaaaaaaaaaaaaaaaaaaaaaaaaaaaaaaaaaaaaaaaaaaaaaaaaaaaaaaaaaaaaaaaaaaaacaaaaaacccactaacaccgcccaacatgccaccaccaaccaacccccaagtaaaaaatacccaaaacaaaggctcaaaaaaagcacaaaataaaaggaaaaaccaaatagtcaaaccaaaaaacgtgcgccaaccacaaaaaaccccccatccacaaaaaaaattcccccatttgaaaaaaaccccaaggaagccccaatacaaaaaccctttcccaaccaccaatcttatacccaaatgcccacatatcctaaacccttaaccaaaaactcactctccaaaaaagttaagcgtacccccaaatttgacaccacccaatgcgccggccacacgccccaccccccaancccctaccccccttttttgcccccttccccc

SEQ ID NO: 48715 - DNA, 230 bp, Zea mays
  Clone ID: MRT4577_144434C.1
gacttccatgcacgcggcaccttacctaagctcctatacatgtagacccaccccaccctttctatctcttcccaattccacaacatacggggcttctttctatgcctgtgggcagccacaacacatctgtctatgccagatcatcattaatcaattctgtacccctgaccgccacgcatgtttaacagcacccttcctatcctgcctatcacttagacttaaccttattt

SEQ ID NO: 48716 - DNA, 631 bp, Zea mays
  unsure (1)..(631): unsure at all n locations
  Clone ID: MRT4577_144435C.1
ctctgctgctctgaagtaagtccaagtccaactccaagtctccacgagacgtacatccaacagggcagggcggcaggcggcttcgacttggagccttcgacgctcgacggcggcacggcgccgaggccgaccgcgagtccgccaccagcccaccgccgaccggtctctctcctccacgcggccctctgcctcggtcccttcgaggcttcgacagcgccaccgcgccgtcctggatctggaagcaggcgtgacgaccaccggcgaccagcgcggcttctcctccaatctctgggctccggcgacaagcacactagattgctaagtgatggaacctttatcggttcattcagttgtggcagcgaaacggaggagcgaaagagacgagactgattcagagagcaactcattcgacaaggtttttataatcataatcaacgttgataggttgggtgcgtggcttggaggcttgaggatgagcgacctagaaaacattgtctggttcgaattagtttctatagaatatagttgaagctgatcaacatgtcttttactcacctcaaggaaatcaatctgcanatacgtgcggcggcggcaacatctggtagcattgctccagcgatttcattgactg

SEQ ID NO: 48717 - DNA, 313 bp, Zea mays
  Clone ID: MRT4577_144436C.1
gaataaccgggtcgtcccacgcgatctttttatctagccattttaggcacaccagaacagaggacgattaaaaaaacaggcactgtgctgagacggccaaccacttggctggcatgtccaagtgcagcctcccagtgatggcaccgctctgcatgggctgccagggggtccaatcctgcgcccacatccacggcatcaactgcagggacagggaagaagcaaggtgggtggcacaactacctcctgaggctggtggacaacatctccaggacggggggcacgcacgtctggctccccgacgcgtcgcacctca

SEQ ID NO: 48718 - DNA, 167 bp, Zea mays
  unsure (1)..(167): unsure at all n locations
  Clone ID: MRT4577_144437C.1
atcatcacttcatctaatatgccgngacaaannngagaantgatgttgcatgcaagggtatttagattanncccnannacaataantattgntttcactctaatgaaatacttggtaaaaagttgtctctgtagttgaatattttactgtgaatattcgaacccaaa

SEQ ID NO: 48719 - DNA, 269 bp, Zea mays
  Clone ID: MRT4577_144438C.1
caaagactatgaaccagtttgagctggctttcctccacttatgctatagggtgactagctgtggtatttagccacctccagggaacaagaagaatgacgtttgctcttgcaggcatgctctacggaaagctcaaagccagctgcatcatcaaattataaggatagagaatctcgagcttatgctgaaatatgaccaacatgattggaagctccataacagacaaatggaatcaaatctgactatgattcaaaagaaggcttgtataata

SEQ ID NO: 48720 - DNA, 187 bp, Zea mays
  Clone ID: MRT4577_144439C.1
tcgacccagcttcgatagtggcgcttacaaacttctgtttgggatctcacagcagcccatggcggatggtctgtctcaaccagagcaaagatatcgtgaccagtggtgaaataaccagataggttttcttacaattaacagccaacctgctttaatggagagaaatcctactcgcctactgttggtt

SEQ ID NO: 48721 - DNA, 1227 bp, Zea mays
  Clone ID: MRT4577_14443C.1
atggagatgctccatcagcaggtgcaaaggaagaaggaaaagatggctaggctagctaacctgcaaaggcagatagacgaagcctctcaagaagttcgccatcttgctcaagatgagcagaaccgaaggcctcagcacagagaacttcatcaagagggcttcttcaacgaggatgactggtatgagaatttccatcatggaaattttgcttttgatgatgcttctcctctgtcagaagaactgcaggctacaccttggcctccgtcttacaagccacctcaactccccatgtacgacggacactcagatccgaaggagtttctgatgagctacgaagcaacaatatcctcctatggtggcaatactgcagtcatggcgaagtctttcgtcatggctgtcaagaatgttgcacaaacctggtactcctctcttcggccaggaacaatcacatcatggcagaagctaattgatatgctgatcactagtttccaagggtttcaaacgaagccggtcaccactcaaactttattccagtgcacccaagatcacgaagaatatcttcaggcgtatgtccgaaggttcttacgtctgagggcacaagcgccaacagtgcccaatgaaattgtcattgaggccatgattaaggggcttcagccgggaccttcagcccaatactttgctaggaagccccctcagactctggagaaactgcttcagaagatggatgaatacatacgcgctgacaatgactttcgacagagaagggaggaagcttacaggttctccgaaatagccaggggtttcggagggagaattcatcctagacatgtcagatcaattcattccactcagaatgatgacaggggaagccagcaacagaggccgcaatattcctcccaggcttcggggcagcagcagagctatcctcggcccccagctccaaggggcagaggtgccaggggcttcggaggaaggaaagcaaaaataccagcgtggagcaaaaacaaatgcccaatgcgtgattacaggagagcacgtgaacagtacaggggtactgttcacctatttataggcaccgttcacagcctgtacataattacatttataccctttacaatgaactacaataatgacacagaatatcatgggtctttaagtcatttcatctttaagtcggttcaccacttcgtcttgagacatgtcactataccgaagctttatggttga

SEQ ID NO: 48722 - DNA, 369 bp, Zea mays
  Clone ID: MRT4577_144440C.1
aacaggggtctcggatatggggtgccactagggtcagtggacgccggcggcgtctgaagaccttgcgtctgtgcgttcgggccagcgcaccgaccgcacggtggcgactcccactgaaggtgatgtcgggctcggctgcgggagccggctcgtgcctcgcgtagccggatggctcttggccgacttagtttgaggcgcttgatcacctgaccgcctcttctatggactcggtgagtgggggcgccgccgtcagcgccgatcgttcgtcgacgtacaccgcggattggacttagatgtgcggcacaactgacgccaaagcgcgcgccacgactcatgcgatactcgtagcatagtagcggacagagctga

SEQ ID NO: 48723 - DNA, 382 bp, Zea mays
  Clone ID: MRT4577_144441C.1
gcattaaaactccatccatcacaccgggggaccgggggataacattgatataaacattgcttcttcatgttccatgcatcaagtttggtggcactaactcggggaaggcgaccttttctttctagaggctttgttttctgataagaggatgttaaaaccatcgaccacactcaaatggccagtttaacaggaagcgcgcatgaatcccaaaacaaaaaagcgaatgccacctgtttagagaaatgggaccaactcaagtgcaacgcatcattcaaatcacttctttgaacataaaaaaaaaaaaaggggggaccttatccaaacccgtgggtactcccggaaattcctgacctgtgacagtaagggtccccatttttcctat

SEQ ID NO: 48724 - DNA, 592 bp, Zea mays
  Clone ID: MRT4577_144442C.1
ggagaggaaagggcggtttttttttgcccatatgaatcaccagtttttaaagcattttgggttcgcgggctaattaaccaccctttggggacaaaattaagtttttcaattcaaacgactaaccttaaccaaaaggggacatagttagcaccaaactaaatttccccttaagggggaacttgcaacttctgggggcataaggaacaaaggttcatttcgtccgggcagggaaggggggaaatcacaatctcaaggggccgattattaggggaggagggggttctaaacattgcttttggggcaggaaaatacgtaatgctgcccccttccggaatgttttgaaaaaattgaaaagttcaatgccccctacaaagcttccctccgaggatattgacttattgcgagtagggcctcgcctgattgccgggaaataaaaaagcgttgcatttgttgaagggtttgcacccgaaaattatcaccctgtcgaaaaaagttctcaaaagggccaagttttcccatacccatcgccatttgccccatgtaatttgcaacattgccaaaaggcccagcagggcccaaggatccaaatgct

SEQ ID NO: 48725 - DNA, 518 bp, Zea mays
  Clone ID: MRT4577_144443C.1
tgggacctcgaggcggcgggaagattttcaaagaggcgctagcaatctctatctttacatactcgttcgatgacaagggttagccttcctactgtgccgatggcccgcagctagcagacggaagaggaactccagtggcggttgggtgccaaggaacgagctggccactaatgaggcggacaagtgtgccccggggactgatcggatgaaaaatgctcaccgtttccgccccggaaccgatgctgtcggggagatccgcaagtaccaaaaaaatacggatgtgcttatccgtaagctgccgttccaacacctggtgcatgtgatcgatcagtacttcaagaccgaacgtcgtttccagagtttcgccgaagtcgcgctgcaagaggggtacgagggctacctggtcatgctctaccaggacaactacctctgcgccattcactgcaagcgcgtcaccatcatgcacaaagacctccagatcgcccgccgcatccatggtgagaaggtctaagcgttga

SEQ ID NO: 48726 - DNA, 550 bp, Zea mays
  Clone ID: MRT4577_144444C.1
ccacgcgtccggacagtgcaaactaatgctattaatgaggcctccagcgctaatgaaattgatcccacatttcttgaagcattgcctgaggatcttcgggcagaagtccttgcttctcagcagaaccgttctgccccagctgcttcctatactcccccagctgcagaagaaatagatcctgagtttttggctgctcttccaccagacatacaggctgaggttctagcccagcagcgagcacagaggattgcccactctcaaccagctggacagccagtagatatggataatgcttcaattatagcaactttccctcctgatttacgtgaagagaagctgttctgtctgcccttccttcagctttacttgctgaagctcaaatgctacgggacagagagttgagtcgctatcgtgctagagggagcctttttggtggaagctacaggcttggagggaggaggctgccaactgataatcagacagttatagacagagctgttggtgtactgtgggtagaagggttatttctactacaatgcagttaaagggt

SEQ ID NO: 48727 - DNA, 301 bp, Zea mays
  Clone ID: MRT4577_144445C.1
gtgtggtgctgaggatggatgctgagacatatactgtaatatatggtaagcttgtaagatcattgtggagaattggtacatccaagaaatataatcccgatccactctgggataaagcatgaggaactgctttacactccttgtccaactacaaggtatcactactcaagatggtattcctgatttctggaaactagactatgagtgctttacgggcgaacatgatctggcagttctcaaggcaatggagcacttacaagatgtgatcatcagatgtgagcacataaatcgtcgtagagtg

SEQ ID NO: 48728 - DNA, 881 bp, Zea mays
  Clone ID: MRT4577_144446C.1
gcacagcctgcaggattatcaccacttgaacctgggcgcggccggcgcgcacgactttttctcggcagggcagcaggccgccgccgcagctgcgatgcacggcctggctagcatcgacagtgcgtcgctcgagcacagcaccggctccaactccgtcgtctacaacggcggggtcggcgatagcaacggcgccagcgccgttggcagcggcggtggctacatgatgccgatgagcgctgccggagcaaccactacatcggcaatggtgagccacgagcagatgcatgcacgggcctacgacgaagccaagcaggctgctcagatggggtacgagagctacctggtgaacgcggagaacaatggtggcggaaggatgtctgcatgggggactgtcgtgtctgcagccgcggcggcagcagcaagcagcaacgacaacatggccgccgacgtcggccatggcggcgcgcagctcttcagtgtctggaacgacacttaagctacgcgtacgtgccggcctggctctccgaattcgaaccgatcgatgcgtcgtaaaaccgtacactgacataagtaacaacacttagggttcttcatggagaggtggccagtaagttgttacttgtcatatgttttaagttctcaatttgtagctggaaggaaagctagggtttcttctgaagggtagggtgatggcttgtgaagagtgccatgcacgcacggggttttctccatgatgacggtaccttcacttgctgccattttggggttcaggttcagaagatggataccgagtagcagtattaaccaaaagccatatttaaatgggatgatgggtaggaaattgaaccggcaagcttgcttgtaaatggtagctagggtgg

SEQ ID NO: 48729 - DNA, 381 bp, Zea mays
  Clone ID: MRT4577_144447C.1
gtctcccgctatggcatgtgatgctgcttcaaatgtttcgtttactatgctccatgtactctcagaggttctactctcccagttcccgagagtagtcataagctgatcctgacatcattcactttggtaggcctcaagttaagcaggcattcgcacaagtgatccaaggctcgctggcgaaccactccttgacatgcctcaccctgtcacccaaactattgtgcgtagtgtgaggatacctagagacaccgcactgcatcttatgacagtacaaataccgctttccaatactggcatggttctgggaccctcgactcgtagctcgagaggctcaaatgcaactggcatatgcaggacctgtatggccgtgatggctcctac

SEQ ID NO: 48730 - DNA, 224 bp, Zea mays
  Clone ID: MRT4577_144448C.1
acaaggatacactttagccaaaggggccaaaggtggacattaaattaacccttcacaacaataatgcccaccgtacacggaatacactctttgattaaaattgaaaacagttttttttgtgacgcacaccatacaaggggtacattgtacacgtattttgggggtaccttagctgtcgtccttaagcttttggattaggggcctctcgaccggggcttatgttt

SEQ ID NO: 48731 - DNA, 327 bp, Zea mays
  Clone ID: MRT4577_144449C.1
gggccgtcaactttttaagggatgaaaaaaaggttcacattcagtctcccaaaattgcaactcaaaccacattcattttcatttcctggcatttcggctaccctgtccctcactgctccttttcgatgacccccttgtccctcacattaatcccccccaaaaactttgggatttccttttttttcacatggcattttttgtttattagggccgccgaaccagataccagctccaccttttttccctcaaggatgaactcatccttgacccttttggacccgaggattgtcaccccatcaaacatttccaccttccttaccttttttt

SEQ ID NO: 48732 - DNA, 254 bp, Zea mays
  Clone ID: MRT4577_14444C.1
tcagcccacaccttccctaccacctttagttgttccgctcctgtgaatccccccggcggggggcacagaattcccccggcacacctcccaaggccaccggacgccagcagccccgtccccggccacacctacgtacgatcgcaatgctggcggcgtaccttatgccggggccttcgctcgcggacttccccggtaccgaccagaggagcccagttcctttcctccccttccctgcccgtcttcaccaccgggcc

SEQ ID NO: 48733 - DNA, 924 bp, Zea mays
  unsure (1)..(924): unsure at all n locations
  Clone ID: MRT4577_144450C.1
ggtacccccattgggtcggccggggttccccggatcactccctcgcctcccccgctgtgccggcctgcacacacagacacacacaccacagcctacagcgcttctgctgctccagctcctcgtactaccgcgcccgcgcgctgctcgttccccggcctctgcttgcttggctcgtcgagcccagaggttggtggagaggcggggcttattgccccagataggagatcggggacgcgggagggcgcgtcgcgctcgggccggtctcggttcagcgggatcacttggccgtggccgtggtcgggcctccggcgcccatgtggtgagccaagccaggcttttgttgcccggggggcagagatcttgcacttgcagcagtgaagccggcggtgcggtccggtccggtccggagccgagcggcgcccaccgccatggccggcagcgacgaggtcaaccgcaacgagtgcaaggggggcggtgccgatccacacctgggtcctcatctccaacttcaagctggcgtacaacatgctccggcgcgcggacggcaccttcgaccgcgacctggccgagttcctggaccggcgggtggcgcccgacgcgcgggcccaggagggggtctcctccttcgaccacgtgatcgacacgtcgaccggcctggaggtccgcatctaccgcgccgccgccaacaacaacggcggcggcggcgccaccctgcccatcctggacttcctcggcggcacgccggccggcggcggcgccgttcccggtcatcctcttcttccacggcggcagcttcgcgcactcgtcgtccggcacggccatctacgacaacctgtgccggcggctggtgaggctgagcaagggcgtgggtggtgtcggtgacctacccggcgcgccnccggagcaccggtacccgtgcgcgta

SEQ ID NO: 48734 - DNA, 231 bp, Zea mays
  Clone ID: MRT4577_144451C.1
cggacgcgtgggcggacgcgtgggcgcgagccatctcttctgcatacggaagaaagggcggagtctaagaaccacacggtgcacaaccatgtcgtcaaggcgcacaagaacggttttaagaaaccctagcgccaccgccagacctccacctaggggatggaccctaagttcctgaggaacctgaggtattttaggaagggcatcaaaaaaagtggttaggctgtacctgat

SEQ ID NO: 48735 - DNA, 2555 bp, Zea mays
  Clone ID: MRT4577_144452C.1
ggtaccctcggggttccccggatcactccctcgcctcccccgctgtgccggcctgcacacacagacacacacaccacagcctacagcgcttctgctgctccagctcctcgtactaccgcgcccgcgcgctgctcgttccccggcctctgcttgcttggctcgtcgagcccagaggttggtggagaggcggggcttattgccccagataggagatcggggacgcgggagggcgcgtcgcgctcgggccggtctcggttcagcgggatcacttggccgtggccgtggtcgggcctccggcgcccatgtggtgagccaagccaggcttttgttgcccggggggcagagatcttgcacttgcagcagtgaagccggcggtgcggtccggtccggtccggagccgagcggcgcccgctattaccccccctcccctccttcctgttgccctccatctctccctcgccccctgtgcccccgcctcacacaccacagcctacagcgcttctgctccagcgcccgcctcgcctcgcctcttctcctcgttctgccgcccgcgcgcgccagcctggtgctcgttccccttcttggctcgtcgagcccagaggttggtggcgtcagggatttgtattggagcggaggagaagggggctttgccccgaggagatcggggacgcgggagggcgcggcgctcgagccgagctcggttcagcgggatcacttggcgtggccggtcctccggggcccatgccgtgagcaaagccaggctttgttgcccgggggagagatcttgcgcttgcaagcggcgcccgcccaccgccatggccggcagcgacgaggtcaaccgcaacgagtgcaagggtgcggtgccgatccacacatgggtgctcatctccaacttcaagttggcgtacaacatgctccggcgggccgacggcaccttcgaccgcgacctcgccgagttcctcgaccgccgggtgccgcccgacgcacgggcccaggagggggtctcctcgtccgaccacgtcatcgacacgtccactggcctggaggtccgcatctaccgcgccgccgctaacaacggcggcgcgggcgcgggcgcggcggcggtcaccctgcccatcctggacttcctcggcggcgggccgtctccggacccgttcccggtgatcctcttcttccacggcggcagcttcgcccactcgtcctccggcacggccatctacgacaacctgtgccggcggttcgtgaagctgagcaagggcgtggtggtgtccgtgaactaccggcgcgcctccgagcaccggtacccgtgcgcctacgacgacggctggaccgcgctgaagtgggccatgtcgcagcccttcctccgcagcggcggggacgcccgggcccgcgtgttcctgtcgggcgacagctcgggcggcaacatcgcccaccacgtggccgtccgggccgccgacgccgggatcaacatatgcggcaacatcctgctgaacgccacatgttcggcggcaccgagcgcaccgagtcggagcggcggctggacggcaagtacttcgtcacgctccaggacagggactggtactggaaggcgtacctgcccgaggacgccgaccgggaccatccggcgtgcaacccgttcgggccgaacgggcggcggctcagggggctccccttcaccaagagcctcatcatcgtgtcgggcctggacctcacctgcgatcggcagctggcgtacgccgagggcctccagcaagacggccaccatgtgaaggtcgtgtaccgtgagaaggccaccgtgggtttctacctgctgtccaacacggaccactaccacgaggtcatggaggagatcggcgacttcctcgcggctaacctctagcagcacatgcacacaaacttcacatgttatagcaagaagatgggtggtaagcttgactttatagttgtaccgatctgcatctgctgctgcttggggtggtggtgggctttgctgctgataaaactctctatctaggaaagaaaccacagtgactttttttttttttgtttcgtcgtcgggttgctgatcacaaagctgcttgatgatctgcgtcgtggttgatggagggaagcctataatttcgccgtcaatcatctaacattctgtgtacagtggtggactgatggaccaacaaggaggtggacggccttttttttgttgctgtgtctgatgtagtagtatttctcatctttttatggatcggatgggatggtgcctgcctttcattctatgatgaatcgtactgtctgtctatctatctatctacccaatgccgtcgtggaacatgtttccaatctagtactactactactaggctagatgcagaggcataagaaaatgtgctactacacctctactgctggtgtgtggcttttgtctcctttcttgtccatctctgtatacaatgctgaactgctgctaaatatattgttgtaaccttgaatgcctcaagttggagaaatgtgatggccccccccatcccccccaaaaaaaaaaaaaaaaaaaaaacgaacgc

SEQ ID NO: 48736 - DNA, 266 bp, Zea mays
  Clone ID: MRT4577_144453C.1
cccccccctttttttttttttttttttttttttttttttttttttttttctattttacctatctcgttagtatacttattttagcgaagatgattaacgtctcataaattatcacttgggatggcaatgggagcatcggcctgaaggaaacattgcaacgcaagggaatggggaaaaggaaaaaagataatggggcaaaaaaaaaaaaccagcgacccggggagggagccaggggctcctttacattaaaaagggccccggggggg

SEQ ID NO: 48737 - DNA, 791 bp, Zea mays
  Clone ID: MRT4577_144454C.1
cggacgcgtgggcggacgcgtgggcggtctaagaagaccgacgactcactcacaaccaattagctcaagatcgagctatagagagaaaagctaagatcgaaacatataccaatgggcaacagccttaggtgctgcctggcctgcgtcctcccctgcggcgcgctggacctgatcaggatcgtccacctcaacggccgcatcgaggagtacggccggccggtggccgccggcgagatcctggccgccaacccgaaccacgtcctcagcaagccgtgctcccagggcgtcgccgtgcggaggatcctcatcgtgtcgccggactccgagctagagcgcggcgagatatacttcctcatcccggcctcgtcggtgccgccggagaagaagccgcagccgcagcgacagcagaagagcgtcgtcctggccggctcgcacggcaaccaggtggtggtcaacaagaagatatcgtcgtcgcaccggagacgacgcaccgccggctgcagaaccaccgtatggaagccacacctcgagtgcattgttgagggggacacttaggcagaggtggacgatgatccattcttttgctctctctttttttttttggtttttgtggatcaagcggggggctaatggctaatgcaatgtaacaccactagcagcatggtgttttgcccactttgtgtggttagtcagcatttttaatcttttttcttgggtaattgtatatccatgtaatgttttcccccttcctacatatgatgggaatgcagaggaagggttgttgccagttc

SEQ ID NO: 48738 - DNA, 822 bp, Zea mays
  Clone ID: MRT4577_144455C.1
ccggccgggacggctcagtggctcacccccagaccctcgacccccacccgcaggccatcagaacacgatagcaaatcaggcgccgccgccgcagctagcggccaacagcgatgcttgcccggcgagacgcggaggatagtggcagcggcacgaaggcagcgcacttcgtgttcgtcccgctgcgagagcagggccacctgatccctgccgtggacacggccctgttgctcgccacccacggtgcgctctgcacaatcgtcggggacccgtacacggctgcgctggtgcgccagaccatcgaggccgcccaggcggccggactggcggtcaggcttgctgagttcccgctcgactacgccgagtccggcctgccggaaggggcggaccgcggagacagcgttccagcggtgcacatgtcgagctactaccgcggcatggcgctcctctgcgcgccaatcgagagctacctccgcgcgaacgcgccgtacccgacgtgcgtggtgtcggacttcgtccacccgtggaccaaggagctcgccgccaacctcggagtcccgcggctcaccttcttcagcatgtgcgccttcggcctgctgtgccagcgcaacctggagaggttcaacgcgtacgacggcgtccaaggctccgacgagccggtggtcgtgccggggctggagaagaggttcgtggtgacgagggcgcaggccccgggcgggtccttcttccgcgggatcccagtcccgtggtgggaggacttcgcggactacgtcgagcgcgcgcaggccgaggccgacggcatcatcatcaacacctttcttgagc

SEQ ID NO: 48739 - DNA, 379 bp, Zea mays
  Clone ID: MRT4577_144456C.1
aaaagggaaaaccctcgccttttttttcccggcaaatttttttaccaaccggcaaaaatggggggggcaaaaggtttttttaagacatttggcccccaacagggggggtccccccgggtaaaaaaagggcgggcaattttcccaaaccacttggagggttaaaactttgggaaacctggaacgcaaaccatttttggggaaccttaaaaccaaaccacttaggaaaggcccaagggtttggagaaaaataaacccaagcttggaccccggggttcaccccggaatttccgcccgggccccggggggggaccaagttttccttttggggggggttttaaaacttgggggaaataagggaaaaacgtgtttcccgggggaa

SEQ ID NO: 48740 - DNA, 409 bp, Zea mays
  Clone ID: MRT4577_144457C.1
aaaaccaaaagccttttgggtttattaccctccacaggcccgcaacaggcaaaaaaaaacccccttaaggggggccaaagaaaaggaaaaaggcggcttcgttaccagggggggaactaaaacaaaagggcaaaaaaggcgggggttacaacaaacccgggggcgccacaggggtttgtaaaaagcctaacccgggttccaagaccccaaaaaccaggcccccaactagcaaagggacaataaggaaaatcggattccctcccaggggccccatttcacgaactccagtcccgaaagaagcccaaaattcaggcaaaatcaaaagggttggattggcaaaacccgcaaaacctgcagcatttgccccggtatggggccccccagtatgcaggaggcttaggggccattg

SEQ ID NO: 48741 - DNA, 327 bp, Zea mays
  Clone ID: MRT4577_144458C.1
agccataatcttattgggaggggttttaaaagagaggagttgctcatcacccatctgcactaacaactagaatattctctaactaaaacatcactagatatatgcaaaccgtcacaaaatgccggtaatgattgctacatgacctaccttaattcattaatggtaaaatctgggccacgatttcaatagtttacaatataggctgacaacataacaggtctaccatcttacttatctcagacacaggatctgcactaccatggaaaaccaacgtgtacatacccgcatcaaatgccatggcatatgctatccaatgcgtcattttac

SEQ ID NO: 48742 - DNA, 554 bp, Zea mays
  Clone ID: MRT4577_144459C.1
ctcgatatcaataattttgggaagcaggacgtactacatactgggcatcctccagccataagcatgcaatgcatactgccacatcagtcattgcgcaaatgactatgtggtcatgctctaccctttgagcggtagtccatatttcaaagcacgctcttgtgtaaatataacatatgcaaactcgggaactgtaattactattctcatgtatcaataagagagacatgtcctatttgcacctataatatttatgcaacaatcattgacacacgtacaataccagcataagattgttaaataaaagtgcggaactctgtgctataaatatgatatacattcgtggaaccgagatgcttatatatataaggctttgctttgctgcgtgatgctttgtatttgacactatcattaacttgttgaacatgactaacagagctttaagttttcgatgttgttcctgcgttaactggaaagatctaatttgcaagcgtacttagcatgattaacatttcagctaaactacttcagtacctatcacttatcatttagcacat

SEQ ID NO: 48743 - DNA, 1071 bp, Zea mays
  Clone ID: MRT4577_14445C.1
atgccaccgaagaaagcttcggcgacaggggctgccgctctgcagccactggatccgaaccaggagaccctttctcttcgagaggctcggagccagaagaggaaggccactagtccaacgccccaggaggatgagttggaccaagagatgagcaagaacgaaggccccagcacagggagcttcatcaagaaggattgtttgatgatgatggatgaactacaggctacaccttggcctccatcttacaaaccacctcagcttcccatgtacgacgggcactcagatccgaagcagtttctgatgagctacgaagctaccatatcttcatatggaggcaatactgcagtcatggcaaaatcttttgtcatggcagtcaagaatgttgcacaaacctggtactcctctcttcggccaggaacaatcacatcatggcagaagctgaaggacatgctgatcaccagtttccaagggtttcagacgaagccagttacttctcaagctttgttccagtgcacgcaggatcacgaggaataccttcaggcgtatgttcgaaggttcttgcgtctgagggcacaagcgccaacagtgcccaatgaaattgtcattgaggccatgatcaaggggcttcgaccaggaccttcgacccaatacttcgccaggaaactccctcaaaccttggagaaattgcttcagaagatggatgaatacatccgcgctgataatgactttcgtcaaagaagggaggaagcttacaggttctccgaaatgaccaggggcttcgtagggagagtccacccaaggcacgtcagatcaatccactctactcagaatgacgatagaggaggtcaccagcagaggccgcaatattcctcccagacttcggggcagcaacaaagctatcctcggcctccagctccaaggggcagaggcgccaggggcttcggtggaaggtttggggatcagcccaggaaaatttattgcctattctgcggtgaggacaagggccatactacaagaatgtgccatgtcaccatccagaaacagaaggagatagcagaagctgcagcctaa

SEQ ID NO: 48744 - DNA, 395 bp, Zea mays
  Clone ID: MRT4577_144460C.1
ctattttaaggtacaagctttctttgtccagaacaccctagaaaaaagtacatcaaattagtatattgttgctacatttgcaaataaaaatacagttttgatgccttatctacctccactagacggtgttgcagccttatgcaccagcttcagctggtgcaatcaaggttaaccatcattaagttgatggctcatataaatctaaacataaaagtgaaagtagatgaaatagaaatagacaccaaatgcatttggtaaaaattaaggagggggaggggcaaaatttactctgcagcagcttgcatgctagacaagaaatcttgagcatcaacaacaaagacaaccgcagcaactttaggcaggacttcatcaagtttgggtttgagcctagcatg

SEQ ID NO: 48745 - DNA, 583 bp, Zea mays
  unsure (1)..(583): unsure at all n locations
  Clone ID: MRT4577_144461C.1
tcggcggcgtcagcagcggcattgcccaagtcgaccaanagacagttctgtcgtcgataagcaagtcattggcgggggtaacgtggcgccggtgcaacgtaacactgcatcctctgcgcccacaccccgtaggcccgtcgacactacagacgttgccggggagatcaaggcgcagttcgttggagctgcagacgctgtcagggcactttcaccacttcttgagatcgggaggcggaggtaccaccaccgaagctcagtgtaccatgtttcatcaagcatggtgtcagcgattgccttgccgcattcggacgttggaggcatcgaactcctggacgttggaagtgagaaggtgttgggaggaagaagcctgtgttcgacactggagaagctctatgtctgggagaagaaattgtatgatgaggttaaggctgaagagaagatgcgtctgctgcttgcaaagaatgcaaagcggctgaagtacttggatctgaaaggggcagaagctcagaagatcgagccgatccgaaatatggtcaggaaagttgtcaacaaaattaagaatatctgtaagagtaattaccaa

SEQ ID NO: 48746 - DNA, 295 bp, Zea mays
  Clone ID: MRT4577_144462C.1
cgacgaatcggttcatgagatcctcggtgtccgcaaggtatatcattcctacgtgctcgatcgtgcatgcacgcacagtgttttttttttttttctctctctctttttcttgaggatacatatgccaatattttcagttaatttggtatcgaacactctctgatcatccctgcaacttttggtgttaagaggttgtgttgtttaggactataatctgtctatattatatattccaacaaataatgtgttatctggctggattatgtaattctggacagattattttcttaaacaa

SEQ ID NO: 48747 - DNA, 439 bp, Zea mays
  unsure (1)..(439): unsure at all n locations
  Clone ID: MRT4577_144463C.1
aacccgagcgacaccaagagggaggngcncgnngcccncgcacncccggcacacgcagcgagcgccaccaccacgcanacaagcggcagcngcggcggccagccaccgccgccggnncaacaaccgccgccggngcancagccaccgccgggggaccggccaccaccggngcancacccaccgccggaccaccagccgccgccggaccaccngccaccgccggaccangggccgacgccggnacaacngccgccgccaccangccacaacccaacacaaccgccccggccccagccncaaccccagccacacccangcccgngccaacagccgcanccaagcccgngccagcngcagggaaccngcggcgnnggcagcaccccgaacccgggccagagcgacaagaaccngaggcaacagagcagcccgacggagacgc

SEQ ID NO: 48748 - DNA, 2094 bp, Zea mays
  Clone ID: MRT4577_144464C.1
atggagagctttcatgattataagatggctgataatcactctattgtagagcaagctcatgaaatacagtgtatagccaaggagctcgaccatcttaagatagtccttcctgaccgatttgtggctggatgcattattgcaaagttgccttctacatggaggaacttcgccacatctctgaaacataagagacaggagatatcagttgaaaatatgatagtgtctctggatgttgaggagaaagctcgggctaaggacacgggatctaaaggaggcgagggccactccagcgccaacatggttcaaaggaaccacaacaatggcaaaagaaagccaaaatctaacaagcccaacaaaactaccatcttcaagaagaagaagaacaaggctgaattgacatgtttcgcatgtggcgaggcgggtcattttgccaaggattgtcctgatcgagcggatcgtcgtggcaaaaagggcaatgtcaacacagtggtcgctagcaatgaggaagacaaagggtatggtaatttacctttcatcttctcagtatttcaattacatagttggtggcttgatactggtgctaatgttcatgtgtgttctgacattaacttgttctcctcttatcagggtgcccgggattcttccgtcctaatggggaatgggttacatgcttctgttcatggcactagcacggtggatctaaagtttacttcgagaaagatcgtgcagctgaagaacgtgcatcatgtcccttctatacacaagaatctcgtcagcggaacccttctatgtagagatgggttcaagaacatggcattattcatgagaggacgcctccctattcacccgaatcaaacgggattgctgaaaggaaaaaccgggtgcatggcgaaagtcaatgtaccaattaataaaaagcgcaagcttggtccaaggacaatggattgtgtctttcttggatatgcttcgtgtagcatagcatatagatttttagtagttaaatctgaagttcctgatgtgtatgttgatactattatggaatcatgtgatgctactttctttgaacacatatttccaatgaaagacattcatagcaattctagatactcttctgagataactcctgaacatagtacatctgttgagagttctgaacagccacatgaaattgtcctagagaaggatgacaatgatgctcctaaaaggagcaagatacaaagggttgaaaaatcctttggtgatgatttcattgtataccttgtggacgatactcctactaccattgtagaagcatttgcatctctagatgcagatgattggaaagaagcagttcataatgagatggactccattctttcaaatggctttgccattaatgaggcagacaggtgtgtatattatcgctgtggtgggggcgaaggagttatattgtgcttatatgttgatgatatattgatatttggcacaaacgttgatgtgatcaatgaagtcaagtcttttctatcaaagagttttgacatgaaagatctgggggaagctgatgtgattctaaacatcaagctgattaaggcagatgtgagcaaattaagtaggttcatgtcaaaccccaggactgatcattggcatgcacttgagcgggttatgcgctacctgcaagatgagctttatgccaccagtggttatgtctttactattggtggaggtgcggtatcatggaggtcatgcaagcagaccatcttgacgaggtcaaccatgcaagtcgagctagctgcacttgacacagcaaccgttgaggcagaatggttgcgtgaactcttgatggacttgtcggtggttgagaaaccaataccagctatccttatgaactgtgacaatcagacagtgattgttaaagtgacaagttctaaggataatgggaagtcatcaagacatgtcaaaagacgatcgaagtctgtcagaaagttgagaaactccagagttataagtgtgacttatatttcaacagataaaaatctggcagatccttttaccaagggactaccacgtaatgtgatagaaatcgcatcaagagatatgagtatgagacccatataa

SEQ ID NO: 48749 - DNA, 3567 bp, Zea mays
  Clone ID: MRT4577_144465C.1
atggctgcttttgccgatgcgctcaagccagaaaagttcaatggtatgcactttaagagatggcaagtcaaggccacgctctggcttactgctatgaatgtcttccatgttagtaaaggcagacctgagggtccactgactcctgaacaggagaaagagtacgaccatgccaatactatgttcacgggagccgttcttagcgcccttgttgaccgtctggttgatgcgaatatgcagtacacagacgggaaagagttgtgggatgcacttactactaagtatggtgcatcagatgctggcagtgacctatatatcatggagagctttcatgattataagatggttgataatcgctctattgtagagcaagctcatgaaatacagtgtatagccaaggagctcgaccaccttaagatagtccttcctgaccgatttgtggctgggtgcattattgcaaagttgccttctacatggaggaacttcgccacagctctgaaacataagagacaggagatatcagttgaaaatatgatagcgtctctggatgttgaggagaaagctcgggcaaaggacacgggatctaaaggaggcgagggccactccagcgccaacatggttcagaagaaccacaacaagggcaaaggaaagccaaaatctaacaagcccaacaaaactaccaacttcaagaacaagaagaacaaggctgaattgacatgtttcgcatgtggcgaggcgggtcattttgccaaggattgtcccgatcgagcggatcgccgtggcaaaaagggcaatgtcaacacagtggtcgctagcaatgaggaagacaaagggtatgataatttacctttcatcttctcagtatttcaatcacctagctggtggcttgatactggtgctaatgttcatggcgcccgggattcttccgtgctaatggggaatgggtcacatgcttctgttcatggcactggcacggtggatctgaagtttacttcgggaaagatcgtgcagctgaagaacgtgcatcatgtcccttctatacacaagaatctcgttagcggaacccttctatgtagagatgggttcaagtcgaagcaacctcgaaagcctcataaggctgctgaggagagacacttggcaccgctagaactcatacattctgatctttgtgagatgaatggtgtgttgacaaaaggtggtaagagatacttcatgacattgattgatgatgcgtctagattttgctatgtatacttgctaaaaactaaagatgaggctttagactactttaaaatctataaggctgaagttgaaaaccaactagagagaaagatcaaacgtcttagatcagatcgtggtggcgagttctttcccaaagtctttgatgatttctgtgcagaacatggcattattcatgagaggactcctccctattcacccgagtcaaacgggattgctgaaaggaaaaaccgtacgttgactgacctggtgaatgccatgttagacacttgtggtttatctaaggcatggtggggggaggcagtcctgacttcatgtcatgttctgaatagaattcctatgggcaaagaagagaaaaccccttatgagaagtgggttgggagaaaaccatcactttcatacttgcgcacttgggggtgcatggcgaaagtcaatgtaccaattaataaaaagcgcaagcttggtccaaggacagtggattgtgtctttcttggatatgcttcgtgtagcatagcttatagatttttagtagttaaatctgaagttcctgatgtgtatgttgatactattatggaatcacgtgatgctactttctttgagcatatatttccaatgaaagacattcatagcaattctagatactcttctgagataattcctgaacataatacacctattgagagttttgaacagccacatgaaattgtcctagaggaggatgacaatgatgctcctaaaaggagcaagagacaaagggttgaaaaatcctttggtaatgatttcattgtgtaccttgtggacgatactcctactaccattgcagaagcatttgcatctccagatgcagatgattggaaagaagcagttcataatgagatggactccattctttcaaatggtacgtgggaagtcactgatcgaccctatggatgcaaacctgtgggttgtaagtgggtgtttaaaaagaagctcaagtctgatggtacaattgaaaagtacaaggctaggcttgtggctaaaggctatactcagaaagaaggagaagacttctttgatacttactcacctgttgctagaatgaccactattcgagtactactttctttggctgcctcgtatggtctccttgttcatcagatggatgtaaagacagcttttcttaatggagagctggacgaggaaatctatatggaacagcctgatggatttgtagtaaagggtcaagaaagcaaggtgtgcaagttattgaaatctttgtatggtctgaagcaagcaccaaagcagtggcatgagaagtttgacacaactctaacgtctgcaggctttgccattaatgaggcagacaggtgtgtatattatcgctgtggtgggggcgaaggagttatattgtgcttatatgttgatgatatattgatgtttggcacaaacattgatgtgatcaatgaagtcaagtcttttctatcaaagagttttgatatgaaagatctgggagaagctgatgtgattctaaacatcaagctgattaaggcagatggtgggattactctctcgcaatctcactatgttgaaaaggttttgaagcgatttggcttctctgagtgcaaaccttctccaacaccttatgatcccaagaacaagagaattggtttagaccaattgatatactctcagattgtcggttcactcatgtatcttgctggtgcaacaagacccgatatctcgtttgctgtgagcaaattgagtaggttcatgtcaaaccccgggactgatcattggcatgcacttgagcgggttatgcgctacctgcaaggtacaatgagttatgggattcactattctggtcagcatgcagtacttgaaggatatagtgattcgaactggatatctgatgcagacgagctttatgccaccagtggttatgtctttactattggtggaggtgcggtatcatggaggtcatgcaagcagaccattttgacgaggtcaaccatggaagccgagctagctgcacttgacacagcaaccgttgaggcagaatggttgcgtgaactcttgatggacttgccggtggttgagaaaccaataccagctatccttatgaactgtgacaatcagacagtgattgctaaagtgacgagttctaaggataatggaaagtcatcaagacatgtcaaaagacgattgaagtctgtcagaaagttgagaaactccggagttataagtgtgacttatatttcaacagataaaaatctggcagatccttttaccaagggactaccacgtaatgtgatagaaatcgcatcaagagagatgggtatgagacccgaataa

SEQ ID NO: 48750 - DNA, 3881 bp, Zea mays
  Clone ID: MRT4577_144466C.1
atggctgcttttgccgacgcgctgaagccagaaaagtttaatggtatgcactttaagagatggcaagtcaaggccacgctctggcttactgctatgaatgtcttccatgttagtaaaggcagacctgagggtccactgactcctgaacaggagaaagagtacgaccatgccaatactatgttcacgggagccgttcttagcgcccttgttgaccgtctggttgatgcgaatatgcagtacacagacgggaaacagttgtgggatgcacttactactaagtatggtgcatcagatgctggcagtgacctgtatatcatggagagctttcatgattataagatggttgataatcgctctattgtagagcaagctcatgaaatacagtgtatagccaaggagctcgaccaccttaagatagtccttcctgaccgatttgtggccggatgcattattgcaaagttgccttctacatggaggaacttcgccacagctctgaaacataagagacaggagatatcagttgaaaatctgatagcgtctctggatgttgaggagaaagctcgggctaaggacacgggatctaaaggaggcgagggccactccagcgccaacatggttcagaagaaccacaacaagggcaaagggaagccaaaatctaacaagcccaacaaaactaccaacttcaagaagaagaagaacaaggctgaattgacatgtttcgcatgtggcgaggcgggtcattttgccaaggattgtcccgatcgagcggatcgccgtggcaaaaagggcaatgtcaacacagtggtcgctagcaatgaggaagacaaagggtatggtaatttacctttcatcttctcagtatttcaatcacctagatggtggctggaggagtacagggatgttcggatgggtgcggtgcatgtgcacgacgccgccatggcgcatatcctggtgttcgagagcccggcagcgtccgggaggcacatctgcgcccagtccatctcccactggagcgacttcgcggccaaggtcgccgagctgtaccctgagtacaaggtgcccaagttccccaaggatacccagcctgggctggtgcgacagggagccgaggaggggtccaagaagctcgtcgcgttggggctgcacttcagccctctggagaagatcatcagggacgctgtggaggccctcaagagcagaggctacatttcgtagctagccgaccgacggcagctatagtggagtagtatgcctgtcgaatttcgattcccaagtggcaaattctgcaaaacgagttcgccaatatgaacaataaataaagaacgttgtgataaaataaagcagattttctgttgcaaggttctaagtgccatagttgtgtgcagtcgaagcaacctcgaaagcctcataaggctgctgaggagagacacctggcaccactagaactcatacattctgatctttgtgagatgaatggtgtgttgacaaaaggtggtaagagatacttcatgacattgattgatgatgcgtctagattttgctatgtatacttgctaaaaactaaagatgaggctttagactactttaaaatctataaggctgaggttgaaaaccaactagagagaaagatcaaacgtcttagatcagatcgtggtggcgagttctttcccaaagtctttgatgatttctgtgcagaacatggcattattcatgagaggactcctccctattcacccgagtcaaacgggattgctgaaaggaaaaaccgtacgttgactgacctggtgaatgccatgttagacacttgtggtttatctaaggcatggtggggggaggcagtcctgacttcatgtcatgttctgaatagaattcctatgggcaaagaagagaaaaccccttatgagaagtgggttgggagaaaaccatcactttcatacttgcgcacttgggggtgcatggcgaaagtcaatgtaccaattaataaaaagcgcaagcttggtccaaggacagtggattgtgtctttcttggatatgcttcgtgtagcatagcatatagatttttagtagttaaatctgaagttcctgatgtgtatgttgatactattatggaatcacgtgatgctactttctttgagcatatatttccaatgaaagacattcatagcaattctagatactcttctgagataattcctgaacataatacacctattgagagttttgaacagccacatgaaattgtcctagaggaggatgacaatgatgctcctaaaaggagcaagagacaaagggttgaaaaatcctttggtaatgatttcattgtgtaccttgtggacgatactcctactaccattgcagaagcatttgcatctccagatgcagatgattggaaagaagcagttcataatgagatggactctattctttcaaatggtacgtgggaagtcactgatcgaccctatggatgcaaacccgtgggttgtaagtgggtgtttaaaaagaagctcaagcctgatggtacaattgaaaagtacaaggctaggcttgtggctaaaggctatactcagaaagaaggagaagacttctttgatacttactcacctgttgctagaatgaccactattcgagtactactttctttggctgcctcgtatggtctccttgttcatcagatggatgtaaagacagcttttcttaatggagagctggacgaggaaatctatatggaacagcctgatggatttgtagtaaagggtcaagaaagcaaggtgtgcaagttattgaaatctttgtatggtctgaagcaagcaccaaagcagtggcatgagaagtttgacactactctaacgtctgcaggctttgccattaatgaggcagacaggtgtgtatattatcgctgtggtgggggcgaaggagttatattgtgcttatatgttgatgatatattgatatttggcacaaacattgatgtgatcaatgaagtcaagtcttttctatcaaagagttttgatatgaaagatctgggagaagctgatgtgattctaaacatcaagctgattaaggcagatggtgggattactctctcgcaatctcactatgttgaaaaggttttgaagcgatttggcttctctgagtgcaaaccttctccaacaccttatgatcccagtgtgacactgcgaaagaacaagagaattggtttagaccaattgagatactctcagattgtcggttcactcatgtatcttgctggtgcaacaaggcccgatatctcgtttgctgtgagcaaattgagtaggttcatgtcaaaccccgggactgatcattggcatgcacttgagcgggttatgcgctacctgcaaggtacaatgagttatggaattcactattctggtcagcatgcagtacttgaaggatatagtgattcgaactggatatctgatgcagacgagctttatgccaccagtggttatgtctttactattggtggaggtgcggtatcatggaggtcatgcaagcagaccattttgacgaggtcaaccatggaagccgagctagctgcacttgacacagcaaccgttgaggcagaatggttgcgtgaactcttgatggacttgccggtggttgagaaaccaataccagctatccttatgaactgtgacaatcagacagtgattgctaaagtgacgagttctaaggataatggaaagtcatcaagacatgtcaaaagacgattgaagtctgtcagaaagttgagaaactccggagttataagtgtgacttatatttcaacagataaaaatctggcagatccttttaccaagggactaccacgtaatgtgatagaaatcgcatcgagagagatgggtatgagacccgaataa

SEQ ID NO: 48751 - DNA, 2247 bp, Zea mays
  Clone ID: MRT4577_144467C.1
atggctgcttttgccgacgcgctgaagccagaaaagtttaatggtatgcactttaagagatggcaagtcaaggccacgctctggcttactgctatgaatgtcttccatgttagtaaaggcagacctgagggtccactgactcctgaacaggagaaagagtacgaccatgccaatactatgttcacgggagccgttcttagcgcccttgttgaccgtctggttgatgcgaatatgcagtacacagacgggaaacagttgtgggatgcacttactactaagtatggtgcatcagatgctggcagtgacctgtatatcatggagagctttcatgattataagatggttgataatcgctctattgtagagcaagctcatgaaatacagtgtatagccaaggagctcgaccaccttaagatagtccttcctgcccgatttgtggccggatgcattattgcaaagttgccttctacatggaggaacttcgccacagctctgaaacataagagacaggagatatcagttgaaaatctgatagcgtctctggatgttgaggagaaagctcgggctaaggacacgggatctaaaggaggcgagggccactccagcgccaacatggttcagaagaaccacaacaagggcaaaggaaagccaaaatctaacaagcccaacaaaactaccaacttcaagaagaagaagaacaaggctgaattgacatgtttcgcatgtggcgaggcgggtcattttgccaaggattgtcccgatcgagcggatcgccgtgacaaaaagggcaatgtcaacacagtggtcgctagcaatgaggaagacaaagggtatggtaatttacctttcatcttctcagtatttcaatcacctagctggtggcttgatactggtgctaatgttcatgtgtgttctgacatcaacttgttctcttctcatcagggcgcccgggattcttccgtgctaatggggaatgggtcacatgcttctgttcatggcactggcacggtggatctgaagtttacttcgggaaagatcgtgcagctgaagaacgtgcatcatgtcccttctatacacaagaatctcgttagcggaacccttctatgtagagatgggttcaaggtagttttagagtccaataaattagttgtgtccaagtctggacaatttattggtaaaggctatgattgcggaggcttgttccgcttttctttgttagatttcaataataagtctgtgaaccatatttgtgctaatgttgatgatcttgcgagtatttggcattctcgtttgtgtcatattaattttggctctatgtctcggcttgcaaccatgagtttaattccgaatatcaccatagtcaaaggttctaagtgccatagttgtgtgcagtcgaagcaacctcgaaagcctcataaggctgctgaggagagacacctggcaccactagaactcatacattatgatctttgtgagatgaatggtgtgttgacaaaaggtggtaagagatacttcatgacattgattgatgatgcgtctagattttgctatgtatacttgctaaaaactaaagatgaggctttagactactttaaaatctataaggctgaggttgaaaaccaactagagagaaagatcaaacgtcttagatcagatcgtggtggcgagttctttcccaaagtctttgatgatttctgtgcagaacatggcattattcatgagaggactcctccctattcacccgagtcaaacgggattgctgaaaggaaaaaccgtacgttgactgacctggtgaatgccatgttagacacttgtggtttatctaaggcatggtggggggaggcagtcctgacttcatgtcatgttctgaatagaattcctatgggcaaagaagagaaaaccccttatgagaagtgggttgggagaaaaccatcactttcatacttgcgtacttgggggtgcatggcgaaagtcaatgtaccaattaataaaaagcgcaagcttggtccaaggacagtggattgtgtctttcttggatatgcttcgtgtagcatagcatatagatttttagtagttaaatctgaagttcctgatgtgtatgttgatactattatggaatcacgtgatgctactttctttgagcatatatttccaatgaaagacattcatagcaattgttgggggccttcggcttccgaaggtcctcaaaaacatgatttaacaatgtttctggagtataatgtgtga

SEQ ID NO: 48752 - DNA, 460 bp, Zea mays
  Clone ID: MRT4577_144468C.1
atcgaattttgaatcccttaataagttatacttgtccattcatttgtcttgttagctcaggggatcaccctgtcaacatgcattattgcccacaataatgcattattggctctactggtatcaaacaattttgctgagattaaaagtaatgtatttaagcgtgttagcaaagagaatcttcataatttggtatactatggtgagtgtgcttatttatacgcatattattccaaaccatgtgcttttgtatttgttctttggttctttatgtgctgagctacttcatcatcttagccttttagccatgttaaaaaaatgctaagctggactttaatatttatctacataggcttcttcacaaaaactgaaccatcttcaaacagctttgtgtacatttttatcaatgtaaggttcaaaaccattgatctaaacaactagcttcaaccagcagtttgatggt

SEQ ID NO: 48753 - DNA, 2019 bp, Zea mays
  Clone ID: MRT4577_144469C.1
acaggactcctcctcccccttccctccccctaaaagctaaaaacatttggagagagagagagagggagatcgaggggaaaccgagcaaccaagacgcacacgacgatggagcgagaggacgcgtgccgggtggcgctgctggacgcggccggcggcgagggcggcaagaagcagcagcagctcgcggcgcgggtgtgggaggagtcgaggaagctgtgggacatcgtggcgccggccatcttcagccgcgtcgtcacctacagcatgaacgtcatcacgcaggccttcgccggccacctcggcgacctcgagctcgccgccatctccatcgccaacaccgtcgtcgtcggcttcaacttcggcctcatgttgggcatggcgagcgcgctggagacgctgtgcgggcaggcgttcggcgcgaagaagttccacatgatgggcgtgtacatgcagcggtcgtggatcgtgctgttcatgtgcgcggtgctgctgctgcccatgtacttcttcgcggaggacgtgctgctgctgacggggcagccgccggagctggcggcgatggcggggaaggtgtgcgtgtggttcatcccgctgcacttctccttcgccttcctcttcccgctgcagcgcttcctgcagtgccagatgaggaactccgccaacgccgccgccgccgcagccgcgctctgcgtccacctcctcgccagctggctcctcgtctccaggctccgcttcggcctcgcgggcatcgccctcacgctcaacttctcctggtgggccaccggcgccatgctcttcgcctacgtcgcatgcggcggctgccccgacacctggcacggcttctcgctcgaggccttcgccggcatgtgggagttcgtcaagctatcctccgcgtccggtgtcatgctatgcttggagaactggtactaccggatcctcgtcttgttgacgggaaacctaaaagatgcagccattgccgtcgacgctctgtccatatgcatgtcaattaacgggtggcagatgatgattccgttggcgttcttcgccggcaccggtacacagacgggaaacagttgtgggatgcacttactactaagtatggtgcatcagatgctggcagtgacctgtatatcatggagagctttcatgattataagatggttgataatcgctctattgtagagcaagctcatgaaatacagtgtatagccaaggagctcgaccaccttaagatagtccttcctgaccgatttgtggccggatgcattattgcaaagttgccttctacatggaggaacttcgccacagctctgaaacataagagacaggagatatcagttgaaaatctgatagcgtctctggatgttgaggagaaagctcgggctaaggacacgggatctaaaggaggcgagggccactccagcgccaacatggttcagaagaaccacaacaagggcaaaggaaagccaaaatctaacaagcccaacaaaactaccaacttcaagaagaagaagaacaaggctgaattgacatgtttcgcatgtggcgaggcgggtcattttgccaaggattgtcctgatcgagcggatcgccgtggcaaaaagggcaatgtcaacacagtggtcgctagcaatgaggaagacaaaggggcgcccgggattcttccgtgctaatggggaatgggtcacatgcttctgttcatggcactggcacggtggatctgaagtttacttcgggaaagatcgtgcagctgaagaacgtgcatcatgtcccttctatacacaagaatctcgttagcggaacccttctatgtagagatgggttcaaggtagttttggagtccaataaattagttgtgtccaagtctggacaatttattggtaaaggctatgattgcggaggcttgttccgcttttctttgttagatttcaataataagtctgtgaaccatatttgtgcgaaaaaaaaaaaaaaaaggggcccttggcattctcgtttgtgtcatattaattttggctc

SEQ ID NO: 48754 - DNA, 385 bp, Zea mays
  Clone ID: MRT4577_14446C.1
gccggccgggctgcgagaatcgccatcctgaatcctccgcttccccgcctgcccccgcgcatcaagcagcccccgcccccgcgcatcccgcagccttggcgtcgtggccgccgcctctgctccctcctccatcccgcgcaacaacgacgaccgtcggggcctcgcctggcagatcaagcggggaatccacccgccaggcgtctccctgacagcggtagacggtggcggcaatgggggccgagagcgaggatgccccttccccaccctctaccctcccttgcgattccagcattggtgaccgcatccccgacgtccgaagaatggcgctcttcgactcctccctcgccgccgtcctctaacacctcacactcacatccaccaccac

SEQ ID NO: 48755 - DNA, 410 bp, Zea mays
  Clone ID: MRT4577_144470C.1
tgagatactgtaatatcttgggatacgttgttgaacatgacagtgggaagtgtagaagttggatcatatgcctgccaactgatgaagtaccttcttcactgaagcctttattgttgtaattgtgatgatcggtgatattccacatggcatagtttgacccgatcatgaaaacaacttccatggcagctatcagtggtggatatatgttatcctgtggggccacctggccccacatgtttttgccaaaaatatgtttatccctcttcatagaatttgcaactatatatatctcaattgtgtagtgcttgtgttaattgacttaaaaatcaactaacttggccccgctgttatttaatccttaatctgccactgctatcatttgatcatgtcgaccgcgacgttaatctaaa

SEQ ID NO: 48756 - DNA, 285 bp, Zea mays
  Clone ID: MRT4577_144471C.1
taaaaccaggtctgtttcttaggtgcaggaaagaaagtcccccccttttttgggggaagggtctaacaataaaacggattgtttattttctggcgtgccgagagcaagagcccgttcaagcatggtggtgcggggctacgataatataaaaacatttctggggctttttgcctataaggagcctcccccaacggggggggccccctttcccggaaaaaaaccaccaattttgggctttgtttcaaataagagattttttcggcccttttgttttcttttttcccc

SEQ ID NO: 48757 - DNA, 416 bp, Zea mays
  Clone ID: MRT4577_144472C.1
ttccaggtttcgacgctagccagtcactctctatacacagtcacttctgacacccacgttgtgtaccgcccttcggcatcaatcgttcattctctcagcaaacaaacaaacaacccgaaaactctctctccgtcgaacctaccagtctctcacttcatccgactaccaatcaaccaaaatgcgtttcgctatctccgtcgctgcccttgctggcgccgccatggccgctcctagcgctggctaccccgagggcaagcccgccgacaacgtcgtggttgagtggaccaccgtcgtcaagaccgtttacgtcaccgagggttaccgatacgaggctcctaccttcactgccgtctacgaggccccagcagtcaccaccacccctgtctatgaagctcccgcttaatccactggcaagc

SEQ ID NO: 48758 - DNA, 379 bp, Zea mays
  Clone ID: MRT4577_144473C.1
agctactccggtagtaaggaccggtggtgaaaatccacaacaacggcagtttatggtgatggaaggcatttgggtaccttcacacgatacaactaataatagagtttacgctcctgtggcgacacaaccgccgcaatcttcaacgtcgggagagagaagcaatcggggttgcaaatctcccgcaacatcttctactactacacacacaccacaccttcttcctctttcataaatatatagttaccgatttgtatgaaaatcttgtttcttctttatatatttgttttgtaaccaagaatgttcgttctaggtttaagagttttgaataaattgtaacaatagatatacattgcacacaattgaataaaagaaaaagttt

SEQ ID NO: 48759 - DNA, 1088 bp, Zea mays
  Clone ID: MRT4577_144474C.1
cctctccacgcgcacgagctcccgctcaactggacggtcgggatgccggggatcctggcggggacggtcgaggacgcgctcatcgcctactcggcgatcgtcgaccagtcccagccgtcctacttgcggccggaactgaatcttcctcagctcggctccacactctccatcggcaacatcaagctcgccagatacggaaagtggttcaatgacagcgccgaggacatcaggagcggctgcgacaaggcgctgcaggcgctgcgcgcgaactacggctggcagaccgtggacgtgaccatcccggaggtggaggagatgcggctggcgcactacgtcaccatcggctccgagtgcacgacgtcgctcgccaagtacctcgacaagctcaagaggtccgagatcggctgggacgcgagggtggcgctcagcgtctacggctccttcagcagcagggcgtacctgaacgcgcagcggctccggaaccgccagatgtacttccacaagcagatcttcaaggccgcggacgtcatcgtctcgccgatgaccggtgtgactgcgtacccgctgcaagacgacgcgctcagcaccggggagctcgactacataaacggagccgcgctggtccggtactccatagccggcaacttcctcggcctgccggccatcaccgtcacggtcggctacgacaggggcggcctccccatcggcctccagttcatcggcaggccgtgggccgaggccaccctcctccacgtggccttcgccacgcagcaggcgtgcgccaaggggtacaagaagccgccggtgttctacgacctcctcggcaagcaacaggactgaggtcagcgacgcgccgccgccgccggcggcgagcgagcgaggatccaccgtatatgtatccgtgggggtcgatcggaggagaagagacgtatagcagcaggacaattgttgtcatgtataccttcattctcgaatcattatcgagtatttgtcgttgactactagttcattcttgaactaaaacacggtaaataaaaaataattgaggtcgttcaaaaaaaaaaaaaaaaaaaaaaaaaaccacaccc

SEQ ID NO: 48760 - DNA, 445 bp, Zea mays
  Clone ID: MRT4577_144475C.1
agcacgatggctcgtcgaatagacctggatccttcaatggacgccaactaggtagcagagcgggtgacaatactacaaggcggaattatcttggccacatattcgggactatctacttgactggcattcaacaaaagtgcagcatgccattcgaatgtcacaatggctctatggagtatatgaattagcacaaccataggccacgctctacataatcgaacatacaaggcacagataacacctcaggatatgagacaagcgacaaaattgactatctgaatgatagctaactgtacaatcactgtgattttataaccgaatgcaaagataccaaattcttagtaataaagtcctacactgaggaccatgtacatagggtcatcaactataaagtttgcgccagcacactcatgtcgaacatgaatctggattctgcttaccatgc

SEQ ID NO: 48761 - DNA, 457 bp, Zea mays
  unsure (1)..(457): unsure at all n locations
  Clone ID: MRT4577_144476C.1
cctctcccgngagccgtaccccgcctcccggttcaaccaaatccctctcgcctcatccccaccagcgcaaagccgncctatcgacctgacnagagaagcaatggagnnccgagggaaggtagatggagctggtgccgcnaagaaagcaacgncaaggagctccaaggctggnctgcagattcccgtcgncaggatcgctcggttcctcaaggccgncaagtacgccgagcgcgtgggcgccggcgcccctgnctacctcccacctgtcctcnagtacctccccgctgaggncctgaagcttgctggnaacgcagcgaggaataacaagaagacccgcatcgtgccgcgtcacatcccgctccccgtgcgcacccacgaagagctgacccagctgcttgncgcagcccccctccccagcgccgcccccatgccccccatccaccaacccctcctcccc

SEQ ID NO: 48762 - DNA, 559 bp, Zea mays
  unsure (1)..(559): unsure at all n locations
  Clone ID: MRT4577_144477C.1
gccctctaccccacgctctgcgcctctgcctagggttacgagcgacgctgcgccgtcggctggtgcattgacgagcgacgccgcgcggggttacgagcgacgccgtcggctggtgcgttactctcgtgtgcacagcaatggcgaatctccagagaggagaggaacccaaggtacggttcgtgttttctgttgttattcgatgattctattttcacttggcttatatgcattggccctcactgcccacaggccacaacccacatggccttgttaacacgtattccagtatattacgttttcactcgcgatatcgtacttttggttcgtcgtgtactcgtgtggaaggcggctgcctgctcccgcgacccgcggtctcttccgtctcggaggtgggagcgagcgatcagcggcgtcgccgggtggatccaaagcgcgcgagaaaatgcagggcggatccagccagtggcggatctagaattgatccaagagggggctactatatatggnctcttttgttctacacggctcttattcgccctaattggtttaagattagaag

SEQ ID NO: 48763 - DNA, 169 bp, Zea mays
  unsure (1)..(169): unsure at all n locations
  Clone ID: MRT4577_144478C.1
actgcgnactcatgctgcgttatttgtcttaccggttccctaangggttagttngggttttctccaatccccnggccttngggttgccctcctagccgatggtgacgctgagtggtggtcatttttgacaagcctcactctggtgccaagatcatcattattttatata

SEQ ID NO: 48764 - DNA, 228 bp, Zea mays
  Clone ID: MRT4577_144479C.1
aacggctacgtgcacgtgcgtaaccagcttagtgtttacaggcggccccagcttaaccacaacaagaccaacggtatgcacatgcgccaatggtacaggccgtgcaacaaggagcagttatacaaccataactcgggtacgcctgtgcggaacggcttttagagtttgtcgtttaacagcaaccgcgctagctggccgcatctttactagcggcaccaccttcacaac

SEQ ID NO: 48765 - DNA, 768 bp, Zea mays
  unsure (1)..(768): unsure at all n locations
  Clone ID: MRT4577_14447C.1
ttggggtacccccgggttctgccgggaactgcaggctcacacattggcctccatcctacaagccacctcaactacccatgtacgacagccactcagatccgaagcagtttctgatgagctacaaagcaacaatatcttcctatggtggcaatactgcagtcatggcgaagtctttcgtcatggctatcaagaatgttgcacaaacctggtactcctcccttcagccaggaacaatcacatcatggaagaagctgaaggatatgctgatcaccagtttccaagggtttcaaacgaagccggtcaccgctcaagctttattccagtgcacccaagatcacgaagaatatcttcaggcgtatgtccaaagattcttacgactgagggcacaagcgccaacagtgcccaatgaaattgtcattgaggccatgattaaggggcttcagccgggaccttcagcccaatactttgccaggaaaccccctcagactctggagaaattgcttcagaagatggatgaatacatccgcgctgacaatgactttcgacagagaagggaggaagcttacagattctccgaaatagccaggggcttcggaggngaggtttcatcctagacatgtcagatcgattcattccactcagaatgatgacaggagaagccagcagcagaggccgcaatattcctcacaggcttcccaggcttcggggcagcagcagagttatcctcggcctccagctccaagggccagaggtgccaggggcttcgga

SEQ ID NO: 48766 - DNA, 260 bp, Zea mays
  unsure (1)..(260): unsure at all n locations
  Clone ID: MRT4577_144480C.1
ngctcagcatggctcgtggtcccaagaagcatctgaagcgggtcgcagctccaaagcattggatgctggataaattgaccggtgtgtttgctcctcgtccatccaccggtccccacaagttgagagagtgtctccccctcatcattttcctgaggaccagacttaagtatgccctgacaggagatgaagtaaagaagatttgcatgcagcggttcattaaaatcgatggcaaggtccgaactgatataaccctacctgct

SEQ ID NO: 48767 - DNA, 254 bp, Zea mays
  Clone ID: MRT4577_144481C.1
cccaaacggtctactccaacggaaagcctcgatagtcgctgccatcgatgttacacacactagaaaagaacatcagttccaacaggcacagcagcagtcgatctactttttgccgagggggtccgtcctggagttatgtgttttgcagggttccaacttccaacaagtcagtgctgctactcctagaatagcctggacctccctactcatgcttaactaccgaagcatgtacatccgaaacagaaactggaggt

SEQ ID NO: 48768 - DNA, 627 bp, Zea mays
  Clone ID: MRT4577_144482C.1
aattcggcacgaggatgcaacacaatctcgatcgcagcctcctctaccaaaccctagctgtctacgcccgtgctgccaccatggagtcgatccacacggatctagcgcgcacgcaggaggaggcgctggtgaccgacctcgtgctgccccaaccggccagaggaaatggcgacaagtgagggcgaccaccgcatcgcctcacccaccatccttcgtcccacttccccccatcgcctctcccgacctcacgccgaccccaaccaactagaggaaatggcggcgagcgaggccaaacttgagcaggtgtcccgggcgcgatgacaatcagacgacctgggttattgctcttgtagcgagcgagtggatcaatgggtaactggaggaggtccttgatagcgagtgggttattgctcttgtagcgagcgagtggaacctgaaacccccgcttgtccaccaccattgtgcgacgcctccaactgcgcccgagccatcagcgcggccacctccaacagcgcccgagccatcaacgcagctgtcgcgcctcccgtcaacaccgcacctccactagagccatcttcgccccaaatcctagcacccttccccaggctgccttccacgccgatggag

SEQ ID NO: 48769 - DNA, 613 bp, Zea mays
  unsure (1)..(613): unsure at all n locations
  Clone ID: MRT4577_144483C.1
nttntnnnnnttttttttttttttttttttttttttttttttttnaaacgggaattttgccccagggttaaccaaaagtcaagagtttgacccaaagtcaagtcccagcaaatggagtgggttgagaaaaagcaacagccagtccccattttggggaaacgggaaatatttgttcccagttaggaggttttccttgtttccagtttttgctttcaaatttcacgggaccaagtttttggttttatttgacgggtttgacaccttaaaattccaccgggcttgaacttacctggaccgtaaatttgatgggggccttccgaatttttaaacccccgcccgggttttaaacggttccgggttttaaaatttgattcgaatggcccccttttaacttttggggaaaacttaccgttttaaaaagtttgtttgttttttcttgtcccaattaaaaaaggcaaatttttgaaaaatggacttcccgtttgaacttgcccaaaaattaaaaggggcaggttttgaattttaaaaggggggggcaaaaaggtttttttttttttttgttttgagggcccttagcccaaaaggtttgtattaacccgaataattttttttt

SEQ ID NO: 48770 - DNA, 120 bp, Zea mays
  Clone ID: MRT4577_144484C.1
gttctattagagctgtcttttaaacaccgatattttattggtttgggcaggaaacctaccactgtctgcaaattgtaaactatgtatataggttctgttgagcctctatgatgaacacca

SEQ ID NO: 48771 - DNA, 266 bp, Zea mays
  Clone ID: MRT4577_144485C.1
gatgttcataagtcggcggccgccctcaggcaccgggggaatgcgcacggcatggcggggttacaatgacgacgacgatctggaaacgggttacctctaggacacccgggccgaccacgaacaccgtgccgactgtgcacctgagtacaccatcggggacggccgcctggacgacgctaatgaacactgtgaactggtgcgcccggggggacgggtttaggatcaaccactaccatactgcgggacgccgaaatcaaatggaaggg

SEQ ID NO: 48772 - DNA, 907 bp, Zea mays
  Clone ID: MRT4577_144486C.1
cggcccgggaaaaaaaaaaaaccggccggggcgttcgatctgcttcgtcgcctcctgttgtttgtggttgtggccagtccttcccctctcatcccgggccccggggaaaattttgcccccagaaaccctagcgcgtcggatcagcaagggcaaaattttctgcgactccggctgaaggacgctgcggcacctatgtcggacgacactggccgcactatacccaagttcggcgaatgggacgtgaacaacccggcctctgccgacgggttcacggtgatcttcagcaaggccagggatgagaagaaagccccggcccaaggccacatcagggacaggtcggcgtcggccgacagcaaggactccaggtccagggacgagaagatgacctcctacagctccaggaccaacgcatcgaagaaatggttctgctgtgtctcgcccagtcccacacagtcttgaggaagctaatgagccgtgcagtgctgcagtttctgtgatggttatgcgtagctcttcgaattcaatcctatactgcttgccagtgacaggggctctatgtatagccattgcaaatgagaaaattactctgatgggtgtctgcttatagcgttcttagctgtgtataccatcagttcaagctgatgtctgcttgtaattttcttttctggccccttctctatggtgtaacccttcctcaacgttatcagtgaatctgagctactcctcaatcctccccctgcaatgctatggccaaaccaggacaacgaattctcagattgcagtgactggacaaagttatgcgccaccaccttgacaaacaaaatgctgcgacattttcagatgtgtaaatgaacatgttatatatttttttaattgccttgcccaatatattatatcagtacagttc

SEQ ID NO: 48773 - DNA, 489 bp, Zea mays
  Clone ID: MRT4577_144487C.1
ggcaccggccccattatattaggatataaaaagaaaaagatttctcctattaaaaattccccgggttaccccttttgggggccttaccggcatattaactaggggggcaatcccataaaaaacaaatataaagccggcctgaaatacaaacaagggggggccatttcacaacatgggggcaacaaaaataaagggggggcctttccggggccaaacaatacttccttgcaaaagcaacaaaggtggggggctacccaaaaggggccccggatctcaaaggcaaagggaccactttggaaaaatatatataactagcaccctggagcattggccactctggaaacagaaagaggaccccaggcgaatattcaccctaattagccactgggagcatagggcactctggaaacagactgggacccatattcccaaacatgaacccacataggaaccctagcttcactgcctctggacaggggaggggccaaa

SEQ ID NO: 48774 - DNA, 868 bp, Zea mays
  unsure (1)..(868): unsure at all n locations
  Clone ID: MRT4577_144488C.1
gctcgccgccaagtcctctcgcccccgcagcctccgccgctgccacctcccgcatgcgtccctgagatttttaattctgtgttaaacttttggtggatttctataattgaactatgaaggggtgcttccggcttatcttgcccttttgactgaaaaaggtgatgcaagaagtctacgttaggcttacctttgagcattcagttcctgtactttagattgatatgcacagaaaatcggaagattggtttatgcagtcaactggaatattcaaacgctgttgctatttgatctactcaactgaagtaaaaatgaaaattgtttagctttctgtgaaattttctagctgtattcagcaatgtttttgcttgtttttttccacttacgccaccttatagatgcttttcagaactaaaacagaaagtaaagacccagaaatagatacactttcatttactaagctgagggacaagctgcttgcccttgatcctctggctatagatcatgtggtgaaaatcaataaagcggaagctgagtattggaagaagtcagaagggtatcgcatgggctggagtgatgaaatactgggcttcgattgtggtgggcagcagtgggtttctgaaaactgcttccccaccggaaccctagcaaagccaagtatgaaggatcttgaatatatagataagctgctgcagttgattgaaaaggaggagatacccgcacctggacctattgagcagcgttggactgctcgcagcaagagcccgatgagcccgggatcaagctctgaagaagatgatgtttttcatgggtaattaatttgttcttgtccaatagtnttatgtttntgtagttatntgtgctgctattg

SEQ ID NO: 48775 - DNA, 789 bp, Zea mays
  Clone ID: MRT4577_144489C.1
ccggccggggcgttcgatctgcttcatcgcctcctgttgtttatttgtggttgtggccaatccctccgccaacatcccgggccccgggaaaaattttgcccccagaaaccctaacgcgtcggatcacaagccagggcaaaattttctggacgctgcggcacctatgtcggacgacactggccgcactatacccaagttcggcgaatgggacgtgaacaacccggcctctgccgacgggttcacggtgatcttcagcaaggccagggatgagaagaaagccccggcccaaggccacatcagggacaggtcggcgtcggccgacagcaaggactccaggtccagggacgagaagatgacctcctacagctccaggaccaacgcatcgaagaaatggttctgctgtgtctcgcccagtcccacacagtcttgaggaagctaatgagccgtgcagtgctgcagtttctgtgatggttatgtgtagctcttcgaattcaatcctatactgcttaccagtgacaggggctttatgtatagccattgcaaatgagaaaattactctgatgggtgtctgcttatagcgttcttagctgtgtataccatcagttcaagctgatgtctgcttgtaattttcttttctggccccttctctatggtgtaacccttcctcaaagttatcagtgaatctgagctactcaaaaaaaaacccaaaaaaaaaaaaaaaagcaaccccagtcacgaattctcagattgcagtgactgggacaagtatgcgccacaccctgataacaa

SEQ ID NO: 48776 - DNA, 376 bp, Zea mays
  Clone ID: MRT4577_14448C.1
tagcccttttttccaacgcaccgtcccacacacggggggggttatcaggagtgtgaggccccgaacccccacccagctagactgtctaccgggtggaacgaaaaaccaacttaatcggccacgcggagacctacaggtgcaaggcgacataaacacatccaccggtcactgccgaccataggcctagcgggaggaaacattcgagaccaaaccaaaaccaaagatctcccaacctctctgccaaattacaatggatgccccagagcccaggcccgaacaaatcacggcttgatgcacacagccaactgcaaaacccaagacgcgcatgcgccttgcaacaacaatgcaacaggaggcccaccaccagagcacgcac

SEQ ID NO: 48777 - DNA, 485 bp, Zea mays
  Clone ID: MRT4577_144490C.1
acccaaactgccttgcatgaaaatagatagacagaaagaacaggaaccaaccaacaaaagacacaaaaagttggagcagggggaggcatggggcaccgccccattgaaaccgggccccaccaccattaccacccgacgcaaattttatttaacccacgttacttgcaacccgaaccggacacgttcacgcaaaagtaactgttagctacgtaccgggctacgtacgaaacacacacacacacagagagagaccccagtaataaccgtagcgtactgaaaaaaaaaatcccgtgtaaaactgccatgtacgcgcccgaaaaaataccccggcacgggcgcaagccaatcccttgggccctggccgcccccctttcgtgcccacaggcttacttggtggcctttttgggctcctaaagaaaaaaaaccttcttcgccttgggggccggttcctggggaccagcaggaacaggagcctccgggttgta

SEQ ID NO: 48778 - DNA, 736 bp, Zea mays
  Clone ID: MRT4577_144491C.1
tgtttgtggttttggccaatccttcccctccctctcatcccgggccccgggtgaaaattttgccccacaaactctagcgcgtcggatcacaagcaagggcaaaattttctgtgactccggctgaaggaccctgcgacacccaaaactatgtcggtggcgaaggacgacactggccgcactatacccaagttcggcgaatgggacgtcaacaacccggcctctgccgacgggttcacggttatcttcagcaaagccagggatgagaagaaagccccgacgaccaaaccacaaccaggccacatcacccaaaggtcggcgtcggctgacagcaaggactccaggaccgacaagatgacctcctacaactccaggaccaacgcatcgaagaaatggttctgctgtgtctcgcccagtcctacacaatcttgaggaagcaaaagaggaacgcaatgctgcagtctggtgctattctgtgatggttatgtgtagctctgtcgctggcagactggccatgagtgacctcttcgaactcgatcctactacttgccagtgacaggggcactatgtatagccgttgcaaaatgagaaaattactctgatgggtgtctgcttatagctccttagctctgtataccatcagttcaagttgatgtctgcttgtaagtttctttttctcgccccttctctatgtggtgtaacccttcctcaacgttatcagtgaatccgagttactccc

SEQ ID NO: 48779 - DNA, 819 bp, Zea mays
  Clone ID: MRT4577_144492C.1
ccggccgggctgcttcgtcgcctcctgttgtttgtggttgtggccagtccttcccctctcatcccgggccccggggaaaattttgcccccagaaaccctagcgcgtcggatcagcaagggcaaaattttctgcgactccggctgaaggacgctgcggcacctatgtcggacgacactggccgcactatacccaagttcggcgaatgggacgtgaacaacccggcctctgccgacgggttcacggtgatcttcagcaaggccagggatgagaagaaagccccggcccaaggccacatcagggacaggtcggcgtcggccgacagcaaggactccaggtccagggacgagaagatgacctcctacagctccaggaccaacgcatcggtatgcgtccaaaccatctcgtagattcagccattcccgttaccattcctacgctagtcataatcatgcatgcgctgtgatccctcccaacttgcagaagaaatggttctgctgtgtctcgcccagtcccacacagtcttgaggaagctaatgagccgtgcagtgctgcagcagtttctgtgatggttatgtgtagctcttcgaattcaatcctatactgcttgccagtgacaggggctctatgtatagccattgcaaatgagaaaattactctgatgggtgtctgcttatagcgttcttagctgtgtataccatcagttcaagctgatgtctggctgtaatttcttttctgccccctctctatggtgtacccctcctcacgttatcagtgaatctgagctactcctcaaaaaaaaaaaaaaaaatttgcggccc

SEQ ID NO: 48780 - DNA, 247 bp, Zea mays
  Clone ID: MRT4577_144493C.1
attcggctcgaggccgggctgcccattttttttttactgattgcggggcatcaaatcgggtgggtgattaggccctaacagccggctcgccaaaaattaacgcaaagttgattggatggtaaatcttgctccatattgatacatcccaactaattaccttgccatccaagcaaaaaactataatctgaattatgggcgtgttacacggagggctagcacatttatgatatacgcgactgataatggt

SEQ ID NO: 48781 - DNA, 376 bp, Zea mays
  unsure (1)..(376): unsure at all n locations
  Clone ID: MRT4577_144494C.1
acgtcaacctcgccgtcgccgtcgccgccgcgccattagcagcctacgctgccgccacgcgccatcaagccatcgcccgtgctcaagtccagcgtgtgagactagtagaacgctgcgatggcagcgtagggaatcacggttcaattccacaacgtcaatcgccaccgggagganagccangaccgcccacgcgctccgcgtgcagccgcactagctgctgtcatcgcacgactacgtatcgctcgcgatgcgcgcggctacacgtcaacgggaaaggcaagaggtccttcatgtccagcatctacatgtgcctgttcccaaaggtcatcgactgagtgatccgaagatggatattcacaatcgctcacccgtatac

SEQ ID NO: 48782 - DNA, 314 bp, Zea mays
  unsure (1)..(314): unsure at all n locations
  Clone ID: MRT4577_144495C.1
ccgcccttttttttttttttttttttttttttnggcacaaatgatttgtaaactagccatgcaattctgttgcgggaggagacaactttgtgaatgcggggacttccttaaatacaaaaagtttttctgttgcaaatacaaactatgaactttttaaatatttggagaacccgacaacttaatttttttcttcaaccacctttgtccccatccctttcaagccctcttcaaggattcttcctactgtgacaatgtaatttattttctccttttcattctttttatcgattcctttttctggctataccttaaaa

SEQ ID NO: 48783 - DNA, 333 bp, Zea mays
  unsure (1)..(333): unsure at all n locations
  Clone ID: MRT4577_144496C.1
agactgtacagctgaactagactgggcctcacatgcggtaattgcctaattgctcaactgtccacaccttgcgtgataactctgcgagttacacatatataatgcatacggtcaatacaaactgtctacgaccccttcatcgacgccgacagcctgttccgcagctctggcaccaccagccaccagcagactcgcatgtcggagctagtcggcttattctgccagacttcccacgaaaccaccggtggatcggcgactgctccggatggaccgtntgcctgaggatactgccgagtgaaggaacagcaacggacggtcccaacgtactatgga

SEQ ID NO: 48784 - DNA, 331 bp, Zea mays
  Clone ID: MRT4577_144497C.1
cactcaccccgccttcacgccgtccttaccaaataaaggcccggccttttccgacattcacagggggggccggaaatcaaccgccattgcctcgattcccgcgaccaccttcgccgtcatcttatccgtcctcttctgtgccgcggcttgcaccggcgtcgacaaccaacttcccgactacctcatacaaggccgcgtctactgcgacacctgccgcgccgggttcgtgaccaatgtcaccgagtacatatcgggcgccacaatgaggctctagtgcaagcacttttgcaccggcaaactctagcgcttcattcaacgggtgaccgacacc

SEQ ID NO: 48785 - DNA, 175 bp, Zea mays
  Clone ID: MRT4577_144498C.1
ccagagatcatccgtgcggtgcgagatgtcagaaccagagaccaaggcggagcagctcagccgactaccagagtagcctatcacaaacactccttcaagctctagaacgagaacgcccaccgttgcatcacaaccacagagctcggaactgtcatgcgatcactgggccaaaacc

SEQ ID NO: 48786 - DNA, 596 bp, Zea mays
  Clone ID: MRT4577_144499C.1
gtcccattaaaggggtgccaagtccttgcatcgaagatgccgatggtcaatgtggagatcatgaacgaactagatggaagtagtgaaatggagaaccatggtaacctctctaaagtggataagttatatgtttaccgtacaactgctggagtgagggatgatgcaccaaattttgttcaaatattatagagctagctgcaattaccttggtatcttcccttcctacgagaatcgggaaaagccacactggtttgtgcccttatcctggagcaacatggccgggattcatcatcatctctgtaccaactgctcccctcttccagtgtctggtcatatggccacccaggccctttatcgccttgtgcattctcactcgagaggaggacagaatcagatgacttttttttttcttcttttcacgccatgtaatctgtagtggacctgtcttcatttgcttttcactttggcacggtggattgtgctgtcgcggtactgttctagtgttttgattcgtaaacctgagaactgtcgggacattccggtgacgatgatttctttcttgctcctgtgatgcaggggtgtgcaaatttaagttt

SEQ ID NO: 48787 - DNA, 465 bp, Zea mays
  unsure (1)..(465): unsure at all n locations
  Clone ID: MRT4577_1444C.1
gggtgatctgcgccttggtgaatgccttcttggagatcgtctgtgatgatcccttgagtgggtcacctcgacagagatctgcatctccccgaagaagatctacaccccctcgaagaagatctatatcccctcgaagatcctcacacaagaggagggaatcaccaagaaggggagactcacctaggaggaggcactcacctaggaggagggagtcaccgggggagagagacttaccaaggaggagagactcaccaaggaggagggattcaccaaagaggaggagggactccccaaggaggagggataggtcaaaatcaaggtcaccttctggaaaacatgacgctcctagacatagaaacgaacatgacagatctcggnccaggtctccccactcgagggntcatctcagacggtctgcatgagggcattctccgtggcgcggatctcccccggccggtctcgggg

SEQ ID NO: 48788 - DNA, 830 bp, Zea mays
  Clone ID: MRT4577_144500C.1
ccccgcgtccgggggaaaccgccaattggcaaggatgaagcttgtgaccgccttcgttgtgctgctcttttctctcctccccgactcgtccaccgcggaggacttcgatttcttctaccttgtccaacagtggccgggctcgttctgcgacacgcggcagggttgctgcttcccggacggcgcgggcaagccggaggcggcgttcggcatccacgggacgtcgctgggccggagctggccgacgctgtcgtgcaagaaccggcgcagcttcgagttctggagctacgagtggaagaagcacggcacctgctccaacctggacccgcacgactacttcgcgcgcgcgctgcagctcagggagcggcacgacctcgcggcggtcctcgcggacgccgggatcgtgccgtccgacaccgacacgtacccggtggaccgcgtcagggacgccatcgcgcaggggaccggcttcgtggccaacctcgagtgcaaccgcgacgcggacggcgaggcgcagctgttccaggtgtaccagtgcgtggaccgcgaggccaaggacctcatcgactgcccgctccccatgcccaccaagtgcaccgatcgggtcaagttgcccgtcttctgattccgagcttctggctgtcgtttgcaattgtaaaaacgggccgggtgcagatcgatcgatacgacgatacatgcatgtttgcgtatgtgatttcgaaagcggatttgaataaatgtgtgtttaccttttatttgcgtatggaaaaaaaaaaaaaaaaaaaaaaaaaaaaaaaaaaaaaagagcggcagctcgcgatctagaactagtc

SEQ ID NO: 48789 - DNA, 203 bp, Zea mays
  unsure (1)..(203): unsure at all n locations
  Clone ID: MRT4577_144501C.1
ctttctttggaacaaagaggttaatngagcaagactttgatgatctatagacgactgaaagagangaaaatgggcccatacaacaatcgtgaaggctccaaatgggaatccttgggtcaaaccaccaaatgctatccattcctaaccaagcaagtccgggccttttggcctacccaaataaaagaaaccacctaaacctaacc

SEQ ID NO: 48790 - DNA, 1017 bp, Zea mays
  Clone ID: MRT4577_144502C.1
ggccggccgggccgggagttgttgattgcagggaaaccgccaattggcaaggatgaagcttgcgatcgccttcgtcgtgctgctcttttctctcctccccgactcgtccaccgcggaggacttcgatttcttctacctcgtccaacagtggccgggctcgttctgcgacacgcggcagggttgctgcttcccggacggcgcgggcaagccggcggcggcgttcggcatccacgggctgtggcccaactacgccaagtgccgcggccgccaccaccgcgagggcggcggcctcgcccgcgcggtgctcggcgccgacgacgccttcctcgccgccgtggggcggcggggcaagtgctggccggagtactgcggcggcggcggcgacggcgacggcggccaccagctgagcccctgggacgtccgggacctggtggcgtcgctgggccggagctggccgacgctgtcgtgcaagaaccggcgcagcttcgagttctggagctacgagtggaagaagcacggcacctgctccaacctggacccgcacgactacttcgcgcgcgcgctgcagctcagggagcggcacgacctcgcggcggtcctcgcggacgccgggatcgtgccgtccgacaccgacacgtacccggtggaccgcgtcagggacgccatcgcgcaggggaccggcttcgtggccaacctcgagtgcaaccgcgacgcggacggcgaggcgcagctgttccaggtgtaccagtgcgtggaccgcgaggccaaggacctcatcgactgcccgctccccatgcccaccaagtgcaccgatcgggtcaagttgcccgtcttctgattccgagcttctggctgtcgtttgcaattgtaaaaacgggccgggtgcagatcgatcgatacgacgatacatgcatgtttgcgtatgtgatttcgaaagcggatttgaataaatgtgtgtttaccttttagcaacgtaaggaaaaaaaaaaaaaaaaaaagttctagatcgcgacgccc

SEQ ID NO: 48791 - DNA, 262 bp, Zea mays
  Clone ID: MRT4577_144503C.1
tcaccttgcggccagctgcttgcgtgcctctccagccacttcactggccgcgcgcgagctcctctgcgcgctcagccgttcttccctgcagtgcccctgcgcaagcttcggtgccttctccgtcgccccccgtggaagcctgctcgcccagctctgttgccgcgcccatggccggtgctccctgctcgattccgtttgtcgcgccctgcgctcgtcgcggtgctccagctcggattcagtcctgcgcgtagcgcttttcatc

SEQ ID NO: 48792 - DNA, 383 bp, Zea mays
  Clone ID: MRT4577_144504C.1
ggggggttgaaacccaaaatatattgatccttttaaggaaaacttaaaaggctgggggactttttggtgtacccccattttgaaaaaaaatagcgcccggaccaaaattagggacggccaaaaacatattcttaaaaaaaggttaattcaaaaaaaacttggtggcagaaccttacggactttaaaaaaaaagaaatctaaaaaaacctgtatgggttccccaagggggttttgagctaaagggatttaaaaatttgccagtttttttttaaaagggaaaaaaaggaattgaccctcatattgaagatttggtgggaatggtttttcctcatccgcaaagttcccaaggggaaaaccctaaaaaagaccctttttaattggaa

SEQ ID NO: 48793 - DNA, 1000 bp, Zea mays
  Clone ID: MRT4577_144505C.1
gggaacttgcgtagagagttgggcgcagagaatccccaagcaaacaaacagggtagagggagaggagaggagaggagaggagaggttgggtctgggacaccatggctccgatgaagctgtacggggcggtgatgtcgtggaacgtgacgaggtgcgcaacggcgctggaggaggctggctccgactacgagatcgtgcccatcaacttcgccaccgccgagcacaagagccccgagcacctcgtccgcaacccgtttggtcaggttccagctctgcaggatggtgacttgtacctcttcgaatcacgagcaatctgcaagtacgctgctcgcaaaaacaagccagagctgttgagggaaggaaacctcgaggaggcagcaatggtggatgtttggatcgaggtggaggctaaccagtacaccgctgcactgaatcccatcctcttccaggtcctcatcagtccgatgcttgggggaaccaccgaccagaaagttgtggatgagaaccttgagaagctgaagaaggtgctagaggtgtacgaggcacgcctgaccaagtgcaagtaccttgccggagacttcctcagcctcgccaacataattcaggggctaaaatcctcttattagtcaaatttgattaagaagaagattttagtccctccaatccactacgattttcgggctcccaaactagcccttactgttatcatttgggcggcagctggaagtggaagtggaactcatgtttttttagcttacattgtattgtcattgtacatacatacagtagtacatgttgtccaagtgtcgaagaaatcatgcaatcaacattgtaatggatgtctgttctgcattcgcaattattcgtgtttataacaaggagaacaaagaccttgctcttagtcgtaaataaaccagacggagatgactccgccttgtgaaaaatgaaggaatttgatctgcgagaaaattgtaggcaaaaaaaaaaaaaaaaaaagcgg

SEQ ID NO: 48794 - DNA, 524 bp, Zea mays
  Clone ID: MRT4577_144506C.1
aactggggaaaaaaagtcagcgatcgcatcggatcacaatgcatatccggatctcggaacacgagaagaggatttttggcgttttacaccgggtttgctcggtctcagggacgagatcaccaggccaccagccttgcggtttaagtacatcggagtattgttaagatctcaaaccccctaggagaacgaagtgttcagtcactactactccattacaacaggcactggagctggagcttgagtaagagcaagactgccagagctagatcgagacgaagactcaaaaacacgggaggagcaaaaaaaaaaagtcctgtcagacagacagcaggcgcaaaaactgttgttgagctgcaggaggaaatccctgccgtgcccacatccaaggagaaaatccacggcacagttaacttaactaaccctcccgtatgtacaagcaaagcagcacttggcgctgcagtcaccgagggggcaggggcaaatcgcattacgcccttcgcggcgaaggttctttctttcttcct

SEQ ID NO: 48795 - DNA, 1144 bp, Zea mays
  Clone ID: MRT4577_144507C.1
tacctcgaggccggccgggcgaccgatcctcggcaacggatatctcggctctcgcatcgatgaagaacgtagcaaaatgcgatacctggtgtgaattgcagaatcccgcgaaccatcgagtttttgaacgcaagttgcgcccgaagccttctggcggagggcacgtctgcctgggcgtcacgcgcgtagagagttgggcgcagagaatccccaggcaaacaaacagggtagagggagaggagaggagaggttgggtctggaacaccatggctccgatgaagctgtacggggcggtgttgtcgtggaacgtgacgaggtgcgcaacggcgctggaggaggccggctccgactacgagatcgtgcccatcaacttcgccaccgccgagcacaagagccccgagcacctcgtccgcaacccgtttggtcaggttccagctctgcaggatggtgacttgtacctcttcgaatcacgagcaatctgcaagtacgctgctcgcaaaaacaagccagagctgttgagggaaggaaacctcgaggaggcagcaatggtggatgtttggatcgaggtggaggctaaccagtacaccgctgcactgaatcccatcctcttccaggtcctcatcagtcctatgcttgggggaaccaccgaccagaaagttgtggatgagaaccttgagaagctgaagaaggtgctagaggtgtacgaggcacgcctgaccaagtgcaagtaccttgctggagacttcctcagcctcgccgacctgaaccatgtgtctgtcactctctgcctgtttgctacgccctacgcatctgtgctcgacgcctacccgcatgtgaaggcctggtggtctggtctgatggagaggccgtctgtccagaaggtcgctgccctgatgaagccatctgcttgaaacggttgccctgtcaatcggtgaatggaataagccaagtctgttctgggttgtttgcttgttcagtgatgtgtcttctatgacgaaagttgagtgcctatgtgtgagcatgcttgcttgtaacgagaccttgaattgttcggaaatgagcattcctgtgctcttctttaaaataaactttgccttaggttcaaaaaaaaaaaaaaaggaaaaaaaaaaaaaaaaaagcggcc

SEQ ID NO: 48796 - DNA, 359 bp, Zea mays
  Clone ID: MRT4577_144508C.1
atgataacttacaacactgtctgtttttagcctaaacacggcgtcaaagtaagcaaagtccacaactatgcactagaaaatgaaggtataaaagaacactcatgaaattttgatcataccgtatggaaacacctctctcctgtccatacaacactagaacctagaaagctctgggacaccttactataggcctgccctcatttgaaactgttcttggcactatcactcgatacagttctaacctgtctgaagatgccgaaggaagcatgcttgatcttgtcatacaacccaaacacattgcctgcactcaaggatcacccatccagaaacatcctaccataggtcattgaccttctact

SEQ ID NO: 48797 - DNA, 978 bp, Zea mays
  Clone ID: MRT4577_144509C.1
ccggccgggaacttgcgtagagagttgggcgcagagaatccccaagcaaacaaacagggtagagggagaggagaggagaggagaggagaggttgggtctgggacaccatggctccgatgaagctgtacggggcggtgatgtcgtggaacgtgacgaggtgcgcaacggcgctggaggaggctggctccgactacgagatcgtgcccatcaacttcgccaccgccgagcacaagagccccgagcacctcgtccgcaacccgtttggtcaggttccagctctgcaggatggtgacttgtacctcttcgaatcacgagcaatctgcaagtacgctgctcgcaaaaacaagccagagctgttgagggaaggaaacctcgaggaggcagcaatggtggatgtttggatcgaggtggaggctaaccagtacaccgctgcactgaaccccattctcttccaggtcctcatcagtccgatgcttgggggatccaccgaccagaaagttgtggatgagaaccttgagaagctgaagaaggtgctagaggtgtacgaggcacgcctgaccaagtgcaagtaccttgctggagacttcctcagcctcgccgacctgaaccatgtgtctgtcactctctgcctgttcgctacgccctacgcatctgtgctcgacgcctacccgcatgtgaaggcctggtggtctggtctgatggagaggccgtctgtccagaaggtcgctgccttgatgaagccgtctgcttgaaacggttgccctgtcaatcggtgaatggaataagccaagtctgttctgggttgtttgcttgttcagtgatgtgtctttctatgacgaaagttgagtgcctatgtgtgagcatgcttgcttgtaacgagaccttgaattgttcggaaatgagcattcctgtgctcttcttgaaaataaactttgcgttaggttctcaaaaaaaaaaaaaaaaaaggcccctagggcc

SEQ ID NO: 48798 - DNA, 312 bp, Zea mays
  Clone ID: MRT4577_14450C.1
ccaagacgcgtaataatatatggcggacgggttcttttatgccccccatccaaatccgacgcatataagaagaagaatatgtgcccgaccggacccctttctactaacacggctggccgacgatacactttagtggtccatctatactcatgagctgaccaacttatcgcccgcactttaccgagactaaaattaacctgtcgtacttaccctcgttctggcctccacactctcttaataatgcacccttcatcatgaccccgccctgctactttcacacccactccttgtttcccttgaacggcgtttact

SEQ ID NO: 48799 - DNA, 1522 bp, Zea mays
  Clone ID: MRT4577_144510C.1
ccggccgggaatttatttaaaaaaacccgccccggccccacccccgccgcagtacttcccgcagtacatgccccagccgtacccctgcaacccctgcggcggcggctaccggatcgtctgcgaggaggacccctcctacgcctgcgccatcatgtgattcgtttattatcaatatcatcccttgatgagtgtaccgtccgtgtgcgtaccatggccttaattaccattatacccaaccccaccctaaaaaaaaccccagtatgtcgtctcatcatcattgcgtacctcctcctgtataatcgccgtacagattcatcgtatatatactctatacatatatagcatcatgtatacaccgccgtaccccctgtcatctctttatgtagattgtgcattatgttctgcgcgcttcgttttggtaattacagtatatgccagtcaggctaagtgagagaataaaataagcaatgatgctgttgtttttaaaaaaaaaaaaaaaaaaaacttgcgtagagagttgggcgcagagaatccccaagcaaacaaacagggtagagggagaggagaggagaggagaggagaggagaggttgggtctgggacaccatggctccgatgaagctgtacggggcggtgatgtcgtggaacgtgacgaggtgcgcaacggcgctggaggaggctggctccgactacgagatcgtgcccatcaacttcgccaccgccgagcacaagagccccgagcacctcgtccgcaacccgtttggtcaggttccagctctgcaggatggtgacttgtacctcttcgaatcacgaggcaatctgcaagtacgctgctcgcaaaaacaagccagagctgttgagggaaggaaacctcgaggaggcagcaatggtggatgtttggatcgaggtggaggctaaccagtacaccgctgcactgaatcccatcctcttccaggtcctcatcagtcctatgcttgggggaaccaccgaccagaaagttgtggatgagaaccttgagaagctgaagaaggtgctagaggtgtacgagggcacgcctgaccaagtgcaagtaccttgctggagacttcctcagcctcgccgacctgaaccatgtgtctgtcactctctgcctgttcgctacgccctacgcatctgtgctcgacgcctacccgcatgtgaaggcctggtggtctggtctgatggagaggccgtctgtccagaaggtcgctgccctgatgaagccatctgcttgaaacggttgccctgtcaatcggtgaatggaataagccaagtctgttctgggttgtttgcttgttcagtgatgtgtcttctatgacgaaagttgagtgcctatgtgtgagcatgcttgcttgtaacgagacattgaattgttcggaaatgagcattcctgtgctcttcttgaaaataaactttgcgttaggttcctcggaaaaaaaaaaaaaaaaaaaaaaaaaaaaaaaaaaaaaaaaaaaaaaaaaaaaaaaaaaccacacccaaaaccc

SEQ ID NO: 48800 - DNA, 392 bp, Zea mays
  Clone ID: MRT4577_144511C.1
actcagttgaggtactctgattgtttttgaaagctgggatctactgcaggagtttgagcttcagcatgaggtggaagatgcacatcaatggatattggtgccatctggtcaattcccaaccagatcagtctactagtctgtatttcatgggtcagtacagttcttaccaagcaatttgatctggaaaacctgtcttcgaaggaaatgcacgtgctttctatggtaggctgcacctaactgtagctggacaactgatacactagctcgctgcagcctgcctcacccagaacattgtctgctttgtgaccagctagaggagaacactaattacattatattatcatgtgactttgcacgacaatttttgcaccaccttttgggcattggcgggg

SEQ ID NO: 48801 - DNA, 543 bp, Zea mays
  Clone ID: MRT4577_144512C.1
gattcaaacaagtataattctcaagttatcacaaaattccccacaaaaatttacaatcagcaaaatattatttttcatgtagcattttcatacaatcccgtggtttcactattataatcttatgttacaataaaccttcattagtccctcaaaacgatgatataaataatctgtacaacctaccatggaataaaaaaccgaagccaagattccccacagttttcatagcagccgggcacacccacggtgaccccaacgagaaccctcttggtgccagccagaagtcactcatcttgagggagcagggatgcatcacactggctccggcggggctccctgcacacccagagcgcctggcgtggagtcgccttgacccccgctctgggcagcagcgaccacactggggcaggaacacctcatctccactgaagtaaaagagaaaatcattgagctaaaaagagactcagtgctcatgtgagtggtgtctgcccgtgacctgagtcccactccccgatgaccctgtgcagagccgtggccgtggca

SEQ ID NO: 48802 - DNA, 334 bp, Zea mays
  Clone ID: MRT4577_144513C.1
gataaattgtttacgaaccacaagacgtcacttctttacagggatgccacgagcggtgactaacactacggagggacgaagctcgaatacgcaggaacccccaacataaatatggtggcaggagcccacgaagaacactgtcacgtacatgctgttatggcaagacacagattagtccatacacctgatcttggaatcggggacctcgatgccaaaaagagaaaatcaaactaagctgccgactcgttaaaagggacatccctggcattgaaatgcatgggaccatactgcagggcacactttcaaccattcttgcatcttgacactgaatcaa

SEQ ID NO: 48803 - DNA, 531 bp, Zea mays
  Clone ID: MRT4577_144514C.1
ggggggggggggttttttttatatattttttttttttttttttttttttttttttttttttttttttttttttttttttttttttttttttttttttttttttttttaaagaccttaaaaactttttttatccgccccatcgcccacattttggggggggggggaaccccaaccggaaaataccgttgggtaaaaaatctgggaggggggataaatttggggggaaaaacaggcccttgcaaggggttttatagcactctaaacaaaatttcaggggcccggggaactatacaaacattttttaggggccaacaaaaaatttcaaatggaattccttaaataccatggacctttgggggcccattaattttaatatcttccaggggggtttcccacgggaggtacataaaaaaaatgggggggatctggttttataccaaaaaaagaaaggggccggggtccaaaaaccttataatgttaaaaaaaaaaatcgggaaattcaaccctttttttttttaattccccccaaaa

SEQ ID NO: 48804 - DNA, 399 bp, Zea mays
  Clone ID: MRT4577_144515C.1
gaccacgcgtacgctaggacaccccatattctggccggacgattctccgcgagacggcggcacgctcaagctggccgttcaactaacacaggaggacccagacaagccaccaactgatcgacgaccatctaacacgcatgatacaattatctattcttatgcaagcaacaggctgcataacctacagaaccagtgcagctctataaataagaccgctggactttgaacacttatccatgcactaccatattcaccaaacccaaacctaccagcgaccacgaccgctacaagacagtcatacgtgcacatacaggatcaccagccaagcgctctacctatccctgatcagcgacccacacccgacgactacataccgcagctcagccttcaagacaggca

SEQ ID NO: 48805 - DNA, 502 bp, Zea mays
  Clone ID: MRT4577_144516C.1
gccaccacgcgtgctatagccagggtcctatgacaaggaaaggaggacaacgaacggacatgaaccagagcaaagatcggtagacaggatcctccgcttttggactggcaccgactgctatctgtcccgtgacccatgcaggatacaccaagaatggccccaccttcggcggcagagaaggaccgtccatgacctgcacgatctaccacatcttggtgctggagatgcccgtccactctgacatcggcggccacaagcccgaaggtcctgacctattgcagtacaagaagatctcaggcggcgtactgcgtgccgccaccaccatgcggctgctgaccgagggtatgcaccaccatgtcatcaacttggtgtggcactgcgtgatcgtctaactggccattctctacctctccgccagcgactgcatgttaatcaacaggtgcccaccaccacattgctcaagccaaactgccctgacatgggtgtggtcatgtaccactgc

SEQ ID NO: 48806 - DNA, 1373 bp, Zea mays
  Clone ID: MRT4577_144517C.1
agcatagtcaccaaccctccaaaaatccggccaaaacatcagtttcccccaggtaaagccaatcctttgatgccttctttttatccccaccccaatctcgcctaatgtcattatacatgctcttcttcatagctatcttcttgaactatggtgtcccgctgcacttgattcgtgagctatatgagaccttccgcacttagaattcgcattgcagattatgtgcgctacagaaagacacttccaacatgaatgaacgctttccagatgctacatcagaagagctcgatgtgagtgatgctacatgtattatttgccgtgaggagatgactacagcaaagaaactgctctgtgggcatctgttccatgtgcattgtctaaggtcgtggctagaacgccaacacacttgccccacgtgcagagctccaatcattcccgcagataatggacatgctgtatcagcacgacaacatggagcccaggctggggttcagcctgctgcaggtactgccactccatcctcagaaggagcaccaggtgagaacatgagcaggcaccaagcaaaacttgaagctgctgcagcggcagcttctttatatggaaggtcttttgtttatcctccagcaaacaccctaaaaaggtctgttcctccccagcctgcatcaagtacaccacaatctgaagcaagtagctccaatcatcagtcacaaaaagaccaagaaatgcagtcccgaaacagcagcgatggtttagtgcctctgcctcttaatgcagatggtgctgttggttcaggaacaagcacaagggaccttgaaaattcactgcagaaggcacaagaaaactttattaagagccagattgagatgttacaaatccaactgcaaatggtgcagcgtggcgctgctgggttgagcagtagcgagaacactgagcacacagaagactgactgaatctgtaaacaggcactcctgcatcgtggagtaataatgagaatactgagcacacgcagctgaatctgtaaataggcggagatgaggatggggataaaagaaagcaatcaaagaattggctatacctgggggaaactgatgttttgcctggattttggtaggcttgttgactatgctttcctgttactgtgttagtgccttcttgccagcgttagatgtttctctacgtgtggtggtttctgtaggttgggtacatctaattgctagtttaattatacgattacacaaaattcttgtaccgagggaaaatagaaaggataattgtacaaatgattttttgtgtgcatatccatgataacgggattgtctgtagattttgtgtttactggagtaaaacagaaaatttggctgctgattggatgttg

SEQ ID NO: 48807 - DNA, 382 bp, Zea mays
  Clone ID: MRT4577_144518C.1
tttttttttttttttttttgtgttttttttttttttttttggggttttttttttttttttttttttttttttgggaaccaggacccaacccttggggagtatttttttttttttggaaataattcccggatagggcaaaccccaaaggggggtaaggggccaaaagagtaaaaaaaaaaaacggggggaaaaaccaaaaccggcctttttttaataaagggggcccatcgcaaacagtacaaaaacaggccccaaattttgggggacaaattttgcccaggattaccccaacttttttaaagaaaaaggtaattgaaaaacaaaccccctttaaatttttaaggggggcggccaaaaaatagattgtggttttgcccccccc

SEQ ID NO: 48808 - DNA, 723 bp, Zea mays
  Clone ID: MRT4577_144519C.1
tttgtttatcctccagcaaacaccctaaaaaggtctgttcctcctcagcctgcatcaagtacaccacaatctgaagcaagtagctccaatcatcagtcacaaaaagaccaagaaatgcagtcccgaaacagcagcgatggtttagtgcctctgcctcttaatgcagatggtgctgttggttcaggaacaagcacaagggaccttgaaaattcacttcagaaggcacaagaaaactttattaagagccagattgagatgttacagatccaactgcaaatggtgcagcgtggcgctgctgggccgcccagtaacgagaatactgagcacacagaagaatgactgaatctgtgaacagacacttctgcatcgtggtgtaataataaggagaatactgatgagcacacagctgaatctgtaaataggcggcgatgaggatgggacaaaagaaagccaaggattggcgatacctggggctgggggaaactgttacatgatgtcttgcctggatttttggcaggcctgttaatttatgcttcactattagtgccttgttgccagcaccagatgtttctctctctctgtgtgtgtgtggtggtttctgtacatgaaagccttttgacgggagaaccaaccatggctagtttaattatgaagttcacttgttgtacccgagggaaaatagaaatgactcttgtttttgcctatcaaaaacccacgcgtccg

SEQ ID NO: 48809 - DNA, 938 bp, Zea mays
  Clone ID: MRT4577_14451C.1
ttttttttttttttttttttttttttttttttacacaccacatttaactattacttgcagttgcagctaagcggctggtacatgagcacacattaactggatcccccacacaagcacactgctaagaactacccggactcggacctcaaacacacacacaagccctaacgtgacgaacacacggccagacatgctgcacacttgcacagacagcgctacagcgaaacgaactctacacgtacgatataaattattgttacgtgccatacccacgtaccacgcgcaacacacgcatgcatctactagaccaggcacctcccgcagcccagggccagctcaaggcgtgacgccgccagcgccagcgcccccgccgccgtagccgccgaagggggtgccgccgccagcgaagccgccaaacgggataccgccgccaccgccgccgaggggcccgaacccgccgacgccgcccagcgggccgacgcctccgacgccgcccccgacgccgcccagcgggcccgtgacgccgctgaagacgcccccgccgttgttgccgaagccgccgccgtacccgccgcccacggccgggaagcccgggaggtcgcccatgcctcccacgcccacgaagaggttcttcttgtccgccacgccggcgacgcccgagccagagtcgtcgttcttggtgccggccgcggccgggagcgacgcggtgctgccggtggacgtcgaggaggcgcccggcataggcacggccctggccgccgccgccgtcgccgcggcgtgcagcaccagcgcgacgcagagcactacgaagccgatgctgcccctgatggccattgtatcagtgatctttctctgcgcgttttcgctgatgttgttccgtgtgatgatgagagatagatcaggcctgcgcgtttaaatataggcgggaggaggctggc

SEQ ID NO: 48810 - DNA, 157 bp, Zea mays
  Clone ID: MRT4577_144520C.1
ctgaatccgtgcgccagttgtcactacatagaactcaagtaggcatcgacgatgagtgaagctcatatactaggaggaggcttggcaacccctgctgatcgtggcagcatggctctgtgcctgatgccctagcgcgcaaatgctccagttaccagcg

SEQ ID NO: 48811 - DNA, 600 bp, Zea mays
  unsure (1)..(600): unsure at all n locations
  Clone ID: MRT4577_144521C.1
aaaagaaaatatttttccttaaaactcgccggcaagcatacatgcattatttcaaacttcgcaggggggagctcgaccgatatatatgaggactagcctcagtcctaaaatagttttggtttagggacacacgtacgggatcgaccaaagccccatgcaggggccaggggtcatatcatcattatcagggcttcatgggaggggaatggatcggagtacgggcttaaccatgatcaggccacacgtttttttggggggggggggggtatcccgggggaaggccgggcaaaaaaataaaagctggagtttttgacaaaaattccctccttggcctcgggggcctcgccgggggaggggtacttgccaagctgccccagggagttggccttggggcgcaaaaaaaacgcgtcctgcgccgccttgaccttggccgggtggcccccccaagttttgaggcaggggttctgcaacccccccccgtaaaaaaaagacaccggccacgggttgggcccctgggtcaaggggttgagggtttgggtnncctccacctccgaatggccgccggaaaagaacaaaaacccgggcacgggaggggggaac

SEQ ID NO: 48812 - DNA, 645 bp, Zea mays
  Clone ID: MRT4577_144522C.1
tttgtttatcctccagcaaacaccctaaaaaggtctgttcctcctcagcctgcatcaagcacaccacaatctgaagcaagtagcttcaatcatcagtcacaaaaagaccaagaaatgcagtcccgaaacagcagcgatggtttagtgcctctgcctcttaatgcagatggtgctgttggttcaggaacaagaacaagggaccttgaaaattcactgcagaaggcacaagaaaactttattaagagccagattgagatgttacagatccaactgcaaatggtgcagcgtggcgctgctgggccgcccagtaacaagaatactgagcacacagaagaatgaacagggcactcctgcatcgtggtgtaataataatgagaatactgagcacacacagctgaagaatctgtaaataggcggcgatgaggatgggacaaaagaaagccaaggattggcgatacctggggggaaactgttacatgatgtcttgcctggatttttggcaggcctgttaatttatgcttcactgttagtgccttgttgccagcaccagatgtttctgtgtgtgtgtggtggtggtttctgtacatgaaagccttttgactggagaaccaaccatggctagtttaattatgaagttcacttgtt

SEQ ID NO: 48813 - DNA, 278 bp, Zea mays
  Clone ID: MRT4577_144523C.1
cggaattcggctcgaggcaccttttttgtctcttcaaacaatactgtttttcttttttgcttttttatgatcgctatgaatttcattaacgtatgcccaaaacaaaacaaaaaaaaaaaaaaaaaaaaaaaaaaaaaaaaaacaaacagaaaaaataaaaaacaaaaaagtgctgctaccacctgcttgaaaacgtatccaacaggtaaaaaattccgacccgagccctccaacctaaatacaattaccaataaggactagtgtatgatcctggctaa

SEQ ID NO: 48814 - DNA, 533 bp, Zea mays
  Clone ID: MRT4577_144524C.1
atgcttcgcagggttgagccatatgttgcacactggtaagttttcttagctaatttagttcatgtcttcctgcttattctggtagatcatcccctgcaagtacccagctgaaaacagattatgctgttgtacttgtgtcttgtatgtgaatttacaatagaatttgtctccttttgtttgtttaaatgcatgagtagtattgatccagggtttcagagaacctgaactaataaataaataaataaataatcctagtgaaagtaggccttttggaatttctttcaaaggatagaaatgcctgcaggctgcagctatatatccaagccagtgggtaaggtgagtccatatacttttaattgattttgacgttgttctgatgagcgcactatgctctttcttagcttgcatgcagaatgagctgttatgtgctgaacttgaatatgtgcaaatagggaacatattaggtgcaaaccaattatttggtgcaatcgtataaacaattatgataattttttaaaacaactctccgcagc

SEQ ID NO: 48815 - DNA, 348 bp, Zea mays
  Clone ID: MRT4577_144525C.1
accacgcgtactcataaacacaccatgttaagctcactatcaaccatctatcaccaagtgctgctaacatattagcgcttgcctgtgcgctatctatgcccttcatagtgagtcacaacactatgcatttcattattccacactgctcacttgctactagtgccattattccacagttactaccaccagttacttcaatgatcttataacatccatccttgcaagcctatatgctactacttacgcttgctgctagcaccttacatcaaccaattacacaattgcaacaacaatccttggcacatataaccctacaaaccattgcaactcaccaacaacatcttcaac

SEQ ID NO: 48816 - DNA, 194 bp, Zea mays
  Clone ID: MRT4577_144526C.1
tttgctgattagtgctggtcagggcacgcagtttgccgcttaactacagccaatgatggagccacgggcctacgtcccgtcttatgaaggttcgtcgcgacccttagtatttcgcccctatacgaggaggagaatactcagaaactaaaaggactcttgagcgcaatcaaagggcatcccgagaaatagaaacg

SEQ ID NO: 48817 - DNA, 969 bp, Zea mays
  Clone ID: MRT4577_144527C.1
agagcggaagacttttacaaagtacgctttacattccagaactcaagttttacatggtagaaagagatgtatttattacaagtcctgatagtactcgaagtgcataacttaactacaataattggaagggtgaagcctctccataagagatatataaaaacattctaagcttcaagtcctccacatgaagtaactaacccaaagataagggaataaaacttctccttattgcagcagaagatcccaaaattattctactctggtaagtagttagatgaaactccaccactggatcaacaggcactgaagtgaactccttcaaacatcactttttctaggtgttcttcgaacggatgaagggcacgatggtgacgtggctggaggtcgaacacagccagcgaagttgacaaccagcgaagtacgggtgacggcgaagtcccgaggtgacgaacaggggcaagtgtctgagcgtgcgatggagggcgcgcgaccagagcgttgtgtcggtgtgcaccaggaagttgatgccgagtgcacagtgaagaaggggacggtggccttcgccgaggtgggtggagctcagtgcctgcaggacggtgacgcgacgaggctgtagggcgagcggtttcgtgctgagcatagaggtagacgatggctaggctgcggcgaacacggtttggaggagaggtaagtcccacggtggcgaggttgagcgtatgtccggcgaacaccggcgaggagagacgcggtgatggtgagagcgctgagcacggagtcgagcgatggagaaaaagtgtcggcgtggtgggagacacgactggcgctgtcgacgagaagaccggtgagtaggaccttaagcacagcgcaaacagtaggtccggcgagccaacacagaggcaagcagctgagcgacggtggtggagacataggcatcttgatcacccccggccggcctcgaggtacccaatg

SEQ ID NO: 48818 - DNA, 343 bp, Zea mays
  Clone ID: MRT4577_144528C.1
gacaatatacatggagactcatcagcttgttctccagatcgcttggctcaaggatatggttgaatgctatccattcctgaagcatgggctggtgctgcgcaacccttacatcaccacccttaacgtcttacaggcctacactctaaaacggataagggacctcaactttaatgtgacacttcagccgcctttgttcacggacttacccgactagatcgagcgcatctgactgctcaagctgcacccagcgatgcttgtcacgatcgcactgtaagacactctcatactcaccatgacaggtattgtcttctgcatgcagaacacttcataggatgcttcttct

SEQ ID NO: 48819 - DNA, 1068 bp, Zea mays
  Clone ID: MRT4577_144529C.1
ggagatagagcggaagacttttacaaagtacagtttacattccagaactcaagttttacatggtagaatgagatgtatttattacaagtcttgatagtactcaaagtgcataacttattacaataattggaagggggaagcctttccataagagatatataaaaaccttctaagcttcaagtcctccacatgaagtaacttacccaaagataagggaataaaacttctccttattgcaggagaagatcctaaaattattctactctggtaagtagttagataaacctccaccactgaatcaacaggcacttaagtgaacttcttcaaacatcacttcttctaggtgttcttcgaacgaatgaagggcacgatggtgacatggctggaggtcgaacacagccagcaaagttgacaaccaacgaagtacgggtgacggcaaagtcccgaggtgacgaacaggggcaagtgtctgagcgtgcgatggagggcgcacgaccagagcgttgtgtcggtgtgcaccaggaagctgatgccgagtgcacagtgaaaaaggggacggtggccttcaccgaggtgggtggagctcagtgcctgcagaatggtgacgcgacgaggctgtagggcgagcggtttcgtgctgagcgtagaggtagacgatggctgggctgcggcgaacacggtttgaaggcgaggtaagtcccacggtggcgaggttgagcgtatgcccggcgaacaccggcgaagagaggcgcggtgatggtgagagcgctgagcatggagtcgagcgatggagaaaaagtgtcagcgtagcgggagacacgactggcgctgtcgacgagaagaccggtgagtaggaccttaagcacagcgcaaacagtggcgcgtcggacagtagatccggccagccaacacagaggcaagcagctgagcgacggtggtggagacataggcatcttgatcaccagtataagcatggcacggactagcagaagtaacggctgaggattatttaggagatgtccagcgacttctggggagatatggaagacagaaaatatcacgagatgg

SEQ ID NO: 48820 - DNA, 236 bp, Zea mays
  Clone ID: MRT4577_14452C.1
gcacgaggcctaatgtgtgatgtatatatgctatgctagtttagatgtgtccatgtcaaaacccatccgatatgcttcagtttatccatccatgtagctgtttatgaaccaatcggaacaggtttggtcatggattggtgactgacgctgctggcacgatgaagcagatcgacggggggtcctgttctcgccattttcctggagcatttggaaatgtccgtgttccccacttgttt

SEQ ID NO: 48821 - DNA, 1230 bp, Zea mays
  Clone ID: MRT4577_144530C.1
ggccgggacgtagcctctttgttcgccctggaaattactggacactactccatctcgtgatattttctctcttccatatctccccggaagtcgctggacatctcctaaataatcctcagccggtacttctgctagtccgtgccatgcttatactggtgatcaagatgcctatgtctccaccaccgtcgctcagctgcttgcctctgtgttggctcgccggatctactatccgacgcgccactgtttgcgctgtgcttaaggtcctactcaccggtcttctcgtcgacagcgccagtcgtgtctcccgccacgccgacactttttctccatcgctcgactccgtgctcagcgctctcaccatcaccgcgtctctcctcgccggtgttcgccgggcatacgctcaacctcgccaccgtgggacttacctcgccttcaaaccgtgttcgccgcagcccagccatcgtctacctctacgctcagcacgaaaccgctcgccctacagcctcgtcgcgtcaccgtcctgcaggcactgagctccacccacctcggtgaaggccaccgtccccttcttcactgtgcactcggcatcaacttcctggtgcacaccgacacaacgctctggtcgcgcgccctccatcgcacgctcagacacttgcccctgttcgtcacctcgggacttcgccgtcacccgtacttcgctggttgtcaacttcgctggctgtgttcgacctccagccatgtcaccatcgtgcccttcattcgttcgaaggtgaggcctcccagcttcgatcttcagtgagtgcagcaacttttattggtggccaatgtcgttcagtggttgtgatctctagaggacgaaatggttgtgtatattctagatcgagtataattgttgttgtggacttcgtatttggagtcacgccggtgtattgcgtctctggtcggaacttggaagtcgactagcggcttgcaccatcggcacaatcctgtggctatacgtgtgaatcgcagcgctgtaactagttgaaaatgaaggaactagatcatatagaatagtggagtgcagaacgtcgctcgccgggatctctgtatattggccggatttgattcgtcaccattttggcgaacctccactcgacttcggtattatgtaagcttagattcactccctgtaaggtttggttcattttggggcatattcatttggtcatcaaatatccacttaattat

SEQ ID NO: 48822 - DNA, 416 bp, Zea mays
  Clone ID: MRT4577_144531C.1
gggggcttggccatcaatcgcttgacgagcgagcgagcgagtccatcgccaagctggggagctttaacctgccgaagagcgtgtgggttcagtcgtctttcctccctctccatctgtaggtctgccgtcgccgcctcgtgcagtgttcgtgtgccctgccgctgttctgcactagttctacccgtcatttccacccttccgcttgctggccgagtcccgcgcgcgtgcaggtctttccgcaatctcaccgggtggcgggtgcttccttccttcctcgccgaccctgtggctttgcaacgaggaaggtgaaatttgaatggaaatcgcgacgggagcgataagcgcactcctgcccaagctgggcaaccttctcaaagaggagtacaagctccagaggagcgtcagggatgatatca

SEQ ID NO: 48823 - DNA, 285 bp, Zea mays
  unsure (1)..(285): unsure at all n locations
  Clone ID: MRT4577_144532C.1
cataattccacctaccttcctccaggaatctacaacattacatgtgtatgcctagaatgtgcaccaggcatgcagtacatactaaataaattactgtcactatcattaccagnacctccctgttctggtgtaaaaaactgaaatccaaaggaccagagctcccagagctccagtgatcagaaccaagacccctggctttttaaccaaacttatcaaactacagatgtgctttaattaaggaccattgtaaccagcaactgacatcacaggcatggacctcattgt

SEQ ID NO: 48824 - DNA, 145 bp, Zea mays
  Clone ID: MRT4577_144534C.1
gcgtacgcttagatggctaaccagcggcctccattttaagccagcacatttcaattttaaccgagagaccatagtcctcttgcgggccgtgcgccttcgtacctcccctccaacctgtgagaaagatggagatgatcaagatgat

SEQ ID NO: 48825 - DNA, 213 bp, Zea mays
  Clone ID: MRT4577_144535C.1
cgagagcgtgggggtagctacaaactcggcaaaaacaacagtctgtacatgcattggctagcgtgaaccgccaggcaagtgcctgcgggctgggagcgagcaagggcgcgcaaggcattggcgcggctactgcacgtgaacctggagggaggaccgcggagtcagagcccgcacgcccaaccagtcgggccaatggaggaagccgaggggcaa

SEQ ID NO: 48826 - DNA, 421 bp, Zea mays
  Clone ID: MRT4577_144536C.1
cccccccccttttttttttttccccccccccccccaaaaaaagaaaagattattttttttactaaaattaccctcaccccttttgggaacaaaaacccaaacatttctaccccttttacaaaatcaggtggaaaaaaattaaaaaccccccattctccaatcccttgaacgctttttattttttcattcaccttgtttttaacactatcccaacaacttatttgttaggtataaataaaaaaaacatcaggaactttctttaacgtcaccttaaacaatggtccaaaaggtccaccatccactacttttaaaacataaaaaccccccccttcccaatcttttatttgaaaaatttaactcctcttttaaaacctttaagaaaaaaacccttattattgaacctcctttttccaatcattac

SEQ ID NO: 48827 - DNA, 441 bp, Zea mays
  unsure (1)..(441): unsure at all n locations
  Clone ID: MRT4577_144537C.1
ggccgctcgagnngccggccgggtcgcngaaaaaaaaaaaaaaaaaaaaaaaaaaattaaaaaaaaaaaaaaaaaaaaaaaaaaaaaaaaaaaaaaaaaaaaaaaaaaaaaaaaaaaaaaaaaacccattcattggaagaaccaaaggggggggtaagggggggggtttttgggaaatcggagggaaagaatttgggttttcggccgacaaagttttaagcccttccccgggaagtggattttttcggaaaaataagaagggggggggatttctcccccggggaaggaaaaaagttcggcgggggggaagccccccccctggaaacaaaaattaaccccggccaaatcaaaggttgaaacccccttccggggattaaaagggggccaaattataaaacaaatttcccagccaaaaattaaaagaggggacaattctagccc

SEQ ID NO: 48828 - DNA, 1351 bp, Zea mays
  Clone ID: MRT4577_144538C.1
ggatatgtcagtggctggcgagagcaccactgctgtcgtggttaatggggaagagcacgaggccaagtccccggaggatgatgaggcactcaccacggcgtctcctgctgcagaggctgtgtccacttccggatgtgacaagactagtgttggtagtggatgtaatgcccgaagctgcaatgggggaggtgcaggaggatcaggaactgggagtgactggtggtggcgtcaggacaatggtggtggtggtagtggcggcggcggcagtggcggcgttaaggactatgtgatggaatggattagatcggagatcaagaaggagcgaccgaagaatgactggattgcagggccatctgcagtaacccctgttgctccaacagagaggaagaagccaaagaggagggcacgggagtggtggcgcgaggagtatgcagaggagctcacgaagaagcaaaagcgaagggcacttgccaagtcaaaaagtgatgctggtgcgatgtctggtttgcaatggtgggagagggattgtgaatttgaggagaagggccattcaaggtggacgatgatgaaaagctggagccggaggagcagcaatggcaatggcaatagcaattccagcatcagttggtgggtggacggtgtgagaaggagcagcagggattgggccagcggggaatttgtgcctaagagtggtggagcagtgagcagcacaccgagcatgcgtggcacagtctgctatgtggctcctgagtatggtggaggagggcctctatcagaaaaatgcgacatttacagctttggtgtgttgttgttggtccttatatctggacgacgcccactccaaatgacaacctcaccaatgtcagagtttgagaaagcgagcctcatttcgtgggcaaggcatcttgctcaagttggccgcttgcttgatcttgtagaccctgcactgcaggatgttgaccgagaccaagcgctgctatgcattactgttgcactcctttgcattcagaggtcaccagctcgccgcccatcaagtgcagaggtgcttgatatgcttgctggtgagggtgagccaccgcctcttccgatagagttctcaccatcacctcctggcggattccccttcaagtcacgaaggaaaggccggtgagtttagtttgttggttagatgaaaaggcagtgttagtattctatccttatgtttgtttcttcttgtactcaactcctaattttatctgtttaatttgttgatgtataaagatcttggtgggacaaaaaagtatccaattgggttcagatttgacaagaattgatgtgccccattaatcaattggataatcttagtttggtt

SEQ ID NO: 48829 - DNA, 295 bp, Zea mays
  Clone ID: MRT4577_144539C.1
gacagagcacgccgctttagcgagcgcaagcagagccagccaaaaggctacagcaaaaaaaatccgccttcaccacccagtcgcaggccaggctcagcctcccctcaccccacctcggcatcatcgccgccggcgatctatctctctcacaatggcggcgcccatgtcagccatcgactcagcgtggcagcacctgatcgccaacatcaccgagttccagctcgccaccgtcgtcaccatcctgctccacgagaccgtcttcttcctcaccggcctcaccacccacctcttcgag

SEQ ID NO: 48830 - DNA, 301 bp, Zea mays
  Clone ID: MRT4577_14453C.1
gcctctgagcagacatcacaaagaaagttgaaggctttctcgtacatgcgacatgcggtgaacaaaccttttcgcaaaggcttctgtttcggcgaccgaggtggacaagcacctaccgggcgcgctgaaagcggggtgggggcatgtatacacgccgccgatcaggtggacctgaaggatagggggctcctggacagccttctctgcagtgacaagcaagctgctacgcattgaagaagaagcaaactgatgagctggcgaccggcatggagaaggtcacggtgttcgagcccgagaagca

SEQ ID NO: 48831 - DNA, 369 bp, Zea mays
  Clone ID: MRT4577_144540C.1
gggggaaaaagcttgccccccaaaacttattaaaaatttgggccctgcctttttttttttagcaaaaagggcccccctaatggcaaaaacttaaaaaagttttttaaaaaaccccccccaaaactcctagcctaaaaaaaaaaaaatttggaagtaggccccctttccatggaaccaaaaatggttgaactttccctttagctaggtaaaaaaaattttattacgtcccaaaaaaaacaaaaacccaagttttttttctttcagcgtttttggagctttatatccccacccatgcattggcggggggggcaccataaatttaccaaacccattttttagatcaaaaagagcccccctttttaaaaattt

SEQ ID NO: 48832 - DNA, 282 bp, Zea mays
  unsure (1)..(282): unsure at all n locations
  Clone ID: MRT4577_144541C.1
gngaacaactgctgttaattttaagaaacaaggggttttaaaatttcaaccccataattggggcattagctgcatatatagacattgttgtatatgagcccagccataaagggacaattaaatttctgtatataggaaacaccacacgttcacaccattaaccatttatatacccaaatttaatgaacacctatttatttatatttatgcacgaaaaccatccatgtcgacacctggcgacattggtggcaccggccacggggataccagctttcccccggg

SEQ ID NO: 48833 - DNA, 372 bp, Zea mays
  Clone ID: MRT4577_144542C.1
taattagttttttttttttttggtgggggtttttttttttgtttttttttttttttttccctaacggccaaacaaaaaaaaaacccacatgaccagattaacccaattgtatacaaaaaaattaaccttcccaggaaaaacacgaaaaggggaaaaaccccaattttcccaaccttggggaacttgggtggacattgaccccaaaaagaagccacacaaaaaacgaatggcctgcgttatttaataatttaacaaaaaaaaaatggcatgttcaaaatagtaaatcaaatgtatgtgacattgttttaacccccaaattttccccaaatattaaaggggttggcctattaaaaaacccccttatttataaac

SEQ ID NO: 48834 - DNA, 836 bp, Zea mays
  Clone ID: MRT4577_144543C.1
cttttccccactcgacgcaccctcgccgtcaagtctagggtttagcggagcctgcagtcgtctcccggcaccacccgagccgcccatggacgtcgactccgaaccgtccgccgagagcaagcccacccagatggacctcgaggaccaggcggacgcgaaggggaaggccgatgccgcggaggaggagaaaggaaaggggaaggggaagggcgacgaactcgcggactccatcgggagtctatctatcggcccggggcgcgccaacttcaagaagaagccggtgatcatcctcgtcatcggcatggccgggacggggaagaccaccttcatgcaccgtttggtgtgtcatatgcaggcatcagcgaacatgaggggttatgtgctcaaccttgaccctgcggtgatgacactgccattcggagccaacattgatatccgcgataccgtgcgctacaaggaggtgatgaaagagtacggacttggtcccaatggtggcattcttacctcactcaacctgttctcaaccaagtttgatgaggttatatctgttattgaaaagcgagcagaccagctggattatgtgctggtggacaccccagggcagattgaaatctttacttggtcggcttcaggagctatcataaccgaagcttttgcatcaacatttccaacagttgttgcatatgtggttgacacccccaggtcgacaagccctgtgacctttatgagcaacatgatgtatgcatgcagtatcctctacaagacccgtttgcctctggtgctgacatttaataaagttgatgtagccaagcacgagtttgctcttgagtggatgc

SEQ ID NO: 48835 - DNA, 197 bp, Zea mays
  Clone ID: MRT4577_144544C.1
gcctcggccaccggcgcgggtgccctcctcctccttttgtccgacgatccggagaggactttctctcgcctgctcgacccttccgcccccgccggccggccggtcctttttccggcccactccggtccgatcgaccatggcggttacccgccccaatggcaataccacttgtagctcccttgtggcaaccgttccgg

SEQ ID NO: 48836 - DNA, 377 bp, Zea mays
  Clone ID: MRT4577_144545C.1
gtacggggctcaaaaccgcgtggaggatcgtggggtaccagcgaacagcaccagcgaggcctcggccgacagcgctggagctccctctacctagctgcccagcggaatctcttcttcatgtccggtggtataacaagccattgaggagagccggcggagcttcgatcaggcagggcggagcgagaaattgagctgagagagggggattcgtcatagttcacccatggttgtgcttatgcagaagccgtggctgcccgtcgacctgcggctgccggcggggccgcaggcgtcgctggggatcctggcgttcgaggcggcggcggccatgtccaagctgctgtcgctgaaccgttcattgtcggacccggaggtctccc

SEQ ID NO: 48837 - DNA, 354 bp, Zea mays
  Clone ID: MRT4577_144546C.1
tgattactaggtttttttaaaaagaattgataataaacatccgataatcaatcaagcgcatacaaagaagatgatcaaaatgcaaataaataattaaacacttaaaaagtattaccctaattaatataataactaaattcattatttttaattgatggcttttatggtgttacaataagaaacataatacttcaatcttactaatgtttaaagcaaaaatcttgggaagaatggtgcaacaaacacaaaaactctgccacggtagcacaacctgtctctgtgatgatctaaacaatttttttcttttcatgaatgttttttgctttgtttttgggacagtcttacttgattctt

SEQ ID NO: 48838 - DNA, 409 bp, Zea mays
  Clone ID: MRT4577_144547C.1
gctcttcggctcgatggtgttggcctgacgacattattttgcatcttcgccctctcaccaccggggggggttttttggctacatcctcatgaaagctctcatccgcctcagtgatttcgccaaacatcttcacctggggctttctattgctaattcatttctaagctgaatgtgagggctagagcccgaggaacactgtacggtctattacgacccccgaggggctccccactggcacgtttaaggggtgccttctgcacagacacggacatcatgaaggtcacctccaccaaggggggcttcacagtgcccactcccaaggagttcaaagagaccctggacttcgaggtctacctcgggaagacgaggcatatcaagcgtcaagggatgggacacacatcgggagccc

SEQ ID NO: 48839 - DNA, 230 bp, Zea mays
  Clone ID: MRT4577_144548C.1
cccacgcgttcgaagtgattctagttcagagaaagaaagaagctgacaatgagaagcatgtgaggcgcgtttgctgtgaagtggttcttgtgaggcttaggaattcacccttattttcttccccttatagaaatggagatggtcctactgtcttagagtcctatctggcttgggagtgggccggcgctcattttttcacccaccggcgatggcggatgaagcgggcctta

SEQ ID NO: 48840 - DNA, 263 bp, Zea mays
  Clone ID: MRT4577_144549C.1
aattcttgggttgacccacgcgtccggatagatatgttcatagctagactgctagactagataattccatctccgttgtgacgacgcaaggcctcatgatgattgagctcgagcatggctggcatggcagcacttcctgcttgactgcgtctgcgtggtcagattaagcctttgataattgtaagacgatctgaaaatctgagtgaaaaaaaaaaaagaaaacctaaaaaaaaacaaaaaagaagagatggaataaaaccgag

SEQ ID NO: 48841 - DNA, 228 bp, Zea mays
  Clone ID: MRT4577_14454C.1
ttcctttatccctcctttgctttctcgcatggaggaggatctttaccctccctctcccacaccttgcatcaaaagagcagccatgtcttgggtgatggagtgagtagaagtgctctgtcacacatgcacccgcacatgagcgcgctcaaagccgagatagagcccatcttgggcggggaatcaccttggcagatacgctactgcgtactgagtccaacataatgctta

SEQ ID NO: 48842 - DNA, 348 bp, Zea mays
  Clone ID: MRT4577_144550C.1
agcagtggtaacaacgcagagtacttttttttttttttttttttttttttttttggtttttttttttttttttttttttttttttttttttttttttttttttggccaaggggaaaacctttattttggtttcaagaatcacagacgggcaagggatccacgggcccgcaaaccccgttgggatattcccctttttacggtcaaaaaaaaaagcaggtgaaacccggatcgcaaaggggaacatctttagaaccccagcattcggccccgaaagaagggcccaggtttcctgacccccttttttgggccaaagaagaaccccggggaccctggggtggtaccaccggt

SEQ ID NO: 48843 - DNA, 888 bp, Zea mays
  Clone ID: MRT4577_144551C.1
atggagattctttcaagaacgtttaactgtcagataggatcaatgcctttcacctaccttggaatccccctgggattatcaaaaccccgaattcaacattttttaccccttatccaaagaattgaaaagagactatcatgtacctctaatttcctctctcaagctgggagattggagttggtcaactcagttttctcagctttaccgacattcctcatgtgcacgcttaaaattcttgttgcctcaatcaagcagatagacgcatacagaaagcactgcctttggagaggaaatgacgtaaactcaaaaaaaccgccgctagctgcatggaacatgattactcagccaaaaagtagcgggggtctcggggtggtcaaattggagacccacaatgaagcgctactcttgaaatatttgcacaagttcttcaataattatgacttaccttgggcaaatctcatctggaataattactacagactgaacacaaggaatatgttgaggaggaaaaacatgacacttgagtcatactcgtgcgaaaactgtatctggcaaaaagaggaaacactctaccatctcttcctcagatgtaactttgctaaggcctgctggaattccattggtatgacgcctcccagaattgctaatcccgaggaggcttcggcaactctcaaacagcaactcaatgttcccttctctatggagatagttatcctcatgacatggagcatatggaagtgccgaaatgcatggttatttgagaacaaagacccaacggtgcagcaatgcaagcatgaattcacaaaggaattacttctggtcatccacagagcacggggaagatatgattcctccattcctaactggcttcagcaatggcaatcttaa

SEQ ID NO: 48844 - DNA, 268 bp, Zea mays
  Clone ID: MRT4577_144552C.1
accgtatcgtctcgcctgttcagtttccttctcttcccgcagcccggtttggcgaccaggggccaccgttccagagtagcctagcgaatcccgtgtctggttcgtgcgatggcggaggagcagtccaacccccagcaccatctagcggaggagagggaggttatggtggagcaccagcagactaggagggcccctaagctgatgtacctggacttcgttcatgtggcggatgcccaggcacgtgtgtgcctcgctgggctctaccgcc

SEQ ID NO: 48845 - DNA, 517 bp, Zea mays
  Clone ID: MRT4577_144553C.1
tgttatgttttccactcccccgtctcccactctcccccgcagtcccgcacccgccgtcttcccctccctcccccgtctcacactctccacagcagtgcggcacctgacgccttccaatccatcccccatcatatattccacatatctctgtgtcgcctcactggtcgaatccctctattgctaaaccctaaagatcatctgtcgcgctgcaagctcccaattcccacataatgaatcgccctagctagaaggtgatgaaggacaacgccggagatgcaggaaaaaaaactggccatgaaagagcggaacaaaggaggatgtcgatgatgatggtgttaagaaaacgcatgattcgccccatcatttcgtggtgtggagggtctgcgtgatgctaaaagggtctcgccacaacgccgtggtaccagcatgtgccctgcggcggagacgtgctctgacatcgacacatggctgcaggacaggatctgccctgccgcgctgaagtgctagaaatccacac

SEQ ID NO: 48846 - DNA, 394 bp, Zea mays
  Clone ID: MRT4577_144554C.1
cgcaaaccatggcgcggttcacgattttgccccttccatacgcacttattttggtcgctgcggcgtgctccgtgctgggctacgtcccttacgacgcggcgccgcggagcaccggcggggccgggcatcacgccagcgctcgaacttacatcgtcctggtcgagcctccgcctgcgcacactcatgaagacgacgaggcagcgcaccgccggtggcacgagtcgttcctgctgagctccggcgccggcgccggcagccggcgccgcgttcgccactcgtacacgagcgtgctctcgggcttcgccgctaggctgactgacgacgagctcgcggccgtgtccaggaggccagggttcgtgcgcgcgttcccggaacgcagggtgcagctcatgac

SEQ ID NO: 48847 - DNA, 576 bp, Zea mays
  Clone ID: MRT4577_144555C.1
cctgccgggaaattgggtgcgcgccatggcccgccatccccttgcgaccgcgtagctccaagtagtaacaaggctgacctcacccgagactcgccacagcatgcttattctaccctgccggacctcgccgtgctctttgctacttgccatcaccgagaccggcacgtccctgagaacatcgtcagaccgcggcaggccagcgaacaggacaacttcaccgacgaccgaccaacctgtatcttccctaagcggattactgcgcgcaccgagaattcggcgggtgctgggagaggatgtagcggacttgtggccgatcagagatgggcgaggacatgtcgccgcggtgagaaggaacaggcggagcaatgccggcgatggcgtggcgctagttaccggggagaacggtggaggactttggactaacgctggagcaagagcagcccaaatgtgactaggtgctgcaactggaaacacagataaacacagcgcctgactgcggaccaatcatgaagacattgtggcatccctgaacctgaacaacaagggcgacggcccttactggagcctactatcaca

SEQ ID NO: 48848 - DNA, 2535 bp, Zea mays
  Clone ID: MRT4577_144556C.1
atggtgccgaaacggaagaaccagagctctgctgcggcaatcattcctctcatcgaccccaatagtcagttgtcgttcgcaggcctacctcgggattcttccccattttggcctctggaagtatttgtatcattgtcggcccgggatggctgggggcagcaccagctcgttggtggtgcaagtttggagatgcgtcgcaggaggaagacagaatacgttgacattcctctcaaggatatcattaaagggtggcgccttgagtggtttattgtggaaaccccctgcgagtccctcccccctcggtcagggaggcaaccagatgtacgtactcctagctgggttgagtctcgaactcctttggaggtaacggaggccagagttctacttgctgagatctgtctgctaaaggagaaaggtctgactgccgaagctgtggttgcagatttcgttttcaagaatatccagcatttgaaggacagggcataccctgcatatctgtacgacgacatcaatgatggcacccgggtgacaaacaagagaattcccactgctgatctgctaagccgactggatatgatcctgaggggcagagtttcaaacgctggtgctcctgttgcttattctgcctggaacctgccatcacatagatcctttttcaattttgtgtctaatcctcctgcccgtgatggtggtctgggtcttagagtgcgaccctcccctgaagacattgaagctttaatttccgcactccggagtctcccaaaggatgagagacagactcatttcgagatgtcagctagcacaaacgacgaggagatagatgttgtgctcaacttgttgcttgttggaatggagaggatctggaaacccgaagaggtccgtccaaagcatccacgacgagtgagcctgcctactgcacccgttgaagagaaaaggaagaagaggcggcttcggcgactgttgagattggatcatggcgtgggtccttcggtgccggtttgtgatgaagtgccagcagaggtccttcctgaggtcgatcccaatggttgtgcccatgctgaagttgatcccaatgggtgtgactgtcctgcagttgatcctaatgggtgtgaccatgcatcggctgttgttcatatatttgttgaagatgaagaagaagaagtcccactgattcagaagaacagtcagcattacagaggtagtaagggggatagtgacattccttctccagctctgttagctcttgtcagccttcaggaattgtcaatatcggattttgatcagacccttgaggaggtcgtccctgaggatatgctatcggagccgactgctgatgacatgatggctatttgtttggaaattccagccgcgggattggagtcttcaatgctgaggtgttggttcggattgcccgactcacatggaggtgatagaggatcgttcagccttagaggtggctgctgtagaggaccctgccccgagggtggtgctagcggttacctagcccccgaggatctcgctggtagtgatccggctctggttggtagcgcgagctgcaacccagcccccgagggtgttgtcggtagtgatccggctctggtgggtggcgcgagctgcaacccagcccctgagggtgttcaggtcggcgagccaaatgcgagaagtctggtatccgctggtggggctgagctcacccctgacaacgttcttcaaactgtaccggttgatcttccttcgtcgagctatgacgtagctccccctagcttggggttaccatcattcctctccaatcttcagctgtttcgattgatcaacttgtttttaatcgtgtatccctcttcagctgcctcatcagatatggctcggcggtgctccgagcttgaggaaaaacatcttcaaagtcaagctgactcaacccgacggtactctgatctcgaggagaagtattctcaaggtcaaaccgacctggctcgggtttctgcttcgctggacgatgctcgttctttgaattcttctctcaatgctcagcttaattctgaaagggcaacacatgaggaggagaaacgagcgttcgcagcttctcgtgataatctggacatgttatatcgtgatgccagcaattccttaaccatcttggagaggagccatcgattcactatgtcagatctggatcatcatcatcgcgagctgcaagtgtcccaagatgaggtcctacgacttagacagttggtgtcaagcaaggattccatcatcaaagatctgcgtgcctccaagaagttagtcgcccaggagctagaggctgctcgactggctaccaaagtttcagaggacaactgcgccattctgaaggctcagcgcgacaaggctatggacaaagccattcacgaggggcggatcttgatgaggaggcccggcgtagtggttcctgatgacattgttgccgacgttaaggttgcccctgatgcttcgagtcgaccttcttcttcactggctcctgtggaaaacattgccaaccgagatgtttcgatgcagtga

SEQ ID NO: 48849 - DNA, 256 bp, Zea mays
  Clone ID: MRT4577_144557C.1
ctttccggtcttgacctctcttttctggatttatcttatgttgatttcacgtgtgcttttcataaaaacgggcttttttcacgagcataccttcaatgtacaaagtttcgagatgttgatgccgaaggctccatatttcacaatgcaactttgcgtgaatgttaatttactgcgccaaatcttcgtggggctttattagctgttgcatgccttcatagtgcaaatctataataagcttgcttattatactttaact

SEQ ID NO: 48850 - DNA, 323 bp, Zea mays
  Clone ID: MRT4577_144558C.1
cttcattctcagttcaccttaaatcaatcaacatcaactgacctcactacgttaggcgcacttcttctaacagaattacaacatcctgcccatcatggctagcaaagtcagagtcttgttgaaccccaagtaccagcgcaatggcaccaagtcatatgtccacctcctgcgcaagtacgggttcgacaccaccctcgatggcccctactttcacgcatcgcacgtccaacagcaaggcaagttcaccgctaccggccagaagcctgttggtggccgggcccgcgttcaccgtgccttgcagaagaaagtagacggccagacag

SEQ ID NO: 48851 - DNA, 131 bp, Zea mays
  Clone ID: MRT4577_144559C.1
tccactcgtttttctattctttcgtctacttattcgtttccccattattcttcttggtcgggattctgatgcttcactcgaggtcaatctcattaattcattagtggccttactggaattcatgatatact

SEQ ID NO: 48852 - DNA, 527 bp, Zea mays
  Clone ID: MRT4577_14455C.1
aaaaaaaaaaaaaaaaaaaaaaaaaaaaaaaaaaaaaaaaaaaaaaaaaaaacctcaaccaaacaccaccctaagggcaaatttaatgccgatttcccgtaaccctgcgagggcgctatttccatggttttaccaggccccttttgggccctatttggagcctttttacaggtccatttcccgccttttgacagggttttaacagggaaatccccggctttccccaccttaatcaccttgaaacccctcccgttacccccctttttggccatagggaaaaggcccgtttcgaccccccttttaaacacttaaaggccctgaatggcgccttttcccaacctgttccccccctttatgcccattggaacccccctttacccccaccttaacccctgcggttggctgggctctcccgcccgttaccttcccttttttcccttccttttccgccgcttttttcggcttttcccgtttttttctaaaacggttggtcccttttgcgccccaattttttcctttaggggccc

SEQ ID NO: 48853 - DNA, 349 bp, Zea mays
  Clone ID: MRT4577_144560C.1
ggcactcgagtccgccttctcgttctccaccaccgccgacggggggctccccaagagtgtgcagcggcgggtcctacgggggcggtggcatctgctcctcctgtgtctgcttcgtcggtcccgtgccgcttgtggcgcgtgccgggggggggggggcgcgcgctggcgcgccgcgccgcggcggcttcccgcgggggcggtctggttccccggccgcacccctgccccgtggctcggcgacggcctgccggggctcttcggctttgttccctggggcctgtgctctgccccggtgagcgctgcggcggagcgtgctggcggtgctggtgcgctgccggtgggcggatgc

SEQ ID NO: 48854 - DNA, 506 bp, Zea mays
  Clone ID: MRT4577_144561C.1
gggtacccgggcccccccctcgagttttttttttttttttttttttttttttttttttttttttttttttttccaagaagccctttttggattttaccggggggcaaaaaacccattccggggaaaaaaaagccccgggccacctccccctagggttaaatttacctggcccagccaccaccggcacttttttggccttccccccccccccttacggacttaggttttttacggggccccagccggtggtttttttccccccttgggaccggttggccgttttaccttggccccggggggcaaggcccccccccctgggggccggccggccccctttccgccagggggtaatcccccagggcccgggcctggggggaaacccaagggtggccctttggccttacccgaaaagcccctttgggattgggggggcccaacccaatggtccaataccgcccggcccagaacaagagggcccgcctcgggcccaattcctggcgcccggg

SEQ ID NO: 48855 - DNA, 740 bp, Zea mays
  Clone ID: MRT4577_144562C.1
acgcgaatcgtaccggtacgaacactgagcacgcacgcacgcaaactcaaaggagtgtgaccacggaactgaagccatggcggttacagttgagaagggctctatgggggagccagcgcagctgctggagcgcagccgggcggttaccctgcacggccgtgaccggaagggccgtgccgtcgtcaggatcgtcggcaactactttccagcgcgcgcgctgggcggccggagatcggggaccgcgagttcgtggtcgtgtacatgcactcccgcgtggatcgcggccacaacttccccggcgtcggtgcgatccgcggcgcgtacgagacgctgccggccgcggccaaggagaggctgcgcgccgtctacttcgtgcacccggccctccagtccaggatcttcttcgccaccttcgggcgcttcctcttcagctcagggttgtatgagaagctgcgatacatgagccggcttgagtacgtttgggcccacatagacaaggagcagctggaggtccccgaatgcgtgcgcgagcacgacgacgagctggagcgccgcccgctgatggactacggcatcgaggcgacggagacccgctgcatgtatgacgccgcgtccatggacacctcggcgtccctgcactcgctccgctgcgtctcctagtcgcctggacagtggcatcccgattcccgccgccggtacggcgtgcttctgtgttctcgttggtaggaagtagctgcatg

SEQ ID NO: 48856 - DNA, 404 bp, Zea mays
  unsure (1)..(404): unsure at all n locations
  Clone ID: MRT4577_144563C.1
ccaaggggggcccaaacgaccccaagccggctcatgtatcgcagcttctcanacaaccctgagctgaagaggaagcgcccgaaggtggcgaagaagatcctggactggagggccgggtgcacgaagtagacggcgcgctggagcgccgcccgctgatggactacggcatcgaggcgacggagacccgctgcatgtatgacgccgcgtccatggacacctcggcgtccctgcactcgctccgctgcgtctcctagtcgcctggacacttggacagtggcatcccgattcccgccgccggtacggcgtgctttctgtgttctggttggtaggaggtagctgcatggcttcatagcgcttcggtactgtagtttagctgtgtatttataatggatatagtttggagt

SEQ ID NO: 48857 - DNA, 1101 bp, Zea mays
  Clone ID: MRT4577_144564C.1
ctcggggccggccgggaaaaacacgcgaatcgtaccggtacgaacactgagcacgcacgcacgcaaactcaaaggagtgtgaccacggaactgaagccatggcggttacagttgagaagggctctatgggcgagccggcgctgctgctggagcgcagccgggcgatcaccctgcacggccgtgaccggaagggccgtgccgtcgtcaggatcgtcggcaactactttccagcgcgcgcgctgggcggccgggcggaggaggcgctgcggtcgtacctgcgggagcgcgtcctcccggagatcggggaccgcgagttcgtggtcgtgtacatgcactcccgcgtggatcgcggccacaacttccccggcgtcggtgcgatccgcggcgcgtacgagacgctgccggccgcggccaaggagaggctgcgcgccgtctacttcgtgcacccggccctccagtccaggatcttcttcgccaccttcgggcgcttcctcttcagctcagggttgtatgagaagctgcgatacatgagccggcttgagtacgtttgggcccacatagacaaggagcagctggaggtccccgactgcgtgcgcgagcacgacgacgagctggagcgccgcccgctgatggactacggcatcgaggcgacggagacccgctgcatgtatgacgccgcgtccatggacacctcggcgtccctgcactcgctccgctgcgtctcctagtcgcctggacagtggcatcccgattcccgccgccggtacggcgtgctttctgtgttctggttggtaggaggtagctgcatggcttcatagcgcttcggtactgtagtttagctgtgtatttataatggataaagtttggagtaccgagatggcttctgcaagtgtgcaagagaaacatggaaaagctgatcaaagaacgcgaacataggtagcagaacaagtgaacaccaatagaatcgctaatccaccaaacaggaaccatagtgtgatcactgatcggtctttgcctcctatcgaagacgttacttgacatcaaagaggttacttggaacaaaggtgacacaaaaatatatagagaagatacttggttggc

SEQ ID NO: 48858 - DNA, 572 bp, Zea mays
  Clone ID: MRT4577_144565C.1
cccacgcgtccggcctggacgaccctgtcatcaagagcttgactgagaagtacggcaagacgccggcgcagctcgtcctccgctggggtctgtagcgggacacggtggtgatccccaagacctctaaggtggagaggctgcaggagaactttgacgtcttcggtttcgacatctccggcgaggacatggagaggatgaaggccgtcgaccggaagtaccggactaaccagcctgccaagttctggggcatcgacctctatgcttagcttttagttcggttgcgttgcgtcgccccccccccccagacaagacagcatcaataatgaggattccctcagacggcatcagtcaaagtcacgaggatctcagacagcatcttccatcacatgtgacggtgtgaggctgatggtagggtttggtgtctccacgtgtccctctctttcagctcagcttcatcaccatgtagactacgcagtgtttgcctccgattatttactgtttttcttccttacaaaaaaaaaaaaaaaaaaaaaaaaaagacccaaaaaaaaaaaaaaaaaaaaaagaaagtg

SEQ ID NO: 48859 - DNA, 326 bp, Zea mays
  unsure (1)..(326): unsure at all n locations
  Clone ID: MRT4577_144566C.1
gctgtacatgtacctcgatcgacgagaccaagacataacagaagcacgtcatgctgataggcttactgccgacgctaagaaagaagagcatgcaccgtgaggatgagacaccaaggctccacctagcgacctactctacgtagcttgttctggtgacaatgtgtgtctctacatgcatccacaccaacatactaaggacatacaatccgtagcgccgaaagcgtactgccggctgtatgtacccagacagaggaggtgggcgggcgcaataagcactactcgctttctatgactatcttcaaagaaaacatacgcgtgcatgncgc

SEQ ID NO: 48860 - DNA, 1410 bp, Zea mays
  Clone ID: MRT4577_144567C.1
ttgggtacctcgaggccggccgggaagcattaaaaagtcgggccagcaagaaagaaaaaaccacaacaagagagagagacagggacagagagagagactgccaacgaggcgaagcagccggccaatctagcatccgcgcgcggggtctgagagcagagcggcagggcgccatggcggcatcggtggcgctgagcagcgggcaccggatgccggcggtggggctgggcgtgtggcggatggagaaggcggacatccgcggcctcatccacacagcgctccgcgtcggctaccgccacctggactgcgccgctgactaccagaacgaagctgaagttggtgacgcgctcgcagaggcattccagaccggactcgtcaagcgggaggacctgttcatcacaaccaagctgtggaactcagaccatgggcatgtgcttgaagcctgcaaggacagcctgaagaagctgcagctagactatctcgacctctacctcatccatttcccagtagccactcggcacaccggagtcggcacgacttctagcgctctgggtgacgatggcgtgctggacatcgacaccactatctccctggaaacgacatggcacgcgatggaagagcttgtttccatggggctggtgcgcagcattggaatcagcaactacgacatcttcctcaccagagactgcctggcctacgccaagataaagccggcggtgaaccagatcgagacgcacccctacttccagcgcgactcacttgtcaagttctgccagaagcacgggatctgcgtgaccgcgcacaccccgctgggtggctccaccgccaacgccgagtggttcgggacggtctcgtgcctggacgaccctgtcatcaagagcttggctgataagtacggcaagacgccggcgcagctcgtcctccgctggggtctgcagcgggacacggtggtgatccccaagacctccaaggtggagaggctgcaggagaactttgacgtcttcggtttcgacatctccggcgaggacatggagaggatgaaggccatcgaccggaagtaccggactaaccagcctgccaagttctggggcatcgacctctatgcttagcttttagttcggttgcgttgcgtcgcgtactcgcgtgctgcgtctctcggcccccccagacaagacagcatcaataatgaggataccctcagacggcatcagtcaaagtcatgaggatctcagacagcatcttccatcacatgtgacggtgtgaggttgatggtagggtttggtatccccacgtgtccctctctctttcagctcagctaatcatcaccatgtagactacgcagtgtttgcctccgattatttactgtttttcttccttacaaaaaaataaaaaaaaaaaaaaaaaaggccccta

SEQ ID NO: 48861 - DNA, 409 bp, Zea mays
  unsure (1)..(409): unsure at all n locations
  Clone ID: MRT4577_144568C.1
gggacccctcgagccggccgggccggcccctccctccaacccgcacacagacgcactaacccccttcaaggcttgcacgtaagcgtaaccggcgttgccttccttcatcacggcggctgggcggcagagcgcgccgccatgccgcaccgccaccatgacgccgcgggcggcaacgaagccccgtccccgcgcccctcggcggccggctgctacgcgttcctgacgcgctcccaccgcagcgcgggcgcgtaccgccgcctggactccgcgcgggcgctcgaggccgaggccgacgccgcggtggcggcggtgagggtggaggtcgggacggcggcgaaggggagggcgaggagcgtgntccacgtcgaccccgccgtgctggaggccgggccggngcgccggctgctgg

SEQ ID NO: 48862 - DNA, 882 bp, Zea mays
  Clone ID: MRT4577_14456C.1
gccggccgggccggggctctctccgatatttcactggatcgccatctcctgctcgcgcccagcaccccgccgccggctctagctccagctccaccgcgacgtccatgctcgccaagcccatctcccatggcgctcgacctccatctcgcctccaccaccgagcacctgccgtcgctccatgctttctggtggtcgagctcctctctctccctcctctgccagcgctcgtcctcgattccatggccacagcgcacaggagtcccgatctcgactcgaactcagcgagctcccctacaagctcgcttctccctgttgccgctcgcccatggcgcccagccgcccctcctctctctaatctccagcgcgacccttctccctgtcccacgcgcgctcctcccctgctccactccatggccggcgctccctcaagctcagttcccatggccgccgcgccccctgctcctccgggccggtcgagttcctccaagccgtgagctcggtcctagccccagcctggtttccagcgcccctcctccaccaccgcgcacctccggtcgctcctcctcctctccatgtccgctgaccacggacaccgttgagctctgggccctgctcgccgtctgtccgtgcatccgtccggccacctagaaggtccgagctcgcccatgccaagctccctcggcgtccctcccatggtcgcgccctcctccaagctggcgtcgacctcccatcacccatcttcttcaagctgctggacactgctcgcccctcgctgcggtcctgctctagactcctgctcgctgacacacgcgatttcaccggtgaggctatgtgcaccattgcctttacactgctgaagttctggtggcgcgcgcaatctcc

SEQ ID NO: 48863 - DNA, 437 bp, Zea mays
  Clone ID: MRT4577_144570C.1
gcctgcagtaccggtccttattccatttggcggcactttcgtccctctcccactcttttatgtcactactcctgttacctttttccgcgccgacgctaccgggatggaccctgttgccacatgggggctaaccccgctcgcggtctccgacccggagatctactaccttctggagcgcgagaagcggcaccagctgtacggaatctagctcatttgcttcgagaactttaacttcttcgcccgtatggatgcgctctggtccgcgctcactaacaagtactccgatggcatgccctgtgcccgtttctacggggtgaacgacttcatcaacgagatcgagaacctctgtcggtcacgccctctctcttactttcgtctttgccccgcttcctggggcgtaaacgtgcagtccttacttggtcttcctagccaacttt

SEQ ID NO: 48864 - DNA, 635 bp, Zea mays
  Clone ID: MRT4577_144571C.1
gcagtctcctggaactctatgctaactggatattcacatcacggtttgagttctgatgctttgaaattcttcagatgcatgcgggcagagaatattagaacagatgagtttgggctctctgctgctctgaggtcttgctcagaccttgctgtacttcggctaggtagacaagtacacaggttgggcgtccaatctggttttgcttccaatgactttgtttcaagctcgctgatcttcatgtattctaagtgcggagtgcttggtgacgcaagaaagtccttcgaagaggcagacaagagtagctctgtgccctggaactctatgatgtttggttatgctcaacatgggcaggcacagactgtgaccgacctcttcaatgagatgctggaccttgaggttcctttggatcatgtgacctttgttgccctgattaccgcctacagccatggtggtcttgtagatgaagggtcagaaattctcaatacgatggaaactaggtataaaattcctatgcgaatggagcactatgcatgtggtgttgatctatatgggagggcaggacagcttgataaagcaaaagagcttattgagtctatgccatttcagccagacgccatagtttggatgaccctttt

SEQ ID NO: 48865 - DNA, 356 bp, Zea mays
  Clone ID: MRT4577_144572C.1
gaaatgtgcgcggaacgcgtatccgtgtattgtttaaggacataatatagggggagacagaccataggtgtgggtgtttgttatacgaatgagacataacatctgttgattgattggaaagataggattaatggcaaatgcaggccgcattttttttgtaaaaggtaaatgcacgggtggtggggataaatttcttatttttgttagacgctaaagtgaaaagatagattgaagcattgctgctaataagtggggcattcgatattcgttactgtagtgtaagttatgtttattgctaaaagtattggatatataaacaacaaacgagtggaacactgaggaggggataattggtg

SEQ ID NO: 48866 - DNA, 338 bp, Zea mays
  Clone ID: MRT4577_144573C.1
cccacgcgtccggacggaaggactagcgtcatgggcacgcccaccgagacggccatcctggagttcggcctcgaggtggagaagtacaccaaggtggagcacgcggacgccaagaagctcaaggtggagccgttcaactcggtgaagaagaccatggccgtggttatcgcgtccccgaacgcggccggccacccgcgcgcgttcctcaagggcgcgtccgaggtcgtcctgagccggtgcggctccgtcttggacggcaccggtgccgcagagaagctcacggaggcgaaggcgaagcgcgtggccagcgccatcgactcgttcgcgtgcgaagcgct

SEQ ID NO: 48867 - DNA, 328 bp, Zea mays
  Clone ID: MRT4577_144574C.1
cggggaaccacatccagtccaccccttcctcctcgaccccgacaaccccgagtcccgacctgatggcgcccaatgtccctgaataagccagcggataaaaagtcggcggccgaggagaaggtgttgatgacgaccgtggtcatgaagcccaagtgcgagaagcgcctgcccgcctcgaagtccttcggcacggagggcggtgagaagaaggtgaagaagatggccaagaagatcgtggagacctacaaaatctacatcttcaaggccctaaagctggtgcaccccgacatcggtatctttttcaatgccatgtccatgatgaactgct

SEQ ID NO: 48868 - DNA, 238 bp, Zea mays
  Clone ID: MRT4577_144575C.1
cggaggcgtgcgcggacgcgtgggaaaaataaaaaaaaaaaaacaaaaaaaacagcaaaaagaaaattttctagaaaagagatagggtgcgtcatctggcacagactgcagaaaatccaaggaatccgtatcctacacgtacttgcatagcgtccacaagctgacctctgaatcggacgtgctcgatgatgagtgcacgctgaccatggagacgcgccacatcgagaacaatgacgtg

SEQ ID NO: 48869 - DNA, 382 bp, Zea mays
  unsure (1)..(382): unsure at all n locations
  Clone ID: MRT4577_144576C.1
aaatttaactttaccgcangggagagngnaggggtaccacaaaggctcgcatgtgtcggcgcccgcaggagaacgtggtgggcgcgggtgctcctctgctgcaggacgagcgagagctgctccccgagggcgttgtcgtacaccgtcttccacaaggcaggtcttgtgtgggatacctgcgcctacggcccgcgcagcgagacgtctacccgatggacagagaccagacctggccccatacgccgtgcacgagcaacagcacgcgtcgctgcgtactgacctgctgagcgacgtcttgagactctctgccttcccgctgacagggccgcccactgacagggatcagccgccgtccccggcgctccgggaggtccacacctag

SEQ ID NO: 48870 - DNA, 234 bp, Zea mays
  Clone ID: MRT4577_144577C.1
gttatatttgcacttgcccaatcaggtctatgtgctgcatttaatcgaacaacaaacaaacgcatatgctacttgaatataagtcctgatgaagttattaggagcttgttttacaacaagaacaacgagtcccttatcaccgtttcagtttatgaatcagattgtttcagttcattaaagtgcagaacaactcctatagagtacatcagaagaggtcaactgaaggatggattt

SEQ ID NO: 48871 - DNA, 1341 bp, Zea mays
  Clone ID: MRT4577_144578C.1
agatcagttccaggcaaccatgcggcagccgccccgcggaccacgcagattagagcagcccgcagcagcgaattaaagttaccagcgggtcgtttcgcgagcacacaaggatctctagctctgccatggtggtaactggtattctgggcgggctgctctaaccatcaaagcgtagcgcacaccacttgctcgacaaaaggctttcattataaatagaggccaactgggttttgcacttcatacaaccccataccttcagagcttacaaggagtagcagagctcagaagagcaggaccctgaggagcaagatggagggttcacatattactgtacaggagatcacacaatgagctattatggcagcagctcttctggtggacgaagcagtaggagagtcgactatgggaggacatatgtggtgaggccaaagggaaggcacctagccaccattgtgtggctccatggcataggtgacaatggtgctagctggtcccagctcctggattctcttcctctaccaaatatcaagtggatatgccccactgctgcaacccggcctgtcgcggcttttggtggattcccctgcacagcatggtttgacgttgaggacacatctatagatggccgagacgacattgagggactggatgcttcagctgcacacattgcaaatctgctgtcgtctgagccgtctgatgtgaagcttgggattggcggtttcagcatgggcgccgccgttgcccttcactcagcagcatgctatgctcatggcaaattcacaagtggcattccctatccaatcgcactcaacgcagtcatcagtttgagtggctggctcccttgctcaaggaccctgaggagcaagatggagggttcacatattgctgtaagaagggctggctccttgcccatcctgcttagtcatggaagagtggatgaagttgtcgtctacagggatggcgagagatcagctgaggttctgaggaactcaggattctcatttctgactttcaagccctacaacgggttgggccattatacgatccctgaagaactggacgacctctgcaagtggcttagttcgtcgcttggcctcggccgatctcgctaaaagaatagttttttttttttggcgtatgcgcaatgggtttggtgacagcatatattttgaggggaggtttggtttgatagcttgtaaaacacttgatgctagctgctctcttcgcatgtggcttttgtttccgtcgtcctaatttacgtactctatgtctctatgtaatgcggtactttgttgtctgatgtttgctaataaaaagaaaatgccgttgaggcctctgatc

SEQ ID NO: 48872 - DNA, 330 bp, Zea mays
  Clone ID: MRT4577_144579C.1
cgcgttcgcgagaggagtccctacgcaagcctttacatttcctccatcgctctcgaccaccgccggctggggcgcctaggctgacccgcctgtgtccgatgcccccacgcgcgccaccgcgccggcagcctgctcccgacgcgggaggccccggcttcggcgactccgtgcgtgtgctgctcgcgctggccgggctctacgccgtcatgtcgctcctcgactaccgcgtcatccacatgcgccacgtcgcgccgctcggcgccgacgcgccgcgatgaaacttctccgacggacgcgtgctacatcacctccgacgcctcgctgttgaca

SEQ ID NO: 48873 - DNA, 669 bp, Zea mays
  Clone ID: MRT4577_14457C.1
ggccgcttttttttttttttttttctttctttttttttttttttttttttttttttttttttttttttttttttttttttttttttttttttttttttttttttttttaccccccaaaaaagtttttttttttattcggggggggaaaaagccccaaaaagtttaaaaaaaccccccggaaaaaggggggaaggttggcaacccccccccaaaaacaaagggggggagggggggcccaaaaaattttggcaggaagggaaaaaaccaaggggggggcataatttaggggcttcaaaaaattaaggggcccggccatgttttaacccccccgaagaatcaaaaccagggggggggccttttgaataaaaaatttccttttttgaaaaacccaggctgggagggggaaaaaaaaaaagtcctggggggggggggaaaaaacccttatcctggcccaaggggcccctccaaccccaacttgaatgggggccgggtaaccccaaaaaaccccccaaaaaaaaaaagttggcaaaaaagggggccccccccgaaaaaaaacccccccctttgggaacaaaaaaaaaaaacctcccccccaaaattttcgaagggccctgaaaagggggaaaccctcgcccttgaaaaacgggaaaacggttttaaggggttttt

SEQ ID NO: 48874 - DNA, 348 bp, Zea mays
  unsure (1)..(348): unsure at all n locations
  Clone ID: MRT4577_144580C.1
aaaaaaacattaattaatttggggcaggaaaaacaggggacgtttccaagcccccccacaagagggggcaccccccttcctttaattccaggccggggggggacccaaccttttatggccccccaccacgggggacccacccgggggccctggctccccattcatccccaggggggcaaccccccccgtttcccttttggggggggcccccgccgggcccaggccggcccaggggcttgggtttcggaccggggggggggcggccccggcggccccctgggcccccgggggggcgggcccccccccgggggggcgggtggccggcggcgcccctttcgccnggccccg

SEQ ID NO: 48875 - DNA, 270 bp, Zea mays
  Clone ID: MRT4577_144581C.1
ttgtgacgcccaccggcgtgcggggtcttcggggactgatccacaacaacgaggcctgatgcataaggcagctgctgcagcgggagggctcgactggggcacggacaaccaggtgcgtctacaacgcgcggatgaacaccggggtggaccacgagtgcaagacaatgcctggaccgccagagccatacagccctggggagcgtgcttccagacatactacacggactacgaggcactgaacgccatcaacggcttctaccagaaggacat

SEQ ID NO: 48876 - DNA, 274 bp, Zea mays
  Clone ID: MRT4577_144582C.1
gggcggagaattttttttggctcgggcggaaaacatttgggggccttaaaaaattgccacgggggacaaacccaaggggtttccccggccttccctgaagacatgggacgggcttccgaatcccccgggggggggggaagaaatcttcccaatggcccggagaacccggggacaattaaaatttaagcccccccaagggctaaaggcggagcctcccccaaagcgcgggcgcagttcccccaaaaacccccacccttttctttcaaagttttgg

SEQ ID NO: 48877 - DNA, 224 bp, Zea mays
  Clone ID: MRT4577_144583C.1
cagccagaacgagtgagtaaggtgagccgccgacgagagggtcccgtgacatcacccctctcactctcctcttcctcatcttgggatcgtccgcagtcgcggaatcgcgaacgatgcccatcagccctctgatcaacgtgaaaagcgcttctgctgagagcgagacttagcattgagcggcacaatgctgaagacaggatggatgactccagctgaggatcagc

SEQ ID NO: 48878 - DNA, 1357 bp, Zea mays
  Clone ID: MRT4577_144584C.1
ggaatgcgggaccctgcgcttttaaagggggcggaccgggctcgcctcgcctcgcctgggccggctgcatctttctcctcccaccatcacctcctccacctcctcctctttatccatctgccagggcgcacgaggagaacggcggcgtctgaggtcgcgaggccgaggcttgtcccgtctccgctccgctccgcccacccacggtttctggaggacaattcttcgctgtctagccttcctcaaaagtaaaaagggtaaatgggatcagaagggccttcagttgtcactgtccatgttactggatttaagaagttccatggggttgctgagaacccaaccgagaaaattgtgaccaatcttaaatctttcttggaaaagcgagggttgccaaaaaatcttgtcctcggaagctgcacagttctcgaaacagcaggggaaggggcacttgccacattatataaggttttagagtctgctgttgcagacagaggaactgggtcctcggcacagggacaagtaatttggatccactttggggtcaacagtggcgcaataaggtttgcccttgagaaccaagctgttaatgaggctaccttccggtgtccagatgagctaggatggaaaccacagagggtccctattgtgccctctgatggaagcatctcacggacgagagagactaccctgccagtcaatgaattaaccaagtcactccggaagataggctacgacgtggtgccctccggcgacgccggtcggtttgtatgcaactacgtgtactaccactctcttcggttcgcggagcaacacggcatcaaatccctgttcgtgcatgttcccctcttcttgacgatcgacgaggaggtccagatgcacttcgtcgcttccctccttgaagtcatcgctttctcatccaactaggaacagcagttggaagatcagcgtctggattcctatctcaaggatggatgtaaagctggaatgctgcatgtaggctgaataaggtggtgtggtcattggcgatagatgttaatcttgctccacaggttgtgtttgggaatcgggagggaaaaaaagagaggtcattggcgatagatgatgatcttgctccagagggtgtgtttgggaattgggaggggggaaaaaagaggaaattgctgcatagagtcagacggtgtatcagcttgtacgccatcaatcaagtgctgtaaacatgcctgggaaataattggggacctggatttgaataagatttgagttgttgggggcggacgcgctacattaggccttgttcggttattcctaatacccttcggtgcaataaaggaaatcatcttgcgcgtgaccgagcgtgcac

SEQ ID NO: 48879 - DNA, 284 bp, Zea mays
  Clone ID: MRT4577_144585C.1
ggcatcgctttaaaaagtttttacgataaggtgcttaagcacataatagatgatcagtatgtatttatttggtcagtggtttcctatgcctggcatgagctgagtgaacaagcatgttccgagtaagtcctcattctgtgattatcatgtggatcagaatctagggattttgaattgccatgtcctacaagccttagatgaggtgcctctgccttcttccctgatgtcatctcttaccacccttcctgccattcactctgtgtatccacagagtaaacagtatc

SEQ ID NO: 48880 - DNA, 110 bp, Zea mays
  Clone ID: MRT4577_144586C.1
tttgtctgtgtaatatactaccccctttgtctactctagttatcttccatcatctgcttttgtctatttacgacatcttcatctagttatgcaaagtcgtctcttttacc

SEQ ID NO: 48881 - DNA, 287 bp, Zea mays
  Clone ID: MRT4577_144587C.1
gcgtccgcagagaatagaggaggagatggccatgctcaccttacgccttgctcctgacctgccgcgcgtatcccgccgctgcttcgggacaatgacgatgggagagcagagcggggcggcgtgctcgctccgcctcctcgacgccgcctacgacgccggcgtcaacttcttcgactccgcagagatgtaggctcacctgctccctcatctccctgcctcggttcgagagtaatgaaaggaaaggtgtctggaactctggatgcacatttgcaaacatgtttactcgt

SEQ ID NO: 48882 - DNA, 243 bp, Zea mays
  Clone ID: MRT4577_144588C.1
gccgaccaccgaccaagcctggaggtggcgctggagcccctgtggaacgacgacgaccgagtgctgcgcgagggcggacgaccctggggggaccaccgcgggggaccgaagagcgacctgcaagacgtgcacaccgccaggcaaccgaggcacgaacacaagaccacaaagcgggtcgccggccacaagagcgtcgccatccgccggcacagcagcaaggacgaggactacctcaccgcgccg

SEQ ID NO: 48883 - DNA, 984 bp, Zea mays
  Clone ID: MRT4577_144589C.1
aactggcggagcatctgccttgctcgcatcgtccgatacctattcccatcctgccagaagctgctgacgtttcgagctcgccgcctgcaagtatacatagatttacattggatcgacgccatcgccactacgaactacgactcgatcgcaagcttccccagtagcgccatggaggccacggcaccagcaaaccttttctacgctgctttcctttttctgtcggtactgtatctcgccgtcacccggcgccgcaccagccgcctgccgcctggaccgacgggcctaccgcttgtgggcagcctccctttcctcgaccggaacctacacgcctgcttcgctggcctcgccgcgaagtacggccctgtcttcgccatccgtctgggctccaaggtggaaatcgttgtcacctccccggagctggcccacgaggtcctccgtgacaaggaccctgtcttctccaaccgcgtcatccccgacgccggccgcgcggtcgcgttcgacggcgtggagaacatcgtgggcgtcccggtcggacccaagtggcgcctgctccggcgcctctgcgcgcaggagatgctgagccccgcaggcctcgacagcctgtacggccttcgccggcgcgagttcaggtctaccctgcgctacctctacgcccagtcccaggccggcgagccggtggacctcggcgccctgatgttcgtcaacatgatgaacgtggtcaccagcaccctctggggtggcaccatcgggagcgagagcgagcgagctgccatagggaaggagttcagggcactcgtcgccaagttgaccgagctcctcggcacgcccaacctatccgacttctttccggtgctagcgccgttcgacctgcagggcgtccggaagaagatggagcggatcagggtgcgcttcgacagatattcgactagatcatccagcagagggtgaacgctcagcaggacggcagcaagatggcactggact

SEQ ID NO: 48884 - DNA, 311 bp, Zea mays
  Clone ID: MRT4577_14458C.1
tacgacttgatctatgacaccgtcataggccttctctgggacagtgatcaccggcggcacggacacgaccttcgacctctgtgggccatccgagattgcaaggtttgagaaattggatggagatagaaaagacctcaggctttagttgcaacgcgtggtcagccgcgaccgggtcctgtctgagacggactttccgaacctgccttacctgcaagcagtcgtaagggagccttgtccttgcacccgccgacgccgttgatgctcccccacagggccagcgccagcgttaagatcgccgatacgacattccc

SEQ ID NO: 48885 - DNA, 549 bp, Zea mays
  Clone ID: MRT4577_144590C.1
cattgggtacctcgaggccggccgggattcctcttcccccacgactgcacctcctacatgttgaaccgacggggacgctcatctactccccgacgagaggagctcatcttccccccgacgactctccacgttgacctgctgtgtgcccttcggcatcacctagcctgatcctcaccactcgatgccatgctggaacgatgccggcccagaagaaccacatatatgttccctcatcagtgcatacattcgtggcctcaatagtacatagcaatattatctcgcgagcatatatcaacttcgatagcaagcagcccatcactaacgcagtgatatggagttgaataacttccataccactgccctactcaggagagagaatgggtgacatagtgtcaatgactcatcgacctactcactctgaggtcgaaaatcgtctgtcagctcgacagcttgttctcctggtacctctctgtgttgctgaccaaactcgttgctcacgatcagctgaggactacgaacactttctgcgacttgaccaacatctacttt

SEQ ID NO: 48886 - DNA, 652 bp, Zea mays
  unsure (1)..(652): unsure at all n locations
  Clone ID: MRT4577_144591C.1
cctgctcatggatacaaatttgacaggtacatgctcatctcgttgtgtgatgtctgatgctttagcaactgctgttgtctggcatacgtaattttagaacattttatcttctttcttccgaaaatgattagttgtttttcaagttagaggatcacaagatttagttcttaatgtagtgttactgccaagttcagtcatgtaagttcttgcctcagtctgatgatttattaagtattctctgttcctacagcattagcacagtgtactacatggcaccctttgccaccatgatactggctctgccagcaatgttgcttgagggaggtggcgtaatcgactggttctacacacacgactctgttttttcttcgttgattatcatcctaggctcaggggtgcttgcgttttgcctcaacttctccatcttctatgtgatccattcaaccaccgcagtgaccttcaatgttgctggcaaccttaaagtaagacaattgtggactatctatgttttcttccctcaagtttctcttctggttctaaaacctgcacattgtgctgntaggttgctgttgcagtattggtctcatggctgatcttccggaacccgatctccccaatgaatgcaatcggatgcgcaatcacgctcgtcggc

SEQ ID NO: 48887 - DNA, 792 bp, Zea mays
  Clone ID: MRT4577_144592C.1
ctccccaaaaaatagtggccgtacatgtagcagacttcgaatgcaatcaatattactgaaaggttgggtttgcctttggatatagtagaaaactccaggcatttacttggaacagctggtgcagagataaatgctttgataatttattcatgaaggactcaaacaagaatatcaacaacatcttcaggaggcacaatatcttcttatgcagtccaaggagcttcataacaatttggaactggcacagaagagcattgtagaccatacttctgctcagagaaaacgaaaggcgagagtaatttcagagtatgctgttatggcccgttctatcattcgtaagaagtttcagcagttccaagaatctgctatagctgaaagagtgaaagaagaagagaatgctgtgaatgatgccaaatctgacagagtgaaggatcctatgccggcaaatacatctgccattggaaagatacagaacatagataccagcttgggcatgtcagccaccggtaaagtactagatgatgaagatgaggttccagaagttggagattcagtgtacgttcctaaactcaagaatgaagctaccgtagtgaaaatagattcgtccaaaaatgaagtgcaagtccaagccggtatgatgaagctcaaactaaagctgaaagatgttaaggttcagaagcggaaagtatccagatagaacatctacactgtcctgcactagcagatattcagataaatatgcatatgctgtttcgtcccattcgtaccctttcattggcctcattttcagca

SEQ ID NO: 48888 - DNA, 301 bp, Zea mays
  Clone ID: MRT4577_144593C.1
aaggagacacccgtttaaaatgaccaacgttgtgcccgatttgagtgcaaaccaaacttgctgcagagaccccttaaaccttttttcaacgtgcaatgggggggcacagaaggggggcggtcttcctaaattacgggaccccaagaacaacgggaaatacaaccgggtgctaaaaactacagcataacccgggtggtctttttgagacttggccggccagggcactggaacgcggaaagcagcggaggcagatccctgctgggctcgggataggacttcagtaggggcgggcgaggcttat

SEQ ID NO: 48889 - DNA, 209 bp, Zea mays
  Clone ID: MRT4577_144594C.1
gacccacgcagccagcacaaggaggcagggttccacgaccgctttggacccagacggagcaacaatacctgcggcctggggaagacgccgaccaccacgcccactgtctccaaacgccacaccgaaatgatacctaatcacgaacaggacgaactgggtccctcacctatacaccgcatcgtgcacggcaccctcgacgaactacctcc

SEQ ID NO: 48890 - DNA, 291 bp, Zea mays
  Clone ID: MRT4577_144595C.1
agtcgactggtaaggggagcaaaaaagattattgtccctaatctcctacctctccttaccagtctcaagccaccagcagagggccataacctcgtggtgaggtctggagcgcgactacgagttacgtagtcgtggtccggcgacgctggggccgagacacttgacaatatataatctgtaattctgtatatcctgctttacttgtgaattcttatatgtggtggcaaggacagatctggtagatctgctactattatctgtgttgactgattgcttggctgcagttgtgtg

SEQ ID NO: 48891 - DNA, 809 bp, Zea mays
  Clone ID: MRT4577_144596C.1
ccggccgggaaacgactcctcactctctcttcttcacttacaccctctcacaaatccacttcagcgagttcatcctctctctctctccatcgctctctctgaggaaaagacagagatcgcccctcaccttcatcggcgaggatcgtcccgcagtgcccatccctcctcgactcgaaaatctgacttgggcccagatctatatgaccgaacgcatgacatgtcctgcctagttgctgcctatgaagcccttccatgcatgtacgatatcgccctctctcgacctgaccttgaaaaccgccgccctcatctataccctcaccgcattcagggccgaaacacggtgacgctgctgatctatcatcctgacctcgaagatgatgtgcagcagcgtagggcgagaaacctcttcttcggtactgatgaagagaaacacccccctgaagctgagattatctttgtctcggtgaacacccccaccaagacccgtgggcttggagctgataaggctgccgacctcacctactgcgatagtgctgcccgcatgattgcggatgtctccaagtctgacaagattgttgatgataagtccactgtccctgtcaagaccgctgaggctattgagaagatcttgacccacaacagcaagggtatcaactaccagatcctttccaacccagagttccttgcggagggcactgccattgaagacctgcttcagcctgacagagtgcttatcggtgagcgagagacccctgaggcagcatgccgtccagctctcagggagtgtacgctcactgggatcccgagga

SEQ ID NO: 48892 - DNA, 490 bp, Zea mays
  unsure (1)..(490): unsure at all n locations
  Clone ID: MRT4577_144597C.1
taaatagtgtcataataaaaggtcccatcttggtgatacaagtttgtcgtctcgcaaagttttccagcatacttggggttctnagacaggtcttgctaatcctgtaatcagtgatatatgttcataggaccagatccccgcctatctccgaggttgtcttagacacatttttaatagggtttgcaattgtgatcctttttttaaaaaaaatggtacaagaggactacacatcaattttctgccctcccacaaatttctgtgaaccaacaaatggggttatgttctggacgagatagcgaatttgcaaatataatataatatagtattataatataatgaagggaaagcatgctatactgtgcatattgacatattgcactagcactaataaattaatcagttagtcctatctgtagcctgntgcanttgtgttgtgttttccagtgtgactcattttacatttttacttgaagacttcttggctggtgcg

SEQ ID NO: 48893 - DNA, 221 bp, Zea mays
  Clone ID: MRT4577_144598C.1
tgtctgtccgtttaggccagaaagaacgcattttgaaatctccaaagcaactaattccatacatggctatcgatggtgggagacagaaccagaaagccaaaacatgatagaactctaagtctaccaaaggggcttgcacaactaactgaggataaagtagctgacatgctcacctacaaaatctgcactgaactttttgttctacaaagagctagatgaat

SEQ ID NO: 48894 - DNA, 1972 bp, Zea mays
  Clone ID: MRT4577_144599C.1
cctcgaggccggccgggctgtccccgtcacctcctctgctccgtagcgccgccatccgtggcggcggcaatctaccgaacaccgtgcgtgcgtgtgttgccgcaatggcctcgcaccacctcgccagccccgccgcgcccgcaacctccgccgccaccgtctccagggctctcttcaagcatgcctacactaaaccctcttactcccttcttcacgtcccgctcctccgctggccgaggtcgacccggaggtgtacgacctaatcgagcgcgagaagcggcggcagcgagcgggtatcgagctcatcgcctcggagaacttcacctcgctcgctgtcatggaggcgctgggctccccgctcaccaacaagtactcggagggcatgcctggggcgcgttactacggcggcaacgaggtcatcgacgaaatcgaggagctctgccggacccgcgcgctcgccgccttccacctcgaccccgcccgctggggcgtcaacgtgcagccctactcggggtcccccgccaatttcgcggcatacacggggctgctccagccgaacgacaggatcatggggctcgacctgccgtccgggggccacctcacccacgggtactacacggcgagtggcaagaagatttctgcaacctccatctacttccagagcctgccctataaggtgagctccgacaccgggtacgtcgactacgataagctggaggaaaaggccatggatttccgccccaagcttatcatctgtggcggtagtgcatgccctcgggagtgggattacgccaggttcagggccatcgcagacaagtgcggggccatgttgctctgtgacatggctcatatcagtggtctcgttgctgcgcaggaggctttgaatccttttgaattctctgatgtggttaccactacgacccacaaaagtcttcgagggccaaggtctggtatgattttctacaggaagggcccaaagcctccaaaaaaaggccagcctgagggtgctctgtatgactacgaggacaagatcaactttgctgtgttcccgtcactccagggggggcctcacaatcaccaaattgctgctctagctgtagccttgaaacaggccatgtcacctggattcaaggcctatatccagcaggtcaaggcaaacacagtttcccttggtaaccatttgatgagtaagggctacaagttggttactgatggaacagagaaccaccttgttctctgggatctgcgccctcttggcttgactggcaataaagttgagatgctatgtgacctatgcaacattacactgaacaaaaatgctgtctttggtgacagcagtgcattatcacctggcggtgtgcgcattggtacacctgctatgacctcaaggggtttggttgagaaggacttcgtgcagattgccgagtaccttcaccgagctgtgaccatctgcttgagcatccaggcggagcatggcaagattctcaaggacttcaagaagggcttggtgcaaaacaaggacatagagaacctgagggcggaggtcgagaagttcgccacttcatttgacatgcctggcttcagggtgtctgacatgaagtacacagactagactgctgctgacttgggtgcaaaccgttgctcctgttacagtaacactggcaggctggtgcaatgcaaaccgttcttctgttacggtaatattaacgcctctgaaatgtcacgtgaatggtggtaaacctgaatttcacacgactagagggatggtttactttctattcagtgctctgccattctgttggcctgctattccgtcggtctattttgttggaactgataataatatgtttagagaataatgattgagaaagaaaatggcattgcactggagataaaaaaaaaaaaaaaaaaaaaaaagaaaaaaaaaaaaaaaaaaaaaaaaaaaaagagggcggccgccgacaatgagctc

SEQ ID NO: 48895 - DNA, 919 bp, Zea mays
  Clone ID: MRT4577_14459C.1
tgtcattagtagtatatgtatattattattatgttgtctgtttgacctcttagtacgatggatttgcctgtgtatgtatatattaacataccataataatgaccaaattaagctagcttcgggttagaattagaactgcgagagaaactggagctgcttgaggatggggctgtgcgcttttatgagcttctcgcaggggtgtgtatggaccacctcgtaagtagtgaccacgatgctcgtatccttgcttagccgctgcacctgattagtcccattgcacgtgtgatgggtgcaccgatagtagctcctggggtgttcgctgttcctgaccaggtggatattgtacttagttgattggtagccgtctggaaggatgtcgtttacgcgagccgtctggaatgcgaaccgcggcctgctcggcttcttcttcctccccgccgccgcgccgcccttctccttgctgctgctactccctgcgttctccgcgctctggtcgtccaggggcgccggcggttgctgcagtagtagtcccggcaagaggggacccatcaagctggcatgctgctgaagcagcgccgaccagtccaccgtagccgcccccagctggagaggaagcagctgcaggtcgttattattgcacgccgatgacggttgctgctgaagcgctgtggcgagggtattgcgctggtcatccgattccgatggtggcggtaataagctcggctgcggcgacggcacggtgaagtaggggaagctggggaacgtgtgcgacggcgactcgtcgtctccttgcagctgctgctggttctccatcgatgatctcgttctatgggcgcctgctagctgttccttctagctagctctagtgggccgacgacatgcagtgtcacgttcccggccggcctcgaggtacccaatg

SEQ ID NO: 48896 - DNA, 489 bp, Zea mays
  Clone ID: MRT4577_1445C.1
ctctctcctaacgaagaggagagggggcagaagaaaacctcgcgcgggggaggcgctagaggaatcgcgggggccggaggagcagcggccggtggaggtggcgcgcgcggtggccgtccgagttgatttttgttctgctgctgtttctgggaagaggctaggggctacttcataggcattgtcatgtcgaagcgtgggaacgatggagtacatatcccctgagagaaatctggaggggacttgtggagatcctgggccgttatttgccgaccaaggtggcagcttgttggaccacttgggttatcaagggggaggaattccacaacatgagtctccaacactggatcatggacttttggttgatccagctggtgcaattccgtatttatctacagattctccgcccttcatgaatgatcaaatcacttgcaatgttataaaatctgcttcagctagtccagaatcttgtacaaaacaacctcaagaacc

SEQ ID NO: 48897 - DNA, 676 bp, Zea mays
  Clone ID: MRT4577_144600C.1
ggccgcttttttttttttttttttcttttttttttttttttttttttttttttttttttttttttttttttttttttttttttttaaaaaaaggggcacccctaatttttttccaggcccagaccacaaaggggtaaacccggccaaaaacaaaacaaaacccatccgaaaacaaaacccaaaacggaaaattttcccggaaaccctcaaaaaaaggggggggggaaaccccccaccccaaataaacaaaacaattatttggcccccataatgaaaacagggggggttcggcaatttgggccccaaaccgaccttaacggaaaagaaaaccaccctagggacccagaagcgggcccaaaacccaatgggcccagccaccacaaaaaaggcatatggggggaaaagcatgtacccaaataccaagaggccaaaccccacctaagggaccggcatttccgggaaaaagaaaaacccaccgtccaggaaaaaacacggggggggggaccctgggggagggaaaaacccccccccccacaaaaagcccccccggcaaggcgggaaaaagcaaaccccgttggggaccccggcccgggggaggaccgggaccccaaccccagggaaggggaacccaaagttggtctaaaccggggccagccagagggggggggggataaaa

SEQ ID NO: 48898 - DNA, 1179 bp, Zea mays
  unsure (1)..(1179): unsure at all n locations
  Clone ID: MRT4577_144601C.1
ggtaccctccgggctcggccgggtttgctgtgttcccgtcacttccagggggggcctctcaatcaccaaattgctgctctagctgtagccttgaaacaggccatgtcacctagattcaaggcctatatccagcaggtcaagggaaacacagtttcccttggtaaccatttgatgagtaagggctacaagttggttactgatggaacagagaaccaccttgttctctgggatctgcaccctcttggcttgactggcaataaagttgagatgctatgtgacctatgcaacattacactgaacaaaaatgctgtctttggtgacagcagtgcattatcacctggcggtgtgcgcattggtacacctgctatgacctcaaggggtttggttgagaaggacttcgtgcagattgccgagtaccttcaccgagctgtgaccatctgcttgagcatccaggcggagcatggcaaggttctcaaggacttcaagaagggcttggtgcaaaacaaggacatagagaacctgagggcggaggtcgagaagttcgccacttcatttgacatgcctggcttcagggtgtctgacatgaagtacacagactagactgctgctgacttgggtgcataccgttgctcctgttacagtgacactggcaggctggtgcaatgcaaaccgttcttctgttacggtaatatattaacgcctctgaaatgtcacgtgaatggtggtaaacctgaatttcacacgactagagggatggtttactttctattcagtgctctgccattctgttggcctgctattccgtcggtctattttgttggaactgataataatatgtttagagaataatgattgagaaagaaaatggcattgcactggaaaaaaaaaaaaaaaaaaaaaaaaaaaaaaaaaaaaaaaaaaaaaaaaaaaaaaaaaaaaaaaaaaaaaaaaaaaaancttgggggggggcccgggccccaatttccccttaaagggagtctattaaccccccttaattgcccgttttttaaaaacgtggaaattgaaaaacccttgggttacccaaattaaatccctttgaaaaaaatccccttttcccaagttgggaaaaaaaaaaaaagccccaacccatccccctttccaaaaattggcccaccttaaaggcaaaaggaaaccccc

SEQ ID NO: 48899 - DNA, 1223 bp, Zea mays
  unsure (1)..(1223): unsure at all n locations
  Clone ID: MRT4577_144602C.1
actccagcccgcggtccagcccctgtccccgtcacctcctctgctccgcagcgccgccatccgtggcggcggcaatctaccgaacaccgtgcgtgcgtgtgttgccgcaatggcctcgcaccacctcgccagccccgccgcggccgcaacctccgccgccaccgtctccagggctctcttcaagcatgcctacactaaaccctcttactcccttctccacgccccgctcctccgcgccgtcgccgcccggcccgcgctcctctccgccgccgccgcggtctccactacggcggcgcccgcagccgcagctatggacaacgtggaggagtgggggctgaggccgctggccgaggtcgacccggaggtgtacgacctaatcgagcgcgagaagcggcggcagcgagcgggtatcgagctcatcgcatcggagaacttcacctcgctcgctgtcatggaggcgctgggctccccgctcaccaacaagtattcggagggcatgccgggggcgcgctactacggcggcaacgaggtcatcgacgaaatcgaggagctctgccggacccgcgcgctcgccgccttccacctcgaccccgcccgctggggcgtcaacgtgcagccctactcggggtcccccgccaatttcgcggcatacacggggctgctccagccgaacgacaggatcatggggctcgacctgccgtccgggggccacctcacccacgggtactacacggggagtggaaagaagatttctggcaccttcatctactttcagagcctggcggattaggggagcttcgacaccgggtacgtcgactacgataagctggaggaaaaggccatggatttccgccccaagcttatcatctgtggcggtagtgcatgccctcgggagtgggattacgccaggttcagggccatcgcagacaagtgcggngccatgttgctctgtgacatggctcatatcagtggtctcgttgctgcgcaggaggctttgaatccttttgaattctctgatngtggtaccactacgacccacaaaagtcttcgagggccaaggtctggtatgattttctacaggaagggcccaaagcctccnanaaaaagccagcctgagggtgctctgtatgactacgagggacagatncactttgctggtgtccgtcactccaggggggcctcacatcacccaatgctgctctagctgtagccttgaacaggca

SEQ ID NO: 48900 - DNA, 349 bp, Zea mays
  Clone ID: MRT4577_144603C.1
cacctgccttatctaacaacatatattccttctaacccatactttccacatcacaatctatttcctcctcatctaacctactatgacctaccttttatcacaaaaaactatctatacccctttttctacccacataattcataacataaccctaaaaatattattatttcacttacccccataaactcccacacatcctacacctcataacctacttcacaaactatcactataatccctcttcacactttcttcttctccccctctattaaaccaaccccattccctttcatatcctactctttatattatacacctacattacctaatctcaacttattcattcatt

SEQ ID NO: 48901 - DNA, 475 bp, Zea mays
  Clone ID: MRT4577_144604C.1
tttttttttttttttttttttttttttttttttttttaaaaaaaagcaaaaccctaaattgacaagaaaacaaacatccttccaaaaacctcaaggtacttcatgagttgtcgataaaaacataagggatagataaaaccaacaagcagatagcagaaagcaacgacagcccaagtgttgagattactagtaacgaccaataccccaaactttaatgactccatcggggtaaccactgaaaaaggggcttccatcaacgctccaattaaggcttgggcaaaaaaaaacctttctcttgggggcaaaaggaccactgttgtcagccttttcaacctcaaccttgaaaacaaccttcaaatcctcaacaatgctcttgctctcaagggcccaaatcttaataccatgttcagttgcagcacaaaaccagtacctgttgggactgaagcaaagagcatggatcacaaagttagcttct

SEQ ID NO: 48902 - DNA, 314 bp, Zea mays
  unsure (1)..(314): unsure at all n locations
  Clone ID: MRT4577_144605C.1
aaacaaggacaaggaacaaaactttttttattttaaattaaaaaaaataaaaaaaaaaaaaaaagcttttaccttttccccgtctaccctatgggcgaatcgggcgggacccaatcccctgggggggcgttcgggcctccgtttggggggcccagtcggcctgacgcggggcactatccactttaattggtcgggtttctcactgcctgactctgtcaatactcagcgctctgctaccctattgctttcgctctatttcctcttcttggactcccgatctnctgctattgatggcctgctgtggagcctctccc

SEQ ID NO: 48903 - DNA, 308 bp, Zea mays
  unsure (1)..(308): unsure at all n locations
  Clone ID: MRT4577_144606C.1
cggcgatcgacccggccgcgtccacgctcaccttcggcgtggccccggagangctccgcnggacgtcactgggagggcgcgccccgggcgatggtgtcaacctcganngcgcnctcacgccgtcgtcccnnatgggcgggcacttcgttcagggncacgtcgacggaaccggggaaatngcngcgttccggccggaanggggantcgctctggntcacagttcgngcncngncgaaaatcctccggnttnncngngcnccaaggtatnntattnttngnnagcnttgcacanttntannagngggant

SEQ ID NO: 48904 - DNA, 285 bp, Zea mays
  Clone ID: MRT4577_144607C.1
tagtcccagtgcgccccctacgtgccatagcctggttagagttccccagtgcctccttgtgcatagaccttcttctcccacgcccttctggccctgggtccccggccatccatcggggctgccagagaaccccagacctgcccttacagtagtgtagcgccccctcgctctgtcggctggtgtagaatagccagtagtgtagtgcggtgtgcttttacgtgatggcgggtgggcatcggtcggcgggctccgcgcagccgtctgtccttgatctgcccgcggcgg

SEQ ID NO: 48905 - DNA, 277 bp, Zea mays
  unsure (1)..(277): unsure at all n locations
  Clone ID: MRT4577_144608C.1
gggccantaaaggaacgccagttgccccacccttagttccgccggagaacacgagggacagaggtcagtccacagctttggcagccgctgcacaactggagacacgggggctacaacacgcccgaatcggaacagccatcaatcaaccaagaatgtcgcacaaacaccaaagaaaaccatctgtaccggaaccgggggggggggcccaacccacaacactggaatatccctgctctgggaaaactacttccaccgccaagaaatgaagaagaaaaac

SEQ ID NO: 48906 - DNA, 377 bp, Zea mays
  unsure (1)..(377): unsure at all n locations
  Clone ID: MRT4577_144609C.1
cccacgcgtccgcccacgcgtncgatgacgcgtgggcggacgcgtgggctctctctatgataatcggagaaataaaaatacgacttgacatgatactaaaactatctacaaaaagacggtggtcacccatggccaaaaaggcctatggccacgcatgatgaaacggtacttatagaggcagcatacagtctaccggcgctggcttccctagcaaacctaacgcaccttgttccgcgccgtcgtgcatggaaggaagaacacgctggaactcattgaggacaacttgacgctgtggccccgttgtccagctagagataacactgtcttatgcgtatgcgcacatattaatcctccttcaacgaaactattatccatgt

SEQ ID NO: 48907 - DNA, 312 bp, Zea mays
  Clone ID: MRT4577_14460C.1
agacaccgcccctatactgatccactaaaacggcgcattacatgagaggctggaggtacaaccaaaacctacaccaccgcaacctcctcctgtcaacgaaccaacaccacctcacctcctgtctgcttccctcttcatccccggccatgactatgccacgcacttcatctgaaccctacactaccgaccacatcgtctcgtaacaccgactcatcaacgcccgttcaagacaccatcaacacgtactcctatacgcttgcgcctgaatatgcaacgccacggacgggaactcactggaggaacgcctgtcca

SEQ ID NO: 48908 - DNA, 1887 bp, Zea mays
  Clone ID: MRT4577_144610C.1
atggctgagaaagcgttggtggacgccgggctgctctgccctcatctccatgggccacacctagagtggattgtgccaggtgacaagcaggtgccggctcgtgccccgggctatgtggtgagcttcaccccctttcatgagagggggttcggagtgtcggcggtctgcttcatgcgagcacttccacactactacggggtggagcttcacaacttcaaccccaactccatcgctcaggtggccatctttgccgccgtctacgaggggttcctggggatcgagccccattgggacttatggcttcatctgttccaagcggagccgttctccctctccaccaatgtgaggaaggtgctccacgtgaggagggtgctgccactgaccgagcgtcggctctgcctggacgagatgacgcttgaggcctccgtggggagctcctggctggccacggctgccatctccaccgacaagctcctccggtgggtgaaggggacggtggggaaggcaaactataccgttgttgtcccgatgcgccccgatcagggctacatgtctctggggttgtggggttaccgaaccgcccgacccccagttctgaaggatgtggctgatagggaagcatgtcagttggcggtcgaggagaagaagaagaagaaagatgcggacaagaagcgggctcgcaagaaaatgctagtccacgatgcattggaaaagcgccgcaaggcgcaggcaagggaggggctgccgctggaggcctctcctagcacggaggaggaggactacgatgatgatgatgaggggatggaggtccagctgggcttcagccccgaggctagactttggtccgaaccggcctcggcgggcttgtccgacggcgcggacgtacctgtggaagggccgacagcgcccctatccgaggcacgggtgtcagccaagccaggacctattcctgcagttgctgaggtggcagtgatggtggaggagaataccatcgatctgcccaggtgctcgataccaagcttgtggaggagagggtcgtcgtcccgccctaggtgcctgccacggggcgaaggggccggaggagctagaaaccgagggtggacgtggacgtcgtgccccagtccgggtccctttgtgatcttcatcttgctatgctttagcactaaacattgggctcatgagctggcatttactgccaccaaagcggaggccatccaatggggcgttgaggcggcccggcatgcccttagtgggcagcccgggcaggatgccaccgttgccgaggtgatagcgttgcctctggcgccattggttgaggtcatccctgtctcttctgaggaggagatgagggtggtcgatgcaacgtcggtcgtggtgtcacccactgtctccaaccttcttgggcttatggcaaagtttgtggccaagtcgattttcattcgtcacaagtttgtggtggtgtttatcaacgatattctcatatattctcaaagtgaggaagagcatgtggatcatctgaaggtggtattgcagaggctacgagagcaccagttatatgcaaagttgagcaaatgcaagctctggattcaagaagtcctatacttgggtcacattataaacaaagatgagttagccgtagatccaaagaagacattctcggtgtattgtgatgcttcctacaccggcttgggatgtgtgctgatgcaagaaagaagagtcgttgcgtattcatctcgacagttaaaggttcatgagaagaattatcccacccatgacctggagttagcagcagtggttcatgcattgaagactttgaggcactatttgtatgggcaaaaatgtgatgtctacactgaccataagagtttgaaacacatatttacctaa

SEQ ID NO: 48909 - DNA, 135 bp, Zea mays
  Clone ID: MRT4577_144611C.1
agatggccacggcggaggagcccactattctgactaacgtatacagaccacgtggcacctcctgtgaaaaggtgcctgctaccgatactgaggcacgtacgtaaatacatgcagactacgcaatgctcatgagag

SEQ ID NO: 48910 - DNA, 408 bp, Zea mays
  unsure (1)..(408): unsure at all n locations
  Clone ID: MRT4577_144612C.1
ccggnccgggacgacccaggcgtaccgcacgcgtccggactaaccatcttgatagatcgctcagggatgcaccaacgcagccaaccaagcgagcttgcctccttacgctccgcggcctgtctgcaagtgctgctgcggcgaccattctcccgtaatgctcgcaagctcatatagctttacttcttccctcgtacctatcaccagcggattctatggttgtgtgacaacatgcttctaccaccctacatgacccaacgagcaatcgcatggagcttcttaccttgaccacccttgctccctcaatgatcatcacgactaccacaacagtgatgtttgcatcatttattggcacaaaacatcagggcacaacaactacaacgacttgtgctagcaaaccttgctgtctac

SEQ ID NO: 48911 - DNA, 605 bp, Zea mays
  Clone ID: MRT4577_144613C.1
atcacacaatgacacaaacagaatgcagggaacgtaaccaaagaagacccataccatacccaaactgccatgcgtgagaatagatagacagaaagaacaggaaccaaccaacacaagacaaggcatggggcaccgcgccactgacaccgggccccaccaccattaccacccgacgcacactttatttagcccacgtcactcgcagcccgcaccggacaagtccacgcgacagtcactgctagctacgtaccgggctacgtacgagtacgacacacacacacacagacgccagtaaccgtagcgtactgaacagcaaaatcccgtgtcatactgtgccatgtacgcgcgcgagcgactaccccgccacgcgcgcacgccgatcccctgggccctggccgccgctgcctgcgcacggcctcactcgctggccttctcgggctcctcaggagcagcaacctccgcctcggcggccggctcctggggaccagcaggagcaggagcctccggcttgtccgcggcgagctcctcgggagcagcagcctctgcctcggcgacaggctcggccgccccgcgctcctcggcaccagcaggagcccacgagtccg

SEQ ID NO: 48912 - DNA, 1186 bp, Zea mays
  Clone ID: MRT4577_144614C.1
ttttttgctgatgaacgactggctctattatcatataaagaagatcatatcatcacacaatgacacaaacagaacgtaaccaaagaagacgacccataccatacccaaactgccatgcgtgagaatagatagacagaaagaacaggaactcaaccaacacaagacacaacaagctgcagccgcggcaggcatggggcaccgcgcgcactgacaccgggccccaccaccattaccacccgacgcacactttatttagcccacgtcactcgcagaccgcaccggacaagtccacgcgacagtcactgctagctacgtaccgggctacgtacgacacacacacacagagagagacgccagtaaccgtagcgtactgaacagcaaaatcccgtgtcatactgccatgtacgcgcgcgagcgactaccccgccacgcgcgcacgccgatcccctggggcctgggccctggccgccgccgctgcgtgcgcacggcctcactcgctggccttctcgggctcctcaggagcagcagcctccgcctcggcggccggctcctggggaccagcaggagcaggagcaggagcctccggctcgtccgcggcgagctcctcgggagcagcagcctctgcctcggcgacaggctcggccgcggcgggctcctcggcaccagcaggaggagcagcagcagcctcctcctcggcggctgcctcctgctcggccgcgggagtctcctcgggaccagcaggagcagcagcctccgcctcggcggccggttcggccgcggcgggctcctcggcaccagcaggagcagcggcctccggctcggcggctgcctgctgctcggccgcgggaagctcctcgggagcagcaggagcagcagcctcagcctcagcctcagcctcggcctcggcgggggcagactcctcgggcacgacggccggcggcggggtctccaccacgggcgcttcctcggccgccacgacggtcggggtctggacctcggcagtggccattggtggcgatgagaaggctgatggctacacgaaggagtggcgcggctagctagagcctagagctaagagcctaagactgagtgattaagggtggagctgcaagagtgagcgaccagctgagagtgagatcgatcgagcttggttgtgtgaggcctgaagatgggccgtgtgcgttgg

SEQ ID NO: 48913 - DNA, 788 bp, Zea mays
  Clone ID: MRT4577_144615C.1
gctgtgggtttttttttttgctgatgaacgactggctctattattatataaagaagatcatatcatcacacaatgacacaaacagaatgcagcgaacgtaaccaaagaagacccataccaataccatacccaaactgccatgcgtgagaatagatagacagaaagaacaggaaccaaccaacacaagacacaacaagctgcagccgcggcaggcatggggcaccgcgccactgacaccgggccccaccaccattaccacccgacgcacactttatttagcccacgtcactcgcagaccgcaccggacaagtccacgcgacagtcactgctagctacgtaccgggctacgtacgacacacacacacagagagagacgccagtaaccgtagcgtactgaacagcaaaatcccgtgtcatactgccatgtacgcgcgcgagcgactaccccgccacgcgcgcacgccgatcccctgggccctggccgccgccgctgcgtgcgcacggcctcactcgctggccttctcgggctcctcaggagcagcagcctccgcctcggcggccggctcctggggaccagcaggagcaggagcagcagcctcagcctcagcctcagcctcggcctcggcgggggcagactcctcgggcacgacggccggcggcggggtctccaccacgggcgcttcctcggccgccacgacggtcggggtctggacctcggcagtggccattggtggcgatgagaaggctgatggctacacgaaggagtggcgcggctagctagagcctag

SEQ ID NO: 48914 - DNA, 782 bp, Zea mays
  Clone ID: MRT4577_144616C.1
cattggtacctcgagccggccgggaacaaccttgctcgatcgatctcactctcagctggtcgctcactcttgcagctccacccttcactcagtcttagtctcttagctctaggctctagctagccgcgccactccttcgtgtagccatcagccttctcatcgccaccaatggccactgccgaggtagctggatcgatcgaccctagtcttcgattcatatatacatacatgcatgtgcacggatcgtttggatccgaataatacctatatatgaataatggtctctgtctcatcgatgatcggtcgggtcgatcgctcatcttcgatgagacgtacagcgatggacgtgcggatcatatcctatgttaacaaatggaggacgctaagattaagtgtggcgctaagatgtaggagtatatgctttgatttttacgcgccgttcacgtgtgcaggtccagaccccgaccgtcgtggcggccgaggaagcgcccgtggtggagaccccgccgccggccgtcgtgcccgaggagtctgcccccgccgaggccgaggctgaggctgaggctgaggctgctgctcctgctgatcccgaggagcttcccgcggccgagcagcaggcagccgccgagcccgaggccgctgctcctgctggtgccgaggagcccgcggcggccgaaccggccgctgaggcgggagctgctgctcctgctggtcccgaggagactcctgcggtcgagcaggaggcagccgccgaaggagaggctgctgctgctcctcctgct

SEQ ID NO: 48915 - DNA, 498 bp, Zea mays
  Clone ID: MRT4577_144617C.1
aaccattgggttgatttatgtgcttgtgtaggcgcttcaagacgagtctaatgagcctagaaactctgcgcggaataaaagggcaggggtctgcccgacctcgacccgtagcatgaacatgaattgcgaaagtgcggttcactgacttcccagattcctggagcccgaagtcagaggcgctagaaaagccattatagggacaatcggtccgcggtagttaagtgcctacagtgatgccgtcccccgacttcctgacgctggtctccttcactaccgcgaagtagaacctattaagcgccggaccgcctatttattaacagggaatgcgagtcgggaccagattgctgcgagataggccagccccatttcatcgacgattgtgttgtgacagcaacctaattcagcatgagaggaattgccgacctatataaccggctactgtgtccggccgaaaagttagcggtgtgaagtcattgcgcgttcgaccacgatcgaatg

SEQ ID NO: 48916 - DNA, 686 bp, Zea mays
  Clone ID: MRT4577_144618C.1
cgatctcactctcagctggtcgctcactcttgcagctccacccttaatcactcagtcttagggtcttagctctaggctctagctagccgcgccactccttcgtgtagccatcagccttctcatcgccaccaatggccactgccgaggtagcttagctcgatcgatcgatcttagtcttcgattcatatatacatacatacatgtgcacggatcgtttggatccgaataatacctatatatgaataatgatctctgtttcatcgatgatcggtcggtcgatcgctcatcttcgatgagacgtacagcgatggacgtgcggatcctatatatcctatgttaacaatggaggacgctaagattaagtgaagttaggttgcgaaccaaacgggccctatatatgctttgatttttacgcgccgttcacgtgtgcaggtccagaccccgaccgtcgtggcggccgaggaagcgcccgtggtggagaccccgccgccggccgtcgtgcccgaggagtctgcccccgccgaggccgaggctgaggctgaggctgaggctgctgctcctgctgctcccgaggagcttccggcggccgagcagcaggcagccgccgagccggaggccgctgctcctgctggtgccgaggagcccgccgcggccgaaccggccgccgaggcggaggctgctgctcc

SEQ ID NO: 48917 - DNA, 192 bp, Zea mays
  Clone ID: MRT4577_144619C.1
ctacggcgggtatattttacacaaagaggctaaaaattttttttttttccacattttacttaaaaaataaactaattttcaactacaaaaaccctaaattgattcctcaattaatgtttacatgacaacccttgtcctgctgcaatccattctttcttcttcgatccacccccacggtaccctttccggtgg

SEQ ID NO: 48918 - DNA, 624 bp, Zea mays
  Clone ID: MRT4577_14461C.1
ctcgaggccggccgggcttctctcgccaggacgggtctgaatcgtccgtctagcgagagcatattgaagtaccgcgcgagctctttcaacaccgcagaagacatttgcggcccagatggtatacggtttgccgcaaaaactgcgttatgggcttacggtctagctgattgatatcgtggacaagctcccgagccttcctcttctctttgaactagtcgctgatattagagagccatggacttttcatctacgacaatctccgcttcaagccacagaggagagaattcctgaagaacatgaaaagcgtcaagatcgctaatgctggggcagtaacctttgtaagcgacggctgaccgcaaccactctgtcctgggatctctgcaagcatggcgaatgaaagtatgcactgtaactgtatgcaagctatgcctggtgacatttgttactggataagcatcaccgattttctgcacaagtgtacagaggatagaatcgatctcctatgaccaggacttgaacttgcacgaggctaataagaacatacgtgcgaagccttcctgaactgaaggcttcgctgattgaatagcacgacactagggcgacatgaaaaacaatacagtggca

SEQ ID NO: 48919 - DNA, 1076 bp, Zea mays
  Clone ID: MRT4577_144620C.1
gtgatgaacgactggctctattattatataaagaagatcatatcatcacacaatgacacaaacagaatgcagcgaacgtaaccaaagaagacgacccataccaataccatacccaaactgccatgcgtgagaatagatagacagaaagaacaggaaccaaccaacacaagacacaacaagctgcagccgcggcaggcatggggcaccgcggcgactgacaccgggccccaccaccattaccacccgacgcacactttatttagcccacgtcactcgcagcccgcacgggacacgtccacgcgacagtcactgctagctacgtaccgggctacgtacgacacacacacacacagagagacgccagtaataaccgtagcgtactgaacagcaaaatcccgtgtcatactgccatgtacgcgcgcgagcgactaccccgccacgcgcgcacgccgatcccctgggccctggccgccgctgcgtgcgcacggcctcactcgctggccttctcgggctcctcaggagcagcagcctgcgcctcggcggccggctcctggggaccagcaggagcaggagcctccggctcgtccgcggcgagctcctcgggagcagcagcctctgcctcggcgacaggctcggccgcggcgggctcctcggccccagcagaaggaccagcagcagcctcctcgtcggcggctgcctcctgctcgaccgcaggagtctcctcgggaccagcaggagcagcagcctccgcctcggcggccggttcggccgcggcgggctcctcggcagcagcaggagccgcggcctccgcctcggcggctgcctgctgctcggccgcgggaagctcctcgggatcagcaggagcagcagcctcggcctcggcctcggcgggggcagactcctcgggcccgacggccggcggcggggtctccaccacgggcgcttcctcggccgccacgacggtcggggtctggacctcggcagtggccattggtggcgaagagaaggctggtggatacgcgaagcagtggcttagctagagcctaccgctaagactgagtgaagggtggagctga

SEQ ID NO: 48920 - DNA, 1091 bp, Zea mays
  Clone ID: MRT4577_144621C.1
gggccggggaacgactggctctattatcatataaagaagatcattttatcacacaatgacacaaacagaatgcagcgaacgtaaccaaagaagaagacccataccatacccaaactgccatgcgtgagaatagatagacagaaagaacaggaaccaaccaacacaagacacaacaaactgcagcagcggcaggcatggggcaccgcgcacactgacaccgggccccaccaccattaccacccgacgcacactttatttagcccacgtcactcgcagcccgcaccggacacgtccacgcgacagtcactgctagctacgtaccgggctacgtacgacacacacacacacacacagagagagacgccagtaaccgtagcgtactgaacagcaaaatcccgtgtcatactgccatgtacgcgcgcgagagactaccccgccacgcgcgcacgccgatcccctggggcctgggccctggccgccgccgctgcgtgcgcacggcctcactcgctggccttctcgggctcctcaggagcagcagcctccgcctcggcggccggctcctggggaccagcaggagcaggagcaggagcctccggctcgtccgcggcgagctcctcgggagcagcagcctctgcctcggcgacaggctcggccgcggcgggctcctcggcaccagcaggaggagcagcagcagcctcctcctcggcggctgcctcctgctcgaccgcaggagtctcctcgggaccagcaggagcagcagcctccgcctcggcggccggttcggccgcgacgggctcctcggcaccagcaggatcagcgacgtccgctactctgagtacatattggttgaccagaggaagctcctcgggatcagcagaagcagcagcttatggcttcggcctcggcctcgccggagacagactcgtcgggcgcagcggccgccgccggggtgtccacggctggcgcatgttcgtgtcgacgcaccggtcggggtggtggtcattgccagaggccaatggcgcctattatatgtgcttgtgccaactactaaggtagtggcttgagctagctagatgcccatagttgaacga

SEQ ID NO: 48921 - DNA, 1188 bp, Zea mays
  Clone ID: MRT4577_144622C.1
attcggctcgaggctcgatcgatctcactctcagctggtcgctcactcttgcagctccacccttcactcagtcttaggctcttagctctaggctctagctagccgcgccactccttcgtgtagccatcagccttctcatcgccaccaatggccactgccgaggtccagaccccgaccgtcgtggcggccgaggaagcgcccgtggtggagaccccgccgccggccgtcgtgcccgaggagtctgcccccgccgaggccgaggccgaggccgaggctgaggctgctgctcctgctgatcccgaggagcttcccgcggccgagcagcaggcagccgccgagcccgaggccgctgctcctgctggtgccgaggagcccgcggcggccgatccggccgccgaggctgaggctgctgctcctgctggtcccgaggagactcccgcggccgagcaggaggcagccgccgaggaggaggctgctgctgctcctcctgctggtgccgaggagcccgctcgcggccgagccggtcgccgaggcagaggctgctgctcccgaggagctcgccgcggacgagccggaggctcctgctcctgctggtccccaggagccggccgccgaggcggaggaggttgctgctcctgaggagcccgagaaggccagcgagtgaggccgtgcgcacgcagcggcggcggccagggcccaggggatcggcgtgcgcgcgtggcggggtagtcgctcgcgcgcgtacatggcagtatgacacgggattttgctgttcagtacgctacggttattactggcgtctctctctgtgtgtgtgtgtgtctcgtacgtagcccggtacgtagctagcagtgactgtcgcgtggacgtgtccggtgcgggctgcgagtgacgtgggctaaataaagtgtgcgtcgggtggtaatggtggtggggcccggtgtcagtgcgcgcggtgccccatgcctgccgctgctgcagcttgttgtgtcttgtgttggttgagttcctgttctttctgtctatctattctcatgcatggcagtttgggtatggtatgggtatgggtcgtcttctttggttacgttccctgcattctgtttgtgtcattgtgtgatgatacgatcttctttatataataatagagccagtcgttcatcagcaaaaaaaaaaaaaaaaaaagcggcc

SEQ ID NO: 48922 - DNA, 326 bp, Zea mays
  Clone ID: MRT4577_144623C.1
tccacacctcctcatacctctgcttgaaagcacacgcttcaatacccaacaactgcgggaggtatatatgtacagcggttacctttataataaccattaaatattgcgaatgaacctaaatctctacatctaatttacgcaacattcccattgatatataacatatctggaccattgattatgatgtttactagctgaaactcaattcaatttgagctatgcagtttgacactccttttcatgtatacctatttacatatttattagcctattcttctattatatttaaacttaccttcacttgcatgctacgttttaattctttt

SEQ ID NO: 48923 - DNA, 356 bp, Zea mays
  Clone ID: MRT4577_144624C.1
agaccgttggctaaagcaaacagcttccgcaacatgctggagatcaggtcgacagccttcgcacaatggaatggacgcgagattgaggtttcatcgtccaacggcggatcgtctactctgcatctgtgcaacatcagcctgccagttacgggttcacataaggaccaccactgggcgggcccagcattcattatgtcacacccgagtttcaggcacatcgcgcgtgctttgccaatttcatcgggcgtaaagtggaacatcctgatcgtcgcaagtactcctgtcaagtacaatgcagggtgcgccctgtagaacctgctacgatctggactgcaagaaccatcgagtcccaacac

SEQ ID NO: 48924 - DNA, 1042 bp, Zea mays
  Clone ID: MRT4577_144625C.1
gcctcaaacaacacagctcgatcgatctcactctcagctggtcgctcactcttgcagctccacccttcactcagtcttaggctcttagctctaggctctagctagccgcgccactccttcgtgtagccatcagccttctcatcgccaccaatggccactgccgaggtccagaccccgaccgtcgtggcggccgaggaagcgccagtggtggagaccccgccgccggccgtcgtgcccgaggagtctgcccccgccgaggccgaggctgaggctgaggctgaggctgctgctcctgctgatcccgaggagcttcccgcggccgagcagcaggcagccgccgagcccgaggccgctgctcctgctggtgccgaggagcccgcggcggccgaaccggccgctgaggcggagggctgctgctcctgctggtcccgaggagactcctgcggtcgagcaggaggcagccgccgaggaggaggctgctgctgctcctcctgctggtgccgaggagcccgccgcggccgagcctgtcgccgaggcagaggctgctgctcccgaggagctcgccgcggacgagccggaggctcctgctcctgctcctgctggtccccaggagccggccgccgaggcggaggctgctgctcctgaggagcccgagaaggccagcgagtgaggccgtgcgcacgcagcggcggcggccagggcccaggccccaggggatcggcgtgcgcgcgtggcggggtagtctctcgcgcgcgtacatggcagtatgacacgggattttgctgttcagtacgctacggttactggcgtctctctctctgtgtgtgtgtgtgtgtcgtacgtagcccggtacgtagctaccagtgactgtcgcgtggacttgtccggtgcgggctgcgagtgacgtgggctaaataaagtgttcgtcgggtggtaatggtggtggggcccggtgtcagtggcgcggtgccccatgccttgtcttgtgttggttggttcctgttctttctgtctatctattctcacgcatggcagtttgggt

SEQ ID NO: 48925 - DNA, 296 bp, Zea mays
  Clone ID: MRT4577_144626C.1
acccacccgggtgttatctctacttcagcactgtggtctccctcccttttatgcttgctcaaccatagttcaatagctgaccacctttacatgatgcttggggggttccctacagccgagcatccatgatatctttcacacttgaaaacccacatgctataccgttttctcttccaacaacccctctctgttagcagcatactgctacaaccctggtggttggaacaatagcccaccctactcactgtgctagccctgcttcagaaattctggctcagcacttgtcacatctaaaa

SEQ ID NO: 48926 - DNA, 377 bp, Zea mays
  unsure (1)..(377): unsure at all n locations
  Clone ID: MRT4577_144627C.1
tctccgctttgcctccctccctcgctggcgggttccaaaacgcctgcagacctccatacnncagcggctcccctgacagcggaggcgacgcctgcaccatgtcctcctgcgacgacgaccacgcctcgctcctcatatcccacgctggggcctcgtcaccgtcctgcccctcgccgcgcggttcggcggtacatcagcaccacgccgacgtctaggcggacgaagccaccgtcaccgcctccccgaggctcgccagctgcggctgtggcgtgcgcggtctcctgcgcaacctctagcgccgcatgtccgcacgcggatcttggcctgggcgttgccagcaccagcaccagcaccagcactatcaacagctcgatccc

SEQ ID NO: 48927 - DNA, 4656 bp, Zea mays
  Clone ID: MRT4577_144628C.1
atgggaagtttgatgaacaaggctgatgccgaagcaatcctgaacccagtggggagaaaatcgtatgaaatcggtctggctagttcatcgacacccaatgtcggaactgtcagcaccattgcttcgagcaatgtctctatctatagccgcaaggagagcatcgaaaatcagaacaaaatgaaaaaaagaaaggggagatgctacggatgtaaaattcgtccttggcgcggtcctctgcccaggatcagtaaacggttgatcactctcgaggcattcatgccgagcttgatcaatgggcttgatagtttgaaacggccattatcagatgagaagttcaagagttcttgggtgacgaaaacacacaacattcaaactaaagaaacctctttagaaaatgtgcagctgctaaacgcttcgggagaggaacagaggcatttattgcctttaagcagggctcagctggtacaaaaagcaaagacatatggcgcttcgcgtgaatcattacgacggccagctttaaatcaaaagaaaggtcaaatttctcccaaaccagtgcagcacttaatccgaccctcatacgctgagatagctgcaagacagcctgcaaacctcaagcctcagcgccagcatatgctaacaatggaggagaaaccccatcatggtgagagaaccttcgtacctcgccatcatcagcgcagagagcaatttcctcggggcggcagggcagggagaggtcctggacgtggctctccagcgtccggtcgcggaaggggaacaggccagaactgggcgtgtggccgtggatacgcgccgcagcagtatgcacctgttgcctcatcccagcagcttgcgcctgtgggaattcaaaggatcggaaatcaacaggagatagtgggtggaaaccttgctgctgaaggtgtgcacgatgcgactcagaaatgggagaatcgagatttcaaggccaagaaaccaagaccaccacactgctatcgctgtaagtgcaacgggcatctagttgaagcatgcaaagcagatttagattgttatgtatgcaataagaagaatatacatattgcggccaaatgtcctttgctcaagatggagaaaccatctgcagccatgagcggatttgccaagaatgagctttgtttctttcgcataccagtttttgactatagacttgaaacacctgatgctgctccaactggattgataaagatgactgggggtaagcttgatgttgtctcaattcaagctgaattggcaaaattgtcaagggttgaatgggcttgggaagctttgcagcatggggaagattctttccttgttgcttttccatcagaagaagaattagcaaggatgtctgaaatggaatacaagatgaggagcagtggagtgaccttaaccatatctgaatggaaacatgggggcgatgcaacaccagcctactttttggatgaagtgtgggtgcatgttactggtgtacctcacgcatggaggcattatcttggtttttgggcgcttggatcaatgattggcaccaccattgatgttgatatgtatacatacaggaagaaaggtgtgattcgaatcttggttgggacactagataaagaacttcttccgctcacaacagatgtggtttttgataaggtggggtatgagattacattctccatggaggatcaatattttgagccggcaatacctccaccaaattctcttgtacccagagaaaaggatgatgatagtgaaggaaatgaggacgctgcaaaggataaggagagagtgcagactgctaaaaaagctaagaacaccaaagatgcctcaggctccaagtccatgcagggcgacaatgaatctgctcctatgcagactgatggtgaaaatctgaatcacagcattggtcacatcgtggtggctccttctgatccaaagacaattttttcaccaggcaaacccctcaaccttgagcagggggttatatgctctgatgagcagcgcccaaattatactcaactttatgaaaccaatgaagtagaagggaaagagcatgctagcttggacttggggatgaggaaacaaccatgcatcgatgtcatattagggagacatatttccatgccaacacaaaggatggaaaacagttctgactgtgacagcaatacacatcaaacaagtgctttggagaccccagcgagcaatgtattatcgcctttgtctatgagggctgagaaacctgcaacaccattaagccaagatataggacagaactcacagggcgagcaagtggctaagatagaaacgaatatggattcattagagaaggcaatgaatcgtgctgctgctcgcaatttggatgtgaaaggaggatccagtattgctgttggatttaagcagtataatacatctccatgcccaggacctcatgcagcagtaaaggaacataatcttgaattcgttgtcgtgatggaaactggtaaacaggacatctctagttcgaatcttacacgactcacaggaggtgtagattttgtttggcatagtttaccaccacgtggaagatcagggggtattcttttaggagttaatgccacaatgttcgatttgtctcttgttgtcgaaggggaattttatataaagttccatctcagcaataaattggacaaattcaactggattctaatggcagtttacggaccggctcaagatgaattcaaaccagcattccttgccgaattggttagaacttgtcaggacaactcttggcccactcttattgggggagattttaacatcttgaggaatagcaaagaaaagaataacaataggtatagcgagcgttggccctttttgtttaatgctgtaattgacagctttgatctaagggagatcgaactaactgggcgacgctttacttgggctaactctctcccatgtcagacccttgaaaaattggacagggtccttatgacaaccgagtgggaatttaagtttcctttggtaacagttcaggcacttgatcgtggtgtttcggaccataccccccttctgttagacactggaactcaggcattcttgggcaagcctaggcagttcaaatttgaactaagctggttcaaccaggaagactttttcgataaagtcgttcattgctggaacagaccaaccaaagggaaaaactttgtgcaacattggaatcataaactaggggcgctacgaaaaatgctctgtggctgggcatctaatgctagtggggagtataaaactaaaaaaggtcaactccaagcaatcattactgacttggacacttcagctgaggataggatattgactgaggctgaacgaaatcaactcaaacaagccagatatcagctatcctccctcctcagagatgaagaaataagattctatcaaatagccaaagagctctttggagaacctgagaactcgcatttctccttagatgaggaatggatccaggacatccctcaggtcactagagaagaaaacaacatcttatcgagacctttttcagagaaggagataaaagatgctatatttcaaatggagcgaaataaagctccaggtctagatggtttcccagcagagttttaccaaaagtattgggatattattaagtatgacatgctgcaaatgtttgaggacctgcataggggtgatctaccattgtttagcctgaactttggtgtaatcaccctgatccctaagatacaagatgtgaatctaatacaacaatatagacccatttgcctcttgaatgttagttacaagatcttcaccaaagtcgctacaaacaggttgaatctagtggcagacaaaatagtgaatcctactcaaaccgctttcatgcgaggacgaaatatcctagaaggagtagtaatcctacatgaaacaatccatgagctacatagaagaaagcttgatgggataattttcaagatggattttgagaaggcatacgacaaggttaagtggcctttcttgtaccaaactctacggatgaagggtttctctctaagatggatatcttggataaagaccttcatctcgggaggtagtgtggctataaacgttaatgatgagataggccattattttcaaacgaagaaaggccttaggcaaggagacccactttcacccctcctttttaatattgtagcagatatgttggctataataattaaaagggcaaatatggaaggacaagtcggtggagttgtgccccacttaatagatggaggtttatctatccttcaatatgcggatgacaccatcctattcttagaacatgatctggagaaggctcacaatatgaaattgttgctttttgtctttgaacaaatctcgggactaaaaatcaactttcacaagagcgaaatattatgctttggtgcagcacaagaccaagagcaattgtatagagatatttttgggtgtaaaaaaggagagttccctctaaggtatttgggtattcctattcattataggaagttgaaaaatactgattggagggagaggcacgatcaacagtctattgtgatggaagcttcacaacgtttggagcagatgactacgaagttcttatctcaggcacatgggtggcgttctagtcgtaggattgacagccattaa

SEQ ID NO: 48928 - DNA, 2191 bp, Zea mays
  Clone ID: MRT4577_144629C.1
aatttacacttgcttggaatgtgtcaatcttaattaagctattcctggtatatgcatgacacagactgctctggttcctgtagcagattaattgacccaccgttgcacttcttattgcagaaatcactgacctttgcgcctgaagcgtctgaggatgttctgccactggatttaggggaacttcttgcttattttgtaaagcaatctgtaccactattcgaccaacttggtataaaaagagatgtatgtgacaagttggtggagtctctgtgcagcaagcgcaaggaccaccctgcatatagttttttgtcagcaactgaatcatcttcattgaaaaatgacaatgttgggaatgaactcgacctaagaatagctagcgccctacagagtacaggacaccattatgaaggtggattttggagtgatggccataagtctgacatatctggcaagagacatgttgccatagtcaccactgccagtcttccctggatgactggaacggctgtgaatcctttgtttcgagctgcatacttggctaaatcttgcaagcaagatgtaactttggtagtgccctggctttgtaagtcggatcaggaacttgtgtaccccaacagcatgacttttagttcaccagaagagcaagaaaaatatatgaggaattggctggaagaaagagttggtttcaagacagacttcaaaatatcattttatcctggaaagtttcaaaaggaaaggagaagcataattcctgctggggacacttcacagttcataccatcaaaggaagctgatattgcaatcttggaagagcccgagcacctcaactggtatcatcacgggaaacgatggacagataaattcaatcatgtgatcggtgtagtgcatacaaattatttggagtacatcaagagggagaagaatggtgctattcaggcctttttcgttaagcacattaataacctggtcgccagagcttattgccataagatcttgcggctgtcaggtgccactcaagatcttcccaagtcgacgatctgcaatgtgcacggtgtgaaccccaagtttctggaggttggagagaggatagcagcagagcgggagtctggccagcaatccttctctaaaggagcttattttctggggaagatggtgtgggccaagggttacagagagttaatagatttgttcgcgaagcacaacagtgatttggaaggcttcaagctggacatctatggaaacggtgaggattcacacgaggtgcaatcggctgccaggaagctgaatctgaacctcaactttcataagggccgggaccatgcggatgattctcttcatgggtacaaggttttcataaacccaagcatcagcgacgtcctctgcaccgcgaccgcggaggcgctagcgatgggcaagttcgtggtgtgcgccgaccacccgtccaacgacttcttccggtcgttccccaactgcctgacatacaagacctccgaggacttcgtcgccagagtgaaggaagccatggcgcgcgacccgcagcccctgaccccggagcagcggtacaacctgtcgtgggatgccgccacccagcggttcatggagcactccgagctcgacaaggtcctgaatggcgacagcaacagcgaatgcggtggctctgttggcaccgaaaccggcaagagcgcgggcacaatgatgaggagatccgcctcggcgccgaacatgtcagacgtcgtggacggcggcctggcgttcgtgcactattgcttcaccggcagtgagctcttgaggctgtccacgggtgccgtccctggaacccgggactacaacaagcaacatagcctggacctccgtctcccgccgccccaggtacagaacccggtctacggctggtaattactagatatataggtatagctctgcagtctgtagcactagctttttcatctccgcgtgtgtttgtttgccaaaggcgagccttgttcattattacctacaaacaacaactacgactgtaaggatgacaacgctgcgtcgtgattttgtaagactagtgctagatagagaggcgagcatttcttcaatcaaaaaatttaaaaaaaaggaaaggaaagaaagactgaggcggggcaggccctctgtttccaaaaaaaaaaaaaaaaaaaaaaaaccgagaagggggcccggtacc

SEQ ID NO: 48929 - DNA, 327 bp, Zea mays
  Clone ID: MRT4577_14462C.1
ttttgtttttttaatatggatagttatggccaggtctctgggtcggtgactaaggagcaaatccgcgtgaaaggcacggtgacaaaggtggtacgtagtatgttgaagtcagagcacgggttcatgagcacgccgaccttctttgcgagaaccatggagttgctgatgctattccatggacacggccaaggaggtgacgacggatccatgtgttttgctgacgaggctgcactatgtgcacgccctggcatggccatgtctgagccgcagtcgatcgtgatgggcttcttcttattcaggccccgtcgatgttcttgccgaccatgt

SEQ ID NO: 48930 - DNA, 2785 bp, Zea mays
  Clone ID: MRT4577_144630C.1
cttcctcttcctcttcctcttcctttcccatcctttccacccatccacaccgccaccaccgcctacctccaccaccagtccatctcctccgcagcgtctaaagccctatccggatatccccactcgccgaagcccggacacatggccagcttcggcgtcgacacccgcccggccgccgcggcctccggcggcggcgtgggcgtggcggggacgagggagggcgcgctctcgtttctctcccgcgggctgcgggaggaccttcgtctcatccgcgcgcgggccggggagctcgagaccttcctcagcgcgccggtgccggaacccgagctgttcgcgcgcctccgtcgcgcctactcctcctcggcgtcctcttcgcggacgcggctcgacctgtccgccatcgggaaggcgttcgaggccgacgcgtggaggggcgccaggactgccaggtggaggtgggaggcggagacggaggcggaggagtgggagccagtcaggatggtcaaggcgcacctcagcgagctcgagcggaggaggctggcccagtcgcccagcgacatgctgcacaagctcaagctcagcttgaaatcactgacctttgcgcctgaagcgtctgaggatgttctgccactggatttaggggaacttcttgcttattttgtaaagcaatctgtaccactattcgaccaacttggcatacgaagagatgtatgtgacaagttggtggagtctctgtgcagcaagcgcaaggaccaccctgcatatagttttttgtcagcaactgaatcatcttcattgaaaaatgacaatgttgggaatgaactcgacctaagaatagctagcgccctacagagtacaggacaccattatgaaggtggattttggagtgatggccataagtctgacatatctggcaagagacatgttgccatagtcaccactgccagtcttccctggatgactggaacggctgtgaatcctttgtttcgagctgcatacttggctaaatcttgcaagcaagatgtaactttggtagtgccctggctttgtaagtcggatggccaggttgtgtaccccaacagcatgacttttagttcaccagaagagcaagaaacatatatgaggaattggctggaagaaagagttggtttcaagacagacttcaaaatatcattttatcctggaaagtttcaaaaggaaaggagaagcataattcctgctggggacacttcacagttcataccatcaaaggaagctgatattgcaatcttggaagagcccgagcacctcaactggtatcatcacgggaaacgatggacagataaattcaatcatgtgatcggtgtagtgcatacaaattatttggagtacatcaagagggagaagaatggtgctattcaggcctttttcgttaagcacattaataacctggtcgccagagcttattgccataagatcttgcggctgtcaggtgccactcaagatcttcccaagtcgacgatctgcaatgtgcatggtgtgaaccccaagtttctggaggttggagagaggatagcagcagagcgggagtctggccagcaatccttctctaaaggagcttattttctggggaagatggtgtgggccaagggttacagagagttaatagatttgttcgcgaagcacaacagtgatttggaaggcttcaagctggacatctatggaaacggtgaggattcacacgaggtgcaatcggctgccaggaagctgaatctgaacctcaactttcataagggccgggaccatgcggatgattctcttcatgggtacaaggttttcataaacccaagcatcagcgacgtcctctgcaccgcgaccgcggaggcgctagcgatgggcaagttcgtggtgtgcgccgaccacccgtccaacgacttcttccggtcgttccccaactgcctgacatacaagacctccgaggacttcgtcgccagagtgaaggaagccatggcgcgcgacccgcagcccctgaccccggagcagcggtacaacctgtcgtgggatgcgacagcccagcggttcatggagcacttggagctcgacaaggcgctgaatggggacagccaatgatgaggagatccgcctcggcgccgaacatgtcagacgtcgtggacggcggcctggcgttcgtgcactattgcttcgccgacggcgagctctggggacggcggcctggcgttcgtgcactattgcttcaccggcagtgagctcttgaggctgtccacgggcgccgtccctggaacccgggactacaacaagcaacatagcctggacctccatctcccgccgccccaggtacagaacccggtctacggctggtaattactagatatataggtatagctctgcagtctgtagcactagctttttcatttccgcgtgtgtttgtttgccaaagtcgagccttgttcattattacctacaaacaacaactacgactgtaaggatgacaacgctgcgtcgtgattttgtaagactagtgttagatagagaggcgagcatttcttcgatcagaaaattaaaaaaaaaaggaaaggaaagaaagactgaggcggggcaggccctctgtttccaactttttgttgccaaaaaaagcaaacaaaaacctcgcccagacttggcagagagttgggagctgctcagagtcatgtctgtgctgtggtctgtagctgcattgcaaccgattacagaaagagagaactcatctcatacacagatcgaaaaaaaaaaaaaaaaaaggccccta

SEQ ID NO: 48931 - DNA, 509 bp, Zea mays
  Clone ID: MRT4577_144631C.1
aaaacccaaaaaacccctggggggggggggaaaaacccctttttgggaaccaaaaaaaatactacatggttccatacccatatcccaggggattacatttttgggatccaaaattcattttttttacaaaaatttcacaaaacccactcagatgattcccggccccaaaaaaaaacggggccctttacatcctttaattaactttaaataaaggctaattttcggttttttttaggaaaaacaaacatgtaaggaacaacccccccaaggaacaggcttacaaaaaaaaggggcggggggttttgttccacgggaaaaagcattcctgcctgccttattgaaaaccaagtttgtccccgggagcagggcaaaaaaaaaataccttggtggtcggctcaccccattttttttgggaccaaaaaaaaaaaaatggtgaaaaaaaaaacacttggatatgctgttttccacggcccaactgcacaagggttgccgcaacctccattttcccc

SEQ ID NO: 48932 - DNA, 342 bp, Zea mays
  Clone ID: MRT4577_144632C.1
aattcccgccaagcttcggcaacacctgctctcctctctactactaacacccagaaaagcaagaacagaaacatgtacctcagagaaacactacccagaagcagtgatgttctccaaagtcttcatgaagaagatgactcacagtcaaaaggttattctgcctcaaggttaatccagatggttttccagggtgctccagcatatacctggcactagtgtccgagcctatgactaaatctttcatgtgttagtctatcttttaaaactttgcacatttagtcgtgttgaactgatgttcatgttgtatttcttatacttcacacatgttgtgcttatattgat

SEQ ID NO: 48933 - DNA, 197 bp, Zea mays
  Clone ID: MRT4577_144633C.1
gccaaagcaacttctatgacacacagaaaccacattattcacataacacaggtccacaaccaacccattgacacatatcaagaggaagctgcggcccttcttccaactatactcagtgtgccaacttctaatcaggggaaactaacttgacgagttaaatggagggcgcggagaacgccggtgtctatcacaggaaa

SEQ ID NO: 48934 - DNA, 611 bp, Zea mays
  Clone ID: MRT4577_144634C.1
ctagaagactctcgagttttttttttttttttttttttaagaattctaaagtaatcacaaaactttgaatgcacgcacaagttgatgcctgacatttcaaaacaatgcatggatgaaaaccctaaactgtgtatggaaggtagcagtacaggaaaataaatcagatctaattatatagtacaacgtacataaactggtcaacataattttcccgacactaggaaagtaggaacccaaagctaaactagaacacattgaagaatatagaaaatatctaaaacatcatgaatcgtctaatgaggatgccgttgcagatcatgggtgagaaattgacgggttgccctagtagctgaccaaaatattgcagactagagcatgcatggtgtcccctggtgaatttgagaagaagtgtttgatggtggaatgacaaaggcatgcatggacggatggttcttgaatgcgctggtgcgaaatgaatctgtgtgatgccgcaagttgtctaaaaaacctgaaacctgcgtgcatctctatccaactagctagtgctatttctgcaagtaatcgaagtgtaagaaaaagaatgagatcagcgcaaggtacttggatgtgct

SEQ ID NO: 48935 - DNA, 636 bp, Zea mays
  Clone ID: MRT4577_144635C.1
ggccgcaaattttttttttttttttttccccttcaacgaccttcaattttttgtttttattgtttgaagttcttcatctgcatttaaagtggcacaggatcgaatgtcacatctttatatataacaggagttctatacaaaataaataattacattataaggagacaacggtccagcaacccaaagttgactgggagacgacgacctagaccactcacgaactcatcgcagcatcctccatgagcatcatcctgcagtacctggtcttgacctgggccttgagattccaggtaccaggatgatcttcaggtgactcgtgacctcagagtgatcgagcagtgttgaactcagcccacgcggcacggcggcaaggggaaaggagcttgccaccgacgagaaattagagcggcgccggggacgaattccaggcggcccggccacgcttacaaccgcggggatcaagcgaagccccagggtccacatgccaaggccgtagggtcgccccagggttgaatcgaccgaagcggtcgtttccgtccatggcgatggtctcctcacgtgcaccgaggaagaggagctcccccgaagctggccctgggaaggggacggggtctcatgtccagttcttatggccgg

SEQ ID NO: 48936 - DNA, 630 bp, Zea mays
  Clone ID: MRT4577_144636C.1
cgtttcttcagaggcctgcgcatctgggaggcagatgccgacgagctcatgcggagtggcctcgcgcattccaaacaggccttgctcacaggttgttccgctggtggtctggccacgctgctgcactgcgacgattttcgcgcacggtttccacctgaggttcctgtgaaatgcctctccgatgccgggttctttgttgacgcgaaggatttgtcagggcagcgctccatgcgcgctgtgtacagcggagttgttcatcttcagaacgttactaaagttttgcccaaggactgcctcctcgcaaacaaggacgatcccacgcagtgtttcttcccggcggagcttattaagagcatcagcacgcccacgttgatcgtaaactctgcttacgactcttggcaggtacggtttgttgttgcgccagacagctcgtctcccgacgagtcatggcgcggctgcagagacgacgttcgcagatgcaattcctcccagatccaagtcctcaatgcatttaggaagacgatggtagatgacctcgtcgaggctgccgacggcaccaacagcagctggttcatcgactcttgcttcacacattgtcagactatcttcgacacctcaggatggaactca

SEQ ID NO: 48937 - DNA, 302 bp, Zea mays
  Clone ID: MRT4577_144637C.1
gagacaaaacagtcagggggggtggcccattttcattttcaaattcaattcattctttcttgggcaggacacaagttgtcttccacgggtgccaacagccgtggaagggtggaagcccctggcttctgtgccatgtgcattaagcaactggggttccaacttccaaaaaccacgaaacgggtttcaggccgggccttgtcgattgttggggtgcgttcattcaaatttattaagcaaacacatgcttgcttgcttgaattacacattcttttgcccaagagtttgggagaaatttttcccgg

SEQ ID NO: 48938 - DNA, 881 bp, Zea mays
  Clone ID: MRT4577_144638C.1
ggccgcttttttttttttttttttcgcagcagaaatcttattaccaaattttacaagttacaaaaattttactttgtacatgatcaaagtgattacaaaagtgattctaaggaaataactttgaactgttataaataatttgtagttttgaaatatatgctagctcaagtgaccatcctcagtaagaagtatagaagggttacttagacttataagaaggccgagcccaccagcacttaacaccatcatcaacagcacaaaactataacctggataacactaggttagtgtttgttagccgacgtccacttggcgactatcttttgtcttcgcattgttctgattatccatcttcaggttaatccaccagcatcatcttgcgaattagtccacccgttacgtcatcttggggttgacttggctcgtcttccgcttcacgtgattaattaacgtaccagcgtcaaacgttactcaatactcacaagaatgctgataaatcctggctcagtcttgtcgtcgaacatctgacggatgtggtgcggcttcactttcttctccatatcttatggtaatttctctcaaaccagcgatgattgacgaggattgcgaatgtgatgagagggcgaaaatcatttatcacaataactttctctaccccgcaaacaacatctaaaacagccatatgaagcagtgttgagatcttccgcccccatgacccagatggggctgaccacgaggtgaaacatgacaagacgcgtatcggaagagttactgggattaaagatgacgacacacatcaaagcgaggcggcataggacggggcaaagtaggaacggacgacgacgagggagcagcacggttgcgtgggacttggcgagctg

SEQ ID NO: 48939 - DNA, 560 bp, Zea mays
  Clone ID: MRT4577_144639C.1
gttctagatcgcgaacggcgcccttttttttttttttttttttttttatgtaccagtgcctccaaatcgttccgtgtaaaacttaaagaggggcccaaaaggaaaagaaaaaaaaataaaaacaaacgtaaaaagagtcgaaggaccatcaggagcacggcgcggtggcggccaggctgagctcgcggcggcggccgaagacgacggcgcactcgggcagctcgccgagccccgcgaacagggcgtcctccccctgcagctcccgctcccactcctccggcggcagcagaggggcgtacagcgccgaccggtgccacgtcgggtactggtcgaaccacccaaagtcgaagctttcgtcctcctcggccgccggcgccaccgttaaggttgctgccgcttccggaccggccagacatgggatgcccttttccgccggctcgtgctccttttccggctccgtctcctgctcctgctccggcacctctgtttctaccagctcgtgctccgggccgagctcatcccgctggaccaggaccacggacggctcaggcttcggcgcc

SEQ ID NO: 48940 - DNA, 349 bp, Zea mays
  Clone ID: MRT4577_14463C.1
atcagctctcatctggcagtcgcaggtagctacagatcagagagcagaaagagaccgagatggcgccgatagctagcatgatggcgtccaaggcgctcctcgtgctaacgctcctgctcgtcgccaccttgctcgccgcctccgataacgagcaagcccaggcggccaacgaggagaagaaggtggaggtccaagactggcacggcggctgcggctacccgggtcacggcggctgtggcggttgctgatacccgcactgacgactgcgctgctgccaccgcgggtaccatagcggctgtcggtgctgctcgcaccctgatcagataccagagcccatgtaccgtgctga

SEQ ID NO: 48941 - DNA, 484 bp, Zea mays
  Clone ID: MRT4577_144640C.1
aaaactccccttgttaatgctaattgtaaaaaaacgggggaagcgtttttttaatacttgtcgttgtgcaacatgtacaatacacgggagggggaggggtttaaaacaccccccccggcgagaatagcctaacctggacgtcccaatcggttatttgctcacctcaccagggcccccccaacatttctaggccgattgttggcccaacagaaacaccccaccgagccccacacgggccattgccggccacccatgaccagactggtaaagattcccttcacctttctcccatcattattcccgtcacgcaaccaattctattttctgaaacacccccccccaccccacgacagggaaaattaccataacccccctttgggccattttaccaaaacgacctcggcccgggtttaaataagccctccaggcttacctgggcccctgccccttccctttgttccccctccgatggaggggataacct

SEQ ID NO: 48942 - DNA, 715 bp, Zea mays
  Clone ID: MRT4577_144641C.1
acctctctattccacctccggtgaccccgctcatttgatttgctgccactgccttcgcgttaccttggaagcaattagttctctcctcatcctttgcattcggaagtccctccttcttctcctctctctctcagacgattggctgaagacccatccaaaattacaccaatgtgataaggtgcacgagacccatccctgacccgcctccaccgcataacgtagcctatctcgcagattcactatctgcccaccccattgagattgtcgcctccttcaccaccgtgaaaaaccttgctaaggccatgctgtgttcccacaacatcattgccaatgaccacaatgaaagccctgatattgtgcgcgcataaatcactacatgcagctatttgaagattgtgctcgaagggagctcaagaggtttattgtgcatccctcgccactgatttcgcaattagaactctcgacatatgtactgccgtctgatcattatgtgaagggaaacgacaggctaaatcactgatgacgagatctcacatgctgagtacctgcatgtcattgatcatgttgtgtgaaaaggacaccacaacaactattgatcttgatttgcactctcaatcattctatgcctacttcccccgaccttctctgatgctctacatatggagatgatgatgatgtcctcaactagcgcctgccataatacatcttccatgac

SEQ ID NO: 48943 - DNA, 279 bp, Zea mays
  Clone ID: MRT4577_144642C.1
ataaacatgggacccatatatataatcgactcgaagaagcccacgggaggggccgaagagcatatgcgtcaaggcaagagggcaaaacaacagggcagggggggggacgcttagtccaacaacaagggggtcttaatgcttacaaagatataccaaccctgccactcgggggggcatcacattacagatatgaaaaatcaaggggttgcattatcacgaaaccggggtggaaccgcaaatacttccacaaacaggggtgtgagaggggcctcttatttc

SEQ ID NO: 48944 - DNA, 330 bp, Zea mays
  Clone ID: MRT4577_144643C.1
tgtaaacgccgtacgcctccagccaaaaaaccggcaccacacacgtagaccaaatcttttcctcccacccaacaccagctcgtcgatcgagcgagcgagtcgtcgcctcgccggccgaccggcggtatatacacaaggaagccaaggaaaacactcctccctcgcttccttccttccttctgtggcggccatatatcccaaagctatagcttgcgacttggcaaccacttgtacaagttgggcgggctacacgagattcaagccgggatggtggcgccggtggtgatcgcgtcggcggggctgggcgtgctggccggcgtggcggtggcc

SEQ ID NO: 48945 - DNA, 317 bp, Zea mays
  unsure (1)..(317): unsure at all n locations
  Clone ID: MRT4577_144644C.1
accggctgganacccgggcgggacgacgcgtcgggccgggttaaaaaacacacctagcttagctcactagcaacgacctaacaacaatggggngcatgatattatacgtcctcccacccctccccctacttganagtccaacaaattccttcattattccacaattctcacttnctcctactgccattattccacatttcctccctccanttacttcaatantcttctaacacccatctnttcaaacctatattctacaacaatctcttatcactatcatcttaaaacaaccatattcccaattacaacaacaattc

SEQ ID NO: 48946 - DNA, 828 bp, Zea mays
  Clone ID: MRT4577_144645C.1
ggcggcggcgtacgaggtgctcgtagcaggcggggaggggctgttcctcaagaccaagcccccggccgccagatccgccgtcgaggcgctcccgtccgccgtcgtcgcggccggccaggaagtccagggggatgagtgcgctgtgtgcaaggacggggtcgcggtcggccagcgcgtcaagcggctgccgtgctcgcaccgctaccacgacggctgcatcgtgccctggctccaggtgcgcaactcgtgcccgctctgccgcttcgagctgcccaccgacgacccggagtacgagtcctggaaagccggccggaccgacgccgcgtgaaccggccaaccaggcagtggccgcatgctcttatggtatggttttattgatagtgttgtatgtatgggttgggtttgaatcgggtgctttggttataaggttgctactcagccgtatcaaaggcaaagtatagaggcagtagatgcagagatggtttttgatcggtttcctttttctccttaaagagggactcatgaagtttttccaagtgaccgaggttggcatatacttgttagttgttactaaaaaaaaaaaaaaaaaaagcggcctactgctgtatttattctaaatgaatccagagaggttagctggatatcttggtgcagggcagctgtatatcctgatgcaatgggacgatctacttgctagatattatgatgttacattttaactgatcgttgtttggtgactctctaatattatgtctagtttattagagcatcaaattacatttccacatcttgtttatagtggcacaggtgatacccattgattccctt

SEQ ID NO: 48947 - DNA, 580 bp, Zea mays
  Clone ID: MRT4577_144646C.1
agaaaggccaggggcatgagtgccctgtgtgcaaggtcggggttgcggtcggccagcgcgtcaagcggctaccgtgctcgcaccgctaccacgacggctgcatccccacgcgtccgcaggtgcgcaactcgtgcccgctctgccgcttcgagctgcccaccgacgacccggagtacgagtcctggaaagccggccggaccgacgccgcgtgaaccggccaaccaggcagtggctgcatgctcttatggtatggttttattgatagtgttgtatgtatgggttgggtttgaatcgggtgctttggttacaaggttgctactcagccgtatcaaaggcaaagtatagaggcactagatgcagagatggtttttgatcggtttcctttttctccttaaagagggactcatgaagtttttccaaatgaccgaggttggcatatacttgttagttgttactacgtattcctgctgtatttattctaaaaatccagagaggttagctggatatcttggtgcagggtagctgtatatcctgatgcaatgggacgatctacttgctagatattatgatgttacatttt

SEQ ID NO: 48948 - DNA, 1254 bp, Zea mays
  Clone ID: MRT4577_144647C.1
ggggaaaaaaaaaacaaaaaaaaaaaaaaaaaaaaaaaaaaaaaaaaaaaaaaaaaaaaaaaaaaaaaaaaaaaaaaaaaaaaaaaaaaacccacgcgtccgggacgcaggggggcatttccgggaacctcgccgcgggcggggctggaaagccgcggagcttttgatttaaccggccggttgggcggccggccaggcaggcaggcactcagtactgcacactgccatcgctctcctacggtactgctgcctaccgcgcgtctcgtcccttcgctgccgctctatctatctcggccggagccatgggcggcggtggcgcggcgctgctgctgctggtgatgtgggcgggcgtggcgtcggcggccgtgtacgaggtgggcggcacgattgggtggaccgtcatgggcaaccccgactacgccgcctgggccagctccaagcagatcgtcatcggcgacaccgttgtgttcacgtataacaagcagttccacaacgtgctggcggtgagcaaggcggactacaagaactgcatcgccaccaagccgacggccacctggtccacggggaacgattccgtcgtcctcaacaccacgggccaccactacttcctctgcggctacccgggccactgcgctgccggccagaaggtggacatccgcgtcgcctcctctgctgccccttccgccgcaccgtcgccgaccccctccggctccaagccctccggcggcgccacggccgcgccgtcgccgcaccctaacgccgcgccgaaggccctctccgccagctccgtagccgcggctgtcgccacgtccctgctctccctggccgcggccgtgctggcatgatcacttgatcaggatcgtgtagtgctggccaggggacggcgcctttgtgaattgtgagagctcgtactgtgtctgtgtgactgtctctgtggccgtatgagcatttagccctggatctgtgtttgttactctgtcttgctgactttgcttcgggaacatcgattatctcaaaaaaaaaaaaaaaaaaaaggagactagcacctgcaagcagcgccatcggtaaagccttgcaggcgcactacgtgaagcctcgctgctgcatagtgatgaaaacagaaacggtaattttcggatgccggaaattgattttcgaagttttactgaaatttagatctacacagaaacggttaccgaaaatatggaaacagaatcggtacaaaaactcagaaatgaaaacggttttggtctc

SEQ ID NO: 48949 - DNA, 480 bp, Zea mays
  Clone ID: MRT4577_144648C.1
aaaaaaggaagggcccaggctcctggaaaaaaagaaaaagccacgggggacgaaacagggggggggcccaaggaaaaagcgcccggcgacagggggcagccaaagacagggggggaggaccacacaccgagcaaaagcaagcccgggggggagcaaccacaaaacccccccgagggggacaagcaaagcccagaaaaaaccccccggaagacgggacggaagaaaaaacaaagggggggaccgggggggaaaaaacaagggcgggggtgctaaggaagaaaacagccggggacaaattcaggggcgaatgcccaggggacgaaggcgacggggtcggccacggggtcaaagaggaccgggagggggccctggccgaaaacgaccccgggaaggcccgaccgggacccgaaggcgaacaatcttgccctatagggagggggataaaagctgggcctaaagggggccaaagcaggccccggg

SEQ ID NO: 48950 - DNA, 259 bp, Zea mays
  Clone ID: MRT4577_144649C.1
aaaacgcccaacagttttattacattttattttttggcaattaaaaacaaacattttttcatttatgcaggcgtttgtacacttgggcttgggatatataccactttgtttttactggggggggtggcgcagttttatgcccgcaaccccccaaaaattatcccctctgtggtcaagggcgccccaattaatgaaactttggttacaatttggggggtcaaaacttaacccattccacaccaaaaaagggggtggggtt

SEQ ID NO: 48951 - DNA, 431 bp, Zea mays
  Clone ID: MRT4577_14464C.1
ctcttaatcagtcaagatcatagtcgtcagcatcttcaccaagcgcatatcaatgctcctgttaagggggttagctgctaaccccactgaagacaatgcgatcaacatcaaccaataaattgaagtgacgcagcggaagcgtgtgcgggtcctaacccacatgtccaggagatcctcaagaattgcatcagttggtctcgaacatttgaaggtcaaagcaaccagtccacaagttaatcttgtagagaagtcaactcaagaaagctgtgaacaacctatgaaccaaccttggtgtcttgccagcctcttcttgaatctcgagggcgagattcctgttaagagggttagatctgtaacaccctgaattttgggggattaaattttcttttctaaattccaccaaaattcagggtttactttcttgttttcat

SEQ ID NO: 48952 - DNA, 1255 bp, Zea mays
  Clone ID: MRT4577_144650C.1
gatcaaaaacagggaagactgtggaatggacgtctaaagacctacttaatggattggaagaatttgtaccaatatatgagacgcgccccattaagaataacgtatatggaatgggctttgaccacagttttgggctttggtttatggctcgctggattaaaccggatttgatgattgagagtggtgctttcaaggggcactctacttgggttttgcggaaggccatgccaaatactaggattatatcactctctcctaggcaccctgagaaatatcttaagaaaggacctgcatatgttgatggaaactgcacttacctcgctgggaaggattttattgattttggaagcattgattggggaaagctattgagaaatcatggcatttctgatcctgataaggtgcttgttttctttgatgaccaccaaagcgagttgaaaaggttaaagcaagccctaaaggctggattcaggcatctcatatttgaggacaactatgatactggtacaggtgaccattattccttgaggcagatctgtgatcaatcatacatcagaggtggtggacatagctgcttttgggagagtgatgaggcaagactaagattcgaacggaagaagttctgggagaaggctgtggagatagctgatctatgcggaaaggatgatgcatggtggggtgttaaaggttacatgagggacaatttcaaccatagcaatatggccatctcgtacaaagagcattttcagaacagcaggctcgtggaatctgtgttggatatgtattgggagcttcctcctgttgccggcccatccttaacacaccaaacaaggtatgacccagcacgtacagttgacccaatcatcgaagatggtcgctacggcttgttccgaaagaccggtctagcgaggttggacgcctcggtgttcaatggttacactcagatggcatatgtgcagatatcaggttcaatgttgagcacggacgatgtttaaagatttttcgtgggtgagcttgtttcgtttttggccaactgttgataggctttttgtacaacactgatgcgcttctatgcttacttagtttcttttaaccttccagaaattaatatttaccagaccaccttccaaatatttatgagggttgtgtttcttgggtaaggtcacttttctgtgaaatttggttctgaataatcacatgtacttctagggcctaaaaaacattacattagccaaccaatgacttgtgtgctctt

SEQ ID NO: 48953 - DNA, 1958 bp, Zea mays
  Clone ID: MRT4577_144651C.1
cattgggtacctcgaggccggccgggacatcgccgcggctgtatccgccatctgcttctctcttccactgccccaagccgccaccaatggcgacctgcgttctgctgatgctgcgggaagtctctccgtgggcgctggccagcgtggtggcgtccgtgtcgctgttgtggctggtggtctggacgctggagtgggcctggtggacgccttggcggctcgagcgggccctgcgggtccagggcctcaagggcaccaggtaccgcctcttcaccggcgacctgagggaaaccgcccgggctaaccgggaggctcgcaagaagccgctgccgctcggcagccacgacatcgccccacgcgtgcagcccatgcatcacagcaccatcaaggaatacgggaaactatcgttcacctggttcggcccaacaccaagggtgatgattcctgacccagagttagtcaaagaggtgctgtctaataagtttggccactttggcaaaccaaggagtaaccgcattgggaggttgctagccaacgggcttgtaaatcatgatggtgaaaaatgggcaaagcacaggagaattcttaatcctgcatttcaccatgaaaaaataaaggggatgatgccagtattttctacctgctgtattgaaatgattactagatgggataattcaatgccttctgagggatcttctgagatagatgtctggcctgagttccagaatcttactggagatgttatctcaagaactgcgtttgggagcaactatcaagaagggaggagaattttcgagctgcaaggagaactagctgaacgcctcatccaatctgttcagacaatatttatcccaggctattggttcttgcccaccaaaaacaacagaaggatgagagcgatcgatgtagagatccgcaaaattctccgtgaaataattgggaagagagagaaggatactaaaaacagagaaacaaataacgacgacttgctgggcttattactggagtcaaacacaaggcaatcaaatggaaatgcaagcctgggattgacaacagaagatgtgattgaggaatgcaagttattttactttgcaggtatggagacaacatcagtccttcttacttggacacttattgtgctaagcatgcacccagaatggcaagagagagcaagagaagaggttttgagccactttggaagaaccacaccggattatgatagcttgagccgcctcaagactgtaaccatgattctacatgaggtccttaggttgtacccaccggcaacctttctaacaagaagaacttataaggaaatggagctcggtggaatcaaatatcctgcaggagttgacctccttctacccgtcatcttcattcaccatgatcctgacatttggggaaaagacgcaagcgagttcaacccagaaaggtttgccaacggcatctccagcgcaaccaggcatcaggctgctttctttccgttcggagggggccccaggatctgcatcggccagagctttgcgttgctggaagccaagatgacgctatgcaccatcctccagcgcttctcgttcgagctctcaccatcctacacccacgcgccgtacaccgtgataacactgcaccctcagcacggtgctcagataaggctcaaaaagctttctccgtgatgctccttcgatgctgctaccggacactactttcgttactgaccgcatatgtagaaaagtatttcttatttagtatgtattttttaggatataaataaaaagatggtgcatattaatgggaaataagttcccttgtatgcattgcgatgtaattttgggaagatttggcaaggaacttaattatacaatatatgtattgtctttaagttatatctaaaagaaaaaaaataaaaaaaaaaaaaaaaaaaaaaaaaaaaaaaaaaaaaaaaaaaaaaaaaaaaaaaaaaa

SEQ ID NO: 48954 - DNA, 394 bp, Zea mays
  Clone ID: MRT4577_144652C.1
aaaacaaatgattgcagcaggcctttagctttgtttctaggtatgaaccatcatcgccaaatgaccatatttggtgctgcttttttatacgatgaatctgttgagtctttcaagtggcttcttgaaacctttaagagtgccatgtgtgggaaacacccaaagacaattttgactgatggatcttcagctttgaaggaagccctgggtcttacttggcctggtactgttcaccggtcctgtgtgtggcaaatataccagagcactgttaagtcattggcacatatgtttagtgcttatgaagaattcacatatgattttagacactgtgtttttaatatcgaggatgaacaagatttcgttgacacatggaacatgataatggaaaaatacaacc

SEQ ID NO: 48955 - DNA, 4299 bp, Zea mays
  Clone ID: MRT4577_144653C.1
tcagtccgcgtcttcagtcatgacatctccccgggcctcagataacgcttgtccccaagcgtttgcctctggaaaccgtgccctggccactgcataatcctcccatgttgcagcttccttaggtaccccactccatttcaccagcacttgaacaatagctcgattgccctttctcaccatccttcgatcaaggacctgctctggctctatacccccttgagacaaatccaccgcaggaggtagctctgagaaaactggagaataacagggcaggaatggcttcagttgtgacacatgaaaaaccggatgtacttgtgcatccccaggtaattcgagcttgtatgccacctccccaatccttgatatcaccttgaaaggaccaaagtacttaaatgccaatttaggacaggatcggttcaccacagtcttttgtgcataaggttgtaacttcagcaaaaccagatcgcccacttgaaattccctgggagttctgcccttgtcagcatactgcttcatgcgaagctgagctcgtgctaactgctcctttagcatgactgaaaatgcattcctttcagcaaaccagtcagctatctccctatcttccatgcccagcgtttttggtgcaacaagcaatggtgcttcatagccatacaacaccttgaagggcgtacatcccagcaccgaatgatatgtagtattataccagtactcagctaaagcgagccagctcttccacttgttaggttggtcatgtacagcacacctgagatacatttccaagcactgattcactcgctcactctgaccatccgtttgagggtgatatgcagtggacatcagcaacttcactcccataagttggaatagatttttccaaaaggcactggtgaaaaccttgtctctgtcagacactatagatctgggaaccccatgcaacttcaccacattctcgagaaatacttgggcaactcctttagcagtaaaggggtgctttagaggaaggaaatgactgtatttcgagaatctatccaccactaccagaatggtatcaaacccctcagactttggtaacccttctatgaaatccatagtcacatcttcccaaataccttgcggaactggtaaaggctgtagcagccctgcggggtgcaccctctcagccttggccttttgacagattgcacattgctgcacatactgtgtcacatcattttttaaacccttccaccagaacaccttctttaccctctgatatgttgcttgaattccagagtgccctccaactgcactatcatgcagtgctgcaattagtttagtgcgcagagctgagttgcacccaatccagatccggtttgcttttctgataataccttgctgcaaagaaaacccctgttcatccgggctctgaattaacagttgagtgatcaattgctgtgcatcctcatctgtggcatacgagttcactacttcttgaatccatataggctgaatttcagagagaacagacaaccccatcatatgctccacccttgataatgcatccgccactacattctctgtgccctttttatacaccacctgaaactgcaagcccataagcttggtcatggctttcttctgcagatcagactgtaactgctgatctccaagataagtcagagatttgtgatctgttttaatcacaaaggcacccctctgcaaatattgtctccacctgtccactgctaggatcagagccaaaaactccttctcataaattgaaaggtgtttgttcttctcacccaatgccttgctgatgaaggctatgggcctgccttgttgcatcagaacagcccccaatcctatatctgaagcatcagtttctaccgtaaatggcaagtcaaatcttggtaaagccagaactggagtagaggccatagcttgtttcaagttttcaaaagctatctgagcttcttctgaccatgcaaacccttgctgtttttgcaacagccttgtgagaggtttagccaacaacccatagttcttcacaaatcttctatagtaacctgtaaggccaagaaatcccctaagctcagtgacattcctgggcatcacaaattttctgaggaaactctgcaatattgaattcatggcacactgaaagctagctggagcattggtgagcccaaatggcatcaccctgaactgataatgaccatggtgtgtcttaaaagcagttttgaactcatcctcagcccccattcggatctggtgataccctgaggtcatgtcgagacttgtgaaaaatttagttccagctaattcatccaatatctcctccaccaaaggcattggaaatctgttcttaattgtcatgtcattcaattttctgtaatccacacaaaacctccaacttccatccttcttttgcaccaataacacaggagaggcaaaaggactcacactaggaactatcaatcccgcagccaatagttccgacacttgcttttcaatctcagttttgtgatgtggtgaatacctgtagggtctggaattcactggtatagaacctggcaagagtgggatatgatggtcatatggtctagtgggaggcaactgggtgggcaccgcaaacacatccgcaaactcttccagaattcctgttagtgtctcatttccagcctcatcttcctctcctttaacctcctccagcatcacaaacacccatacttcatctcccttcacccacttttctaactgcaaaacagacacctgttgcacctctctctttaggtctgcttccccttgaagtttaacctccaccccttgatcacagaaggttagcaccttgttgatccagtcacaatgcattgggctatgctgtttcaaccagtcataccctaatatcacatcataagcctccaacgccaacaccctcatggcagttctataaacatgccccccagccttccacttcacctctctgacatttttttcacacaccatgatctctccattagctaccttcaccttcacaggaggacaatcttctgtgctcaaccccagtttagtcaccatcctctgactaataaaagttgtggaactcccggagtcaatcagcataaccagcacctgatcttgaatcagagatagcaccctcatacaaccatcacactctgtcccctttatggcattccaggacagctgatgtaatccttccactatatgctcctcctcctgttccagcttcagcaacacttcgtcagttagaactgtgctcatatcctccactgtcaactgatgtatttgagtcactactcgcttgggacatttggcttgatgcccaggttcaaatttgtctccacatatgtaacatagcccattggcccttctataatctcttaactgcctttccttattcaattcaggattcagaattccacttctactccctattgcttgagtcttgattcccataactcccttctgacttctcatcctattcttctcggcaatttcctgatataattgggctaatctcatggccttatccactgtcttgggcgtccgggccatcacttgggactgaatctcaggcttcaaacccctcacatagtgggtcacaaacaaagtctcatccaactccggattatgcaaagtagctgcatatctgatatcattgaaagcctgggaatattcttctaccccatgctgttgtttcacattgaccagcgctctcatggcatgagggtactcttccaccccaaacttctccctcaccgcatgggtgaactgctcccagtctcccaaaccatgtttcagtttatacacctgcagccacttcgacgcatttccctccatgtgcgtcgaggcagtgcttgcccagatccattcgggcacctgataaactgtgaaatattccacacacctatcaaaccagattcctggatcattcccatggaacttaggaaacgaccacttcggtagagaactgggcctgaactcccttccttcaccccattgctccctccgttctctacctccttccctgccgaatcctccgcccctctcatccccgcgatggacacggtgttctcgctcagagttggattcgttaccttccaaatccttcgccagcagctcgagtcgaagacgcgagacagtctgctcggtctcctgcagttgacgagccatgagcgcccgatcctcctcagccttcctctgaccgacctccatcgcctccatcttgcccgtcaggcgctccaccgctgtcaacatgcgctcccatcgctcttctcctttctgctcagctcccgccat

SEQ ID NO: 48956 - DNA, 540 bp, Zea mays
  Clone ID: MRT4577_144654C.1
aaaaaccggggccgggaaaaacctttggggaaaacttgcccttttccgggggggggtttccaaaaaaaatttttaccccggggttatttttttaacggggggcccgcaaaccccaccccaagggggggcacccaacccccctggaaccccccaaagggcccctgaaaaaggttggggggccccaaccgggggttggggggccccaaaagcccccaccctaaaaacccccgggggggggtttccaaaaacggccctttccaggggcaaaaattttttgggcctaattttaaagggtttcccccctttaaaggggagggcccaccccttgtctttaaaggaaaaaccccagttgggggggccgcccattttttaaaaaagcccaaacggcccccccgaaaaaaggtcttcccccgccccccccaagaaaaaggaagcgtccccaaccctccccttcctaaaagtgaacctggggggaacttttaatttaccttttccaaacccccccccgggggggggggggccaaacccccccccgggggg

SEQ ID NO: 48957 - DNA, 405 bp, Zea mays
  Clone ID: MRT4577_144655C.1
gcttgggtggtttttttttttttttttttttttttttttttttggcagatagaggggcatgcttcatatttaccaatataagaacatgggagtctggtgtctcggggtattaaattatggttcatggaaaattggcaaacagaagcaaatttttaagggaaaactgcgtacatcccactgggtcctttagatccggaacaacccagttatttacatgcaacttttttttccactagcttttcatttgtggaagggggggcatacggggttttccggttggatggaccttcttgaccctcctatcggattgatttttctttttctaatggtcccctggggggggggtcctcttccttttttttttgttgatccgaaaactcacttgtccaccccatagcctgagtt

SEQ ID NO: 48958 - DNA, 1808 bp, Zea mays
  Clone ID: MRT4577_144656C.1
cgccagcacggcacacacactggaaagtgcaggctgtggtgcgacctccgcgactgccagcgtggctcccgggggcatcgagcgtcgcgccggtcgtcggtacgcagggccaccaactcgctacgacggagccgctaccagctgcgaaccgtgcgcaagtagtagtgcgacttcgccgccggccgggatcgctagctcgatcgatcggcgggaccacatacgactccggtgtggccagcggcggccgggccggggaacgcacgtgctgcgagcgagcgagggcagacgctagctgttgccgggagctagccggcgcgcgatggggagggcgccgtgctgcgagaaggtggggctcaagcgagggaggtggacggcggaagaggaccagttacttgccaactacattgcggagcacggcgaggggtcctggaggtcgctgcccaagaatgcaggcctgctccggtgcggcaagagctgccggctccggtggatcaactaccttcgggcggacgtcaagagggggaacatctccaaggaggaagaagacatcatcatcaagctccacgccaccctcggcaacaggtggtccctgatcgccagccacctccccggccgaacagacaacgagatcaagaactactggaactcgcacctcagccggcagatccacacgtaccgccggaaatacaccgccgggcctgacgacaccgccatcgccatcgacatgagcaagctgcagagcgccgacaggcggcgcggcggcaggaccccgggccggccgccgaaggctagcgccagcaggaccaagcaggcggacgccgatcagcccggcggcgaggcgaaaggcccggccgcggcggcgtcgagcccgcggcacagcgacgtggtgaacccgggcccgaaccagcccaacagcagcagcggcagcacgggcacggccgaggaggaggggcccagcagcgaggacgcgagcgggccgtgggtgctggagccgatagagctcggggacctagtctggggggaggccgacagcgagatggacgccctgatgcctatcgggcccggcggccacgactcggctgccctcgaagggcttggcgcggtcggctgcgaggcccaggtggacgacctgttcgacatggactgggatggcttcgcggcccatctgtggggcgggccggagcaggacgagcacagcgcgcagctgcggcaggccgccgagccgctggaagttgctgctgctgctgctgctgcgacggcggcccgcaccccggacgatcgcgagctggaggcgttcgagacttggctcctgtccgactcgttctgacggctccggtcaccggaccgatcagacagaccaaataattgggtcacgtgtgctcgctcgctcgctcgctgccgtcgcgtgggtcttggttcagatggccaaataattgggaaaaaaattctacgcgccagggccgtaaagccaccaccgtgcgctcctgatgtcgatgcctgccgcgtggagctcttgcgtatctaacgctcccacgacaatcacccttccagacggctcgaattacatacgacaggatcggctccgctctactccgttctgttcgcttctgctttaggtgcgtgcctagcagatggtgaggcggcgtcgcgcggccctcccgacggctcgccggccgcgctacggggcctgctgcagcagcccctcctccacgcctgtaaaagagctttgtatttacctgtttgtttgtgcttttgtgcaatggaataaacaatgatattatactgaataaacatgaatgttctgagac

SEQ ID NO: 48959 - DNA, 1494 bp, Zea mays
  Clone ID: MRT4577_144657C.1
gggtacctcgaggccggccgggagcagcacagaccacactggaaagtgcaagctgtagtgagacctgcgcgactgccagcgtgtatccgcgcggcaaggagcgtagcgcgcggtcgtcggcccgcacggccaccaactcccttggacgcacgcgcgcgcgcgaccagctgctaaccgtgcgcaagtagtagtgcgacttcgccgccggccgggatcgctagctcgatcgatcggcgggaccacatacgactccggtgtggccagcggcggccgggccggggaacgcacgtgctgcgagcgagcgagggcagacgctagctgttgccgggagctagccggcgcgcgatggggagggccgccgtgcttgcaagaaggtggggctcaagcgagggaggtggacggcggaagaggaccagttacttgccaactacattgcggagcacggcgaggggtcctggaggtcgctgcccaagaatgcaggcctgctccggtgcggcaagagctgccggctccggtggatcaactaccttcgggcggacgtcaagagggggaacatctccaaggaggaagaagacatcatcatcaagctccacgccaccctcggcaacagggatacaacagcgcaccggtcttgatgggaaatggtgttcaggcagcagttcgaggtactggacaggtctacctgaagttatggcgttggttggcgtcctgtccatttcgctttgctgcctcgccatcaccgccggccggtggtccctgatcgccagccacctccccggccgaacagacaacgagatcaagaactactggaactcgcacctcagccggcagatccacacgtaccgccggaaatacaccgccgggcctgacgacaccgccatcgccatcgacatgagcaagctgcagagcgccgacaggcggcgcggcggcaggaccccgggccggccgccgaaggctagcgccagcaggaccaagcaggcggacgccgatcagcccggcggcgaggcgaaaggcccggccgcggcggcgtcgagcccgcggcacagcgacgtggtgaacccgggcccgaaccagcccaacagcagcagcggcagcacgggcacggccgaggaggaggggcccagcagcgaggacgcgagcgggccgtgggtgctggagccgatagagctcggggacctagtctggggggaggccgacagcgagatggacgccctgatgcctatcgggcccggcggccacgactcggctgccctcgaagggcttggcgcggtcggctgcgaggcccaggtggacgacctgttcgacatggactgggatggcttcgcggcccatctgtggggcgggccggagcaggacgagcacagcgcgcagctgcggcaggccgccgagccgctggaagttgctgctgctgctgctgctgcgacggcggcccgcaccccggacgatcgcgagctggaggcgttcgagacttggctcctgtccgactcgttctga

SEQ ID NO: 48960 - DNA, 266 bp, Zea mays
  Clone ID: MRT4577_144658C.1
ccgtcgtcgtccgggcacgcgtccgggcagccagtgagccttatgagcctagagccagtgcctgaccgtgcatcagccgccacacgacaaacacacaccactctgctctcgcccgcttgctatctgtcccccggtccagcttatggcggaggcggcgccagccgccgggggcagcctcagggacatcctcgacacgagcgatcgggacttggtcgtacgcaactacggcaagcaggcgaagaccagcagcgttgaagcgagccctg

SEQ ID NO: 48961 - DNA, 180 bp, Zea mays
  Clone ID: MRT4577_144659C.1
gcatcgacaaaggaaacctcatttacaagatcgatgtgtttctgacatcatgcgtatttcgtcactggaaggtctcgatcatagttttacagagcacaaagtcactgcaaccttggtgtgaaatatctgaaggtaatcaaccactgcattgactgtatcgcgtcgaaggtgtcaattgat

SEQ ID NO: 48962 - DNA, 343 bp, Zea mays
  Clone ID: MRT4577_14465C.1
ctcggaagacggctcttggaggccaatgtcaggaaattttataacgggccagagcgagaggggaagggagagcatgtgcgagcgcgcagtcgccgtccacaccgttgagcttacactaggctttcgatgggcctgatttattctaccagctgccaactggcaagcaaaccccgcattgggctttcttcggtttctttttttccctcacaagggcaaaccccaacccccggagaataggggattaggaagccgaactgggcgggccgggcggtcaagaaaccctggctaaataaatcccttcggcgtctgtgggcttgaacgcggcggggcaagcgtttttttt

SEQ ID NO: 48963 - DNA, 633 bp, Zea mays
  unsure (1)..(633): unsure at all n locations
  Clone ID: MRT4577_144660C.1
tgggacctcgagccggcgtgcgacnggtcangatacgggtgacctccctcgccgtaacggcatctgttgggtcaacaccgtgtgctacctcctctgcatcaacaactttcctgcccaaggcgcgtcgcgggcagcctggccactagctacctcgggttgcagcgccaaggtctacaccaccatggcgcagaccatccccagggcggcgagggctcaggtactcgaccacggacgagtacctgctccgtcaatgccgtcgtccacatgacggccgggctcgtgacggtgatgacccccaggggggaggaaccccaggagggcctggacacggaagaccgagagcggcgttcactctctatgttcttgatgaccctgaccaccggagcctgcgccgccgtcgtgagcgtaggggacaagtccatcgggctctcgtctagagcacacatgggcgatctctacgtgctgctcgacctgcctctgctcatcccagtgtggctcagagtcacggagggcacggccaagatactcgagagcatgtgggagaaccgggtccacgatcacaactccgacggggccgactcctagacggtggtacacgcgacggtgtcgaagaacgagatttcggcgaaggac

SEQ ID NO: 48964 - DNA, 481 bp, Zea mays
  unsure (1)..(481): unsure at all n locations
  Clone ID: MRT4577_144661C.1
aaaanccaaacaccaacctttttcagggttgggcctagtcgggggggggacccccccccaacacaaccggtccttttttaaaccccccctggcccgaacgggaagttctttgccccccccctttgggggggggccccaaacgacgcgggcccctggggggtttaaacgacccttgtttttctgcccccccggggaacgggccccaggggggggggggccccccttttgggtggggaaaccggctgggggggggccctccccccgttgtttgccgggaaaaatcaaacccttttggcccggggggaagccctccttggccgggatcttcgccttcacattggcgggggggccccgccccccaccccccaggggttgggtttttccagcggggggtttaacaaagatcggcttcccccccctgggggggaaaacaaggggaagggggccccccttcggggggggggaccccgggagggggggg

SEQ ID NO: 48965 - DNA, 280 bp, Zea mays
  Clone ID: MRT4577_144662C.1
caaggttccaggatgtacagtgaggtagctatagatctaatcaaacgtcaggtatgagtcggatcaaggtcgagtcgtggattgtcggtacggtccgtacccgacctgtgttagtgttgggttgggttgggttcgtccgtgcttctatgtcagagttcggttgggattttttcgagttgggtcgggatttttgactttgggttagaatttttttggaaccgattgggttttggatcaaaaattatatccggttcgacctgtagattgttggggtcaaaaa

SEQ ID NO: 48966 - DNA, 373 bp, Zea mays
  unsure (1)..(373): unsure at all n locations
  Clone ID: MRT4577_144663C.1
tggcaccnnnctcttacccaactgnncaacaatgtgcgttgcctattcaaaaccaacttnngctttgacaannnacccagcanngcgttctatccaaccnnatcccatcattngnngtggtgccncnntcttttnnagatttnncttatcgacgttatangnnttcaataannntaaacgttttttcggtctcggatcgttnnaaaanannaaaaaaaannnaaaaaaaaaaaaggggccggcccgcttctttagaggatctcannagcttatcgtacccgcgntgtcatgcganncgtctatagcttctttcttatttagtgtnncacctaaatnnntcaattcactcggcccccgtcgttttacaaaacgt

SEQ ID NO: 48967 - DNA, 227 bp, Zea mays
  Clone ID: MRT4577_144664C.1
agctagcattacctctccttcacctcattattttcaccatctcgaacactcccacctgcgaggggggcctttatcaagtacacccagcagctgaacatgcgccccaaccgctccattccctactgcatccctatgcgcactgacaacaccatcatgtacaacgccaaccgcaggcactggcgccgcaccaacctcatcttctgcgcctccccattggtccactactg

SEQ ID NO: 48968 - DNA, 449 bp, Zea mays
  Clone ID: MRT4577_144665C.1
caccaagcaagtgcactgcagttctctgcagcatgctgccgtattatggtggctattattggtcagagtacgttgaacagtatcacagagcacgccggctagagaacgagaagcggcggctggagaacgagaagcgtgcgctggagaggcaactagcggagaagacgagggacgctcaggtgtcctccacccaggtcttcacgctgcagcacaaggtgcgagagctggagcagaggaacaccggactgtccggggacctggcgaacgaaagggaggacacgaggaaggccggcctgctgttcatggttgccgccgacaggtaccaagaggaagcccagaagcaaatcagggccaaggcagaggaactggccgacacgaggaaggcgggcctggcgctgatgaacaccgccgacacctaccaacaagcggcgaggaagcagatgaaggag

SEQ ID NO: 48969 - DNA, 266 bp, Zea mays
  unsure (1)..(266): unsure at all n locations
  Clone ID: MRT4577_144666C.1
ccggggcacnatcncaccatttcggcaaccccgcaggaaaaaaaaaagggcgaaacgaggccaccagctcaccgccgagcggaagcggcgccgagcaccaactcctctcctcgtccgccgccgtctccccggaccatgtccatggccgcctcctcccgggtgctctggccttccctccccgccggctagctctctatctccatcttccccagtgccttctcacgcgcgctcaaggatcctctgtctgttgacactcctgaatggcc

SEQ ID NO: 48970 - DNA, 1138 bp, Zea mays
  Clone ID: MRT4577_144667C.1
agctcatctgatgcctccgtcaacggctccatagccataggtggaaaggaagaagccgaagcacagccgatagacacaaatcacacggttgtcatctctgacgacatggcagcaaaggcgaaagcgctactggcgaataagtcgttgcaaccaaagcacggtgatgacattgggctgcaagaaacgactgtggcagcagcaaaggaacgcgtcgccactggggacgacagtactgcaactcctggaacggaaatgatgaaaggcagtgcaacttctgctggggctcaggtcaacaatgtctgtgattctgactcactggccatggaagtagacggtgtgttgcaccctctgcggcgggtggatggcttcctcgtctgcctgagctgcaatgcaaaggcaccatctgagatcgtcatgcggtctcacctgtctgggaagaagcacaagcgcaagatcacactcgctgctgccggaggaaacaatagcttgtgtgtccttgccaccgccggggctgatggggcccaagaaaacatcggctcaaagcctaccaaaggcaacgtggaggcagaatcggcggcggcacaagcaaaaaccgctgccaacgaagaagcagaatcagccccgtcgttggaagtgtcacaaacgaagaacactgcatccacggcatgcatcattgagccagctgaggatggggagattgctaaggaagctgaagaagagcgggcagctgcaggcaccaatggtggtgtgatccaagccaaggaaaccgtgagagcagatgacgccacttcccctgccaagtcaatcgaggcgtccaccgtgatgcagcaggagaatggcaggtcagcatgatcctgcatctctacaccagtacgcactggggcctcggacatggctgcagttgcaatggtggataaggatgtctcaggtgtgacaacgatgtccgtgtgacaaaatctaatggtgaagaacttgaacgtagcgttgcatgaaaaacgattggttccgcctctgcctatttcttgtgtgatgtgtagggctacaatctagtcatgaatacttgatgctttgaacgacagtaccttctcgaaaaaaaaaaaaaaaaattcggccctaattaaaaaaaaaaaaaaaaaaa

SEQ ID NO: 48971 - DNA, 371 bp, Zea mays
  Clone ID: MRT4577_144668C.1
cccgatcatcctcatcctctgctcctggacagtacagcacagcacaacacatcgaggtagagctagcatccatcaccggatctcagaaccatcatccgcaccagcagcacaccacggtcaaccttccacacacgcgcgcacacacacatggcgtcgcaccataagcaacttcatgctggagcctctgcatctgcgctctccgacgtgggcttcgacgactacctgtcacagatcgtgtagcggctaaccgaatacacgctgatgctcgagctgtctagcgtgttccggctgctgatggacccggcgctctgactcatcaccttcgacagcctccgacgcatcgcaccgctgctcggcctgtgcggcatgtc

SEQ ID NO: 48972 - DNA, 119 bp, Zea mays
  Clone ID: MRT4577_144669C.1
cagtatgtgaagaagttgtggcctcgtaatgttgtggtactcatgcgtccagaagaatcagggttccggatgtcgactgggtgagccaattgcggttggaagctcggaatcatgttatc

SEQ ID NO: 48973 - DNA, 213 bp, Zea mays
  Clone ID: MRT4577_14466C.1
gagctcactagtcggcggcgccttttttttttggtttttttaaaaaaaccgcaggacaaacacatccggagaaaccaagagatagcaacaaatcggcacacatgcgcataggaaaggattattgacacatgcacaatataaagaaaactatgggatgtttagtaatgcaaaaaatgtctgaccgtcatgtaaacatctatatcaactaagaaa

SEQ ID NO: 48974 - DNA, 532 bp, Zea mays
  Clone ID: MRT4577_144670C.1
gtggtggaccgcctggccttcgacgcctgcaacgccagcgcgccgctcgccgcgttcgccggcggcgccaccgagttctgcctccaccgcccgggcttcttctgcttcatcagcggcgagccagggcactgcgaggaagaaggccagaggctcatcgtacgcttgttggtctgggtttgatgctccactgattggtttgctactactttgcttttatgtgtgcagtactgcagtgcagactcacacactagtacctagttgttgttagataatgctcagttgcctagttttcggtttccatattattttgggttcatgcaagatgacttatgagttatgaagtattggtactaggaataatgttatctgtcgaacaatttgtttaactcagtaatcgtacgtatgctgtttagtacctatatgtgatgtggttcagttcgttgtattctgctcttgtagttctcaacgatgctaaattgctggcctctttttttaattagtatcagacaattccatttttatagtgagagtt

SEQ ID NO: 48975 - DNA, 331 bp, Zea mays
  Clone ID: MRT4577_144671C.1
cctgcggtcgacttgaccaacctattgatcccttttttttatctccgggacaagatcattcttaaggggggtaggatttgtaacactcaaaactgcgtccacggaatctatagcgtgttccttatccgatgagcctcattcgcatcatagagagaacatacacaaaactaggagtataattcaaacaactgctataaacaaaaatgcatcatgttggagttcatatgttgatgcattaaataaaataataaatagatcaataaaaggatattcatatagccgcattgaagtatcgactgaacgtgtattcaaaaggtgaaactagagttcg

SEQ ID NO: 48976 - DNA, 333 bp, Zea mays
  unsure (1)..(333): unsure at all n locations
  Clone ID: MRT4577_144672C.1
cacgcgtncgnacggctgcgagaagacgacagaagggtgtgcggcggcatagttagattcttgtgaaagagtctacccctttcttttccttcttgtagatcgtgatggcggcgcagctaatccatgatcgagtagagatggagtgcttagagggagcctgngagaccctcgaaggcaacacgaggtgccgatttcggtgcaccactcgattcacggctacctctntggtgcatccagatgaacctgcacggacgcttcagcgcactgtggaatggatactacccacgcctacaccatatatctagtgagcccgccaatgatcaggtacgtcat

SEQ ID NO: 48977 - DNA, 300 bp, Zea mays
  Clone ID: MRT4577_144673C.1
cacggggcggtcggatccaattgtcacttgctctccctccaacaagctaattaaggccgagcatcccttcttgtaactcagtgtcattatccatggcgggaggagaagcactcccgcccaccacctgttccaccacaagaaggaccaggattttttctccgcgggcgggaccggcagtccgcctgatacacggtggcccccggaccggagtgggtccccgggccacaccattccgacgagacaagaagggggagaaggagcacaagcccgaacgcggcccttggcaaggccggccccatc

SEQ ID NO: 48978 - DNA, 374 bp, Zea mays
  Clone ID: MRT4577_144674C.1
ccacgcgtccgccggatttatatagcttttatctatgtttaattaagacttgtgtttacaattttttatatttgttgttaagttttgaatatatggttttatggtgtgattttaccgaacaaaataccggttcccgtccgattccagccagcgtcatctgattgcatgcaggcgtttaggacctggccggccgtagttactgtaatctccgctgaaatgtcgtatagtaaactttgtttattagtactattttttttttgtgtgtggagctaataatgtgcttaaacgaaaccttgtcgtcatgctgtcatgggttggtggatcccaggcaacgggggccgtggcagggtggggaaggcggcgcacctggagga

SEQ ID NO: 48979 - DNA, 106 bp, Zea mays
  Clone ID: MRT4577_144675C.1
cagatacgcaagagctcctgcctgttgcttccgccacccagctccagctcgagctccatgagttggctatatctgtaggccttgctgctccggtagaccgtggtgg

SEQ ID NO: 48980 - DNA, 266 bp, Zea mays
  Clone ID: MRT4577_144676C.1
atgaatgtagttactgtcacttggtgagatcgttggggggcgaacaaacagttctattagtaaacattggctcgttaaacagaccaaaacgagggcatctattaacaacagcagaaagggtgaggtacaccttgagctactcaaaaccacttccgtatgtctagaacacaacaggggcggcttgcacagcgccggctatggtgacaaaatttatgccggatgcagatgctgctgtgctcttcctaccaacagccccggcggccgga

SEQ ID NO: 48981 - DNA, 1598 bp, Zea mays
  Clone ID: MRT4577_144677C.1
cccacgcgtccggccacgcgtccgtccacgcgtacgcccacgcgttcgcccacgcgggcggggacgcgtacaaatcgccgcatataatgtagcctggccatggatactttccctcctcgcctccccctcttcgtcagccccgcatctggcccggattagccgcctccggctccctcccggatcgccccaccaacagccagcctcgccagctgatctaagccaggcgcaactgtgaaacaatggcgacatccaagaaggatccccccaatcctagcagaggcaggacgtcacccaacctcatgtcgtccagcagtgagtcctctgggcacggatatggtgctaggcgggctcggtctgtaccgagttccgcgcaccgcaaatttggctcatcgtcgccgtctgtgtctgcctctggctccacagacgtgcatcattcatcattgttcaacgctggtaggtccatctcatcacggaccatgggctcttccatccagggcaccaaggcccagccattcccatctgcagcctcaaaacctacactggcaaaggagaaatccgacaaggtcagcaccaccttgcagcggcctccagtgcttgctgtgccggcagctaaggcatcgccatccaccttgccgaggagagtcagagggtcatgttgccaggtgctgctcaaggagacaagttcgccactgtctaccgcacagtcacctggtgcagctgcaaggaagagattggatactgttaatggtgctactaccaactcaaaggctaaaagtgtttctcagaaggcaatgggggcatcttcagccaggaaggagaaacataaggacccatcaatgcagattaagggaactgagtgcataaacaccaccacgtctatagaagagcacttgcacaaggagctccccgacccagttgatctgaaatccatggagatgactgtacctgatcagcatgagccatctttcaatgaaccagaacatgtactcaaagacgatgagaaatccgagggtcatttctctgaagagaaagtagatgcaggagctaatgagattcataatggagggcaagatgacaatggtggtgtcaagactatatatgaatgtgggattgttgagaagaaggctgaccggagtgtggataagacagtgccgaagactgaagtggctcaggtatggaggaaggatgatccaaagggcaatgacgtgattgaggaaaccaaaagcaagctcctgctggagaggaagagccgggtgaaggccttggtgggggcctttgaaactgtattgtcgttcaaggagtagtcctcaatcttgtcttctggtctcttgtgcccatctcaatattgagtaatatatatgatgacttccttggctcgttgtactctatatcgtatttcctttttctgaatcatcgttgcattcgatgtggatttgtctatttgttgctctttattgatgtagaattaaattaaattccggtgcttatggcgagaacatttggattctgtgaggaatattcttacttgcaatttttaattaaattgtgcgctaaaaaaaaaaaaaaaaaaaaaaaaaaaaaaaaaaaaaaaactcgag

SEQ ID NO: 48982 - DNA, 220 bp, Zea mays
  Clone ID: MRT4577_144678C.1
cagaagcacacgccgtgcctatctatctatagctagcaccagcaggggggcacaccgaaaaggacagcgccagcagcctcgaggacgaacaccagcagcggctgcggcggcggcgcgtccacggacaagcaaagggcagtgggcgtctaccccgacgccacggggacgccgccggagcgcaagggcaacagcgccaacgcggacccggacaccgcccaac

SEQ ID NO: 48983 - DNA, 937 bp, Zea mays
  Clone ID: MRT4577_144679C.1
cgggtccccgctctgctgtgctccggccctctacccacgggtcgcgggctcgaccgcagagctaccgtccaaatcgccgcatataatgtagcctggccatggatactttccctcctcgcctccccctcttcgtcagccccgcatctggcccggattagccgcctccggctccctcccggatcgccccaccaacagccagcctcgccagctgatctaagccaggcgcaactgtgaaacaatggcgacatccaagaaggatccccccaatcctagcagaggcaggacgtcacccaacctcatgtcgtccagcagtgagtcctctgggcacggatatggtgctaggcgggctcggtctgtaccgagttccgcgcaccgcaaatttggctcatcgtcgccgtctgtgtctgcctctggctccacagacgtgcatcattcatcattgttcaacgctggtaggtccatctcatcacggaccatgggctcttccatccagggcaccaaggcccagccattcccatctgcagcctcaaaacctacactggcaaaggagaaatccgacaaggtcagcaccaccttgcagcggcctccagtgcttgctgtgccggcagctaaggcatcgccatccaccttgccgaggagtaagccatctccaaggcctagttctgacagttgcaaagcggcagcatcactgaaacctagcagtcagagggtcatgttgccaggtgctgctcaaggagacaaagttcagccactgtctaccgcacagtcacctggtgcagctgcaaggaagagattggatactgttaatggtgctactaccaactcaaaggctaaaagtgtttctcagaaggcaatgggggcatcttcagccaggaaggagaaacataaggacccatcaatgcagattaagggaactgagtgcataaacaccaccacg

SEQ ID NO: 48984 - DNA, 279 bp, Zea mays
  unsure (1)..(279): unsure at all n locations
  Clone ID: MRT4577_14467C.1
gttaattatcctgtacttaatgtttttttttgcgtcgcctgtacaaccatctcggtgggtattttcgcaccaactcgagaacctcacccctcatcntttatgttatggtgcatgatgtgtatgcatcctccacacctttttagctgactcatccgacacttactcctaagcaactcttctttctacattttcaaatcgtgtttgaaactcttccttttctcctgcataacatctacttaattcttcttcatacgtcttaataacacattgatcttattc

SEQ ID NO: 48985 - DNA, 358 bp, Zea mays
  Clone ID: MRT4577_144680C.1
cgttctagaaccccctctccctatgttcgccactaaatttctgttttccaccacaccactcccgaaagggtctgcgtgatccttcactttcccttacgccacacccgccccgacattacacaaccacattctaattccccgcccccaccaatagggaaacccacagagctttaccacacaaaacctcaacatacccaaggacacctgaacgcactaaatccctgccgcatacaataacgttgtcaaaaagttacaccccgacaagcacccggcatcatacatacaagatgacgatgaacacttaaaggccattaacgaggcctacgaagcgctcctggatcaacaggagaacatgggc

SEQ ID NO: 48986 - DNA, 2257 bp, Zea mays
  unsure (1)..(2257): unsure at all n locations
  Clone ID: MRT4577_144681C.1
gggtacctcgaggccggccgcctcgttggttgccatcagcggacgccgccgattcggctctccttgctgtgttcggcgtcgggtcgcgcgacagacgattctataatatggagtacatgcgtgccgcgcactgtttagtggttcctgcggtcgtccgtcgctgcgggaatgttcctttgttgctaacgaattcagtgattgtggtcgtacgggtgatgccaattcagtaatcgcctgccatctttaattgtctggtgagccagtcgagacgccggtttggcgttaggaattattggaattccacagcgcctggcatttcgttccatcccccatcttgtacggatccttgggagattctaggctccatctgatctcgctgcattttgttcttttcctccagtccgaggcgcaatagataagttcgtgtctgtagttgctaccatttctctactctctacgtatgtaatttattcgcgggaatatttgttgaaatgttggtacggacgacagaaaaacaaagggagaatcaggggttgttggattggattgtagcctgcgccaccatattttaacttcaaatccgttgggatatgcttctttttcgggtctctttgtttccttcctccttttgctggagccactgactttgatgtctcaccaccatttcttcattgcattcccttttctctcaacttgaggcatccttgtgtacacaagatctgcctacgtgtttcaggttcttgattctgtttatatgcagtcggaagctttaggcggttaggcccagctgattgntgttgtgttgtttcttgtaggcattcccttttctccttgaggcatccttgtgtacacaagatctgcctacgtgtttcagctgatctaagccaggcgcaactgtgaaacaatggcgacatccaagaaggatccccccaatcctagcagaggcaggacgtcacccaacctcatgtcgtccagcagtgagtcctctgggcacggatatggtgctaggcgggctcggtctgtaccgagttccgcgcaccgcaaatttggctcatcgtcgccgtctgtgtctgcctctggctccacagacgtgcatcattcatcattgttcaacgctggtaggtccatctcatcacggaccatgggctcttccatccagggcaccaaggcccagccattcccatctgcagcctcaaaacctacactggcaaaggagaaatccgacaaggtcagcaccaccttgcagcggcctccagtgcttgctgtgccggcagctaaggcatcgccatccaccttgccgaggagtaagccatctccaaggcctagttctgacagttgcaaagcggcagcatcactgaaacctagcagtcagagggtcatgttgccaggtgctgctcaaggagacaaagttcagccactgtctaccgcacagtcacctggtgcagctgcaaggaagagattggatactgttaatggtgctactaccaactcaaaggctaaaagtgtttctcagaaggcaatgggggcatcttcagccaggaaggagaaacataaggacccatcaatgcagattaagggaactgagtgcataaacaccaccacgtctatagaagagcacttgcacaaggagctccccgacccagttgatctgaaatccatggagatgactgtacctgatcagcatgagccatctttcaatgaaccagaacatgtactcaaagacgatgagaaatccgagggtcatttctctgaagagaaagtagatgcaggagctaatgagattcataatggagggcaagatgacaatggtggtgtcaagactatatatgaatgtgggattgttgagaagaaggctgaccggagtgtggataagacagtgccgaagactgaagtggctcaggtatggaggaaggatgatccaaagggcaatgacgtgattgaggaaaccaaaagcaagctcctgctggagaggaagagccgggtgaaggccttggtnnnnncctttgaaactgtattgtcgttcaaggagtagtcctcaatcttgtcttatggtctcttgtgcccatctcaatattgagtaatatatatgatgacttccttggctcgttgtactctatatcgtatttccnnnnnctgaatcatcgttgcattcgatgtggatttgtctatttgttgctctttattgatgtagaattaaattaaattccggtgcttatggcgagaacatttgaattctgtgaggaatattcttacttgc

SEQ ID NO: 48987 - DNA, 217 bp, Zea mays
  unsure (1)..(217): unsure at all n locations
  Clone ID: MRT4577_144682C.1
agtgtgcagtcgagtctcagcaaggaagatgtatgggaggggaaagaagcgttacgggggtagatgcagaggcgaatccgaggctaagcgtaaggatgggatggatgatggctctgcgaattcgctgaagaatgtaacgtcttacatgagatatatagtaanaagaaggtatacgttaggagatggaaaggtatggtcttgctggagttatgtgagt

SEQ ID NO: 48988 - DNA, 457 bp, Zea mays
  Clone ID: MRT4577_144683C.1
ttcccccccaccctaacctaggctcctatacaccagacccccctccctttttttttttttttgaaactttttcacttacagccaattccccaacccgagacaatatgcagggagggtacaatttcggttttatttggcacatgatacgtcaatgccaacacagaacaaaattcaaaacacgaagccctctctctcccacaatgacaacaaagaggttgacctggcttgcgacattgcagatcagtacaccactccttccacacgacccctccaccatatcccacttgcgccaaaaaactgcgcaacaggccccccgcctatccggcggacctggtatccgcgcgccccgatgatacaacaaaccagccgtatgtccatgcgcatgatggcgacccccggacccccttctccacaaaagtccatgacctcaaacaagccgacgaggtaggccaatttg

SEQ ID NO: 48989 - DNA, 213 bp, Zea mays
  Clone ID: MRT4577_144684C.1
tatctcgatattgctgtgccctcttctgtatcgggtactgaggaagttgtcttgggaacccaggacgtctttaaaacccaatttgttgaattggcacccgtcagttagctttaaatccctcccagggagcaagtaagttttctttcccttcctcagctaagggtagagctatccgttggaagattaacaaaaatctgcttgcggatagctttt

SEQ ID NO: 48990 - DNA, 248 bp, Zea mays
  unsure (1)..(248): unsure at all n locations
  Clone ID: MRT4577_144685C.1
aaaaaaagnaagaaaaaaaaaaaagaggagaaaaacgaatgggtacctcgaggcggccgggaaaccccgtctccaaccccactacgggcttccccccatggctcccctggactcccttcctctcccgcccagcactgccgacaccgctcgcttcctcgccgaccccgccatcccggcgatcagcccatcgcgacccgcgactggcgctcctctcatccgcctccgcaggcgcgcttccctccacgcct

SEQ ID NO: 48991 - DNA, 1820 bp, Zea mays
  Clone ID: MRT4577_144686C.1
acgaccaattgaaattaaaccatttttatttctcttgattacaatcattctaaaatgcattattaacactgctccaggtcaaggagctggagaatacaaaggatgcagaactcccgtcaaagaggcaacatgtcaaatgttgacaccataaaagaatttgaatcacttgcttttgatggacataattttcccacatggtcaatagatctcaaagtcagtctctctttacaaatttttttgggaggtcattgttcaacggtaatagggtactcagtacccaacaataaaaccaagtacatcatacgcctcatatatataccacagacctagccttcacgtgtttttttttggatcgctctccaacaacggtatgaacaacaacagctacacatgaatggaaccatcttcgcctacaagacttcaagtctgtagggggatacaatcatgcactttataaactttgtgcaaaactcaaaagttatggaaaagaaccaactgatgcatatagaatagataagacttcttctacattgacgacaactgtgtacagaatccttcctcgttaataccatgagaaaaattttaaagtatattctgagtttaattaatagtctattttaagccgaagggcacaataagatctttgtttggaacacaaataaactttccttgaacgttgccctgttactttaagtatatgccaacacttagaacataaacaacaaggattgtacaaataagcaacccgactctaccgcataaacaagatttaatggacaaacaagatgcttgtggagttttcctccaacatatttggagatctcagttagactctcatagtccttggtcacagatacttgagtccagtcaaaataatatttagggttaataatgtgtgttataaattatatagcagtcttgtaaatatttgtggctagcttgctatatcacagttattcgttctctagacattgagaaagatccattcagtcaaggggatgatgaagaagagacactaggacctttagttttatatcttagtgttgttggagcacttatatttgtaaatatctgtggctttgtaatttttttatatggaggcacgaccatctattatctattggaaattttctaataaacagactattgtaacaaccgctatgtattattccaaaaatgatgcactatatgaaacataacgtgaatgtgtattgcttcgcaaaaaatgattaatcacatacaccaatttagtggaattggttcccaccaaatcatccacgattaactgcgaagataatgctgcttgtattacatagatggagacaggctatataaaaaaagaacagtataactaaaacatatttctctaagttgctgtgtcctcatgaatcacaaccgactagagaaatcagcttacaaacaaacgaagtctttgtgataattttaaaaacaaaagtatgaaaacaatagaattgaaagttcaaccattctctttttctttctcccgattacagccgaaaaacacacgtctcaagccgtcgctccacacccacaccgatgattgatctaatctacccatccatccatggatcgatctgtcatgcatcaattaataggtcgggacaaggcaacaagggagggccactgacaggcaggcaggcaggcctgtagcccccgcagcgagaggcggtgacaggtaggccggccggccggccggtgcatacatgatgcatgcgggagtgggacccaccaatcagacccatgaggctcgtccccggcctctccagtcccctcccccctctctgcagatctgggcatct

SEQ ID NO: 48992 - DNA, 787 bp, Zea mays
  Clone ID: MRT4577_144687C.1
aattctatatccgaatagatatcgtgtcttcgtactcgtctagctgcgcggcttaaacctttcccgcttctatgaattcctgtgcgtcggccgccgctccacccggacgacgacagcgtgagggagtgcatttccatccacatcggccacgcccgcatccactccctaaacttgtgctgggagctgtactgccttgagcatggcattcacgctgacatgccagatgcccggcgacaagaccattgtcgggaggtgatgatgctttcaacaccttcttcactgacactggagctgggaatcacgtgccccgtgctgtttgtgctgaccttgaacccactgccgtcgatgacgtgacaactggtacctaccgacagctcttccaccctgagcaactcactcgaggggaaggaggatgcagccaacaactttgcccgtggacactacaccattgtcaacgagattgttgaccatgtgcctcagatcgcatcaggaagcttgccgacaactgaactggactacaaagcttcctcctcttcaacgctgtagtggcaccaacagattctgggcttggatccctcctcctagagcgcctgtctggacactacagcaagaaatccaagttggggttcactgcgtaccctatcccccaaatatctacttctgtacctgagccatacaacgaggcactgaccacccagtacctcctcaaggacgctgatgtcgctatactgttggacaatgatgtcatgtacgacatctgcctccgatcccttgaattgagcgccca

SEQ ID NO: 48993 - DNA, 746 bp, Zea mays
  Clone ID: MRT4577_144688C.1
ggcctacctgtcaccgcctctcgcctgcctgcctgttttggccctcccttgttgccttgtcccgacctattaattgatgcatgacagatcgatccatggatggatgggtagatcaatcatcggtgtgggcgtggagcgacggcttgagacgtgtctgttttcggctgtaatcgggagaaagaaaaagagaaacgttgaactttcaattctattgttttcatactttgtttttaaaaattagcacaaagacttcgtttgtaagatcgaggctgatttctctagttatactgttcttttttatatagcctgtctccatctatgtaatacaagcagcattatcttcgcagttaatcgttgatgatttggtgggaatcaattccactaagggtttgtttggttagctctcaatctatgtggattgggtgggattgtatgagtttgaatctcaaacaagtcaaactttttcttaattttttctaatcccgtccaatccatgtgtattgagaataaccgaacaaagcctaaattggtgtatgtgattaatcattttttgcgaagcaatacacattcacgtcacatttcatatagtgcatcatttttggaataatacatagcggttgttacaagagtctgtttagaaaacttccaatagatggtagcgcctccatataaaaaaaattacaaagccccaaatatttacaaatataagtgctcccacactaagatataaaactaaaggtcctagc

SEQ ID NO: 48994 - DNA, 826 bp, Zea mays
  Clone ID: MRT4577_144689C.1
ctagaactagtcggcctctcactcccatcctcccgcgcttagaaaaccagggccaccaagggctgtggcgtgccattcagtccggccacgcactcaagcaatcatcgttctttcgaaacgcaacagcaagaagaacaaccacgcacatcgccgttccatcgattcatgggtcgcctcggcaccgcgacgacgctggtggccctcgcggcctgcctcctctactgctctgcttcgtcggcgacgctggcctacgccggcgctgcgccgacggaccttggggcgcttgcggccgacgtgcgacgggacgcttgggcagtgcgcggtggggagcgactaggagcatgaggtgggcggcagcgacgcgttcctgcggcgggcgttggcgcagcggcagcccaccaaccggtacatcagctacgcggcgctgcgcgcggatcaggtgccgtgcaaccagcgcggccgctcctactacagcaactgcgcgtcgcagaagcccgccaacccctaccgccgcggatgctccgccatcacccgatgcgcacgcaacaccaactgacccatccgatttatcattcctagctaaattctcatccatgacggttgacggcgtgaccgcatgatttgaggattatttataaatatatttgcatccaagagatccagccatggcagatgcggatccatccattcacgtgcaggtccatcgaaaggtagaggaggaagacagggaacatgtccaagcagtgttgtttggattgacatggatgtttccacttttttgtgttaatttatctttttgtgataaaaaaaaaagtcgacgcggccg

SEQ ID NO: 48995 - DNA, 157 bp, Zea mays
  Clone ID: MRT4577_14468C.1
tgtatattaaggggaagcttttgccaagttgtggtcttcaaatttatgtttactcttcctattggcagaataggtgctatttaagagtaaaccaaaggataagcagagggagtccctataaccaaagatcaacagcatagccctggatagccagata

SEQ ID NO: 48996 - DNA, 356 bp, Zea mays
  unsure (1)..(356): unsure at all n locations
  Clone ID: MRT4577_144690C.1
cccagcgtccgggcgttggcaacccatccaggctcgtacgagtcgcatttcccgtcacagctggccaccgccccacctcacggcctcacctactcccgctacacgcacgcgcccacctacccaaaagaccgcgcgcggagccctcctcccgcggtgccaccaccaccaccacctcatggggggggggggggggggttactaaaaataaatatttcccgacttgagtatagggagagggaatggtaatagacgcgggtgtagttttttaatagaggtggaggggggatcggaatgacgggngttattggggtgggttacaagtggtttgaggtggttattaagtggggggaggggag

SEQ ID NO: 48997 - DNA, 602 bp, Zea mays
  Clone ID: MRT4577_144691C.1
aagctcattagtattccattgacaaaaagatagcgcgcgagtcacaacgggaaagagctcgacgcggcaaagcatgcaaaggcacgatcgatgatattgctatacatgacgcggagacgtacgatggctacatggggggggttgggaatggccgagtccgcgcagagctccaaatcaacggccaccaggacgagctgggacaatcgaacccgacgatatccgctagccggagcgctgggaagctcaacagacgcggccaagaaaattggcgagcgtacgcgggacgaccgacgcgaccaaccagaaagagcttctggaacgcggtcaggactagagacggaaacgcggctagagacccaagcatccgagaccgacgaacggcgacgcaaggagcaaggcgagctctacagcatcggcaacggcacaacatcgacaagaacactatgcgcagccatggcgactttggcgagctgggcgacggcgtgtagacaccagagaactcgacggcggcgaccagggcgagcgcagcagggagccggccacggcgagcagcaggagcgagggagcatcgcggcaatggaagagaggggaacgccggccat

SEQ ID NO: 48998 - DNA, 368 bp, Zea mays
  unsure (1)..(368): unsure at all n locations
  Clone ID: MRT4577_144692C.1
agtatcccatctttagccatgttcatgcagttctgatggttttttctgccacatctcggttgtntngagaggacgtaggtagggtggagatatgataggataacttaaatttgnattaaatttagaatttaagttatgttagtaataatggggttgaaaagacatattaacaaagaaagatcatattaaaagttgatgttacatttgcagatataggacgtaggaggttttctataaattagaaaatgtgtaagagcattttgaagtcaattgttttgttactagtgatgtaatggagaaacagagttttgtgtgtgtgtacaatcaagtaaaatgtggacacaaaatttttttagatgagaagataa

SEQ ID NO: 48999 - DNA, 296 bp, Zea mays
  Clone ID: MRT4577_144693C.1
ccgcgagtcacaggcgcgtctatctcagcttgctgcactgcagtaccctgccgtgccatcatatggtgcgtgagcccggccgagcgagagcagaggagaggcgtggctgctccgaagctcgcgacgctggcgctggccgtgctcgtggcggcgaccgtggtgactcccccggccgcggtgcgcgcagcgagtgtcgtgttccgccgtgtacagcacgctgatgccgtgcgtgccgttcgtccagatgggcagggccgtgccgccccaggcgtgctgctgcgggatcgggagcctgg

SEQ ID NO: 49000 - DNA, 260 bp, Zea mays
  Clone ID: MRT4577_144694C.1
ggccgggctcagttgtacttacatgcagtcaccactcccaagccagtaccgagtcctacgagcagtcgcacgcaagtgtcaagagacgaaacggtcgacatgggtcgcacccaatctgccagagcgtgcgccgtggagtcagaggcgctgctgctggcaccggaggatacgagctcggaggacgccatctcctgcgcgccggtgaactcccacatcgcgccctgcccctactactaacccagaacggcttccaccccctc

SEQ ID NO: 49001 - DNA, 491 bp, Zea mays
  Clone ID: MRT4577_144695C.1
ctccgaggcaaattggaattcttacacaatgcatcaaaagatagcttatagtggacaacatgggtttggaccttacggcatgggcttaaaagataggctggggttgtatcaatcttcatctggttagcttatagtggacaacatgggtttggaccttacggcatgggcttagaagataggctggggttgtatcaatcttcatctggtacattaagtcatgacatccaaatgagtgatgagcatagcggaggtgtgaagaagaggaaaggagtggaggactgtgtcacattgttgcctaatgcatgtgatcaacaaacagaaggttcatctcagccagaaaggaattcaatggaggaggggaacagaaagatttcgcccaaaatacaaagcaaggaagattcttcttatggtgatggtactaaagagtgatatgtttcatattcgggcaatgcgaggtcaaaccactaacaaccacagttttttaaaaagac

SEQ ID NO: 49002 - DNA, 284 bp, Zea mays
  Clone ID: MRT4577_144696C.1
acagagatgacaatgtcgcaaaacacaagcagcagtcccttcagataatgggatgattcttcctggggcgggtggtgtgtggcttatattgcaggaaacaagcggccatgatgcagcgagtatttgtgatcttcgatcggatctcccatgatccatgctacaagggcgctgggtgggaccacatgcacgggaatccgcgtatcggacccaaaggcttctacgcgggagttgctcaaagggcagggaagcgcctggtgcttgacgattatgctctgttgcacgac

SEQ ID NO: 49003 - DNA, 487 bp, Zea mays
  Clone ID: MRT4577_144697C.1
catttttgttttattatgcgacgacatttgctggcgttggatataacgtaagatcaggcaacaaactggtcggctacattacattcctcgtgaggggtcatgcatactaaaaaaaactgtcggctatttaggttgggttgcctgaatagtttgtgcagctcactcgaaaaatgcacaaagtacaccgccacgaggcctgaggaatccatggttgcagggggggcgactctagatggcccgactgggctgtgaggactaaaacgactgcttggctaaggaaaaacacacacactgaccgatggtgggagttgtggtttgataagaaacaccttatcttatctaatctttgccacttactaatccacctctgtatctgacctagtagtggtggcctacgagttggggatgtctcacaaactagtccgagtgctgtgactactagattgcttgggagagctggcctcctcattatgatactgatgcagct

SEQ ID NO: 49004 - DNA, 199 bp, Zea mays
  Clone ID: MRT4577_144698C.1
cctctatagcggtcgccccctccttaataattccccccggcggaacacccacaagggggggccttttgaaaacaaatcgggaacttcaaaaatgcaagcggcattaagctacatgccaggcataggcaacgcgggagggagcaaagatacaacacgcaccagcatggttaggacagactaaaaaacaagcgcgaccagc

SEQ ID NO: 49005 - DNA, 422 bp, Zea mays
  Clone ID: MRT4577_144699C.1
gccggcccggtcccgaaaaaccgagcgagaccattaatcactcactctactactctaagctactaccaacagcttgcttcaagaatagaacagagcgagaggaggcatactgctaagtccgcgtctcatggcctgttcctcctggcgatggccgccgtgctcgccgctggcacgcgcggacctagacgtacccacaactgcgacgaccaacgagaacgagctgtgcacaacctgggctacacgacggaaacctgcacaatacgatgcgctggctcactcctgcgtcgctgctgcgcagtatacctgacacgtctgagcccacatcatacacactcatgtcgcttgagctgttgcacgaagccactgctcttacatgactgcgcccagcgacaactacactgcctctcgagagcttctgctta

SEQ ID NO: 49006 - DNA, 551 bp, Zea mays
  Clone ID: MRT4577_14469C.1
aaaaaaaaaaaaaaaaaaaaaaaaaaaaaaaaaaaaaaaataaaaaaaaaaaaaaaaaaaaaaaaatttttttttcttcggccaccacccccttgggggatttttctgatttttttcttcctgggggcggctgttccatctttcttttgggggcccttttcccccttttggggggtgttttaattatttggtggccgttttttaacaccgtggttggtgaaaaacccctgttgcccccctttttaatctttttgcagatcctccttttttcacctggtgggttattaaaaaagacccccccactggtcctttttaccaatttttcagcctccttgttgaataaaggcccccccttgtgggggtttattaaccgcgggggtgggggtgtttcccagcggggccccttttatttttgccacccccttacccccccctttttttgttttctttcctttttttgccaccttggtcggcttttttccccaaaattttttaaaaggggggctcctttgggggctcctttttggttttttgcggctcctcccccaaaa

SEQ ID NO: 49007 - DNA, 559 bp, Zea mays
  Clone ID: MRT4577_1446C.1
ttttgctgttaggagctgcattgcggtcgacgcgcaaggcagtcccgggtgagggtgatggccaagaaagtgtacatgtgatgccgagctagagaacgagaagtgggatggaccgcgcacacgggagagcgtgcatgcgttttacttctgcgcggcaatgcgggcctgcaggcgcaggttcttctcgagcgggccgtggttgttgatgtactgcaggtagcagccgtccttgaggatgcggttgtcggccttggcctgctggtactcggagcgcatcatgttggtgaagccgtggcgcttcgagatgatgatcttctggcggccagcgaacttgtagcgcgagcggcgcagcgcctcgatgacgacagcgcggttcgagtcacgcgtgcgcaccgacaggaggacctggccgatgtcgacacgggcgtccgtgtcgtacggcttgccgtaggcgccacgcacaccggtctgaagtctatcagcaccggcgcagaccagaatcttgttcataagaatacatcgaatgactgaaacagcacgcacccgaagcgggcactac

SEQ ID NO: 49008 - DNA, 597 bp, Zea mays
  unsure (1)..(597): unsure at all n locations
  Clone ID: MRT4577_144700C.1
gcacgttcaacaacaaaaacaacagcaaaaaattccaatctctctcacacaatgatatgataagaaccaaattaaagaactaaagaggaaaagaaagtgaagcaaaaggaggaactctctctcgtcttaatttcactcatgaccttgtggcgatcttagtttctctgggtttgttgttattagcttctctctgatcaaacgtatgtgtgcacgtacatatgccaatggatcgacgacgatcgattagattaccctctgttgtttccttgttgctcaaacgacgagctcactgctgacgacgaggaattggcagaccagtccagcatgtcgaacagtggatccaggtccttggacgtcatcgctaatttctcctggtgcccacgatggtcaccaccgccccccctcgcctccgcccccatgtactctctggagaagattaggctcatgggatccgactccagctccgcgaggtcggagaagaagtcgtcagatgagtggccgccggcctccgggatcatcatcggcttgtagctctcacagctgaacacctggtccatgagctcgatactgnggtctactgctgctgctgctgtatcc

SEQ ID NO: 49009 - DNA, 692 bp, Zea mays
  unsure (1)..(692): unsure at all n locations
  Clone ID: MRT4577_144701C.1
cgcggaccggcacgccctattttttcttcttttttattttgttgtttttttttgttttgatattttataaattttttttgtgtttatttttgtgtttagaaattttgtatttttctatttatttaacacgagnataaataaagaatagaggggttatggtccacaaggaggtgggtaagtgttgaagggaatttaacaatactccaagctgcggggagaggaaaggaatagatagcaatgtctggggaatgggtgatcggtgctgaatttaaccttgaggcacagtattagnaagtccagtttgcggcaagctatggggttgagggcatggtgnngttatccagaacgttaagttcatggaaaaattcggaaagttttatggcatggggctcctgggaaaaatgcannacccttcgctaaaaccttggcaaggggagggggcatggcactctatatatagggcagaaacaggcactcnncgtaaccgtttaatcttgggagtaggggcatcaaanagggaagnnaaattgaaaagntattttaaggcaaatttaattaagggatcttaacctggnatanntatagaagtaattacaaatggagggaggttcactnaattcaatgcagggcactggttggatggcagggagccacaagggtagtaagtgggagcctcaagggaaatacaccca

SEQ ID NO: 49010 - DNA, 337 bp, Zea mays
  Clone ID: MRT4577_144702C.1
tgaatccatgatggaggcttccatgaaccatatggatctccaagtaccagcaaacaatgcagttagccaaggcttttctttactctatcatcatgaaatgaaatgaaatgagaagggttttttaaatttttcttgttgtttttcagttcactacccattcaaaatgcatcgcctctaaagtatggctgcttaatccaattctgctcttgtttagggttcctagattactccaacagcttttgccgtaccagttctgggtgggggggatctctacaccccccatgcaaacgctccttttcacccctcacatccaccactgaaggcccacgaaaacata

SEQ ID NO: 49011 - DNA, 473 bp, Zea mays
  Clone ID: MRT4577_144703C.1
cccacgcgtccgcccacgcgtccgagcgtagcgtccgaaagaacggctttgcgcaaggcaaatcaccacccagctcacctcggcgatggcatcggcgggggacgcggagtggcaggcggcggtgcggaaggtgctggtggcgctcaagctatgttccgggctacctaccggctgccgagggtgcctctacgtgctcatgtacctgcgtatgtcgcacgttcacttcgacatccacgtcgacacctcctttcacattgcctatcacataccatatgttggatttggtgatagcatcgctatcagcagcgagataggatgcgtaatggattatatcatggatgagaaaatcgctgactagaactcaattcactcaaatattgcattcaccactgtgctagatacaaaggccatggttgcttactgtcttgctaatgctctgctggatgaactgtgtgtgaggagtgctggaagca

SEQ ID NO: 49012 - DNA, 176 bp, Zea mays
  Clone ID: MRT4577_144704C.1
gacaagcgcgccgaagcggcgtacgcagcgtacgtggcgcggggcctggcgtacctccacgggcggacggtcgtgcacggagacttcaaggcgcggaacgtcgtggtgggcgccgacggccgtgccaagctagattttctttaggtgcgcccgggcggtgggctccgggcgccccg

SEQ ID NO: 49013 - DNA, 184 bp, Zea mays
  unsure (1)..(184): unsure at all n locations
  Clone ID: MRT4577_144705C.1
ccttcccccagcttgggacttgccgcttgcttgaaacaccgtgctgggtaacaggtttcagccacanggaacgggtagagcaccagcnccaccccactagaaaggaaccggttgcttatggagaacttctccgaannaaaccctgagtaaagggccccttttnttnacaaacgggagggccttg

SEQ ID NO: 49014 - DNA, 926 bp, Zea mays
  Clone ID: MRT4577_144706C.1
ccggccgggcttccggtcgccttcgcgctgctgctcgtgcggcagcggttcacggccttctcggtgaacgccgtggcgctgctcagcgccggcgccgccatgctcgggatgaacgccggcggggaccgccccgcgggcgtgtcgccggcgcagtacggcgccggcttcgccatgacgctcggcgccgccgcgctctacggcctcctgctccccgccatggagctcagccaggcccaggcgcgcgccggtactgccgcggctgtcacctacacgctcgtcatcgagatgcagctcgtcatcggcctcaccgccaccgtcttcagcgccgtcggcatgctcgccaaccatgatttgcacgcaatccccggagaggcgcgggagttcgatctcggccggtcaggctactacctactgctggccgggtcagccgccacgtaccagtgcttcttcctcggcaccatcggcgccgtcttctttggctcggcgctgctcgccggagtggtcatgaccgtgcttatcccggtcactgaggtgctcgccgtcgtgttcttccacgagccgttcaacggcaccaagggcgtcgccctcgcgctctcgctctggggcttcgtctcctacttctacggggaggttcaaacatccaaggcgcaccaccacctgcctgacaagccaacaaatgtcgagcgtttggacccatagatgatggtgatatggcgttccccgggagtaagttttcaccccgtatttgaggaataagcaagccatatcaaatcatattatacaacaatctatatagggggagtatggattttcttgtacagtctaatgtctcccatgcatggacctatagagcatactatgtatatacgttggtgtatatgtacttaaacaaacttgaccatgcaaaggtaagattaatcccttag

SEQ ID NO: 49015 - DNA, 225 bp, Zea mays
  Clone ID: MRT4577_144707C.1
gcggcgcgttcaaatcccacaatcttctatgtagcacaccaatgtcttcgtccaactcggcggcgatgtctgggcacagcaaaggcggcaacgggctgggcaagggcggcgcgaaacgccaccgtaaggatctccgcgacaacatccagggtatcacgcagccggcaatccggaggctagcgaggatgggcggcgtgaagcgtatctccgggcttatctacgaag

SEQ ID NO: 49016 - DNA, 1505 bp, Zea mays
  Clone ID: MRT4577_144708C.1
ttgggtacctcgaggccggccgggttttcctccattttctctacttttcttctcttttctctcgctctctctctctctctctctgatttcttctcttaactctcgcgtctcgcgtccttttcccttcctcccctccgttgcgtccctccgtccgtccgtccgtcgtcaccagcctcctccctcgcgcccaccgccgggatccgtccctcctcgtctgcgcccgcctcggtctagatttctgagaaaatggcgagaagtgcgggaactaggaggcgtgtggctcgccagctcaagtccacacatcccattccttcataccgatggaagtcaaagcccatgaaaaagccgatgaaaaaatccaaccgaaagcaagtgttgccaaccttgcaaaagatggactgggaagatgccaattgctctgtgtgcatggaatacccacataatgctgtgctcatcctttgctcatcccatgataagggttgtcgtccttatatgtgtggaactagctaccgccactctaattgcttggatcagttcaagaaagcttacaccaagggggcattgcttgaggaagttcctgcaaatagtgttggctctaatctggattcggcgccattggctgcagaaaaaactgactccattgaccttgcatgtccattgtgtcgtggcaaggtgaaagggtggacggtggtggaaccagctcgaagctacctcaatggaaaacgaagaacatgcatgcaggatggttgctcatttgtggggacctacaaggagctccgcaagcatgtcaagttggaacaccctcttgcaaagccaagggaagttgatcctgtccttgagcaaaaatggagattgctcgagattgaaagagagcggcaagatgcgctcagtacgatcactgcaacaatgggcagagccgttgtttttggtgattatgtgctagacttggaggatggaatggactccgaggatgttgacagtgatgctgataatgatggccgtgggacagaaaacactcgtaggatgctactatttattatgcgccaagttgctcaacatcaccaaaaccaaaggctccagaatgcgactggtgcatctgacaatgctgaggacaattatgtggtgagcagtggtgccaatggaaccacaccatactcttaccccttggagggggaggacgagaatggtatggttgtggccggaggcagaagcactgatgtgctgagaccagagaggaggcgccgtcgtcgccgcaggaaccgtgggagattgtttttaggtgctaattgagaggacaggtggccaggtagggtttagccgccagaggagtacatacagaaatgcttccctggtgcctggcattcatcaattcctgtctcaatttacttgatcatgatcatgtaccaagtagttatcttaacatcagctcattgtcataaatttatggtatctcacattcttcgttgaaaaaggaaaacaccgcatccatctcttgcggtttgtgt

SEQ ID NO: 49017 - DNA, 399 bp, Zea mays
  unsure (1)..(399): unsure at all n locations
  Clone ID: MRT4577_144709C.1
tgggaccctcgagggtgccggaacactccccaatccgtcccgtcggccggacgagcaggggcgccaagggcgccacctgaccatggcgacggcgactgccgcccccgtgcccgccggggggcacccgtaccgccgcgcccgcactcgctgcgggccaccgcgcctgcgccgcctgcgcttcccgggcgcancagcagccgcgtcgtgttccctgcgcgcgccgtgcggcatgctgcgaccgcggccanatggaggcgggcggctgggggcggagctggggtgcgcgttcaacgagctcacggggcggatgggggaggacctggcgacntcctcctcngcgagcgctgcgcttccgtgtgcggaagcgtgggctccccgcgctccgggaggggggggggg

SEQ ID NO: 49018 - DNA, 289 bp, Zea mays
  Clone ID: MRT4577_14470C.1
cggcacagcatgcgggggttgctggtgttgagtgtcctgttcggggctgtctttggcaaggaggactttgtggggcctcaggtgctccgaatctctgtagccgatgaggcccaggtacggaaggtgaaggagctggaggacctggagcacctgcagctggacttctggcggggccctgcccaccctggctcccccatcgacgtccgagtgcccttccccagcatccaggcggtcaagatctttctggagtcccacggcatcagctatgagacgatgatcgaggacgtgc

SEQ ID NO: 49019 - DNA, 2075 bp, Zea mays
  Clone ID: MRT4577_144710C.1
cctcgaggccggccggaaatagggtacctcgaggccggccgggctctctgttgaaacctctcctcactcaccccgtccgacgtccttcgtcaccagcctccttcctcgcgccgaccgccgggatccggcgcccccgtctacgcccgcctcggtctagatctctgagaaaatggcgagaagtgcgagagctaggaggcatgtggctcatcggatcaagtccacccatcccattccttcataccgatggaaggcaaaggcaatgaaaaaatccaaccgaaagcaagtgttgccagccttgcaaaagatggactgggaagatgccaattgctctgtgtgcatggaatacccacataatgctgtgctcatcctctgttcatcccacgataagggctgccgtccttacatgtgtggaactagctaccgccactcgaattgcttggatcagttcaagaaagcatacaccaagggggcattgcttgaggaagttcctgcaaatagcgttggcactgatctggattcagcgccattggatgcagaaaaaatcgagtccattgaccttgcatgtccattgtgtcgtggcaaggtgaaagggtggacagtggtagaaccagctcgaagctacctcaatgggaaaaagagaacatgcatgcaagacggttgctcattcgtggggacctacaaggagctccgcaagcatgtcaagttggaacaccctcttgcaaagccaagggaagttgatcctgtccttgagcaaaaatggagattgctcgagattgaaagagagcgacaagatgcactcagtacgatcactgcaacaatgggcagagctgttgttcttggtgattatgtgctagacttggaggatggagtggatttggaggatgttgacagcgatgttgatgttgatgatgaccgtgggacagaaaacactcgaaggatgctactttttattatgcggcaagttgctcaacatcatcaacaccaaaggcttcataatgtgaccggtgcatctgagaatgtcgaggacaactatgtggtgaacaatggtgccaatggaaccaccccatactcctatcccttggaaggggaggacgagaatgatatggttttggccggaggtagaagcaccgatgtgctcagaccagagaggaggcgccgtcgacgccgcaggaaccgtggaaggttgtttttaggtgctaattgagaggacaggtggcctggtggggtttaaccacctgaggagtacatacacaatgcttccctggtgcctgacattcatcaatttcggcctcaatttacttgttcatgatcacgtaccaagtagttatgttaacatcagctcattgcttgccatcaatgtatgttctctcacatttctttgctgaaaaggaaaatgccgcatccggagtacatacagaaatgcttccctggtgcctggcattcatcaattcctgcctcaatttacttgatcatgatcatgtaccaagtagttatcttaacatcagctcattgtcataaatttatgttatctcacattcttcgttgaaaaaaaaaaaaaactatttattatgcgccaagttgctcaacatcaccaaaaccaaaggctccagaatgcgactggtgcatctgacaatgctgaggacaattatgtggtgagcagtggtgccaatggaaccacaccatactcttaccccttggagggggaggacgagaatggtatggttgtggccggaggcagaagcactgatgtgctgagaccagagaggaggcgccgtcgtcgccgcaggaaccgtgggagattgtttttaggtgctaattgagaggacaggtggccaggtagggtttagccgccagaggagtacatacagaaatgcttccctggtgcctggcattcatcaattcctgcctcaatttacttgatcatgatcatgtaccaagtagttatcttaacatcagctcattgtcataaatttatgttatctcacattcttcgttgaaaaaggaaaacaccgcatccatctcttgcggtttgtgtagcaaaaaaaaaaaaaaaaaacccgcggccaaaagggggg

SEQ ID NO: 49020 - DNA, 388 bp, Zea mays
  Clone ID: MRT4577_144711C.1
aaaaaagctaatctcagggcccattttagcgaggggttttttcccaaatggttccaggaagggaagcaaaagggcaaaacttgtccagactcagcttgaacctggggacccaaaggccccccccctccacattttttttggggatacccaagcggcacccctccttgaaaagcggggggaaaaaacccctttactgggtcttgaacatgggggggatcaggtcgaccacccggttgctgtacccccactctttgtcgtcccacaagaccagcttgacaaaatggtcgttaaaagggatcccggccttggcgtaaaaaatgctcgacctggtgtccccaagggaggtgggtgaaaccaattcctccttcgaataacccatgataccctt

SEQ ID NO: 49021 - DNA, 237 bp, Zea mays
  Clone ID: MRT4577_144712C.1
gcttgtttttcctcatctcacggggctacgattatgactaaccgtccagtgattttgttttatgacactggaccaatcttgtgtacatatatgatcaagggatagtcgtgtgtcaatgctctacatatcatgctaacattgattcgccgtgttacaagactatctttgcactgagcaatatgaagcgacacactatatattctgttacagcacacattgtgacgggggcgagtcgct

SEQ ID NO: 49022 - DNA, 421 bp, Zea mays
  Clone ID: MRT4577_144713C.1
ctacgggctggtcctcccctaaagtggaaaggcgcgcagagcgcacaatagcgactccgtgagggtcccttgcttccagttcttgatgacttcataccggctgaataagaaccaccggttggtctactttgttttcagggccggaaggcatgacatctaccggcactaccacgagcggctgatgtatctgggggagacgggctggcttatccgttgcttacaacccgctgaggaacggatccttcgtgctacctgacaacccgcccatgcgcaaggtacattcctttatacacggagttgttgcgggtggctcaacaaggggctagccgccaactacccccttgagatgtgacagctctccgtacagcgacagggtttccctttgatgtccatttaaatgaaaacatgacctgggctggac

SEQ ID NO: 49023 - DNA, 632 bp, Zea mays
  Clone ID: MRT4577_144714C.1
cctcgagtttttttttttttttttttttttttttttttttttttttttttcttcatggaaacctgggggttaaacctaccaatggtaatttttttccctccaacaaagctggaggcggcttttaactcttaacacgtcaatgggccccagggggattatcctatctcataacaactaagtttctaaaatgaacaaatggggggcggtgggggaaaccccaaagcgccccggaattaagggccctctccttagtttttgggactttgtttttcttacctagtccgggtcctgcctttcaaagggggctcaaaagggcccaaaactttggttgctccttcttgtggagaaaaggacccacaggcggcctgatggtacggaaaataacactttaagtttatgactccaaacccccacaacacttgaacctttgctggaaatagaccccttggaaggttaacccagcccccaaaattagggggttttttttccctacttaaaaactagaactggtcctttgcactaaagctattcccgttccaggattgattcccgattttttttcgggatctttatcgaactttttttaaaggacaaccttttaagcgtggacacgagttccgtacccattcttg

SEQ ID NO: 49024 - DNA, 276 bp, Zea mays
  Clone ID: MRT4577_144715C.1
acaaagtttgctatgccaaaaattttggccccacgggtattgggtttggaggccttacacaacaagtggaaaagaacgaatgaagagatgcgccgtttctcagattttttgcgagcctaaaacacttgccaagtaatcctgcacagatcgatacctttccccaaatagcctctcctttgtagtcgtacattatgtgtttctcctcagaagtgatcaggtctttactgaatgttagaagaggcctttggaagaaaattatgtaaagtttaatctata

SEQ ID NO: 49025 - DNA, 434 bp, Zea mays
  Clone ID: MRT4577_144716C.1
caggggggggtttttttggaaaccggtccggttcctaccccgggggggggggccccaaatgttttctccaaagaacggggatccaagccctggtttttcagccgggaacaacatatgggggccccggctgtttaacatccctgccaggggggaaaaacaccccccccccttttttttaaagaccccttcccaaggttgggttttccccaaaaacaggggacccaaaaaccgggcccccggggttggaaattgggcccccccggtaaattccggcaaaccccttttttcctcccaaaaactcggggggtaacaagccccagatatccccggaggaggcccccccgcccttggtttttggccgcccgttctaccccgaccggaggggcgaaagccctcctgttttgccccctccctttccggggggggaacccccc

SEQ ID NO: 49026 - DNA, 229 bp, Zea mays
  Clone ID: MRT4577_144717C.1
caagatcccgaggaagctgaacgactactcaagggcaggtataggattataaatgtctggcgtcctatcaatggcgccgtgcaatctgctccattagcaattgcctctgccgcgtcaggcaaccccgataaagacctggtaccgatcgagcatcggtaccccacgagaacgggcgagactatggccgttgtgtacaacccggagactagatggaattactggtctggta

SEQ ID NO: 49027 - DNA, 170 bp, Zea mays
  Clone ID: MRT4577_144718C.1
ggccgccgtgatcggggactacgccctaagcgagctcgcaggacgcggcccaagcgttttctttttcgtggtcgcgtactcagtttggtgaaaacacatgtcatacaagaggttcgcggaagcgattatcatgacctttaagaaaataagattgctttctgttttttttt

SEQ ID NO: 49028 - DNA, 189 bp, Zea mays
  Clone ID: MRT4577_144719C.1
cgtataacttccacttgatttaagtaaaatagatgtaactgtatatgtcctttatagcacagataactatcccgatataaccaagcacctagaaaaactctcttcttgccatattacaaagatttagggtcgatagcaacaaaaacctaattcaccatgatgctttatttcctggcacgtaagtgatat

SEQ ID NO: 49029 - DNA, 849 bp, Zea mays
  unsure (1)..(849): unsure at all n locations
  Clone ID: MRT4577_14471C.1
aatacctagatgccacaccctatcccagccgccgccgccgccgccgtcgccgccgccgccgctgcaaccgccgccttcgattccgtggaattggaggggaagacaattggatctgtctgccgcaggaggagtggggagaaatagaatgaaggcgcgacagttcctgaatgttgtgatggagaggtatggcactggcggtgccggtggcagcttgtatacggtcagtcgcatcaacgccaaggaacacctcttctaccgatccacggccgaagcacaggcagcagaaaaatcaaggttcgatatggagtgcatctggcgaatgcctacgtccaggctcaggttcgaagcataccgctcggatgacaagaggctcaatttcctgcccttctatggacgacgcagcggcggcgatagcaagatgctctgcatggacgccgctggccacaccgtgctctgtgatgccgctggcctctctgtcatgccggctccctgccttaacgaacccaaggttgacagccctgtttctttctccatcacccgcaccaacgcggaaacccccaatcgcgccgatgctctctacgtcctcgacagatttgtcacgagccgcaactccttcaacttcgaggcactcatgtttggcgagaagacctgngactgngttcggcttccaccgccgccctatgtcaacaacccggcctacaactccacatccatccagtcctacacgctccctggctgatggctccaccatttgcatctccccccctcggcacagcctcgtcggcacctactgcttcgacacgatttagctgtaaagtggagcaagggctggccgctgggcgcttccct

SEQ ID NO: 49030 - DNA, 715 bp, Zea mays
  unsure (1)..(715): unsure at all n locations
  Clone ID: MRT4577_144720C.1
ctccctccctcatctgacctcccgccccgccccgtccctcaccgctgtccgcgcgccgccaccgcctgcctcgcagccacgcctacccctaccccaagtgccaacgcacccgcgcccatccactattggcgacccgcggccttcgggactcctccccgttgcttcgactacgacctgacagccccgtagcggcgtggggatggcgagcaacaacaccggcgagccgagcacggcgccgcaaccgaatcggtggtacgaccttcgattggggtcctcctgccgcgaccccgcccttaccaccaagttctgcacgctccgctatgaatttaagccagcatctattgacaagactcaagctggctctctgcagaagagcaaagataaccgggtaactgtggaatttcataacaatcagcctggcaggccaaaggtggcattcgagggaagccaagaagagtacaaggataatgatggtgtcttgttttttgatggtgagacctttcgcttggaacgattgcaccgggcagtcaagagattaaggcatgtccgggttccgggagagtcaacttccttggcagctacaactactggaatgggtgaatctcattctcctccattagcgaaagttggcaagttgcctgcaacgaancaaccttctatacacccagttccggttgaggttgagcacattgacattggtgaacctgaaaatcca

SEQ ID NO: 49031 - DNA, 188 bp, Zea mays
  Clone ID: MRT4577_144721C.1
gcacgagacgacgtgctgtccccgccgggcggctactgccgctgctcggcggcggcgcacgctggggtcgacgtcgccgacgtcggctgacgcgatgcgtgaggcgatcttccacatcgtcgcgctgcatccgttggagatcgacccggaggcggtgcgtcccgccgaagctgcgcaactttcgcatc

SEQ ID NO: 49032 - DNA, 540 bp, Zea mays
  Clone ID: MRT4577_144722C.1
gggctgggggggaaacggggatcccttacggggacaggaaaggggtaaaacctattaaaaaaggaaaggggccaggacccaggtttccgccctgccgtaaaaagctaggggctttcttccacctgaaaaaaaaatttgttggtgcccaagttgttgacaaggaaggggagggcgcccccctgcagtttaaccctgggggagccgatcgagtccaggacgcccaccccctccggggggggggggttgttccccaaaaacccccacttgtccttggagcccttttttttgaagggaaaccctcttggccccaatttaaaccttttggttcccttttccagggggggggaccaccccattgccggggggaacttaaaccgcacgggggccccgttacaggtagttttcaccgaaagggcatggttgttgttaactttgagggcacgccctgggttccccttgaaagcaggctgacttgaggggctccccctaaaaaaaaggggtggcccaaagggggagggaaggggttgctccttgggggcc

SEQ ID NO: 49033 - DNA, 853 bp, Zea mays
  Clone ID: MRT4577_144723C.1
ttgggtacctcgaggccggccgggaaggaccctacctcacgtcccggatcccatccggcggccaaggggagttacacgctagccggcggtcggccagccgccgccaaccgcctcagccccaacagtcgcaccgccgccgccgaggcaaactcgaagccacccccgccgccgcagccacagccgcgccgagcttgagccgtcgttgctccgctgaatcgcccccatcgtctctcctgaagagagaggacatttattgagacagcatgcctaagataaagacaagtcgtgtcaagtatcctgaaggatgggagcttattgaaccaaccatccgtgagttggatgccaaaatgagagaagctgaaaatgatccacatgatggaaagagaaagaaggagatatcacgggagctttatgagttttgcctggaccagagctatgcagatcgtaacctgatcgcaaagtggaaaaagccaggatacgagcgcctttgctgcctccggtgcatacagacacgtgaccacaactttgcaacgacttgtgtctgccgagtccccaagcatctgagggaggagcaagtgatagaatgtgtccattgcggctgcaggggttgtgccagcggtgactaatcttgtcagttgtcatcatgttgttgggctcacgactcatcatcaccatcctaaccacattaaggcttttcggttagctctcaatccatgtggattgagtgggattggatgagtttgaatcccaaacaagtcaaactttttaagaatttttttcaatctcatccaatccatgtgtattgggaataaccgaacaagccttagatgtctcgtgagcatggatcggctat

SEQ ID NO: 49034 - DNA, 1197 bp, Zea mays
  Clone ID: MRT4577_144724C.1
ggccgcttttttttttttttttttaggggctcaataaggattcaagcaatgtactagcttggctcctgagcaattggtgataaaagacaatttacagaatcatacaagatgcaaaagcgttactaatttaacaaaaacatctgtggcacgaggagtctttatagtacatagcagttgcaaacatccaaacgtcaggaaatttagtcttccaactagttaccacaacacattcatgctaatcaccatagccgatccatgctcacgagacatctaaggccttgttcggttattcccaatacacatggattggatgagattgaaaaaaattcttaaaaagtttgacttgtttgggattcaaactcatccaatcccactcaatccacatggattgagagctaaccgaaaagccttaatgtggttaggatggtgatgatgagtcgtgagcccaacaacatgatgacaactgacaagattagtcaccgctggcacaacccctgcagccgcaatggacacattctatcacttgctcctccctcagatgcttggggactcggcagacacaagtcgttgcaaagttgtggtcacgtgtctgtatgcaccggaggcagcaaaggcgctcgtatcctggctttttccactttgcgatcaggttacgatctgcatagctctggtccaggcaaaactcataaagctcccgtgatatctccttccttctgtagtaaagatcatatatgtagcggctcctttgatgagaaatacgaaaaataggccagagagcttcacactttctctttccatcatgtggatcattttcagcttctctcattttggcatccaactcacggatggttggttcaataagctcccatccttcaggatacttgacacgacttgtctttatcttaggcatgctgtctcaataaatgtcctctctcttcaggagagacgatgggggcgattcagcggagcaacgacggctcaagctcggcgcggctgtggctgcggcggcgggggtggcttcgagtttgcctcggcggcggcggtgcgactgttggggctgaggcggttggcggcggctggccgaccgccggctagcgtgtaactccccttggccgccggatgggatccgggacgtgaggtagggtccttccccaccagatcggggaagaggaccatttttttttttttttttcccgg

SEQ ID NO: 49035 - DNA, 1117 bp, Zea mays
  Clone ID: MRT4577_144725C.1
gaatcatacaagatgcaaaagcgctactaatttaacaaaaacatctgtggcacgaggagtctttatagtacatagcagttgcaaacatccaaacgttaggaaatttagtcttccaactagttaccacaacacattcatgctaatcaccatagccgatccatgctcacgagacatctaagggcttgttcggttattcctatcccgtgtggattggatgggattggaaaaaattatgaaagattttgacttatttgggattgaaacccatccaatctcacccgatccatatggattgagaacaaaacgaacaagccctaatgtggttaggatggtgatgatgagtcgtgagcccaacaacatgatgacaagattagtcaccgctggcacaacccctgcagccgcaatggacacattctatcacttgctcctccctcagatgcttggggactcggcagacacaagtcgttgcaaagttgtggtcacgtgtctgtatgcaccggaggcagcaaaggcgctcgtatcctggctttttccactttgcgatcaggttacgatctgcatagctctggtccaggcaaaactcataaagctcccgtgatatctccttccttctgtagtaaagatcatatatgtagcggctcctttgatgagaaatacgaaaaataggccagagagcttcacactttctctttccatcatgtggatcattttcagcttctctcattttggcatccaactcacggatggttggttcaataagctcccatccttcaggatacttgacacgacttgtctttatcttaggcatgctgtctcaataaatgtcctctctcttcaggagagacgatgggggcgattcagcggagcaacgacggctcaagctcggcgcggctgtggctgcggcggcgggggtggcttcgagtttgcctcggcggcggcggtgcgactgttggggctgaggcggttggcggcggctggccgaccgccggctagcgtgtaactccccttggccgccagatgggatccgggacgtgaggtagggttcttccccaccagatctggggaagaggaccctaattcgtcaggtaacgcagataagcttcacaggaaatcaggt

SEQ ID NO: 49036 - DNA, 1514 bp, Zea mays
  Clone ID: MRT4577_144726C.1
aaaaaaaaaattatttcgtttgcaaaccccgggaacggaaaattgggtccctctaaaaagggcccccccctttttttttttttttttttttttttttttttttttttttttttttttttttttttgggttttttttttttttttttttttttttttttttttttttttttttttttttttttttttgaatcatacaagatgcaaaagcgctactaatttaacaaaaacatctgtggcacgaggagtctttatagtacatagcagttgcaaacatccaaacgtcaggaaatttagtcttccaactagttaccacaacacattcatgctaatcaccatagccgatccatgctcacgagacatctaagggcttgttcggttagctctcaatccatgtggattgagcaggattggatgagtttaaatcccaaacaagtcaaacttcttcataattttttccaatcccatccaatccatgtgtattgggaataaccgaacaagccctaatgtggttaggatggtgatgatgagtcgtgagcccaacaacatgatgacaagattagtcaccgctggcacaacccctgcagccgcaatggacacattctatcacttgctcctccctcagatgcttggggactcggcagacacaagtcgttgcaaagttgtggtcacgtgtctgtatgcaccgaaggcagcaaaggcgctcgtatcctggctttttccactttgcgatcaggttacgatctgcatagctctggtccaggcaaaactcataaagctcccgtgatatctccttccttctgtagtaaagatcatatatgtagcggctcctttgatgagaaatacgaaaaataggccagagagcttcgcactttctctttccatcatgtggatcattttcagcttctctcattttggcatccaactcacggatggttggttcaataagctcccatccttcaggatacttgacacgacttgtctttatcttaggcatgctgtctcaataaatgtcctctctcttcaggagagacgatgggggcgattcagcggagcaacgacggctcaagctcggcgcggctgtggctgcggcggcgggggtggcttcgagtttgcctcggcggcggcggtgcgactgttggggctgaggcggttggcggcggctggccgaccgccggctagcgtgtaactccccttggccgccggatgggatccgggacgtgaggtagggttctcgatgaggacggcggtctggatggtcatgtggagagaccccgagatcctagcgccggcgaagggcttggacgggccgaactcggcgcggcacgccatgaggccgggcatttcgacctcggccagctcaatctcgaggcggccgaagtccgcctgcgagagatccttgaccttgtactcccgtccagacgaggtcttctccacagagagcgccatggcggcagaggagggagaactcgcgaattggatctgggagatggggaaatggaacgggagtgagggag

SEQ ID NO: 49037 - DNA, 1141 bp, Zea mays
  Clone ID: MRT4577_144727C.1
acgagcacagacactcaagcactgagcaaagcactctaaacctagtagtagcgacggcggtggcggctgctgctcatcttcggccgacggtggtggcggctgctgctcatctccgcgacctggtcgtccgcctgaagcccgcctggagcctgtctgcctacccgaccagagtacccggtgctactgccgatccagcgcccttacttcaataaaggaaaaaggtgaagtagattaataacaccatggttccaagaacacataaggtcatcaggaaacaagcagaggtcaacgacatctataagtgaaaatgaactaggtgaaggtgacaacaccaatgtgaatgcaagtgagaacgtagaggctaataaagaagcaagtggtgcagctaatgatgtgattgaatctcataccccaataggagaaacttcatccaccaaactcaggcgtacaaagaagagaacttcaggagtttgggatcactacaatgatatatttgttgaagaacatggttgtcaagaagccaatggcagcatgcaagtattgtacagatgttctttgcgctgcaagcaagcaaggtaccacacgcctttggaaccactattattcatatcatgatgaaaacaaggtgaaacctagcataaggaaactgagttcagatgatttgatttataatgaggaggctagtgttagaaaatactatcttgcaattattatgcacgagtatccaatcaacttttgtgagcatgagtatacaaatgacttcattagatctttgcgtccaaattatccattaatgggtcgcaagggcagtaggaccaagatcatggatatcttttacaatgagaagaaaagtatttttgactacttttgcactcttgactgtcgatttagttgtaccatggatttatggacttctaatcagaataaggggtatctatgtgtggcatgtcatttcattgacaatgattggaggatacataaaaggattatcaactttatgcaccttaaaggaaggcatacaagagctaatttgagtgccgcatttatgcaaaacatggactcttggaatctcgatcataaattatttgcattgaccttagataagcatctccaaatgatgtttgtgtggacaccgtcgttt

SEQ ID NO: 49038 - DNA, 296 bp, Zea mays
  Clone ID: MRT4577_144728C.1
cgtcagtacgagctgctctaagaagggaacccccaaatttaattaaagccttaagcacaattaattaaaagtgatacgtaattgtacaagcagttaatcacccaccatagggcatgattaacaaagcaacctttcccttcccccgagtgattttgcgaaacccccttttcccttcagcttgcttagatgttccaaatttagaaagcttaaggcggcctacagaaaaaggaaaaaaggccacaaaagttccctctcactttcagtaaaaataaataaaacagcagcagcaaacaaat

SEQ ID NO: 49039 - DNA, 2999 bp, Zea mays
  Clone ID: MRT4577_144729C.1
ttacagaatcatacaagatgcaaaagcgctactaatttaacaaaaacatttgtggcacgaggagtctttatagtacatagcagttgcaaacatccaaacgtcaggaaatttagtcttccaactagttaccacaacacattcatgctaatcaccatagccgatccatgctcacgagacatctaatgtggttaggatggtgatgatgagtcgtgagcccaacaacatgatgacaagattagtcaccgctggcacaacccctgcagccgcaatggacacattctatcacttgctcctccctcagatgcttggggactcggcagacacaagtcgttgcaaagttgtggtcacgtgtctgtatgcaccgaaggcagcaaaggcgctcgtatcctggctttttccactttgcgatcaggttacgatctgcatagctctggtccaggcagaactcataaagctcccgtgatatctccttccttctgtagtaaagatcatatatgtagcggctcctttgatgagaaatacggaaaataggccagagagcttcacactttctctttccatcatgtggatcattttcagcttctctcattttggcatccaactcacggatggttggttcaataagctcccatccttcaggatacttgacacgacttgtctttatcttaggcatgctgtctcaataaatgtcctctctcttcaggagagacgatgggggcgattcagcggagcaacgacggctcaagctcggcgcggctgtggctgcggcggcgggggtggcttcgagtttgcctcggcggcggcggtgcgactgttggggctgaggcggttggcggcggctggccgaccgccggctagcgtgtaactcaccttggccgccggatgggatccgggacgtgaggtagggttcttcttttgaatcttcggaggaacttggccacatttcaacttgtaaaaagcgttacacacagcagcgtcctggatcaaaccccgcaccattagccaattcagttggggggtttgttcatctgggatttctctgctgcaaggattagttcgtatttacaggtgtattgtacagcagcaggttaacatggcgatgatggtgtcagcttctaggggtggtggcgagcgcaaaccctccccgctcatacatgcgctggatctcctcccggtactcggacagcgacttgtcagggagcgcaggcgtcagctccaccacgtcgcccatgctgagcttcctatttgggtcgcttatgggcttgtggttaaccctcggtcgcagctcctctttcagtgggaagctgtaagggctccatctcggactgttggccccgactcgctccattagatcaactacagtcgagttggctgggagctcttggacagacatcttgtcatgttcaagcatgatgacaaatatagggccttcatagttgcactgccggctgtaagagtaggagcaatcttccgaatgcaggggaaaagggcatggtggccttatgccaacagaactgctcaaagacgagggacgctctttgctcaatgtctcgcattgccatgtgagcacccacctcgcccattccaccatttggagcacaaaggagtgcctgcagccaccttctttgtacctccagtgcgcagcgaatccatattcagcctgtaggtgcatttcctttgttcggatctggatttcaaatggatggacaccctcacacatgatgacagtgtgcagcgaccgatacccattcaacttcggatgacaaatatagtctttaaatcttccggtaactcggggccacagcttgtgcactatgtcaagtgctcgataacaatcttcctctgtttcaaccacaagccgtagaccatggatgtcatggacatcgtccattgttaagttcttctttatcatcttggagtatatactgtacaaactcttgtgccttccagaaagactgtgatatgaaatgccttcatctctaaggcttttatccaagttatgaagcgtagatgtaagaagtgcttcatcaaaagacatcagaagtttagaggaaagctccttgtgctcctctgggttcaagtgtttgaagcaaatattctccaagtggtctttccagctagcaattcctaatcggttggccaatggcacaaatatttccatagtctctttagcaaacctttgttgtttaaccaaaggcaaagcttctatcgtattcatgttgtgcagacgatctgctaactttataagaacagctcgtgcatcagccattgcaagaaacattgtatgcaggcgatcagcttcaacagtcctacttgcagtattgttgtcccgagcaagtttgctcaaatggcttaacttcgaaaccccttcaacaagatcggccacaccagcaccaaacatcctgaagatatgatcatagtccatgaacgaatcatcaattgtgtcatggagaaggccagcagacacaacggttgcgtttgcaccaatattggccagatgaaccgcagtctccacacaatgctgcaagtatggatcaccactagcccgcttctggccacggtgtgcccgctcggcctccttgaaggccttgacgacaagctcgtcgcggaagatgtggtggcgagcctgggcgccggcgaggagttcatgagcgtcaggttcgcaggacggctccgcctcagagaggttttcgtcaagctcgaaggccagctcggcggcgtcgacaccagtggccgcggggcgcacacccagcgggaagctggtgaccggtgcgtagtcaatgcaggagccaagcgcgttgcgcacgaagctagagaagaggcgctcgcgctcacggccagcgagccaggaaaccgaggggctcctggacgccggagaggaggcaggggtgtggaacagcgacaccgggctgcggtggaggtggtcccgcagcttgagcggcgacggcgacgactgggggtacgagtagcccccggcccggccggcctcgaggtaccca

SEQ ID NO: 49040 - DNA, 592 bp, Zea mays
  Clone ID: MRT4577_14472C.1
atcccttcctctcgcaacgccaacatggatagaacactctcgccacgctgctctttactcttagcaacagcaatacaagcgacgagggggagtctagggggtaccgttggagagggtctaagatgcaaggcagcaggaggagcaaggcacgctcggctctcccccgagcccaaaaatctagtagcagtattgatcacgggcccatggaccggcacctcctgccgctctccctcctcgtcgccgcctcgctttgcgtcaacgtcgtcgtcgtcggcggcaccggagatcgcgcgccgtggcccgtcgccctcgccgcgtccactgtggtcgcggcgcacctcccgcgccaccgcgcgcagtgaaagagctctcacgcgacgctccggccggcgggcgcgtagcggctgccctgccgtgcgtctccgcgtcgtccagctctggaaaccaaactgtcgtcctttcatctgctttgtttacatctcgctcatttgctcacaaactcgctactatgctactcatcagaccttcgcgtgtcgtaaatagtacatatacaataaaataaggtgctgtttggttcattaatataggctac

SEQ ID NO: 49041 - DNA, 487 bp, Zea mays
  Clone ID: MRT4577_144730C.1
caacgactcgagcatcgagcagagcactctaaacctagtagtagcgacggcggtggcggctgctgctcatcttcggccgacggtggtggcggctgctgctcatctccggccattcgacctggtcgtccgcctgaagcccgcctggagcctgtctgcctacccgaccagagtacccggtgctactgccgatccagcgcccttacttgtaatccactaatccgcccttaccatgtgaatttggtgctttgtaacggtgaatgacatgataaatttacatatccttatgttttacgaaactagcaataaaggaaaaaggtgaagtagattaataacaccatggttccaagaacacataaggtcatcaagaaacaagcaggtacatatatttctaggaaacttttcatattattgaacctatcagtcagtaaataagttcaatctactaaattttctaggcattttctatatggaatttatttcttacaga

SEQ ID NO: 49042 - DNA, 444 bp, Zea mays
  Clone ID: MRT4577_144731C.1
gcctgcgattcctgttctctcgcctcctcgtctccccgtaggggatcgccaggatagggatcgtaaagaggtgcgtctcgtccgagttaaggaagccatggaccacaagcaggctgggtgccaggcccccgcaggacccatcctctgcatcaataactgtgggttcttcggcagcgcggctgaccatgaacatgcgctctaagtgccacaaggagatgataacgaagcaggatcaggtcaagctggctgcctcctctatcgaccgcatcgtgaacgtcagcgactccttcatggagccgtttgttgctggtagcaacacttttttatctgctgcccacgtccagttgcaaactatgaacgtgctgcagcccgctgatgctgcccgacacagcgaggggttggtgggaatctccaaaggggggagggtagggtcgcaccgctgca

SEQ ID NO: 49043 - DNA, 164 bp, Zea mays
  Clone ID: MRT4577_144732C.1
atttttgggtttgttggcttggattgaatttttgggtttgttagcttggattaaagccagctttgttcgtgactgttccaactataatttgtagagacaaaacattgtaaaattgtagtagaagtcaatatgaattaaagctgagccaaccggccgtttgttct

SEQ ID NO: 49044 - DNA, 340 bp, Zea mays
  Clone ID: MRT4577_144733C.1
agtacactatatgacatcaatggcttctaccgaatatcagccttggcaagggatgggttatggctacatagctacttagaacgatttcatgattggctaatacgacagctgtgatataatgcacatgatctctgacaacatgaaatgatataaaagaccttgtaggcttaatagaatttatacacagaaaggtgatatctgagctgtatatgctaattggtgctctgactgcgatgaacatacttcaaataatgttctccatgcatacattgtgggtgatgtactggatgcctatgatgatacccatggtaactgcataattcccttagtcaaggttact

SEQ ID NO: 49045 - DNA, 420 bp, Zea mays
  Clone ID: MRT4577_144734C.1
cccccgaaaagggacaacagcaaattttaaaaaaacatgggactaaagccaaaccgttttaaaaaaacagggaccaaaaaagggcaaaaaacagggaaaaaccctttgaactggaaacaactaaccaaaaaaaggggtccccataaggacacacatttgggggaaaaaaaacccaagaaaaggcttaaagcaacagggctttggccctttttccttggaagttttttggaagaaggggttttttttttccaaccaagggaaaccccaaaggggggggggccccccggttggaagggggcaaaataaactggaaaaagggcccttttaaaaagggttgggggccccaacaagcccatggttggaggcatggaaaaccacgtgaaggatacgggtctgggggaaaaaaacttcactccccca

SEQ ID NO: 49046 - DNA, 196 bp, Zea mays
  Clone ID: MRT4577_144735C.1
gtctcagtgaagtgaaaagcctcagtaatgtttagggttagctacaactctttttgttagcttgatgaatattcaagatgttgaaagggctatgctatttgtcattttggacatgtgacttagatgtagcgtgatgtatattgctagctggatgtatgagttgacaatataaatttttgcaacctgggattttgtc

SEQ ID NO: 49047 - DNA, 649 bp, Zea mays
  Clone ID: MRT4577_144736C.1
cagctgtaaaagctctttaacgggaagctgcaattgtccttttaaaactgtatttggtattaaaaggttgctgacggttaacaatgtggtcatgcccttgacaagtagattgtttactattttctagctgaacttttacgtttttttcctatattttatggttgaattgtcatgagtcggctgagctggttacctcaattgattgacatgtgcagcctacttgacctggataataacagtttttcttattttccataaggagcagataaggttaaataaatttgtgcttgacaatattcgatgactctattagttggagttccccttgcacaaagacatttctatgtcccagctgtgaagttcccagttgctacggccttgttccatcatttccctgcaatacaatttagcttctttattcaggttacataactgaacccttaatctgtgtgatgccttttcttacagagaagaggcagtctgaggctaatcggatcagagagaagtaccctgacagaattccagtgattgttgagaaggctgagaggagtgacattcctgacatcgacaagaaaaatacctcgtccctgctgatcttacggttggacaattcgtgtatgttgttaggaagaaatcaagctcagtgctg

SEQ ID NO: 49048 - DNA, 212 bp, Zea mays
  Clone ID: MRT4577_144737C.1
atctcctgatcctcgttcctctccgccccgcttgcgccgcgcctccgcccccgtctcctgtgagatcagctccggcggcacgcggatatgactacttcaaggctgtttgctgtcatgattagtgcaaagtttcagaataacattacaaatagggtgtttgtagtagataccactgtgaaaaagagcaatgactaccctgttggacctatagt

SEQ ID NO: 49049 - DNA, 227 bp, Zea mays
  Clone ID: MRT4577_144738C.1
gttacaacaccctagagtgagtcgtattaaccgagccagtcgattgttcacgatcgatagcagcttaccaacaccaacagcaccaggcccacgcgttcgacaacatggcccgcctcggcgccggcgccatgttggcactccgagtggcggtcgcggtggtggccgcgttcatcccggtgacggtctcggcgaagtcctccgacctgaggccgatggggttgctggcg

SEQ ID NO: 49050 - DNA, 320 bp, Zea mays
  Clone ID: MRT4577_144739C.1
gaatgcccgggtacacccatcgcgggcgcggacgcaggggcggacgcttgggctagctagagcccttcttccttcttcctcagctaggcacccgtgcgcatctgcaggccacctagccctgcctacgacgatggcggcggcggtggttgtgtttggtcaatctcgttccgggtttggcgccaggggtcgaccgggggaggccatgccctctacaggaggtctcagagggctgcccctgtctccgccagagcgtccttgaacatatcgtgctgcgcgatcctgacgcagacggcgcaccgctagtcggattcggggacgac

SEQ ID NO: 49051 - DNA, 436 bp, Zea mays
  Clone ID: MRT4577_14473C.1
atgttcaattttttgtttttcctttgtggacaccggggcgtaacaaagggagctgggggaagacgaaaaccggtgagcaggacaggtcggcgggggacaaagaaggttagcaccccccaatccaagaaggggtttcgcacgaaacctagcttaaataggggagggggaaattggcgaccataccggcttcttgagggggggcgcagaaaaaaccctagggtcccgggcccgggagggggaccgaagaggtcccccctggggcggtgagggacccccccggggaaaaaatggggggggggacccccgtgggcacccaaattttttgaaaaaaaacaatatcccggaaacccccgtttgtatggaaaggggagggggccccccccctgacggggaaaagggtgggggagaaaaataacccgaccatgcctgggcccaa

SEQ ID NO: 49052 - DNA, 646 bp, Zea mays
  Clone ID: MRT4577_144740C.1
ttattgatatatccccactctttcactcctttgtgaaccaaataaatcctgcttcataccatgacgaaatcacatagtgaacatcaagctgtccccgctacaaaaaaatatgtgagcggctgggctatcaagagctttctctcctctcaaaggtcctatggataagcagtacggatcaggaagagggggcgacgaggaagtatcagattgtgcccctctccaaggaggatgactggagtgcacgacagatcctctcttcgtaagtgaacttccaggacgccatccaagggaatagagtcctgcaacaagagggctactggcggctgcacctccggcaccggctgcaacgccagatgcgacacatcaggtcgtccactcacgcgactctctctgattgataaccaagacaacgtacattagactaccaatcgtgaacttccacgatgcacaaccaacttcacgcttgttctatcttcatctttgcctcgctcacctatctgcaacctcggagttcgtacctgacacgtgcaactgaccagactcgtctgctggaaatgaagctgctggagtagcactgccaagagatgtctcaggaccttcagctgctgcagatgctctgcccatggagaggttccagatattgcat

SEQ ID NO: 49053 - DNA, 589 bp, Zea mays
  Clone ID: MRT4577_144741C.1
cgatatatatttaacgccttcttgctcatctagaaactctccctctatatcttgtgacactattcctgtctcggttatctgtgctatccaaatgcctgcctctttgtaagcccgtgcagactgaaatgcatatgcctcccaaagcggattaagcatatcctcgctctctctaccctttcctctctcattccagaaaagaagtgcaatatgcgatcaataagcttacggattcaatacctttgatagcatcataagtagtgccgtaggttcaatcccaaccaatgcccagcttcagcaaatagaagaagggttaacatcatgaatatgcgatcaagcaaagagtgaagaagcagcaatacgtgttttgagttatctttcttttttcttctaaaaaagcaatagaaaagaagaaagaattccgtagtgtgtatcaacttcatcttctccacaacctcacagaccttatcactagggaaagccgatacagctgatccctcaccagatgaggctggtgacaagttccaattgtacttttgttgaccaatatctgaccgagaaatgagttgatgaacccgtcttaccagagata

SEQ ID NO: 49054 - DNA, 618 bp, Zea mays
  Clone ID: MRT4577_144742C.1
cgggcgcggggttccatctcggtgtgtacttgatgtctggccagggaggattgctgcacatcttgggcaggccccaagcgatgccgagtgcaggggtggccggtgtccggccaaattcctcgccggaattggagtttgcggccaagccaccgatcactctggtaacacaccgtcgactaccgtccccagtatgtaaacccctttcgtgttcacgttaatacccgcatcaaatagaaccaatcaaatttgttggtggggtccttgggtgctggcgtggccaactccgacgggtccgccaccgctgatgaggacatcactatgagtacgactacaccagcagcacctccatatcaagcgccacttccttcattagctgggccaatcactcgggcccgtgccagagatcttaacttcgtcatgctactaaagaatgagggcccagaagaatagacgaccagcccaactgcagcccatagtggacgacctagggttggccgcccctaggggttgcgccccccctctctatttatccaggagttgcgcctcctttgttcttcgagtttagttttacgttagctttagctactctcgaacacgtgcaaatcagcgctgtcttcg

SEQ ID NO: 49055 - DNA, 309 bp, Zea mays
  Clone ID: MRT4577_144743C.1
aaaaccgggaattagccaaacaatttttgcaaggggggaatacagggtacactaaattgatttgcattttggcaaaaccagtttgttcaaggaatacatgggttggtggtggtgcactcctcctgccgatgttccatgactccatttttgctggcctttttttcccaagcatttcaccaaacagttcaagggtaaatgttagatgtggggtgcccccaactttagaaatcaagccgggtttctactaaaaaccccattgttttttctcggaagggcattgatttgccacagtagttgcatacacaattc

SEQ ID NO: 49056 - DNA, 711 bp, Zea mays
  unsure (1)..(711): unsure at all n locations
  Clone ID: MRT4577_144744C.1
ctcgaagggccggccgcngcatccgtgtcacaagcgccaggacagcatcaacgacttacatccggtgtgacggcaggagctccgaggacatccaggtctgcttcgcggatgattacctgagcttccagacgtttgcagatgacttcacgcatcgacacgcatggagcatgaaatgcacccgcatggttgctcccaaggccgactgtccttgctcatagaacgagatagagcgcccgtggccaaggacgaataccgctcctgcgaccacaaggagacgtgcttcgtcgagtacttcagatcggctacgctgtagaccgagtaggacaggatgataattggctgcctgccacgcaaaatgaggcacggtggacgaatcacaaccctgcgcgtcatccactgcatcatctcgtgtcatcaaatacacgttagcacctcctagtgtgcctgtgaggaccctccgcatgtaaagctcgtaatggacaaggaagtcaataatttacaagaactcaaagagatgtacaacgagcgtccattcttaaagcccaaccggcaactgctggatatggactgcgccagggtacatcccgacattggcgccttgtatgaccagctgcttgtggcacaagaactcagctctttgtgaatgagctcagggacagtacgaggagaccggtggattcacgtcacatagctgtacacacgatatacttg

SEQ ID NO: 49057 - DNA, 192 bp, Zea mays
  Clone ID: MRT4577_144745C.1
cgataacatgaatctgccacgctgcacagtacataggtacggtgagaaactgagatggcgggtcatgtagacaagtacaagacccacgcttactgtaagcgatgccatgataggtataggagaaggcgtgctggccagactgactacacgaccaggataaggttgattaacgaaaacaaaaacaggtacaat

SEQ ID NO: 49058 - DNA, 1879 bp, Zea mays
  Clone ID: MRT4577_144746C.1
cgcaacaagcactagcagttgtgcccttgctgtgtttggttgggccctcctcttcctcttctccttctccagtcctgttggcatcgcgtacaagagggcagccagtggaccctcgctgccgccattgctggggtgggccgtgctccagccttgtgcggttggcaggcctactagctgtagagtatagtggaggtggagtagtttttttcgcttccattggcctccatccacctctcctccactcgacctgcgcttcactacagccccactggcaggggaaggggagcgtcgaccaattcgtcccgccctcgccgcgccgctggcctcgctcgcgtgccctccccgatggcggcagcggcgatccaccagttcgccgagtgtatcacctgccacgcctggagccccgaccagtcgatgattgccttttgcccaaacaaccatgaagtacatatctataaattcttcacagacaagtgggagaaacttcatgttttgtcaaagcatgatcaaatagtttcgggaatagactggagtaattcatccaacaaaatcgtaacagtttcacatgatagaaattcatatgtttggacacaagaaggatctgattggatacctactctggttattctaaagttaaatcgtgcagctttatgtgttcagtggagcccaaaagaaaacaagtttgccgtgggaagtggtgccaaatctgtgtgtatttgttattatgaacaagaaaacaattggtggattagcaaggttatcaggaaaaggcatgaatcttctgtcactagtcttgcatggcatccaaacaatatatatcttgcaacaacgtctacagatggtaaatgcagagtgttctctacttttatcaagggtgtagacacaaggggatcacaatcgagcacttcaaccaattcaaaattcggagagcaaattgctcagcttgatctatcatctacctgggtatttggtgtaaggtggtcaccaagtgggaagacattggcctatgcagggcataactccatggtttatgtcatcgatgaagttgaatcttctcctgtggcccaaaacttgacgctgcgtgatctgcctctccgtgatgttctttttgtctctgagcgcacattggttggtgtcggatttgactgcaatcctatgatctttgctgctgatgatactgggctttggagtttcgtaagattcttggacgagatgaaagctgctccatcagcttcaaaagcctcacagctctctgaagcccttggaaagctatatggacaatcaaagcagggggctagtagcgacactgttgaaccatcgaaagctcgtggtggggcccatgagaattgcataacgtgtattgtacccttgagaaaaggaagcgatggtactatcaaacgattcagcacgtcaggattggatggtaaggtcgtggtatgggatttggaaaaccacgtcagcattgcaaaatagctcgagggaaggctttcgttaacaatcaaatcgagggggcttctgtcattacccatcgtgctcaggggaccaccattcgtggcagcggggtcctgcaggttttcaagatccagggccagccaggtagattttttttgggtgcctgtacacagaaacattgccttagcgtagggagaacttgcatctatcaagtagattcaatttttggcgagtaattgtcctttgaattgagtccatacgtattgtgtatccttgctcccaaacaaacccgtaccgtatagtttttagctaggtaggtaggcaattgacgtcatctcttatttctggcgccatgtgtaaaataaccacacacggaattcatccgcggatgctgcatctccaacaatgagacttaaaatagtggccc

SEQ ID NO: 49059 - DNA, 112 bp, Zea mays
  Clone ID: MRT4577_144747C.1
gagtgccaaatgcaaaacgcccaaagcaaacggaccgacaacggtttcctgataacaacgacaacaatacacccgcaaaaggctttcgacaaccagatacaaaagatttatt

SEQ ID NO: 49060 - DNA, 720 bp, Zea mays
  unsure (1)..(720): unsure at all n locations
  Clone ID: MRT4577_144748C.1
ctcgatacgcattccgcaccgaaaaatccgccccatcttgaggagctgggtcactggctgggctaagcaacacggccaaccacagcgcgaatcccccaaagaaaaaggcttcgtttcagaaatcaagaggttcacttgttgggttctcgctgtcggagttcggcggcggacggagacggagtcgtagtcggagcgagaggtctagctggtggctgcggaggcgaggcccggaggaagcggctgattgagtaagcgcgtctagcacaggaaccaagaggaggaagaggaacccaatccaatcatggactcggagcactggatctcgcgcctcgccgccgccaagcgcttctatgccgcgcagctcggccacatcgacgatatgtcggggatggggatggaggaagtggacatggacatggaggacgacggggagatggacatggagatggagatgcagatggaggaggcaagatggccggaggtcgcctgcccctactgctacgaggactacgacctcggctccctctgcgtccacctcgaggaggaccacccctacgagccacaccccgcgccttgccccatctgctctngaaagattacaagagatatgctaaatcatatcaccatgcatcatggttacttgttcaaggcgcttctaggaggcggtcatagtcataggtcaagggacaccaacgccgccactacaaaatattatgctga

SEQ ID NO: 49061 - DNA, 410 bp, Zea mays
  Clone ID: MRT4577_144749C.1
ccaacgcataacaaactgaacgggtcttccaccaagataacattactaaacagtatggtggacgcaattaaatgctaactcccgactagaacactaaggaaacgataaccatagctacacagaacttgagcagtgctgtgccacccgtaagcacgcaacacagtccagtatgtagccgatgttgtagacgttgattccgaccagaaagggccaggtacgacaccagagcaacctgtcaagcgaagggcacacaacctgcgactaggactgagaactctgctgcgaaatgcaccgagacaaggaacacccacataacagatattgtgttgtcgcgcatcaaatggggcaacacatgatccctagctagggtaactcgagctattacgcagactgggctaactcacgtacga

SEQ ID NO: 49062 - DNA, 388 bp, Zea mays
  Clone ID: MRT4577_14474C.1
ctcactcgtacgtgcacgcattcgaaggtaaatgacgagtccttctgcattcgatccagctaactagcctggcagccctacggaatggcgtggcatgattctggaaagacatagcacgagggctagctacgtgagctcgtgccacgaagattgggcgcaatcggtaggagcatggcggtgccggtgctggtgctccacctcatcatgtacatattctacctaaaggttagggagctgtgacctgaaccacttggttaacggacgatgacctagtaccagctgggtggccgggaacagagcgacggtctacttcctgtacgttcagaatactggccggcttaaaaggctctgactacaacctggcgagcgtgcacctcgtgagcgcctg

SEQ ID NO: 49063 - DNA, 248 bp, Zea mays
  Clone ID: MRT4577_144750C.1
gggttgggttttttttttttttttttttttttttttttttttttttttttttttttaaacacaacacgctcgcacgaagcatttttaaaattttccagtttatacacaatacaagcggcacacgttcactgttaaaaaaggggcccaatgcctaaagccacatgtttttaaagggacaaacttggtaacagggggcaaacccccccttggggcatgttttaaagggaacatacttggtgggggttttt

SEQ ID NO: 49064 - DNA, 473 bp, Zea mays
  Clone ID: MRT4577_144751C.1
tctcttttttttttttttttttttttttttttggttttttttttttttttttgggttttttctttttttttttttttttttttttttttttttcccccccaacaaaaaaaaccccctattttttgtaaaaaaatatttttaaaaacccctccccaaaaagttttttttggggggacccttaaacaggcaaccagggcccttcccaaaatttttgatcccccgccttgactaattggtggggcagtttgaccacttgggtttggccaaaaattggtgttgcagaaacccaccgtaaagggggagtccgggaattttcttaacaaaaaacaaagtttttttcccccacaagggcgtattaccccccccccccttttttataagaaatttttttttccctgggggcccccccacttttttcccaaaaaaattaaaaaaaacccccccccggggtaattttttcccccacccctttt

SEQ ID NO: 49065 - DNA, 299 bp, Zea mays
  Clone ID: MRT4577_144752C.1
gcgcagtcgagcaccgggcgatctacgcctccacgccggcacgtcctcgtttctgtccgatgtcatcgccttcacaacttcgtggccggagaggccgcaccaccatggagtaactcctagcccgggatgcagcgcaagctctccgcgcgaggcaaactgcgcaactcgggccggccgtgtcagctatgcctgggcaccttcgtacctacatgaacgctgggattcccaagcggttcaaataggatgacgagaaagaacatctcgcacaagatgtcgcaaaagattggaatgctgtgttt

SEQ ID NO: 49066 - DNA, 810 bp, Zea mays
  Clone ID: MRT4577_144753C.1
cccacgcgtccgcccacgcgtccgcccacgcgtccgcccacgcgtccgcgaagatcttcggcatgatcttgcgtgcatgttcggtattcaagggcagcttgaagatccctacaggacggactggaagctggtctatgttgaccacgaaaatgacatcctccttgttggcgacgacccatgggaggagtttgtaagctgtgtcaagagcattaaaatattgtcatctgttgaagtacagcaaatgagcttggatggtgacctcggctgcatccctcctcaaactcaagcctgcagtgcttctgatgacgcaaatgcatggagggcatgacgtaaatactaatatgttccttaccatttttaaacaatactgagagtcaggggtcaaagaagtgaaacacacgtctaacataatcacgaggtactgttacttagagccgactcactgacagagtcgatgagaagctcgtggcggaagttgttcagcaagctgccatattttggaggccttgacggctgacgctttgttccactgaaatcgggtaattactcaacacaatcatattagtttccttcttgtgtgtgtaagttgggtgggggtggggggtataatgaatttgagaagctactctgcttattagaacctacattcactgtaatcctcctacaaagttgttcgattatctcagtgtatatatgtgcgctgtagaaccgtgactgtcagttttgcaactcgcaatccccaatgtaattgttcctgtgtgctgctttaacagctgaagtactattataaattgtattatctgtaacaga

SEQ ID NO: 49067 - DNA, 159 bp, Zea mays
  Clone ID: MRT4577_144754C.1
tcgccaagggcaaggagcaccgatccccgttcgtgctcagccagtgagggagagtgtctgtgaaggctgtgcgaagggaaaaagacgcggcgggagagatgggcgacatggtgaggccggctgcccgtagaagaagtcccacacgtaaactgcggacct

SEQ ID NO: 49068 - DNA, 183 bp, Zea mays
  Clone ID: MRT4577_144755C.1
acgcgtctctgcaagcggacatagcccgtccctttcctacaccttccccaaagttccgctccggggcgatcagttacgcccccgctaccgggcgtgtaaaccactaacacttcacgcggatcggtcgctcgctagctgggtggaggggacattgatccccccccgctcggatctcatggtaac

SEQ ID NO: 49069 - DNA, 443 bp, Zea mays
  Clone ID: MRT4577_144756C.1
cctcgagcggcgggaggtacctcaaaaaaggggtcgtgttcactgctttgcctctgcgtctgagtatgcactgcttcgcgtctccctcccccggcctacgaccccgccctgggagaaagcaaaacacgggcatggaaggctacgaccgcgtactctaccagttcatcgaccagctgcgcatgcagatggccgccttcacgggcctctccctcggctactccatgtgggcgcccgtcggcaggagcaacaacagcaacgacgccctcttcaccggctcctcgacgaccgccgactccgccgccacgagcaacagcaccagcgggctcaagttcaacgacgcagggacggccctcatcagctacgggaagatgaccttcttgacaggcgcctcaagcggcgtcacctactacgccgaacgctacaactacaaccaacctccccaa

SEQ ID NO: 49070 - DNA, 1580 bp, Zea mays
  Clone ID: MRT4577_144757C.1
gtctaaataaagcaatcatacattcaatacatttgggaaaagtacaaataaacagcacacctaacatgtacaatcaagtgaacataagtttatgtcacacccggatttaagggacaaagtcgagtgcatctcatacatgcgccaaagaacacaacatatataataacagagtgtatagagataaatgtcacaatataatcagagtacttattacgtagcggaagtcttacaaaataaaatataaatatagatcgaattaaaatccatccttggcgccagaaagtcaactgggagacgccacctagatcaaatcgaactcctcgatgtgtggcacctcttgaaccacctgttcttctcctgtgggggtgtgagacagcaaaggtgacctcacacatgttcatcgctcaacaagttgtggggaataatatggcatgaactcaccaaaggtgggagttcatgtgatgtgtaaggctaatcaacaataggggttaaagcttagcattgcttttaatatgttggtcaaattttattagcagttactaagtgtaagtaaataccaaaccataataagaataatagaacaaaattaataaataatcccatgcaatgcaaatgacaaattaaatttaagtttcataatttaatcatgtgggagtcctgagctgctcatgaccatgagctcgactagtataccagttttacactctgcagagattgtaccctgtacccacaagtcgtgtatctcatgtcggcaggattagctagacccttagacactaccaaggtgaatggctagggatccactatgaggcctttacaaagttccactagcttccgaaaacctgctacagtttatgggaagagcacttgcaagaatccctcgtctgaccgccatcgcagcaaaatcaacccgagaacctccttgcatgcaactcccctactgcccttgcccctttcgggtaaggtagtcttccactagctttcctaattagtcagccaagggtgtcccattccacccttgtggtggcacgtgtttctcaagttaagctacatgttccaattaacattaatgatcttgatatgaacataaatagaataacaaaataattggaagatggatataatgaaatattatcccaaaaactatgtaaagcaatagcaaaactacccaagtgattcagggatatcaaggtaaaatagataaacagtctagggtaacctattgggtcccatcaaaattaagcctatgcatggtaaacgattataaagaacattatggagtacataaaagtgatcaagggcacaacttgactgacacttgagactccagttaccagggtgattcttcagatcctcgtgaccacactgctagtcaaagtaatacaaacagacatggtatagacaaaattagcatcacaccaaacataagaacatactgcataataatgatctacgcgttgctacgagatcgtgggaacgcgaaccactaaagtcggagttacagctaaggagttatgattttatagaggatttatgtgattaaaatgttaaactatattataaattggttaatataaatc

SEQ ID NO: 49071 - DNA, 1790 bp, Zea mays
  Clone ID: MRT4577_144758C.1
cccacgcgtccgcccacgcgtccgcggacgcgtgggctgaccgacacgactccccccttcgtctcccaatccgccgctgttcgagtagtcggcggccggggcggcggcgatgaatcccctcacgcaggtgaagcggacgcagattatcaaccagaaggaggcgctcctgggcatcggcgaggacgcgtcgtggcacgccaagtttaaggactcggcctacgtctacgtcggcggcgtccccttcgacctcaccgagggcgacctcctcgccatctttgcgcagtatggtgaggttgtcgacgtgaacctcgtgcgcgacaagggcaccggaaaatccaaggggttcgcgttcctcgcgtacgaggaccagagaagcacgattcttgctgttgacaatttgaatggagctaaagttcttgggaggatcataaaggttgaccatgtgagcaagtacaagaagaaggaagaggaagatgaggaggagctgcagaagaagagggaggcccgtggagtctgctatgctttccagaaaggcgagtgcaaccgcggagcttcctgcagatattcgcatgatgagcagagaaatgcaaacaccggttggggttctaaagaggatagtggtgcacgatgggagcatgacaaacacagtgatgtaccgaagagccgaggcatgtgctatgctttccagaagggagagtgcaaccgtggagcatcctgcaaattttcgcatgacgagcagagaaatgcaaacagtcgtcgggactctagggatggtggaccatcgagatcagagcggtatggagaccgagaatctaggagtaggcatgatgatagaagagcagaagatcgggacagattcaggcgtgacaactcacctgagagatcacgaggtgagaggcagagggacgatgacagatccgacagaggaagagaaacaaaatcagaaagacgcagatatgatgtggaacatgaggatcgcaagcggtcaaggcacggcagagagtgatgccatgaaagaagtgtttacaaagaacacaaatggtgcaggaggccgtgggggattgacgtttgtactcttaacttgcaatacaaccagtgctgttaaattttgatatttgaatgtagttgccttcgtctgcttcgtctgctgctttattcagataagtttctttatatgcctccatttgattacatctggtgttctttttcgctcttcagatcggtgtcatttttagttgtcatcactgaaaccgtctgactgctctgtgttggtgccaattgcgtggtttttgccgaggaagttgtttactggttaatcttcagctaggatggtgggcgcgcctccgcaaggaccacaatgcctgttctggctacgtgctgatgaacaacaaaaatgatgctgtattttgcagaaccactgttacctgcaacagcatcagcagcagcatgtgcaacccaaaaggagccgtattcccagtagaaattttgtactggacagaggcacggttccaaaaggttcggccctaaaaactgctctgcaatgtcagtggtccagcgtagatgatgatgatcgcttctaacatagtctataaaaaatgcatactggagatttggtactagactagtcggttgaccgtacgttgcgacggcttacaataataccaacgtaaactatccatcaaaaaaatttaaagattttttattaattgtatccgctctctgtataatatattttttgatttggctcaaattccaggccttcggttgattttctaagagttagtatggtt

SEQ ID NO: 49072 - DNA, 1092 bp, Zea mays
  Clone ID: MRT4577_144759C.1
caacaatcatctttggcgcagatgtcacacaccccccaccaggagaggactctgcatcatccattgctgctgtggtggcatcaatggactggcctgaaatcaccaagtacagaggtctggtttctgctcaaccacaccgacaagagataatagaagatttatttactgacagtaaatatccacagatggggcacaacgttaatggtggcatgatcagggaactactgattgctttccgcaagaagacaaacagaaagcctgagaggataatattctatagggacggtgtaagtgaaggtcaattcagccatgttctccttcatgaaatggatgctatcagaaaggcttgtgcttctttggaggagggatatctacccccagtgacgtttgtggttgttcagaaaaggcatcacacaaggcttttccctgaggttcacggaaggcgtgatatgactgataaaagtggaaacattcttcctggaactgtggttgaccaaatgatttgccaccctactgagtttgatttctacttgtgtagtcatgctggcattcagggaacaagtcgcccgacccattaccatgtgctctatgatgagaacgaatttactgctgatgcactgcagtcactgaccaacaatctttgctacacctatgctcgttgcacccgtgctgtatcagtggtcccaccagcgtactacgcccaccttgccgcattccgcgcacgctactatgtggaaggagaaagctcagacggtggctcaacacctggcagcagcgggcagacagtagcccgtgaggggcctgtcgaggtgcgtcaacttcccaagatcaaggacaacgtgaaggacgttatgttctactgctgagctgctccaagttttagcattcaagctttcttattttcgtaacttatccttgatatggagctggttgctcttattttcgtctctcggtattcggagtagctaggctatgactgcagcatggtcttgaaggcctaacactctgtttggatgaaatcaatgcaaatactctataatctttttttttgttttgtgttctttctgttcgatcaaaaaaaaaaaaaaaaaa

SEQ ID NO: 49073 - DNA, 238 bp, Zea mays
  Clone ID: MRT4577_14475C.1
ttcgtgttgccgacttcgtttgcctacatggttccattggccagaggctgttcagcttgcacacgctgatgcgggtatgagtgcgagcgagcgtggactgaattcggacctcatgagtccaagggccgtcggcggctcaccgcatacactgcgatgtgcggtgctcttcagagagctgaaccctacttactgatgaaccgattccaaggttgacgggccgttaatcacagatgataac

SEQ ID NO: 49074 - DNA, 311 bp, Zea mays
  Clone ID: MRT4577_144760C.1
cacacgcgtccgcacgacatggacatggcctcgccggcgctgctcaccgacgacctcctgtcggacatcttcctccgccttgcgagccggccgacctcgttcgcaccgcagccgcctgcatccccttccgccgcctcgtcgccgaccgcgcgttcctccgccggtaccgttcgctccaccccgcgcctctcctcggcttcctcgaccacaacggcttccacccggcgctctcgccccacgcatccgcccccgcagcgcgtgccgtctcgctcgcagcggatttctccttctcgttcctacccgcctcctcc

SEQ ID NO: 49075 - DNA, 527 bp, Zea mays
  Clone ID: MRT4577_144761C.1
cggacgcgtgggtggattgggggggtgccaattgcgtggtttttgccgaggaagttgtttactggttaatcttcagctaggatggtgggcgcgcctccgcaaggaccacaatgcctgttctggctacgcgctgatgaacaatgaaaatgaaccactgttacctgcaacagcatcagcagcagcatgtgcaacccaaaaggagccgtattccccagtagaaattttgtactggacagaggcacggttccaaaaggttcggccctaaaaattgctctgcaatgtcagtggtccagcgtagatgatgatgatcgcttctaacatagtctataaaaaatgcatactggagatttggtactagataacaagaggaccttgagtaccgagttttttccggtgaaagattgatgggcgatgccacagcctgaagacgaagaggatgtaaagaaaaaaactcgccaactaagaattgatgatgttgtagtacaaattccaggccttcggttgattttctaagagttagtttggtt

SEQ ID NO: 49076 - DNA, 516 bp, Zea mays
  Clone ID: MRT4577_144762C.1
gagacatccgataaaattggaacgatacagagaagattagcatggcccctgcgcaaggatgacacgcacaaatcgagaaatggtccaaatttttatgggggattgacgtttgtactcttaacttgcatacaaccagtgctgttaaattttgatatttgaatgtagtcgccttcgtctgctgctttattcagataagtttctttatatgcctccatttgattacatctggtgttctttttcgctcttcagaccggtgtcatttttagttatcatcactgaaaccgtctgactggattgtgttggtgccaattgcgtggtttttgccgagggagtttgtttactggttaatcttccactaggatggtgggcgcgcctccgcaaggacaacaatgcctgttctggctacgtgctgatgaacacaaaaatgattgctgttttttgagaaccactgttacctgcaccagcatcagcagcagcttgtgcaacccaaagggaccctattcccagtaaaaattt

SEQ ID NO: 49077 - DNA, 304 bp, Zea mays
  Clone ID: MRT4577_144763C.1
ggggaaaacaaaccattttttttatacaaaagccccccccaaaaagctaaatggaacacagggttattattatgggccggaaccatgggcccattacgcatttagtaaaacgccgttaccaaaccataccaccatttttaactggcccccggattcacccttccttatttttaattcaggtcggagggggatccaaatccaaagtccccaccgggaaaaaccagtttgggggcgcgcccacacaaacacacactattggccctttgccaaggggttggcctttggcccccacaaaaacaccttt

SEQ ID NO: 49078 - DNA, 864 bp, Zea mays
  Clone ID: MRT4577_144764C.1
ttctgagcaggtgctgcaggtgcataaccagatgcagcagcttcggtgtgagccagacgttatcacatacaatttcttgatcgaaacacattgtgggaaggggcagggcaatcttgatgcagcgctgaaggtgcttgacaaaatgacggcaaaaaagtgtgttcctgactgccacacgttcaatcccatgttcaggctgttacttgtgcttggcaacataggtgctgcacataagttgtatgagaaaatgagggagcttcaatgcaagccaaatgtcgtgacatataactgcctcctaaggttgttcaataaggagaagtcaatggatatggttctaaggatgaagaaggacatggatgcggaaggaatcgagccaaacatgcacacctatgcggctctgattgaggcattctgtgggaggggaaactggaagcgagcacacacaacactaaaggaaatgatcgaggagaaatcttttaaaccttcaaagcaggtgcgcgatatggtattggtccttttgagaaaggctgggcagctcaagaagcacgaagagcttgttgaactgatggttgatcggggttttattagccagcctcctaatgatgcattgtggagtgcactatctgcttgctgatcttcatgtgccagattgttatggaagtgtagtcacacataaaaggtatcctttcttatgtgttgtacccaaacaaggcttcctgagtaaaattctttgggttagatgtatgattgtcaaattttgagtgctacaggtatattgggacactagcttaactgttcggcggactagcgaggttgattaataatggaggtgatcatttctggcctaaacttgtgaagctgagt

SEQ ID NO: 49079 - DNA, 530 bp, Zea mays
  unsure (1)..(530): unsure at all n locations
  Clone ID: MRT4577_144765C.1
ggtttggggtttttttgtgcggtgagccagaaagatggctaaccaatgttcttgctgcagccccccaaaaaaccgtgttacaaaggagctgcacacttacatgtcagcatcaagcaaacaccacatgattaagcacctgaaaaaacgcagggtgggcatgacaataagcttaatgggagcaaaaaaaatagccaaacggcaaaaagaagaaacaatctatcagcacagcagggattcaccggagcgaagcagataaatagcacagggagctgtaggagctcttaacctatgaacagcttgtactcctccaagaaactgtaggtcgggacctcaaggttgaacggcgcaaggcccttgcggatcctcccagatatgccgtaatgggaaccatggcatgggcagaaccagccgccaaagtcttcggggttcgggagggggatgcaaaccaggtgagtgcacacgccaatgaccaccagccactngggattcttcacacgctttgcatcctgctctggggggggcagggatgc

SEQ ID NO: 49080 - DNA, 371 bp, Zea mays
  Clone ID: MRT4577_144766C.1
cggatagggacggccgacgtgatgaccatagcgaatagaaaaatcgacaaccggcgaaactgatagccgaacataaattgtgtagatcgacgccatgggcgagatccgaactagaatagcagcacactggcaagcatggacggctggcgaactccggtttaggcgaatgaaacgcgacacagggagatggtgcacgcgtagggactcgagggactcgacgacggacagcggccatgtatgacgtgccgcgcggacgggcgagcggtacacgaactggacagaaccgaccacgcaggctccacggcgaaccaagaaaccggctacgcgcagggggcagaggaccgcacgcgcaaagcgagcagcaagacgac

SEQ ID NO: 49081 - DNA, 980 bp, Zea mays
  Clone ID: MRT4577_144767C.1
ctgcagcccccaactacccccagcctcggaaggaaccttccagaagcgcaagactctaaggccgtcgccttcccattcttcctcgccgcgggggtcgcctgagatcacataaacaatggtgaaggctgttgctgtgcttggtagcagcgatggtgtcaagggcaccatctttttcacccaagagggagatggccctaccgctgtcaccggaagtgtctctggcctcaagcctggcctccatgggttccatgtacatgcacttggtgacaccaccaatggatgcatgtcaactggtgtttattcttctttttactttggcttgcttatgtgatcaggatgtgtgctaagttaatatcagtcattgaactttctacttgttggtgaaatcaaggaccacactacaatcctgcgagcaaggagcatggggcaccagaagatgagaaccgccatgctggtgatcttggaaacgtgacagctggagcagatggtgttgctaatatcaatgtcactgacagccagatcccactgactgggccaaactcaatcattggcagagctgttgttgttcacgctgatcctgatgatcttggaaagggtgggcacgagctgagcaagagcactggaaacgccggtggccgtgttgcttgtgggatcattggactccagggctgaaaacgatcgccggacttgggggtgcctgagaggtccgtctcctgccgtcgccagcagacgagcctgaacattgggagacatcgtgaaataagagcgtcgctgatctgtgatcatcgtatttgtcattatgcacctgtagccaccgatggactaaactgtgctggattatgctgttggatgaccagagtatgtgttacatgtcggttttgatgacatcctatcgtttcgatgtgctttgtggaagtgttgttgcaagatttcaacagtcgcgacttggttttgacaaaaaaaaaaaaaaaaaagcggcc

SEQ ID NO: 49082 - DNA, 269 bp, Zea mays
  Clone ID: MRT4577_144768C.1
gttattaatcaaacaaggttactggacaaattgctttaacttacattggaaatagagcgcgcacagaagagagaagatatggcccggcaggtgtctgaaactccacccttacatgaactgtgctaaaatgaaaccggggcagttcgtacgcgcgtgctcaaattacacacgaccgcacacagttatatataaaccgagcactggatgggcatgattatgcgcctgtgggcttcttctctttgagcatgctgatgacggccacacccgtg

SEQ ID NO: 49083 - DNA, 866 bp, Zea mays
  Clone ID: MRT4577_144769C.1
cattgggtacctcgaggccggccggggccttcctatccatcccttcctcgccgcgggggtcgcctgaggtatgctacctaccaaaaccctcacggatccctggcatttcgatcgcctcactctgtaccccggacgagttgcagttggatctcagatcggtgatcacataaacaatggtgaaggctgttgctgtgcttggtagcagcgatggtgtcaagggcaccatcttcttcacccaagagggagatggccctaccactgtcaccggaagtgtctctggcctcaagcctggcctccatgggttccatgtgcatgcacttggtgacaccaccaatggctgcatgtcaactggaccacactacaatcctgcgagcaaggaacatggagcaccagaagatgagaaccgccatgccggtgatcttggaaatgtgacagctggagcagatggtgttgcaaacattaatgttaccgacagccagatcccactgactgggccaaactcaatcattggcagagctgttgttgttcacgctgatcccgatgatcttggaaagggtggacacgagctcagcaagagcaccggaaacgctggcggccgtgttgcttgtgggatcatcggactccagggctgaactgaaacaaatggtcgttggacttcgggggcgcctgggagtgccgtcaccagcaggctagaataacatcccgaagacatcgtgaaataataataataagagcgcctgatatgtgatcagtggtgtactcgccattaagcacctgtggcaaccgatgagctgaactgtgttggactgttggctaaaatgctggttcgcctgagcatgtgtcacatgtctgtcggttttgatggc

SEQ ID NO: 49084 - DNA, 332 bp, Zea mays
  Clone ID: MRT4577_14476C.1
actacgccgacgatatcgtgatccgacgccccggaccccgcggcggcaatggacattgacgacgcggaacactaccacaccgcctacatgtccacagacgatatcatccaagcctcccgccttcaagacaacaacgaaccgacactaaaggactagcgccaacggaccaacctgcagttggaaaccctcaaggacaagatgaatgaaaaccaagagaaaatcaagctcaacaagcagcttgccctacctcgcccccaacatcggtgagatctcacaaatgaaccctgaagatgaagctgacgatgaagccgctaacactgatatagactcac

SEQ ID NO: 49085 - DNA, 839 bp, Zea mays
  Clone ID: MRT4577_144770C.1
gccggccgtgccgggacaattcagaaaattcgacccgaggcgccttatcgggagcaacggcaacggcagcctctcctccgcgccatcaggcagccatgggtccgggcgcgtccacctccgcgcagccgctgtcccggctcctcctcagcctcccgaagccaggcgccgcgaagcacccccgctcctcctcctcctcctcctctccttcgcagcctcgcccggacgtcgccgcggccaggagccccggcctcgtcctccggcggcgcgaggcagcggccgccctgctgtcgaccgcctttctctcccgcttcgccctccccgcggccgccgcggacggcggggagtgcccgctggaggtggcgccgtccgggctcgccttctgcgaccgcgccgtcggcaccggcgccgccgcccaggagggacagctcatcagggcgcattacacggggaggctggaggacggcacggtgttcgacagcagctacaagcgcgggaagccgctcaccttccgcgttggcgtcggagaggtgatcaaaggatgggatcagggtattgttggcggcgaagggatcccgccgatgctcgctgggggtaagcggacgctgaagctgccaccggcgctggcctacggcgagaagggtgctgggtgcagagggtgggagcccacctcgtgcgtcatcccgccgaacttccacgctcctctttcgacgttcgagtaacgtcgggcagagccaacggctgaggtctccggaaactctgaaagttctgaatgcgcgaggccaaggttcagactgatccatgtggacaacgatcgtagttgcccgcgcagtaagaggttt

SEQ ID NO: 49086 - DNA, 828 bp, Zea mays
  Clone ID: MRT4577_144771C.1
cattgggtacctcgaggccggccgggatcctcaattcaggtctgcagcccccaactaccccagcctcggaaggaaccttccagaagcgcaagactctaaggccgtcgccttcccattcttcctcgccgcgggggtcgcctgagatcacataaacaatggtgaaggctgttgctgtgcttggtagcagcgatggtgtcaagggcaccatctttttcacccaagagggagatggccgtaccgctgtcaccggaagtgtctctggcctcaagcctggcctccatgggttccatgtacatgcacttggtgacaccaccaatggatgtatgtcaactggaccacactacaatcctgcgagcaaggagcatggggcaccagaagatgagaaccgccatgctggtgatcttggaaacgtgacagctggagcagatggtgttgctaatatcaatgtcactgacagccagatcccattgactgggccaaactcaatcattggcagagcagttgttgttcacgctgatcctgatgatcttggaaagggtgggcacgagctgagcaagagcactggaaacgccggtggccgtgttgcttgtgggatcattggactccagggctgaaaacgatcgccggacttgggggtgcctgagaggtccgtctcctgccgtcgccagcagacgagcctgaacattgggagacatcgtgaaataagagcgtcgctgatctgtgatcatcgtatttgtcattatgcgcctgtagcaaccgatggactaaactgtgctggattatgctgttggatcacctgagatggggttacatgtcggttttgatgac

SEQ ID NO: 49087 - DNA, 1657 bp, Zea mays
  Clone ID: MRT4577_144772C.1
ttactcggtggcccatgcctcgccgaccgttctcggctctcgcccagcctgaccggaacgaaacgctgaggcagcatcttccccgccgtcctccgccgcctcccattttcaccttggctgcagcctgcaacacaatcctacgcttccgacttcaacgcgcgcccctcccattttcacctagccctactcctttgtacataaaggaagatgggagcatatgcaacgactggtatgcagatgatagcaacacgcccttccatcccggcctacaggcaaatacttgggtcgacatcagcactatctgcatttggaaggtcaatctgttccagaactggctttgccatctcttctaaagccacatcagcaggaccactggtttcttcgaattgcaagagggttgttgtgagggcaatgtcgcagagaggtgcccaaggacttcccattgatctcacaggtaaaagagcatttatagctggagttgctgatgataatggttatggttgggcaattgctaaggctcttgctgctgctggtgctgagattcttgttggtacatgggtgcctgcgttgaacatatttgagacaagcttgagacgtggaaagtttgatgaatcacggaagctacctgatggatctcttatggagattgctaaagtatatccactggacgcagtttatgacacccctgaggatgttcctgaagatgttaaagcaaacaaaagatatgctggagcttcaaactggactgttaaggaagttgttgagactgtaaagaatgactttggtagcattgatatccttgtacactctctcgccaacggtcctgaggtaacaaagtcactgcttgagacatcaaggagaggataccttgctgcaatttcagcatctagttattcttatgtttctttacttcaacacttccttcccataatgaatccaggaggtgctagtatctctttgacctacatagcttctgaaaggataattcctggctacggtggtggtatgagttcagcaaaagcagctcttgagagtgatacaagagttcttgcatatgaagcaggtcgaaaaggcaaaatcagagtgaacaccatatcagcaggtccattgggaagccgagcagcaaaagccattggatttatcgagaagatgatagagtattcttatgttaatgcaccactgcaaaaggaattattggcagatgaagtggggaacacggcagcattcctggtgtctcctttggcatcagcaatcactggttcaactatttacgttgacaatgggctcaacacaatgggacttgcacttgacagccccactttatccacatgagcacatttcagcagaatgcggcgcagttaggtttgaattacgtgcaggcctgagcacggcagtctggttttttgaattaatctgtacgatgctagattttgcaggagatttcgttttttgttttcaataacttggactatcagttgcctgttagaaataagaactgtgataggctgcagtctcctggtcaatgcaatgcgctaatcctgaattgcggatttagattttgcaggaatcgagtttgttttgctgtcagctgaaagtttttataataaatttccgaggtctgggacgtcagggtaaaaaaaaaaaaaaaaaagcggcc

SEQ ID NO: 49088 - DNA, 242 bp, Zea mays
  Clone ID: MRT4577_144773C.1
gcgacgcgtttttgcaacattaactttttctgctattctacccacaagatgcggatgagaatggggactttttacaacaacaacaattgctgccatttatctcaacttgatttgacaaatcctaccaccttattacagcatgccaccattggtggcgccatcttctaaattattttatgctttatactgtgataataaagttctcataccgatatgtgcgcatataaaaaaaactgtaaacg

SEQ ID NO: 49089 - DNA, 1091 bp, Zea mays
  Clone ID: MRT4577_144774C.1
cgatccacgggcggcagggcctgctggtcgttgcggaatagtaacgcaacttgactgcaatgtttggctgcgcctacaaatccaacgcaccaacacaccgcgcgcgtcctcatcctcgcttcaggtctgcagcccccaactacccccagcctcggaaggaaccttccagaagcgcaagactctaaaggccgtcgccttcccattcttcctcgccgcgggggtcgcctgagatcacataaacaatggtgaaggctgttgctgtgcttggtagcagcgatggtgtcaagggcaccatctttttcacccaagagggagatggccctaccgctgtcaccggaagtgtctctggcctcaagcctggcctccatgggttccatgtacatgcacttggtgacaccaccaatggatgcatgtcaactggaccacactacaatcctgcgagcaaggagcatggggcaccagaagatgagaaccgccatgctggtgatcttggaaacgtgacagctggagcagatggtgttgctaatatcaatgtcactgacagccagatcccactgactgggccaaactcaatcattggcagagctgttgttgttcacgctgatcctgatgatcttggaaagggtgggcacgagctgagcaagagcactggaaacgccggtggccgtgttgcttgtgggatcattggactccagggctgaaaacgatcgccggacttgggggtgcctgagaggtccgtctcctgccgtccccagcagacgagcctgaacattcggagacatcgtgaaataagagcgtcgctgatctgtgatcatcgtatttgtcattatgcacctgtagccaccgatggactaaactgtgctggattatgctgttggatcacctgagtatgtgttacatgtcggttttgatgtgacatcctatcgtttcgatgtgttttgtggaagtgttgttgcaagatttcaacagtcacgacttggttttgatatgcagtcagcagcagctcctgagttgtgattgctcagctgcggtccttttctttttttgggataactgatttcttgttgaaatacgctcgctgcatcacctgt

SEQ ID NO: 49090 - DNA, 842 bp, Zea mays
  Clone ID: MRT4577_144775C.1
gcccccaaggccccaactacccccagtctcgtatgataactatccagaagctcaagactcgaaggccgtcgccttcctatccatcccttccttgccacgggggttgcctgagatcacataaacaatggtgaaggctgttgctgtgcttggtagcagcgatggtgacaagggcaccatctttttcacccatgtgggagatggccctaccactgacaccggaagtgtttctggccttaagcctggcctccatgggtttcatgtgcatgcgcttggtgacaccaccaatggctgcatgtcaactggaccacactacaatcctgcgagcaaggagcatggagcaccagaagatgagaaccgccatgccggtgatcttggaaatgtgacggctggagcagatggtgttgctaacatcagtgttaccgacagccagatcccactgactgggccaaactcaatcatcggcagagctgttgttgttcacgctgatcctgatgatcttggaaagggtgggcacgagctcagcaagagcactggaaacgctggtggccgtgttgcttgtgggatcattggactccagggctgaaaatgatcgctggattttgggtgcctgagagtgtcgtctttgtctcctgccgtcgccaacagaccagcctgaactttcctagacatcgtgaaataagagtacctgatctatgatcagtgtatttgccattaagcacctgtagcaaccgatgaactaaactgtgttgaactatgctggatcgcctgagtatgtgctacgtgtcggttttgagaacatcctatcgtttcgatgtgcttttgtgaaacgtgttgttgcaatc

SEQ ID NO: 49091 - DNA, 1612 bp, Zea mays
  Clone ID: MRT4577_144776C.1
atgctacctaccaaaaccctcacggatccctggcatttcgatcgcctcactctgtaccccggacgagttgcagttggatctcagatcggtgatcacataaacaatggtgaaggctgttgctgtgcttggtagcagcgatggtgtcaagggcaccatctttttcacccaagtgggagatggccctaccactgtcaccggaagtgtctctggcctcaagcctggcctccatgggtttcatgtgcatgcgcttggtgacaccaccaatggctgcatgtcaactggaccacactacaatcctgcgagcaaggaacatggagcaccagaagatgagaaccgccatgccggtgatcttggaaatgtgacagctggagcagatggtaatggtgttgcaaacattaatgttaccgacagccagatcccactgactgggccaaactcaatcattggcagagctgttgttgttcacgctgaccccgatgatcttggaaagggtggacacgagctcagcaagagcaccggaaacgctggcggccgtgttgcttgtgggatcatcggactccagggctgaactgaaacgaatggtcgctggacttcgggggcgcctgggagtgccgtcaccactcaccagcaggctagaataacatcccgagacatcgtgaaataataataataagagcgcctgatatgtgatcagtggtgtactcgccattaagcacctgtggcaaccgatgaggcgaaccagcattatccaacagtccaacacagttcagctcatcggttgccacaggtgcttaatggcgagtacaccactgatcacatatcaggcgctcttattattattatttcacgatgtctcgggatgttattctagcctgctggtgagtggtgacggcactcccaggcgcccccgaagtccagcgaccattcgtttcagttcagccctggagtccgatgatcccacaagcaacacggccgccagcgtttccggtgctcttgctgagctcgtgtccaccctttccaagatcatcggggtcagcgtgaacaacaacagctctgccaatgattgagtttggcccagtcagtgggatctggctgtcggtaacattaatgtttgcaacaccatctgctccagctgtcacatttccaagatcaccggcatggcggttctcatcttctggtgctccatgttccttgctcgcaggattgtagtgtggtccagttgacatgcagccattggtggtgtcaccaagcgcatgcacatgaaacccatggaggccaggcttgaggccagagacacttccggtgacagtggtagggccatctcccacttgggtgaaaaagatggtgcccttgacaccatcgctgctaccaagcacagcaacagccttcaccattgtttatgtgatctcaggcgacccccgtggcgaggaagggatggataggaaggcgacggctttggagtcttgcgcttctggatagttctcttccgagactgggggtagttggggccttgggggctgcgacgaggtggaggagcgggatgcgcgcctgtgctggatttgtaggcgcagccggacagagcagtcaagttgcgttgttttttttttttttt

SEQ ID NO: 49092 - DNA, 973 bp, Zea mays
  Clone ID: MRT4577_144777C.1
cattgggtacctcgaggccggccggggaggaagttcgcaacttgactgctctgtccggctgcgcctacaaatccagcacacaggcgcgcacggcgcgtcccgctcctccgcctcgtcgcagcccccaaggccccaactacccccagtctcggaagagaactatccagaagcgcaagactccaaagccgtcgccttcctatccatcccttcctcgccgcgggggtcgcctgagatcacataaacaatggtgaaggctgttgctgtgcttggtagcagcgatggtgtcaagggcaccatcttcttcacccaagagggagatggccctaccactgtcaccggaagtgtctctggcctcaagcctggcctccatgggttccatgtgcatgcacttggtgacaccaccaatggctgcatgtcaactggaccacactacaatcctgcgagcaaggaacatggagcaccagaagatgagaaccgccatgccggtgatcttggaaatgtgacagctggagcagatggtaatggtgttgcaaacattaatgttaccgacagccagatcccactgactgggccaaactcaatcattggcagagctgttgttgttcacgctgaccccgatgatcttggaaagggtggacacgagctcagcaagagcaccggaaacgctggcggccgtgttgcttgtgggatcatcggactccagggctgaactgaaacaaatggtcgctggacttcgggggcgcctgagagtgccgtcaccagcaggctagaataacatcccgaagacatcgtgaaataataataataagagcgcctgatatgtgatcagtggtgtactcgccattaagcacctgtggcaaccgatgagctgaactgtgttggactgttggctaaaatgctggttcgcctgagcatctgttacatgtctgtcggttttgatggcattccgaccgtttcgttgtgctttgcgctt

SEQ ID NO: 49093 - DNA, 1296 bp, Zea mays
  Clone ID: MRT4577_144778C.1
tgcgccgctcgagccggccgggctgcggagcccggccgagccgggaacgcacctacacaccgcgcgcgtcctcatcctcgcttcaggtctgcagcccccaactacccccagcctcggaaggaaccttccagaagcgcaagactctaaaggccgtcgccttcccattcttcctcgccgcgggggtcgcctgagatcacataaacaatggtgaaggctgttgctgtgcttggtagcagcgatggtgtcaagggcaccatctttttcacccaagagggagatggtaagccatttcatattctgtgatatggggtgtttggttccaccaaactaaagtttagtccttatcacatcgaatgtttgaatgataattatggatattaaatatagtttaattataagactaattgcatagatgaagactaaaagataagataaatttattaaacctaatcaagcatgtatttaatacttataattgatattcaaatatttgatgtgtcacgaactaaactttagtcagaaaaacttaacactcctatagtattctatattcaattgaatgttgtcttcaccttgttgactctagctgcttggatctattgttaggccctaccgctgtcaccggaagtgtctctggcctcaagcctggcctccatgggttccatgtacatgcacttggtgacaccaccaatggatgcatgtcaactggaccacactacaatcctgcgagcaaggagcatggggcaccagaagatgagaaccgccatgctggtgatcttggaaacgtgacagctggagcagatggtgttgctaatatcaatgtcactgacagccagatcccactgactgggccaaactcaatcattggcagagctgttgttgttcacgctgatcctgatgatcttggaaagggtgggcacgagctgagcaagagcactggaaacgccggtggccgtgttgcttgtgggatcattggactccagggctgaaaacgatcgccggacttgggggtgcctgagaggtccgtctcctgccgtcgccagcagacgagcctgaacattgggagacatcgtgaaataagagcgtcgctgatctgtgatcatcgtatttgtcattatgcacctgtagccaccgatggactaaactgtgctggattatgctgttggatgaccagagtatgtgttacatgtcggttttgatgacatcctatcgtttcgatgtgctttgtggaagtgttgttgcaagatttcaacagtcgcgacttggttttacaaaaaaaaaaaaaaaaaagcggcc

SEQ ID NO: 49094 - DNA, 599 bp, Zea mays
  Clone ID: MRT4577_144779C.1
cctgtgaacacttttttttctctatgtggtgcttgagaccgcagaaacaagggagcacagatttgtcccagtttttaatatatccacaaaaacaaaaaaacccccctatttttcgaggagaagagggggttcgggttcacatcccccggccccccccagaaaaggggggggggaccccccccccgggggggcctcgcggcccccttccccctcttatttttctaagagggggggacgggcgaaccttttgggggggggaaggggaacaacaaaaaggaggccccccccccccaagaagggttgtggtccccggggaaaaactttaacccccccttgttcttgttttctgggggacccccccccccccgcataaaaaacttcggggggggcccccctaaacaaagggggctcggggggggcccaacacccccccgatgtccgttttgaaaagggggggacagaggcaccgctttaaaactccccgcggccctgggaatacgccctggggggttatgggggggggcgggcccccccaggagaaaaaaaaaaaaaggagtcccgggcccccccggaacgaggggggtaaaaaaaaggggggg

SEQ ID NO: 49095 - DNA, 198 bp, Zea mays
  Clone ID: MRT4577_14477C.1
gtgctggtgtttcatcccaaaaggcactcgtgtttgttgccagaacaagtattgccctgcgcaaaaaaacagtggccctttattgccctgaacatgaacgaggcaacacacactttgggaccgtaagatgtgtaaatactgctgaaccaacctcggtagatgggcattatatccaattacagcaatatgtgaaatgat

SEQ ID NO: 49096 - DNA, 622 bp, Zea mays
  Clone ID: MRT4577_144780C.1
tgggtacctcgaggccggccgggattttcatagcccaccgaattccctgcgattcctctcccctcgactcctcgtctccccctaaggagtcgctcccaaactaatcgtagacaccatcgtttcatcctagataaagaattcatggagcacaagggggctgaatgacaggacgccgaagaacccatcctctgcttctataactgaggcttcttctgcacctcgcaaaccatgaacatgtgctccaatggtcacaatgatatgataacgaatcaagatcactccaagatgcctgcctcctctatccatagtatcgcgaacgccagcaactgcggcatggaaccgcatgatgctcgaaacataacctgatgagctgatgcccgagatgaccttcaaacaaagaacgggcaactacccgctgatgttgccgaacccagcgaggttccggcgtcgatctctcaaggatgaaaatgataacctaaccgttgcaacgcctgcatgaagacagttggacttacaggattcaactgacgtggagacaacttgtactgggcacttcagctatactgagacaatcatgactgccagttccactatcgagatgctgccagagaccccattgaca

SEQ ID NO: 49097 - DNA, 294 bp, Zea mays
  Clone ID: MRT4577_144781C.1
cagctgatcagggcacataaatacaagtggtagaaccagtatttgatccctggcagtttggctctagagcctctgctcttaaccactgtgatgttgccactatatagtacagtcagtttgcagaatttcagtttcttttccattcttttgaagattaagagaaatctgtcacttacaagaatccaactgaagttgtgataaaagtgatcttgatcgtgctgtttgtgtttatgatactacagtcgtcgggaatggacaagaggctccagttggagtgctcagaatactcctcga

SEQ ID NO: 49098 - DNA, 506 bp, Zea mays
  unsure (1)..(506): unsure at all n locations
  Clone ID: MRT4577_144782C.1
ctccgnaaaaaaaaaaaaaaaaaaaaaaaaaaaaaaaaaaaaaaaaaaaaaaaaaaaaaaaaaaaaaaaaaaaaaaaaaaaaaaaaaacaagaagggggtcacgggcccttttttagtttttacccgggcccccaaaattggccctggggcttgttgccttggtgcccaagcgttcccccctgggtttaacgggggggggggggtccgccgggggaaactccatgggggggtggctccaacgggggggggggccctgttcacgatggggcccccggggcgcgggcggcttgtaagcgttcgatcggccttgtggggcacctttccatctttgggggggctccatcttcctccgggggagagaaaatggtattggggggggggtgtttttttgtttttgcccagggcccgcgcccccggctttggcggtgtcccagtgaggttcgcttttttttttccggtttcttttttcccccccgaaaaaaataaaaaaaaaaaaggggggggg

SEQ ID NO: 49099 - DNA, 405 bp, Zea mays
  Clone ID: MRT4577_144783C.1
caaaggacgggggcccccttttttttaacaaaaacaatgggtccccaaacgtggtatccattataattaccccttgttgccaacaaaacgtttttttccttgatccaaatccttattttgggggccacaaacaaagtttcccttccccttgcccttttaaaaaaatcgataccccccgttgggcgttttgggtttcccatggccatctaataaataaaccccaccttgttttttggcccatttaaaaaaaaatacgccaaaagcccctttcacctttgggactgggggttgccactgtttggaacccccccggaaaccccccctctaaggcccttcctaaaaatctggccggagggattcttcggaaaaaaacccggaaaaaaaactttgttgatccttttgaaa

SEQ ID NO: 49100 - DNA, 227 bp, Zea mays
  Clone ID: MRT4577_144784C.1
caggtgtatcaactattcactgattaccaaattaaagatgggcatgttattctgcaactgaatgcgaatccctccagtgatttgctctgtgtacgaatccggatatttgaactctttgaagattggtttctcagtcctgccactttcacagtgtacgaataccgcagaccagataaacagtgtaccatgctttatagcacttccaatatcaacaatcagaaagtctg

SEQ ID NO: 49101 - DNA, 199 bp, Zea mays
  Clone ID: MRT4577_144785C.1
acattatctaattgttcaatattatattattatgtttatccggcaaaaaataccaaatcggttccacaaggataaataacccaacctaaataaaaacccaggtttccacaagcaatcctcccctacatcctatgatactatcgtttaataagaatcgagaacctattaacaaacccgagtggtatgaaaaataaaacat

SEQ ID NO: 49102 - DNA, 1203 bp, Zea mays
  Clone ID: MRT4577_144786C.1
ccggccgggaactgtttcacggcgcaccagtccggccggtggtactgcgcgtttgccgtcacttcggccacctgcgcttcgcctccttcctctcaatggcggcgccccagcaatccgctcccctgtccgggtcggcgcccaagaggctcagggcgatggcctcagacgccgccgcagtgccgaatcccccagcctctagtggctgccccgcgatgaaggcggagttcgccaagcacgccgagtacctcaacaccctgaatgacaagagagaaaggcttgtgaaagctagtcgggatattacaatgaacagcaaaaaggtcatctttcaggtccacagaatcacgaaagttaacagggacgaagttctctcgaaggcagaaaatgatcttgctgcagttgttaatcaatacattgcaaaactagtaaaagaattacaaggaactgacttctggaaactcagaagagcctacacctttggtgtacaagaatatgtcgaagctgcaacactctgtagattttgcaagactggcactctattaagccttgctgaaatcaatgattctttactagcactaagtggtcaatctgttgagcccttacagttaaatgtgcttgactatcttttaggggttgctgatttgtccggagagcttatgaggctcgcaataggccgtatatctgatgggggaagttgaatatgcaaaaactatctgtgcttttgtgcgggatatttacagggagctgactcttggggtgcctttaatggatgacaatagtgagatgaagaagaaaatggaggtcatgctgcaaagtgtagtaaaaattgagaatgcttgcttcagtgttcatgtgagaggttcagagtacattcctctgctagaatcatcagcagatccaggctattcttattttggtgccccggactttgatcaatgaatgttttgaagcaagaactaactgagtgttaaaggagcttagatcaatttaaggagagcggttgtgtcaaggctactcttaggtccacagttgggtgtttgattttatcgccagtttatgttgcacatcttgaagtctgtaaatctaagccccaacgtggtaatccgggaaaatcatgttgcaatacaacctttttatggtgcagactgtttgactgtaatactcaaagtgttcgggagaattaaaggagacaatgtctccaaaaaa

SEQ ID NO: 49103 - DNA, 450 bp, Zea mays
  Clone ID: MRT4577_144787C.1
gccgcgacgttggctctcttccagcagcacaactgctcgctgctcaaagccaagtgccttgagttcgtcaccaggtcgcctgagactctcgatgctatcctggcgactgacggctacgagcatctggtggcaagctgcccctcggtgctggctgaactgctgagggctgcgcgtggaaggaagatctgagctggacgatgatttcatattatggtttgcctaagatgtgtgcgaactaaaaactatgcatgatgaactagtagtgcttgcagttgatttcctgcccctcctttcagtttgacctgcgcttgtcatgcatgtattgtatgcacatacatgagacgggcagctagcattttctgtggttagatctcgtctcggctttgtgcctgtcatttgggggcttaattgtaccggttgccgtttctcgttccaaaaaaacaaaaattc

SEQ ID NO: 49104 - DNA, 711 bp, Zea mays
  unsure (1)..(711): unsure at all n locations
  Clone ID: MRT4577_144788C.1
gctacccccgaagcctccgcntgaagaaacaagaaaaaggagaatgaaatccgcgatgcttcccctcctcctcctgctcgccgtcgccggccccgccgccgcgaagccgacggcctacgaggcgctggcggccttcgacttccccccgggcatcatccccaagggggtcgtctcctacaccctcgacaacgccaccggcgacttcacggcgcacatcaactcctcctccacctgcgagttctccatccagggctcctactcgctccgctacaagcccgacatcagcggccgcatctccgtcgaccgcctcaccaacctccagggcgtcaccgtcaaggtcctcttcttctggctcaacatcgtcgaggtcacccgcagcggcgaccagctcggcttctccgtcggcatcgcctccgccgacttcggcctcgacaacttcctcgagagccccacctgcggctgcggcttcgactgcaacgacctgctgctgccgcggtccaccgccgggtcaagcctgcgcctgcgaggtgcgttctaggatcccccaccgagctctctcacaagtcacaagcgccccttcaaaattaagctagttcttggatggattattcatgctcttgttgctcgaagataccaaggggctggtagtattttctagtgctgttcctgttttagatggaccaacaatttcaggactcgatttcgatgggt

SEQ ID NO: 49105 - DNA, 596 bp, Zea mays
  Clone ID: MRT4577_144789C.1
gctgctcttccggctgaccaggatgaggcttacgggcaaactaacctgagagctaggcatgtgcctggcagaaatgtgcgcacaaacttgctgaccatgtattgtaccaccaattagatcacatctctactcaaaaatttactgacattgattgaaacctatgttgatgcccatacagccgacaactacatgctgcgctagatgctgattgggtttaccattaggcgcaccaaccagcgcacgagaacctgctatactaacgcatatgatattgcgtacattattcggaagatggttgagatgatgatcaacaatattattacatgtgatcttacataacaccttaataaactcattcctaaagttattgccaaagagattgacaaatatacctacaacattttctccattataaacgcacttatacacgtggtgatgatactcgaggccatcctgattgacctcaagaaggatctggaggagtatgtcgactaccatgaggactacggagaggaccttgatatgactctcgagagtgctgacgctattcatgaggctattcatgacgatgatgctatctgctacttcattatcta

SEQ ID NO: 49106 - DNA, 522 bp, Zea mays
  Clone ID: MRT4577_14478C.1
gaggaatgctgtctacgacctccagtggccctcaaacaacaacaattatctgatcgctgaatttgtcgatccagaagaggcaatggctaaccaaactctagtacctccccatgttcctgctacttcgagaggtttattgcccactccagcacggtttgccaagctgcctcccacctctgaccctggaccagcaagggagagccttcctcctcctccactgagcctggaacctgcccggacactggatgagctcttcaagaagacacagacgtacccaaggatttactacaggccactgtcagaagaggaggtatctgctaaacgtgcagctcacgacaaaggtagaaggggatagtgggctttagtttgtcgctcaagctggtattttggtaagtatcttgtacttgtcacagctgttttcagatgcaaccatacttgtcacagcacagcgatcgacaggctctcttctccgcagctgactccaccagaccagcagctgcagctctatgaagaactactgca

SEQ ID NO: 49107 - DNA, 676 bp, Zea mays
  unsure (1)..(676): unsure at all n locations
  Clone ID: MRT4577_144790C.1
attgccctcctcacagctacactattgtagacaccaatactctccttctacacctacactaggctgatgaccactctcaccggctacgatcaatactgagctgcaataccgccctctggctgctcatcatacgagatgcatggacggcctccactgtccccagcggcggcaggtgataggaggagtaccccgcgacgccgctccaccagcctctgtcgcatccggtgacggacagcaggcttgccagcctcgagctgcgcattgggaacatggtcgacgctgccgcagatggatgacacggcgggcggcacaggcaagaggaagtgacctgaacaacaacgagccgagctctctggactctcggctgctagaggggccgtccgcgtcactgcttgtcgacggatacaagaccttggtccactagctagccagagcctactatgtgtaatccagctgatttgagagaacagtaattgtcttggaccttctctttttttctgagatcttggtaactttattatcgacctcgggtgagtgtatttgttcgtgtttcggcaaaattttcgtgtaactttattatcatggcaggatctgtanaaatgttcctgccaattctaggtgttgttgcaacagagatgatatatgatggataatgacaatggcatgatcgacctgc

SEQ ID NO: 49108 - DNA, 280 bp, Zea mays
  Clone ID: MRT4577_144791C.1
tgcgttcagcgggcctaagcgggcacccgtgttttttaccgccacacacagtggggggagtgatgggcaactaatggttgtctttagtgtaattgaacacttgacgctttcgtctctctgatgaaagagctagcctactgacattgggcaaatggctgtgcgcttgtcatgcactaacacgcgatcaccttcacaacggcggtcaagatttcggagggcgtatagttcttggtgtcgacattcagtgtaagagagctcgagctcattattctacctgact

SEQ ID NO: 49109 - DNA, 293 bp, Zea mays
  Clone ID: MRT4577_144792C.1
cgaagccgaagcgaagagaaaggtcgaggcgggaggaccgcgatcccgtccgcggtcgtgcacggcccacatccgccgtagcgtgggcgtgcgcagctggccagcctattacgtgtacgtgcgggaggagctgtcagtagcgtgcggaccaccacgcagatgctgccgtctggcgaccgatctctgattcattgatgctttcgtgaaatgctcccgccagcgaacttctcctgtacgcgtgcatcaatgcttcttctactactatgccttttgtttatttttaaggagacaaa

SEQ ID NO: 49110 - DNA, 255 bp, Zea mays
  Clone ID: MRT4577_144793C.1
cttgcatgccataaccgcgttctggtagacagcccgcggcttgtatgtcgcgggtttacccaaaccttatgtgtccaaaatgagctgctccttgtcttgctcactacggctacatgccaccagaaaatataatccactggaggtaaacaactccccgccctccatccacagagataatgcggggaggttaacatgaacatattcgatcggccgggcgaaacggtgcacgccaggtcaatgaaggctctctcagtg

SEQ ID NO: 49111 - DNA, 776 bp, Zea mays
  unsure (1)..(776): unsure at all n locations
  Clone ID: MRT4577_144794C.1
ctccgtccggcgtcttcgacacagagggctctgatcctcctctgccatccctctctgggccccgccctctgcccctcagtcagtcgtcactcccccgccctcccaatggccacctcgtccgtgctcccgttccacctcccgtcctgcgcgcgccgggccagcaccgccgcgcgcgcctccgcggccccggtggcggcggcggcggcgacgaccgcgcagtccctggaggagtcgttcggccggaagggcctgcggttcgtggccgacccggccggcggggcccccgccgcggagctcagcgtgcggaacggcagctcgctgcacctccgcctcggcgacggcctcgtcacgtcctacaagcccaaggtgcagtggaaggacgacgggtgccgggaggtgctgcacaccgtgggcggcaagggcggcgtcggcctcgtcctcagcgatcaggcgtcaggtggccagtcgtcgctgctcgacggcgccgagtgggccgtcagggacgccgactccgattcctacgacgccgtgcaggttgagctcgggtgcaccatggggaagctggacatctcgtacgtggtgacgctgtactcgctgagcatggcgacggcggtgatcgtccggaacacgggcagcaagccggtggcgctgacgggcgcggtgctgagccacatcaagttcgacaagcgaagcggcacggccgtggagggcctgcggggctgcccctactgctcccacccgccgccggncgccgccttcagcctcctgtccccggc

SEQ ID NO: 49112 - DNA, 467 bp, Zea mays
  unsure (1)..(467): unsure at all n locations
  Clone ID: MRT4577_144795C.1
agcagtacaagaagcaagatagcaataagcaccgtatcagttgcactttcaattcgcgaccgacaaccgacgacgatgagctccacggcgacggcggcggattgcggcggcgccaagacgtcgtggccggaggtggtcgggaagagcgtggaggaagcaaagaaggtgatcctcaaggacaagcctgacgccgacatcgtcgtgctgcccgtcggcacgattgtgaccgcagattttgtgcccagccgcgtgcgtatcttcgtcgacaccgtcgcccagacaccccacatcggctgattaattaagaggctgggtgatgcctagctagctttgattccttccttgctccagaactgaatattctgtaaaatgaataagtcggacatgttatatatgtattcatgtccgtacgtgtatctgacgaataatgcatggatgtgtacgtgtgtttcttcccttttnnanaa

SEQ ID NO: 49113 - DNA, 369 bp, Zea mays
  Clone ID: MRT4577_144796C.1
tttgctaaatggcgttcctggggagatcatttcacaccagaggggccttaggcaaggagacccactatcccctttgttgttcattttggttatggatgttctgaacttgctcattcaaaaggcttccgatgaagggttacttcagcagctatcttctgggactttacatcacaggctttctctctacgcggatgacgcggtggtttttcttaggccggtggcttcagacatcagcttggtcctggagatccttcggctttttggggaagcctcggggctcaagaccaatgtcctgaaaagtagtgtgttccccattcgttgtaccgaagatgatttgatgcgggtccaagcttctctcccctgccccat

SEQ ID NO: 49114 - DNA, 1404 bp, Zea mays
  Clone ID: MRT4577_144797C.1
cgggcacgtgggcggacgcgtgggccgctccgcgtctccagagggctctgctcctcctcttcaatcccactcccgccccgatggccacctcctccgtgctcccgctccacctcctgtcctgcgcgcgccgggccagcaccagcaccagcaccgccgcgcgcgcctccgcggccccggcggtggcggcgacgaccgcgcagtccctggaggagtcgttcgggcggaagggcctgcggttcgtggccgacccggccggcgggcccctcgccgcggagctcagcgtgcggaacggcagctcgctgcatctccgcctcggcgacggcctcgtcacgtcctaccggcccaaggtgtactggaaggacgacgggtgccgggaggtgctgcacaccgtggcgggcaagggcggcgtcggcctcgtcctcaacgacgcgacgtcctcgtccgcccagccgtcgctggtcgacggcgccgagtgggccgtcagggacgccgactccgacttctacgacgccgtgcaggtggagctcgggtgcaccatagggaagctggacatctcgtacgtggtgacgctgtactcgctgagcatggcgacggcggtgatcgtccggaacacgggcagcaagccggtggcgctgacaggcgcggtgctgagccacatcaagttcgacaagcgaggcggcacggccgtggagggcctccgtggctgcccctactgctcctacccgccgccggccgcagccttcagcctcctgtccccggccgaggccatgaagcgggaggaccccggctggttcggcggcggcggcggcgaggagccgcgccagggcgtctggaccatcgaggaggacctctacaccacgctcaagaagaaggtgagccgggtgtacgcggcgccgccggaggagaggaagaagcgcgtctacagcaccgcgccgtccaagttcaccaccatcgaccagtatagcgggctcgggttcaggctggtgaggatggggttcgacgacatgtacctctgcagcccgggaggcatgtacgacaagttcggcaaggactactttctgtgcacggggatggcgtccatgttggtgcccgtcgtcgtcaaccccggcgaggagtggaaggcggcgcaggtcatcgagcatgacaacttgtaacttcttcttcttcttttggtcaacggaattacagaatcgaatggcgcgcggctccattctcgaatacatgtcgatggtccgatctccagtgagatatatacatcaatacagatagttctttccatgggaagtgttaaacattgaatgtaaaatgagaaagtgaatgagaaaactatcatttttattgatctttgaaatctctactatatagagcacgagtttatttcaaaaacccaaaaaaaaaggaagg

SEQ ID NO: 49115 - DNA, 387 bp, Zea mays
  Clone ID: MRT4577_144798C.1
cgctgccgccccgctccccaagaacagccccgacagtatctgccaattgatcgagctccatgcgccgacgctgccccgacgcctgaaccgtctacgatacgaacgccgtctgacgatcgccccgatcgacgcctccgataccgtcttagagtactacgtaggagttaactacacggagcccaaaactcggagaaggataaggaggaggagatgctcggatcgggcgaccacaagggagaaggtgagatggcagacgaccaaacctgagaggaaacatccgctggcgcggaccaggggaaagtggaggccagggagcacgcatacaaactctaggaagcaagggcagacataggaaaactcaattacgactgcgacggcaaagtaaca

SEQ ID NO: 49116 - DNA, 562 bp, Zea mays
  Clone ID: MRT4577_144799C.1
cgcccacgcgtccggtccatcgtgagcttctgatgccaattaggattatacatgtttcctcgctgcgctcaagtgggagaacaagagatcagcctagacactagtcatctgctgcaagcagaaaatggtatagcacagtgctcctggactacatttcacctgtgcccaatacttgctggtagcagcaattcctgatcattagaaatcgtgtttgcgcctgcagcacccttattcacttaagagttccaagggagcaccaattctgccacggccagtcttcgttttcttcatcgcgacatttggtttctatgtatgctatctctccttcaatcagataacgctagagaacaacagagaggggaatagtcagaagaacaaagggacgatatttgcagaaagccttatgtgccatatgaggagctcagttatgtgcactttccagaacctacaagttatagcaggggggagtgctcgtgtactcctgttcggttctttgtaattgtgtctatgcaaagatcgggaagtggatggtttgagaccttgatgaatagtcaccctaaca

SEQ ID NO: 49117 - DNA, 756 bp, Zea mays
  unsure (1)..(756): unsure at all n locations
  Clone ID: MRT4577_14479C.1
cggccatccatggctctgctccgcgccgccgccgccgccctccgccgccgcgcccgcgtcgccgctctcccggccgtctcccccttcccccacacgcacggccaaacctcctccccgtccccctcacccggtcccgtctccaaccccgccgcccggcgccacctcatcaccctaagccgccgcggcccatgccttcgcccgccctccgcctccgcgtcggcgtcctcccactacatcgacaggatcttgctccccagcagcttctcgcacccgctctcgacctcctcccgggacaaggacacggacagggacaaggaggagagcatcccgccgctgccgccggcgtcgtgggtggagaggttgctgccggaggcggcgcggccgtacgcgatgctcgcccgcctcgacaagcccatcggcacctggctcctcgcctggccctgcatgtggtcgatcaccatagcagcgatgccggggaagctccccgacttgaaaatgctggcgctcttcgggtgcggggctgtcctcctcaggggggctggttgcacggtgaatgaccttctcgatcgcgacattgataacaaggttgagcgcaccaaaagcaggccctttgcatcaggcgctctaaccccttctcaaggagtggccttccttggagctcagctactgctgngattgggcattcttctccaacttaacacttcagccgtgttcttggggcatcttctcttcttctggngtttcttatcccctgat

SEQ ID NO: 49118 - DNA, 350 bp, Zea mays
  Clone ID: MRT4577_1447C.1
cagagacaatgtggctgctccagactgtcttctcttgatcagcttgcatttgcagagagccgcgtcagcatgacatcatccacatccgatcaccatatgcaatcttccccctctattgcttgccaatacgtgtagaaccagacgatttctcactcgtaccgtctgatcgatgacttaatctactgtaacgacgacttcgcacaacatgtagatccgtggctgtctaaatgcgtctgaggcctctctactactagtgttgttgctaattgcaaactcatccagtgctcttggttctacgcttgaacttgcgtagtgtccggatcgacaggcacgtcctcgatctaactaca

SEQ ID NO: 49119 - DNA, 978 bp, Zea mays
  Clone ID: MRT4577_144801C.1
cattgggtacctcgaggccggccggggctctcgttcatctctccattccatgccatgccatgccatggcccctcctcactttcgttcgctttgcgctttttgagtttaaaagaaaagaagaaagcggccttgcccacgtttcaaaccatcttgaagaaggagatcgagaggcattcctacggcaccgtctttttttcccgattctcctgttcttgtttgtgagtgaaagcgggatccgacatccgaggagaggtcgaggccgggcaaagtcgaagtccgcgctccggtctccagctgacgaagcaggatgcactgtgacgcgctggtccatcgtgagcttctgatgccaattaggactaaacatgcttcctcgctgcgctcaagtgggagaacaagaaatcagcctagacactagtcatctgctgcaagcagaaaatgcacccttattcacttaagagttccaagggagcaccaattctgccacggccagtcttcgttttcttcatcgcgacatttggtttctatgtatgctatctctccttcaatcagataacgctagagaacaacagagaggggaatagtcgagaagaacaaagggacgatatttgcagaaagccttatgtgccatatgaggagctcagttatgtgcactttccaaaacctacaagttatagcaggggggagtgctcgtgtactcctgttcggttctttgtaattgtgtctatgcaaagatcgggaagtggatggtttgagaccttgatgaatagtcaccctaacattagttccaatggcgaaatctttaacagagtggatagaagagaaaatatctcgtctatcttacaaacacttgacacgctgtataatttggactggctcaccagcgccgcgaagaatgagtgcacagctgcatttgggactgaagtggatgcttaatcagggaatttttggaaaaccctgaagatatagttagttatttga

SEQ ID NO: 49120 - DNA, 342 bp, Zea mays
  Clone ID: MRT4577_144802C.1
cggtcattggctgttgctactcagaaacaggttgaaactgactgcacatctttcctcgagtctcacaggaataattaatctttggagtcattagactcattgatgttagccagctcatgcacaagacttgactattctaggactgttagcctactgtttaagcgatgccagacgcatccatgtctcagtgaagcaacaaccaggggaccctctgcttatacgaggatctccatctgggctcatgtgaccctcacatttcttcagcagtctatcagttggtgctagtgcacattgccttcctacatgcactgtagggagctcattactgatggctgacacgct

SEQ ID NO: 49121 - DNA, 199 bp, Zea mays
  Clone ID: MRT4577_144803C.1
tggtgctggtgcactcccaattcctctcccgcacgcctgttgtaccggtgccaatctacgcgcgcgcacgcgctctccatatatagatccacaccccgagccgcgagcactaatgcgggcggaggcgcatggcctgcacggcgaccatgccgatctacttactccccgctccaaccccctcggaagaggatgtgtaagc

SEQ ID NO: 49122 - DNA, 418 bp, Zea mays
  Clone ID: MRT4577_144804C.1
aaaagaaagccccccccaaggggctgtttttttaccccccctttggggggggaaaaagtgccaaaaaaaacggtcccgggccaaggttccggtttaacccggaaaattcccccccaaagggccggaaaactgcccctgcccttgcccttgcaaaagaaaaaagggggggggcccctaataagggggttattttttttttttaggaacccctaaaaaaccggttttgaccccccaacaaaaaaaaaaaaagccccttttgggcccctttaagggtttccggggcagtttttcttgaatttggcacaaaaggccttttttttcccgggcccccttgggcccggggggaatggcccccccggggtgccctttctccccaaggggcctggcggggggcccctgttgcacaaaggcccccccg

SEQ ID NO: 49123 - DNA, 294 bp, Zea mays
  Clone ID: MRT4577_144805C.1
tcaagccggcgggacatctccctctccgagcaaggaagtctaggcttcctcctcatcgatcatggcccaaccaacaaacggctaggaaaccaccggcggaaaggagacgaggaagcaactggcgaataacgcggcccgcaagtctgaaacatgcgaccgccggagcgaaaaagccccaccgcttccgccccaccaacgcaccgcctcccgagacccgcaggcctccccccaggacgaatactgaaggaccaaaaaatgacaaaaacacgaatgactgcatcgacaccctgccaa

SEQ ID NO: 49124 - DNA, 414 bp, Zea mays
  Clone ID: MRT4577_144806C.1
caaacagaaataaactgggtccttcccttttctttaaaaaaaacaatgtccaactggaaaaaaaaagggggggggttttaaaagaataccacaatgggaccctgggggaaaaggcttctgaaagggaccagttctcccaggaacaaaaaaggttttgggcaaatccttttttttgggggaaaaacggttttttattttttgcacggcccctttttttgggaagggctgttaggaccaatgaccctgccttttcgataaaatccccaggaactgccccttaagggacacaaatgggcccttcctgccatggtttttcccaggaaagggggttaggccaagccccgagccttgcttttagaacagtttcttgggggggggcaaaaatcatgtttttttcaacatcaggggggggga

SEQ ID NO: 49125 - DNA, 294 bp, Zea mays
  Clone ID: MRT4577_144807C.1
tctcgtcgatcccatccacccggtgcgcttcttctcgccggcgggcttgctgggtctcgcgatcgttctacttctcggctgtgccttctggggcggcggcggcaggaattaggtaagtggaggcaagggaaggggaggtttgaggtagagcgtgtccgcaacgtcgatgccgtcgcacgcggatcttgaccaccagatctcgcatctgcgggaacgcaagcttctgccggccgtggaggtcaagacgctctgcgtgatggccatggctatcctcatgggggaatggaacgtaca

SEQ ID NO: 49126 - DNA, 542 bp, Zea mays
  Clone ID: MRT4577_144808C.1
catctactatcgttgagctgtgcgagccgagagagagtggacaagaaaggaagaaagttgtccccgcagcctatttcaccattgccgccggaagctcggaccaaagccgagcctggctgttcgtcctctgagcgattggggagaggactgcgtctaacaaagactttagcgcgggatcgaccatccgatgtgagatctccctctccactggtgaatatcatggacgccggtattcgccgtgacccaaggccagtacctcggcgggacccgcgcgctatcgtcgtccggtcgcctccacggccttgtcgctggagtcccgttgagagcctctgcttcaccactgagaacaggtggtcgaagaggagccgcctaactctgaggctttcgacttgatctaggtgtcatatcccagtcagctttgtggcgccagggaataatatatatagttcactttattttatcatttatttctgtaagacttccgctatgtaataagtacatttatgatatttatgacatttatctctatgcactctgttagc

SEQ ID NO: 49127 - DNA, 386 bp, Zea mays
  unsure (1)..(386): unsure at all n locations
  Clone ID: MRT4577_144809C.1
gacctgaaggtgcttcccggcggagatgacacgatctggagctgaacgcggagccccacttcctgagcttcttgcagcggttcntcgcgtcctccaaggaccgcncacgagccacgcgttcccggctatccctgtttcaaggccaacctgccnccccgccccccgtaccagctgctggacccntccggcggagcacggcatcactaagttctccgactcctccccgccagagttccgcccgacccttcctnggctcncgcaagttccggcgcgcttcttcgagaactcgggagtcggcgcacgaggcgcccgtgctcccaccgatggtctccccgnacgatttcgactggagggaccacggctcccgtcggcccccgtcaagaacc

SEQ ID NO: 49128 - DNA, 292 bp, Zea mays
  unsure (1)..(292): unsure at all n locations
  Clone ID: MRT4577_14480C.1
agagnggggttttttaaaaaaatttttggtttaaaccgccagggcagcgactaaaccattggagcaccaaccaacccaggttggaccataagtcacacactaacaaccattgccaggacaaggaagctaacattgactgagtatggccagggggcaaacctaagccacagcagaacacacacgctaactggataccacgctgcgagctggaggctcctaataaaagctaacaacaggctactccaaagaggagcgagccaactcaggggaccaaaacccaacgcacgcgcac

SEQ ID NO: 49129 - DNA, 713 bp, Zea mays
  Clone ID: MRT4577_144810C.1
cattgggtacctcgaggccggccgggagagcttttccaggtccggctcctgccgctccaggtgtacacgtgcgtcatccgggggctcggcaagggcaacagcccggacgccgagttcgacgtcatcgagcacctcaagcggagaggggtggtgccgaaccagttcgtgtacaactgcctcctcggcggcggtaagagctgcggcgagctcggccgggtccaggccgtcctcgacgacatggaggcgcagggggtgcccccgaacatcgtcaccttcaacacgctgatgtcgatccacgtccagcagggcagggtggaggacgccctcagggtgtacgccgacgtccaggggcgcgggctcgtgccgaccgccgcgacctactccacggtgatgtccgcctacaacaaggcgggggacgcgtccgcggacatccagctcttcgccctggtcatggagaggtacaggaacggagagctggtggggagccgtggggacccggagcaggagctcgtcaagctcgagaaactgaccgtccgagcgtgctacctgtcgatgcggcggtcgctcgtccgggggaagaatccggtcggcgaggcgctgaaagtcctcctggacatggacgaaacaagtgtcctggcggagcggagcgactacgagcggctcgtctgggtgtgcacgcgggacgagcactacgccatcgtgcaggagctgta

SEQ ID NO: 49130 - DNA, 303 bp, Zea mays
  Clone ID: MRT4577_144811C.1
ggcaaaaaggaaacggagaccacaaacaaaacagcgactcccttgttgacggatatcgcttttgcctccggttcgctttgataaaagccataactcccgggcgaccatcgctcgcctcccctccctccatcacatacgatgcctacggagaccgccaaactcatcggccgtgtactcaacaagccaagtcacattatccgtctcgacgtcactgctctcttactacatcgcaagacgtgcccggccacaaggatcactgcaccaaccaacgacaccaccacaacgactacggcgactgtgctg

SEQ ID NO: 49131 - DNA, 369 bp, Zea mays
  Clone ID: MRT4577_144812C.1
cacgcgtacgcagacgcgtgggtgcggactcaacctgtttttcattgtcttcacgttgattcttgtttttgcgtttgctattgttgccctgcacccaaaggtaccatcatgtagcctgtttttctccgttttactgattttgcatttgtttatattacttgatttgaccagaaaccgttgcttgataagttatactggatgggtttggggtttggggcagtattatacttgcaactctagattattgggttggtttgattgttttagattccatcttggccatcgtatgaccatgctttccaaaaactatgtctatacatttcccttgaatgtaactatcttttttgtgctaaataatgctgaactttg

SEQ ID NO: 49132 - DNA, 940 bp, Zea mays
  unsure (1)..(940): unsure at all n locations
  Clone ID: MRT4577_144813C.1
cggacgcgtgggtggacgacgcacctgcgtcgccgacggcggcggtatcatcggtgagcggacgcgcggccggccaggcgagcgtgatcctcgatccaagaggtcggtagggatcgagatgaccgggtgcctgtggccgtgcgtgggagcggcggtggctgggcatggggccggccatcggaaggcggggctgttccgctccaagcccaggacccccgcggaggtggtgcagcacgccagggacctagtcacctacatcctcgacaacaaggacggctgcggcgccggcaagcgcgacgccaagcatgagcacaggatggtagaactaagcaaagaagtcaaggagatgaaaggcattctctatggtaatggcgaagaagatccttgtgaagaagcatgcaagcaattgactaaggagttcttcaagaaggacactgacaccttccgtcaactaattgtttgccttcaatatgtggacctggaaacgcaaaaggatattacacaagtgatagcaaatttgcaaaggcaaaaggttgattcaagattggttgcctctgattacttagaaaccaacttggatcttttggatattttgatgtctgggtatggaaacttggacattgcaatacattatagtactctattgagagattgcatacgccaccaagttgctgcaaggtacgtactggaatctccacactttaggactttctttgatcatatacagtttccagacttcaatgtgtaatcagatgtttttaaaacttttaaggaactcatgacacggcataaatcaactgctgctgagttcttttccaagaaatatgattggttctttgcggaatcaactcgaaactgatattatctgcttccaattacttcatccggnagggaaagcatcagctcttgcgagacattcttttggaaagtcaaacgctgc

SEQ ID NO: 49133 - DNA, 432 bp, Zea mays
  Clone ID: MRT4577_144814C.1
gttgaaatctaatagtggaatggattcaaacacatggggagcgatgatacacgtgtttatccctctctctgggggaagaacatcaatggcatgcatccattttttacttttaggtgaaagaggccacatcgtaaaataggactcaaggtgtgtcaggtcagaaacatgcccacccataggaatgcgcgcgggcgtgtctctctctgtcccgcttagtctgttcatccgcctccatgcgacctgccccggcccgctcactgaatgtagcaggcgaagaaggatgccaccgccttcctctggtccgtgccggtctggggtctcgaccggggaggaaccgcttgtggggcccgaagccggaggctacggggcgagcgccactgtgggctgctacgcggcaacaacgactgctcagacaactttctttatcttcat

SEQ ID NO: 49134 - DNA, 628 bp, Zea mays
  Clone ID: MRT4577_144815C.1
tcttgtgtgatcttacagaatgagagcacatagattagttggagagggcgcgtcgtgtgctcgtcggattgcagagatattgatagagacaaagctgcgctgcaaaacaatccacgccgcgtcatatagtatgggcatggtggcgccgcgctgatggcgatggtcgtgcccgtctcctcgatcggggtccggactgtcaaaaatacctacaaggacttcgtcaccagagccgctgctaaaccgcgtcacgcgccgtggttgttgctagtcacgctccgacccctgtgaagacgcgtgacatctcaaagagcaagatgggacctgtaatctcaagtcccacgatggcagcattgcaacccctgctcaggagaaagctaagccgtgtaaggagacctccaggagatccaagactacaacgagttctagacgagggttatgggcaacccccagacgactacctgtgaaggtcgcgtttatctacgattcttttccgcactttgattattagtaaagacgtatgcggatgtgtcagacatatgatgtaatcgactactatttcccttttaagactatttgagcgctgtgggactcgactctggtgatggagtgagacaaggtgcctacggtc

SEQ ID NO: 49135 - DNA, 1887 bp, Zea mays
  Clone ID: MRT4577_144816C.1
cgccgcgggttgcccacaatcaacactgcggcgatcacagctttggtcgacaggtggcggccggagactcacactttccatcttccttgcggcgagatgaccgtgacactgcgagacagccagaagcagcttggtctcagtattcgtgggcgtccagtgaccggtcaggcagcacccggtggctggagacagagagtcgaggcctttcttggaagggaggttcccacagacacaccaggtagccacacatctggggtttctctcgcctggcttaggcagtcgttcggggagtgtccagctgcagcagatgaccagacagttagctactactgccgagcttgggtcctgcatttgtttggctccgtcctttttccagacgcgacgggtgatagcgcgtcctggatgttccttccttgcctcactgactgggacatggcaggaggctacagctgggcttctgcagtgctatccttcctgtacagacaactttgtgaggcttgtcgtcggacggcaaagaacgcgagtttaggcggttgcgtgtacctactccagttgtggatgtggtcgcacctaccggttggtcgccctattgagtttgctcctcgaccttggttcgacgtcgtcggcttgcgactacgaccgacggcggcttaccgttgggaccaggtccaggctccgttcgcacgtcaccaacgcgcctacgtcgagtactcaaacgagctggacgcacttacaccgtcgatggttagctggcaaccatacgatcagccaccgtcgccacacattcagttgagctccgcgtgcacggcagatgaagacatttataaattaaggtgtccactgatttgcttctatgccgttgagtaccacttgcctcatagagtagcacgccagttcggtctacgtcaggagttccctgtggagcccttctcaacatcgatagaactccacaagttcgaccgccaaaagcagaagaagatcactgactttgaggcacaccaccaagtgtacattgacgaatgggaccaaatgcatgacctcctctaccagaacgatcagccccacaccaactacaacttccgcgagtacatctcttggtatgtcagtgcaactcggtgcaagttgaagggccagtggacatcagcggactacgccgaactagagtcttcagatgacgaagacacgtcctatgacctagttactcggcatgggacacacgtggaggctgcaccgatcctagatagagtgggcaactccatgatgcagtctgtggttgacatcgagcatttctctaagaccacttctgacagcaggacacttgcctttctctcaaggctatcacgtcgcctacgttgtgctgctgctcgttgtggttgcaggactagcgtcggagttaacatacaacatactctgcagcaccatggtgacacctcgctaggacttggagctatcatcgttgcacagggctcgtcacgttcgacacgagatgcgtttgcgagccacaaggaggacgaggatgacattaagattcctctcgacaagattggaccataggatgctcctaagacaaccttcacagcctataccacgcagacgatggcgacgatcgcgcaaccctaacaccccaggcatcaacgctcttggggccaagggcaacggtaactagaaggatgcgagggaaacatgatggtgcatgtcttctgctttggctttttttgtgctatggactatggatgacgatatagactttctgcgttgtacactttggttgatgatatagattatttgtggtatgcactttgtttgatctagttgtgtgatgcgctatttagagatatatatgctcatatcatattagttttttttataattgtggatgttactaaa

SEQ ID NO: 49136 - DNA, 144 bp, Zea mays
  Clone ID: MRT4577_144817C.1
atgccttccactttgtttgcttcatcgatagcttataatcttagcgctaagaggaggaaactcttactgacaaagataaaagagctgaacctcctcttcaatctcctccaaaaaaaatcaaacaagaaccactacacatcatag

SEQ ID NO: 49137 - DNA, 446 bp, Zea mays
  Clone ID: MRT4577_144818C.1
catgcttagtttgcatattagggaagcatggggggggaaaagaaccttccataatcaccaagggggggggggcaaaaccaaacaattgattacaggggtccaaaaaaagaataaaaggccaagccaaaatggagggccccatccgggccaaaaataacgccccaaaaaggagctccccaagggacaacggaaccatgaagaaaacaaagggcttgaaaaaagagcagaaaaaccggcggaagaaaaagaaccccaacttcccgaacaagccggggggggtagggcccaccccggaaaccccaaaaccagggacaaaaaaaaaggggggcgagttccacaaaaaggaccggcccaaggcagcacccccaggggaaaaggaagccccacagggaaaacccaacccaaaataaccccaacccgaggcccaaccgtggggggacccggga

SEQ ID NO: 49138 - DNA, 267 bp, Zea mays
  Clone ID: MRT4577_144819C.1
tttttaacgccaccaccacacgttcacggaagcgagagcttatacacgacctcggcgacaatggcgtagctgaagctgcagaagcggctagccgcgagcgtacttacgtgtggcagaggccaagtacgtgttgaccacaatgaagacagcgagaactccatggctaactcacgccagaacgtccgaatgctggataagcaggagcgtcacaccaagacacggcgccatggcgaaagagcatccgggcaagctctacgcacaggtgct

SEQ ID NO: 49139 - DNA, 821 bp, Zea mays
  Clone ID: MRT4577_144820C.1
ctccagactcttgtccaccgcagctagggttttgctccgccgcaacgcacgatccagattcctacacttccctaaccctacccaaccctgcacctcccggcggcggcggcggcggcggcgagcagcagtcagcggcaagatgaggcctattctcatgaaggggcacgagcgcccgctcacgttcctgaagtacaaccgggacggcgacctgctgttctcatgcgccaaggaccacacccccaccgtctggtacgccgacaacggcgaccgcctcggcacctaccgcggccacaacggcgcggtatggtcctgcgatgtctcccgccactccgcgcgtctcatcacggggagcgccgaccagactgccaagctctgggacgtcaagacggggaaggagctcttcaccttcaggttcgacgcccccgcgcgctccgtcgacttagccatcggcgaccacctggcggtcatcaccaccgacagtttcatggggaatatgcccaccgcgcaggtcaagcgcatcgccgaggacctgcaagaccaaacggaggagtcagctcttgtgatctccggcatcacggggaggattaacagggccgtgtgggggcccggcaaccggaccatcatcaccgccggtgaggatgccaccatccgcatctgggactctgagaccggaaagctgctgaaggagtcagacaaggaggttggacatcagaaggcaattagctcactgtcaaaatccttagattggtctcatttcctcacaggttccttggataaatctgctaagctatgggatgccagaacactgaccctgataaaga

SEQ ID NO: 49140 - DNA, 427 bp, Zea mays
  Clone ID: MRT4577_144821C.1
cttacttctactttatcattattatcgcgctgcttataggcgttctatacagccccccatacgggggaaaggctaccgggggacaggcagcccaactaatatatacaaatacaatttctgggaccacgggtaaggctaatgcccggaaacacaacaataggagggaagggcaaaactacggattcctgaaaaccctcaggcgtaaaatccagagtcaggaaaaaatgtctacctccaaaaacgatttctatttttaccaggtaaatgtttgccggtaattggaaattaagttatccaaaactttgtaggccggaggcctgtttggagacttgcgtgcttggctgttaagaggattggcaaaaaaatgagtaaccagtactgcatcttccctgggggggatcattgccgggggccgaattcccgcggg

SEQ ID NO: 49141 - DNA, 265 bp, Zea mays
  unsure (1)..(265): unsure at all n locations
  Clone ID: MRT4577_144822C.1
atagtgagtcgtattagaacggcgancatacggctgggggacgttgaggggcgcttcacagatcgtctcggcgatggtgcgatcgtcggcgcgtgcttgtggggaggtcgtgcggcaggatcggcagagggcacttcggcgaggcggcctcgcatcgagagttgtcacggagtgcgacgatgaggatgaggagacggatagggggagtcacgctcgtaggatgtcaggcggcggtggcgccgaggaggagagctacgggccgccg

SEQ ID NO: 49142 - DNA, 246 bp, Zea mays
  unsure (1)..(246): unsure at all n locations
  Clone ID: MRT4577_144823C.1
ctacccatccgtgctttcccatatgataactgcaagcttctccttgtggacaagaaaattaacaatgccggagatcttatttcttttgccctatcacnccttacacacctttctcttcttcttttttttggcagaggacattgatctcgaagctcttgcaacccttgtgtttaattggcttagaccgtcattgatctattgctcgctattaatgcccctggctttttctagcgcaaacttctcttt

SEQ ID NO: 49143 - DNA, 497 bp, Zea mays
  Clone ID: MRT4577_144824C.1
ccaaaaccataaagggattagattttgaatccaattaaaaattattttacaggaccatcccgtttatatcccacgggaagtccatcacatattcacatgtttgttcttgggggatggcacaaacactcactacaactaaaaaatcctaaaaacaaaagtcatcctttccagtcctaaacgccgtttgtacagaaaaacaatgtgtataaaatataccggtccaaaaaaacactatcgaaaatgcaggaacaactgacccacctaaagccggtcaaataactaacccgacaacaaacggaccgatctccccactgcccatgccgggggcaacctttttggcaataaccaggcagggggacacccagccgggaagcaccgcccacaccatgtccacaatgcaggccggaaaaccccatggaatcggcatcctttttccctttaacaagcctcctcaaaggaggcaattccacaaacaccgtccttgtccctgaaatcgg

SEQ ID NO: 49144 - DNA, 654 bp, Zea mays
  unsure (1)..(654): unsure at all n locations
  Clone ID: MRT4577_144825C.1
cattgggtacctcgaggccggccgggaccgcggtattaccgccgccgccgccgccgccctacgccggttaccgaggtcttcgtcagccccttcgccggcggcgagcaccctttaggttggtgatagaggcaggtaggagcggctccgatgcggaccgcctaagatgagcccattacgttcttgcgtcggcttacactggctcccacgccgtgggtggatgtttcgccaggccaagacgagcatccatgcttgtcgcgactggtgctgatgcctggttgcaggcctttggcggaccgacgttgcttcctcgggtcaaggttttggcctctcacgaagaggacgccaggaaagagaatgacatggtggaggagattctaatccccaagcaaacaattggtggcaattggtttgttccgtttcgtgctccatgagacatgcagctcaccttcgtcgtcgctccctccgtcaaagctttgctccactacctatggcaaagagttggataaagtgactggtcaaaagaggtacactgattctaactggcgtcaagtggtgacattcatgttttctaattanttagtggatgttttctaattattaacatccatgttttctaattattaccattgataaaaaaaaaaaaaaaaagcggcc

SEQ ID NO: 49145 - DNA, 674 bp, Zea mays
  Clone ID: MRT4577_144826C.1
accgccgccgccgccgccgccctacgccggttaccgaggtcttcgtcagccccttcgccggcggcgagcaccctttaggtattcctttcccggctcccgctgcgcgaaaccggccacccaaatttgtccttcactgggtgtctgggtccgatcctggcctggctgaaggggcttccagcaacacacacgtgggcgaggtctttatcgaaattcccgagagaaatgtgcttgcagttttttaccgtgctcccttcttccattccatgcttcctttttcttgcatgaatggtacccgactcggatggctcaatgagttgaaataatatgacgttgtagtatactggatataggttatagagtgattatgggtcagccatgaatttttagaccaacaatttgcatttaagctgattatttggtgcataaagatatgtttataggataagtcagaaggaacaatttttggaatgctatatttacacaggttggtgatagaggcaggtaggagcggctccgatgcggaccgcctaagatgagcccattacgttcttgcgtcggcttacactggctcccacgcccggggtggatgtttcgccaggccaagacgagcatccatgcttgtcgcgactggtgctgatgcctggttgcaggccctttgggcggaccgacgttgc

SEQ ID NO: 49146 - DNA, 137 bp, Zea mays
  Clone ID: MRT4577_144827C.1
gtagccatttcaacattgtaagatcctgttattttcatcctattcaatctgagatgatcgtacaggaacctactatttggtgcctaccctgttaaagagcctaccttgggccgggaaaagaacaatagtacgcatac

SEQ ID NO: 49147 - DNA, 675 bp, Zea mays
  Clone ID: MRT4577_144828C.1
cggccgctcgaggcggccgggcgggaactctcacgctttcccccaaatcgccgccgccatggagaaggagaagaagctgtccttctccatcccttccaagctaaggccgcccaagccccgccccgccgccggcgctgattcctccgccgctagcggcaactccgcttccgcggccgctgcccccgcccagaaattcatcaccgagctcgatccgtcgcaaaccctagccgccggagccgcgtccgtcgttatggcgcccctccccaactccgggcacttcctcaaccaccgctcccgcgaaccctcctccctcccgacccgcgaggaggaggacgccctcgacgcctccacagccggtgaccgcacttgcgcgtgctgaccctccgatgcctgtgtacaatgcctcctcgcacataatgccatggtctcacccgacccgacagcgatgtcgacgatgaggtcgacatcacggagacggagaagacgtgatcttccaaggaaccagagaagaagtcgacctctccagacagagatgacgtctccagaggtgatcttatgctgcgagcgtacaatgaggacatgttcagtctccccgaccaccgtggtatagacgagtttgctgaggagcctgtggagggattcggtgctgccctccttgctgtgtacggttggtca

SEQ ID NO: 49148 - DNA, 323 bp, Zea mays
  Clone ID: MRT4577_144829C.1
cggggaacgacagaggcaaaaccacacttggttgcattgagggagcagcattatcccttgcgggagagcgcagcaggaagcaaaaagatacgctggtgcccttcccggcgcacggtgccatggcggccgacgatcatatggcgcacgctctccgcgcccgaggtgtccacagccacgctcgaacacactgatgctgtaccaccggcgtctgctgcgcaccaagcggtggcaggcctcggcctgaagacgacgccctgtaccgggacgagggcttctcactcgaggacatcccggacggactatcgctggaggacctagcgcgc

SEQ ID NO: 49149 - DNA, 2087 bp, Zea mays
  Clone ID: MRT4577_14482C.1
aaagccaagcccacaaggcagccagagcgcggggtagcgtttacaccttgacacctaaggccagagattggagagagaaagaagcagctgagtggagcaagaaagaagaggtcatggcggtgtagtctatcagctgagtgggaaagagtggagcaatggtggggggctgtgccagcggcgacggcgccgccgaagggacgctcgcgaggtggcggagggcggcggccaagcggatcggcctctcatgcgcctccttcttctcctacgccgcctctccctccccgcctccttccaagaccatctcccactccgcactgaatgcgcctgatggagagcagcaaaagatggaggaacccaccagcaccagagtggctgacaagaatctatgtgcaatatgtttggaactcctcagcacgagcatcagcagcgatgttgatagtggtgaggcggcagcaatctacacagcgcagtgctcccactcattccacttcctatgcatcgcctccaacatccggcatggcaacgtcagctgccctatctgccgtgcacaatggtctgagctaccacgtgacctgaaggttccaccattgctgcacaaccagtcagacccaatccttcgcatcctggacgacaacattgcgtcatcccgtgtgaaccgaaggtcctccatccgtgctgctcgctacaacgatgatgacccggtagagcctttcaccttggctgagcatgtggatccatgtctccgcttcgtcctcatcccggcaccggtgtcagctcaccatcacgtcctcgggcattacccctgtggacgcatgttgccactgcaacagcaatgccagtacagcggctcctccatgctttcaccaccgcagattgcttcaccaagtggtcaaaggcgagcctacctctctgtcagtcttgctccacagccagccatggacctggtcctggttgccagccctaacggaccacatctgaggctcttgaagcaggcaatggcgcttgttgtcttctccatgagggcaattgaccggttagccatcgtcacgaatgccaccactgcaacccgtgctttccccttgcgccggatgacgtcccatgcaaaaagaatggcgctgcaggttatcgaacacctttgctgtgttggtgggactgatccagtaggggctctacacaagggcctcaagatattggaggaccgggcgcatcggaacccgagcaactgcatccttcacttgtctgatcatccagtccgcaactgtgttggtggtgtggacatgaaccactccagcatcccagtccaccagttccatgtcgggctcgggttcggggtgcggagtggatttatcatgcatgagtttgaggagctcctcgcgcggttgcttggcggcgtgataggcgacacccagctgaggataggggagcatggcggaatggtcaggcttggagagctgaggggtggtgaggagcggaggataccgctcgaccttgcggcagattgtggcttcatactcgttggttacagttacctggagggtggaagagaggagcagttgaggacaggtgagatcgccgtcgggttcgaagagaaaggtgacaacgggtactgtggaatgagagagatggggctgagcattggcggcgagaggaggagctgctgcgccgagaggcgggactaccatgacccgttcatggcacggcgatgggcgaagcatttcaacgtgtacagggcctgagtagaagagcttgatcgtcagctgctgcgaaatatgagtcttgttggtttcttttctctctttttttccccattcctgcaagcatctaggtttggtgtctgctttttggcttcttttgttgtggatctgaatccctgtaagatctctctctctttctctttttgcatgaaatgtgtgggttctgtctgacaaaatctgcttgtgttgtgtgaatctgaacgtgaacagatcatactggagaaaaaaaagcagcaaaactagaaatattatttgattgagcttgcaaatttggaagccagggagttaaagaattattctttcgaagttgtaatgctaaaaaaaaaaaaaaaa

SEQ ID NO: 49150 - DNA, 271 bp, Zea mays
  Clone ID: MRT4577_144830C.1
tttttataaatgtttatatgtgtgaagggtttattttaattaagacaaaagacattggccacagctatattttggagaccgagtcgtaattgtaaacgacatctaatacgaaaccgaaaggtgtacgtacgtacgtatgtactacagaagcactaagggcttgtttgtacatgctgattgatgattagtaattaagatctgcatgcatgcattgtagaagcaaataaatgggatgtagcttaggcatgcatgcatgatgcatggggcgtta

SEQ ID NO: 49151 - DNA, 267 bp, Zea mays
  Clone ID: MRT4577_144831C.1
tccgtcggtacagtctaccatcaggcagtcgttccaggcgtgcaacggcgacgcgatggcgagtacgaggcgtagcacgcggggcagtcgggccaagacacggccggaaccaagaaggacagcgcgcagctgcaggagcacggcgccaccggcaccgtggaccaggtggcccaggccggcgagggcgtggcgacaagcgtcagcgacaccgcgtccgccgccgtcggtggcgtcatgagcacggtggtgggcgtggtcggcggcgtc

SEQ ID NO: 49152 - DNA, 336 bp, Zea mays
  Clone ID: MRT4577_144832C.1
ataagaggtttggggttgttctcagttttatgatctgttatcataacaggtgttacaaaagtacgctgttgttatgcgccatctttaagaatatgtttcttaaacaacacaccttaacactatcaaaactacggatacataacgcaataggctgaacgtgctgcggcacagaaatgaaaaaggcaatgtccagcagacacaggtaaacaactctgcgagggtggtgtgagacggcaaccgatagaccaagccccgcctagacgtcatgtgagattgcggcgacatgggacattaacagggggcaggacatcggaattcaagctgccaagatttgat

SEQ ID NO: 49153 - DNA, 616 bp, Zea mays
  unsure (1)..(616): unsure at all n locations
  Clone ID: MRT4577_144833C.1
gcgtttctnataaccgnaacaccttctggggggcaagcttggatgtganacaatctggnaatctccggtgccattccagatactaccgatggaaatgcaaaaacagatgaactagttaaagtagatggtgttatccttcctgaccacaaagagagcttttcntgaaaacacatgtgttgtaaaactggagganggggatagaagtagatcaacttggtcaacaagctgatgcgatacatgcagaggtattgcaggaagaggtgcctgagatgatagaagtagatcaacttggtcaacaagctgatgtgatacatgcagaggtattgcaggaagaggtgcataaatctgaacagtctgatgagccaggggtcgatgctcaagaagtgctgaaccaagaatctgctgaagaaactgatggcctggtgaatgtaaagactgatgaaactgagcacaagagcaacatggtggtccctgatgacacaattccagaacatgatgcacaaacgagagagccacctgtaaatattcaagaacaaagccgggaatcagtaggagatgctgaagcagtcaatactgaagcagaaatgcaacaaaacagtgttgcttttgaggagac

SEQ ID NO: 49154 - DNA, 482 bp, Zea mays
  Clone ID: MRT4577_144834C.1
aaccaaagggttaatttatacccaagccaaaatttctggaaagaataacaggactttttggggtccaacaacaggccaggggttcctttccatccaatttttcgggccccccccggcacacacaaaagttacgggccccataacgataccgaggcaacaccatatctcccccactttttaggacagccttaaaagggccccttttcaccggaccctactatgctcaccggaccaaaacctttgtttcccgtaaaaggggacccgtggggggggagctctttagctcactagcgggggggggccataaagggggtccgggccataccctgaagcgaacatgttgggggggggccccggggaggcatacccatatcccccgaaaaagggggggccaaaaaacatggggtccctccggtggacggagccacccctaaactgtttatgcgaggggctggggacccatgaagggcgaacggcctgct

SEQ ID NO: 49155 - DNA, 1026 bp, Zea mays
  Clone ID: MRT4577_144835C.1
cggggactacgtgttcctgttcatggggctgagccagaaaagagacgaaggaaagaaggacgagcctgctccttccggggatgcaacagagcctcatcactgccgttgccgacgcgtcaaagcgaccggttatccttgtgcttctctccggcggaccggtggacatcacgttcgcgcagtcgaacccaaagatcggtgccatcttgtgggctgggtaccccggacaggccggcgggctcgccatcgccaaagtgctattcggcgaccacaaccccagcgggaggctgccagtgacgtggtacccggaggagttcaccaaggtgcccatgacggacatgaggatgcgcgccgacccgaccagcggctacccaggccgcagctaccgattctaccagggcaataccgtctacaagttcggctacggcctcagctactccactttctcccgccggctagtccacggaaccagtgttcctgcgctctccagcactcttctcactggcctaagggagacgatgacaccacaggatggcgaccgtagctaccacgtcgacgccatcggcactgaaggatgcgagcagctcaagtttccggccatggtggaggtgcagaaccacggccccatggacgggaagcactcggtgctcatgttcctccgctggccaaacacgaaacaaggtcgcccggcaagccagctgattgggttcaggagccagcatctcaaggcaggggagacggctaagctcaggtttgacatcagcccgtgtaagcatttctccagggtgagggcggatggcaggaaggtgatcgatattgggtctcatttcctcatggttgacaaccatgagatggagattaggtttgagccttgagttgtagatggagggtaacaagtatagttcaatacgacgccattggttcctagtatgataaaaaaaaaaaaaggcccattcatgccatagaaagtggagtagagtaaaacaataaaaaatgagacatgttccctgtggtcgatatgattcttgg

SEQ ID NO: 49156 - DNA, 343 bp, Zea mays
  Clone ID: MRT4577_144836C.1
aataaaaacggggggcactcacaatttgtacaaggaaacacatttttttgccaaaaacaaaatttaggggggccccaacccggggattatacaaaaggcccccgggcttcccaaggcaaaaaaaaagggggagatttttgggccttttcccctttagttggaccattcttgccccaatccatgaatgttgccgggggaaaattaattcctggccccagaaaaaaacagggccgggacgtcccccaaaggttttggaacggggccccaaaccgggggcccccgtttggttggaccctttttgggggggggcccccttagggaggaccgtgggcagaaatttggg

SEQ ID NO: 49157 - DNA, 661 bp, Zea mays
  Clone ID: MRT4577_144837C.1
ccggccacgtcgccttcgaccgcgtcatcaagcccctcgtccgaaagcgccgctgcgtgaggcccagtgagggcaagctgcgcttcgtcgagatccgcggcctctcctacaaagtgcccgtcgacgagtctaaccccaccgtatggatgtggacgctcgttgacccggaggtcccgaacccctggacattcgagtacgaggtggccttcgcggaaatctgggaggacgagacctacgccgccgccggcctgcagccgggcgaggtgcccgacgtcgccctcgtcgaccccaacgaccactacgttgtctacttcttccagggctcgaagctcttcggcctggacctgcgcgagaagaaggtcgtcggctgcgaggaatggctgatagaccgcgatcgactcgagtaccaatcctcccgccccatcgtcgatgcctgggagctgtcgccaccaccgccatcgccacccattctttcgggcgatgacgactattcgacagacggtatgcgcgcgaacatttgcattgccttgcgttactgaatcgctccaatcatatgcataaatcttaaccacactgtaaatttttctgaatttggcatgtatagaacactccttctgtttggcatcggtctttataccaaaaaaaaaaaaaaaaagcggcc

SEQ ID NO: 49158 - DNA, 927 bp, Zea mays
  Clone ID: MRT4577_144838C.1
ctcgaggccggccgggatccgtcctgcgattttcgtttcctctgtgtctccgttcttcaagccgaggtcgaggacccagacgcacacgcagcgcgccttctccaccgcgaagtcatcgttccgcgctgccgccgccgccctagcaaggtgttggattctgtgttgcggcttcggagtgtcattgctacccttctcctgacaacatggtttctttcgagatgaatgacctcaagaagattgggctaggcctaacaggctttggaatattcttctccttcctgggaatcattttcttctttgacaagggccttattgcaatgggcaatatcctctttctatctggtttgggtttgacaattggtttgaaatccactatgcagttcttcaccaagcctaagaactacaagggtactatctcatttgctgctggcttttttctggttcttattgggtggccctttcttggcatgctcttagaagcatatggctttgttgtactcttcagtggattttggccaacccttgctgttttcctccaaaggattcctatcattggatggatttttcaacaaccgtttgtcacatcggtatgcaaaggctccaatagcttccgtctgctgtatgggaaagaaaggagacttggcagaatcgaagttacttgtgattcttgtgacgccatgtggttattttcttcagtaattccccttccaggcctagtatgggaactcagctttgagttgtaaagaaaaattgcattggtaatctggtatgagttctggtctgctggagtggcgtctacgcctcgccatgttggctttgtaaggttccgcagctaatcaaaagtgagccgtttatcaccttgcaagtacctttcaaaatacaagctgtaaataagcttcataaatgtgcatatggtccgtcttattg

SEQ ID NO: 49159 - DNA, 1088 bp, Zea mays
  Clone ID: MRT4577_144839C.1
gccggccgggctcgcgaaattattgagatcgttattataaatgtagtgttttatagggtaaaaatattgcgcgctgcacggaggcattcatccgtcctgcgattttcgtttcctccgtgtctccgttcttcatcctgcgttagagaacaagacgaggtcgaggacccagacccagacgcacacgcagcgcgccttctccaccgcgaagtcatcgttccgcgctgccgccgccgccctagcaaggtgttggattctgtgttgcggcttcggagtgtcattgctacccttctcctgacaacatggtttctttcgagatgaatgacctcaagaagattgggctaggcctaacaggctttggaatattcttctccttcctgggaatcattttcttctttgacaagggccttattgcaatgggcaatatcctctttctatctggtttgggtttgacaattggtttgaaatccactatgcagttcttcaccaagcctaagaactacaagggtactatctcatttggtgctggcttttttctggttcttattgggtggccctttcttggcatgctcttagaagcatatggctttgttgtactcttcagtggattttggccaacccttgctgttttcctccaaaggattcctatcattggatggatttttcaacaaccgtttgtcacatcgttccttgaccgctacagaggaaaacgtgttccggtttagcttactcctgctatatttcaacatacttccctcacaaatatcatgcggttatggatatgttccgtccttgcctttttctttaacttgtttagttggtggtaggattttttgttgttgtgtaaattacccctcatccgtggttttccacagaccagaatgcattttccccgttaatacattgaagaaagttctcatgcaagcctctttgtggggggaaatgaagtcttagggatgttctgaaagtagtgactacccatcatgtctttttgtaacattacttaatgtaagcatatctgatataggtatgcaaaggctacaatagcttccgtttgctgtatgggaaagaaaggagacttggcagaaaaa

SEQ ID NO: 49160 - DNA, 421 bp, Zea mays
  Clone ID: MRT4577_14483C.1
gtaagtcatttatagctactgttcatcaccatgccatcttatgtctccaacttctatattcctccagcagcctgtctagcattctctttttgaaacctgggaactcaaataaagcttatatttcctactttaggctctagtgcccaatcaaactttatctggctctttaatcttcctctaggcttatggtaagaacttgaacatgtgttcttttttctttttaagtttggtgttaattgcttttccaagagaaaaaaagatagttgtattgcgctttagtctttaataatcaaatgtggcaggttcatgtcagcctgttctatttaccaccatgatgcagcacatgtgattcaacatagaagtatttacatttacaactccgtttattaaggattcatgagctaacattttattgacattt

SEQ ID NO: 49161 - DNA, 349 bp, Zea mays
  Clone ID: MRT4577_144840C.1
aggggaaaaggctggtagcgcctagcagagtacccaggtccgagaatttcccggtgtcgatcccacagcgttttctgggctaattttattcatacacagaattataacgtagaaggtttggtataaaaggagttagggagatatatttcataaagcctttcccatattaggtataagaagtgcacttcatattagatttagtgaaaactccacgttattgtttagttttactagagagctagttcctgtttagcctaacacaaaatagagtggagcctcgttcactggtgagagtttcattctaagtaacatggcttgaattaggcttcttccaatctatgagaagact

SEQ ID NO: 49162 - DNA, 297 bp, Zea mays
  Clone ID: MRT4577_144841C.1
ggccgcttttttttttttttttttctttagccatgtttctgcttattgctgttgttgtgatctttctttgtttttcattctttttttcgagcaaaaacgcacttttttatttttgggaagccacagatataccccaaacatcttatttggtgatctttacgctactgacaatttaaaagaggcccccccccatgattgtttgtaggcaaaccctgaccggcttttgcaaaccccgcagtttcacgggactgattttttgagacttcaaaaggggccccacaataggcgcggggtgcc

SEQ ID NO: 49163 - DNA, 566 bp, Zea mays
  Clone ID: MRT4577_144842C.1
atcgcttcctgtctagggtttcacccgcgtgccttatatatcctatcacttcccgcccggccgccatctccgcatttccatcttcccgtgggatcccagtcgccgccgcaagaagaagagctcggggacttccaggtctcgcgagaagatgccgaagcagatccacgagatcaaggatttccttctcaccgcgaggaggaaggatgcccggtcagtgaagatcaagaggagcaaggatgttgtcaagttcaaggtccgctgctccaagtacttgtacaccctctgcgtattcgatgctgagaaggcaaacaagttgaagcaatctctccccccaggcttgagcgtccaggaggtttgattggatacatgacaacgtcgggtcgaacctctagagcatctttatcattagcagagcatgctgtttatgtagttttggactttaagctattagacatgtctggatttgtggatcttgaatttttggagaaataccaatttgcctcgttcaattgcgcaaaaaaaaaaaaaaaaaaaaaaaaaagacaaaaaaaaaggcccctagggcc

SEQ ID NO: 49164 - DNA, 859 bp, Zea mays
  unsure (1)..(859): unsure at all n locations
  Clone ID: MRT4577_144843C.1
ggcgggacccctccctaaactcgacatcacacacaatggctgcctcaaggctcctccgaccggcctcgcgcctcatggcctcgacacgacaggcgcccgctttccgacctgctttccgcgccgctgccctgacaccgtcaattgcaaggagaggatatgcgtcgggacaaaaggagatgactgtgcgagaggcgctcaatgaggccatggccgaggagatggagcgaaatgataaagtctttgtgctcggagaggaagttgcgcaatacaatggagcttacaaggtcaccaagggcctcctcgaccgcttcggtgagaagagggtaatcgactctcccatcaccgaatctggtttcgccggtctgaccgtcggtgctgcgctcgctggccttcaccccgtttgcgagttcatgaccttcaacttcgccatgcaagccattgaccaaattatcaactccgccgcaaagacccactacatgtctggtggtatccagccctgcaacatcaccttccgtggtcccaacggtttcgctgctggtgtcgctgcccagcactcgcaagattacactgcgtggtacggaagcattcccggattgaaggttgtctcgccatacagcgcagaggatgccaagggtctgcttaaggctgctattcgtgaccccaacccggtcgtcgtcttggagaacgagcttctgtacggtctctctttccccgtcagcgaggaagtccagagggacgattttgtcattccttttgngaaggccaagatcgagcngcccggcaaggacctccacatcgtcaccctctcccgctgcgtcggccagtccctcgtcgccgccgaaacactcaagtccaagta

SEQ ID NO: 49165 - DNA, 511 bp, Zea mays
  Clone ID: MRT4577_144844C.1
ggccgggaaatatccctatcacttcccgcccagccgggatctccgcatttccatcttcccgtgggatcccagtcgccgccgcaagaagaagagctcggggacttccaggtctcgcgagaagatgccgaagcagatccacgagatcaaggatttccttctcaccgcgaggaggaaggatgcccggtcagtgaagatcaagaggagcaaggatgttgtcaagttcaaggtccgctgctccaagtacttgtacaccctctgcgtattcgatgctgagaaggcaaacaagttgaagcaatctctccccccaggcttgagcgtccaggaggtttgattggatacatgacaacgtcgggtcgaacctctagagcatctttatcattagcagagcatgctgtttatgtagttttggactttaagctattagacatgtctggatttgtggatcttgaatttttggagaaataccaatttgcctcgttcaaaaaaaaaaaaaaaaaagcggcctagggcc

SEQ ID NO: 49166 - DNA, 446 bp, Zea mays
  Clone ID: MRT4577_144845C.1
tgctcaaattctgttataaaactgatgtgcatttttgacaatcctgttacagatttgaagctaagttgcttctggagaagctaaggaacaaaaggctgatgtttgtgggggattccctgaatcggaaccagtgggagtccatggtgtgcctggtccagtcagaggcttcatgggacaaaaagtcccttgtcaagaacggttctcttaatgtggtccatcttcaggaggaccatgcaaccggtggggtctattgggcttcttttcttatggaggtcgaacttcaaaagaacccaaactttcttaggaataagggacggaatgaaccaacccgccatcgatcgttaagcatgcggcgaactgggaaggggtggactacctgatctttaacacttacatttggtggatgaacacgccacaaatgaaaactctgcacggtggatcttttt

SEQ ID NO: 49167 - DNA, 559 bp, Zea mays
  Clone ID: MRT4577_144846C.1
gccggccgggccgggatctccgcatttccatcttcccgtgggatcccagtcgccgccgcaagaagaagagctcggggacttccaggtctcgcgagaagatggtcctagtgttgccgacatcgctgacggacccagacaatgttattgtgctctggttttgtacaatctctgtccgaagcagatccacgagatcaaggatttccttctcaccgcgaggaggaaggatgcccggtcagtgaagatcaagaggagcaaggatgttgtcaagttcaaggtccgctgctccaagtacttgtacaccctctgcgtattcgatgctgagaaggcaaacaagttgaagcaatctctccccccaggcttgagcgtccaggaggtttgattggatacatgacaacgtcgggtcgaacctctagagcatctttatcattagcagagcatgctgtttatgtagttttggactttaagctattagacatgtcagtgttggatttgtggatcttgaatttttggagaaataccaatttgcctcgttcaaaaaaaaaaaaaaaaaaggccccta

SEQ ID NO: 49168 - DNA, 769 bp, Zea mays
  Clone ID: MRT4577_144847C.1
ctgggcattgttggaatcgctccctgtctagggttttacccgcgtgccttatatatcctatcacttcccgccccgccgggatctccgcatttccatcttcccgtgggatcccagccgccgccgcaagaagaagagctcggggacttccaggtgtcgcgagaagatgccgaagcagatccacgagatcaaggatttccttctcaccgcgaggaggaaggatgcccgatcagtgaagatcaagaggagcaaggatgttgtcaagttcaaggtccgctgttccaagtacttgtacaccctctgcgtattcgacgctgagaaggcaaacaagttgaagcaatctctccccccaggcttgagcgtccaggaggtttgattggatacatggcaacgtcgggtcgaacctctagggcatctttatcattagcagagcatgctgtttatgtagttttggaccttaagctattagacatgtcagtgttggatttgtggatcttgaatttttggagaaataccaatttgcctcgttcaaggacgcacctttcagttttttcttatttaactgcatgttccccttcgcaacttagctctgcaaacttactagatttttttggttttatatgtatcccatgtggataagtagcagaaacatggctaattcgcccatccatcgacatgtcaagatgaactcatattttgggggctgatgctattaaaaattttatcataaactcagtgttcaaaaaagcggcccctcgagctccaagctttt

SEQ ID NO: 49169 - DNA, 380 bp, Zea mays
  Clone ID: MRT4577_144848C.1
cgcgctcgccgccgggcccccgctgccccccagcgcctccgtccgcctcaagtccttggagtccagcgtcggcctcagccgcaaggatctccgtgtcggcaagttactgcagctacctcaacgcgcctccgcgcccacccgcaccctcccgcggagcacgtgctactcgcctaccgtggttagggcgtctactacttcgttgagcacttcgtctggctcgccaaggacgggctcctgcctgcgcaccttcaaccgcgcctccagcgtctcagcgcctgagatgagctgctgtgctacgaccgttgcactctaattaagctggaagaggaggataagatcgaatcttctataaagaagctgctcgtgaaggactgtgataa

SEQ ID NO: 49170 - DNA, 518 bp, Zea mays
  Clone ID: MRT4577_144849C.1
tggttccggaccagagtgtatagtaagacttatcacactatctggctgagcgctctatatgtctaactatgattgatgctaccctggctgtcgcctcgtggttgttgaacgaaagccctgtctataaggtcttcttcatgtgatggctaataaaaatgcataagaccgcgctaaagccccttgcgctcgagaactagagcatctgccacgctgccgaactcctaaagcatccttatccctactccggacatccaccgagctccctgacaccgccatttcccctatcagtgtacagctagtgacaccagctctttgggcgatcgatttacaacatcttcgactgagaaaagccatgctggaggccaacttatgcgctgtgctgtgctccgccctccgagatgtggcgtaccagagatgatctccctagagatcgacctttcaacatgacgcctggttcatggcgaatgcctagagcataacacagtactctgtggactaccttggaaagcccttgctga

SEQ ID NO: 49171 - DNA, 402 bp, Zea mays
  Clone ID: MRT4577_14484C.1
taatttatgccttacaaggggacctacgggaaaaaaattatgcttaccccgtgggataggaaggtaaacggcccctgagaaacccacactagtgaccacctggagccaaggacaacaaatttttatggctgcacaccaagcaattctggaatggctgagaatgagatagtccaatgaagtggcgggtgtgtttcaaattcccttgcaaaactaagtgggcgcgccttaatataagctgcatccacttatgccagagcagcggatacttcaaaactttggttttttttggaggctctacgcctttgtggcactttcgtaggcacatcaggaagcttgataaccttgtcgacgttcttaggagcacgctttgtgatagcgcgcgctttctttttctcttcaggc

SEQ ID NO: 49172 - DNA, 335 bp, Zea mays
  Clone ID: MRT4577_144850C.1
ccccctgctcttatctccgctgtgccggagcctgacttttcctcctcttgagacctccaacccgagaaccgcacaaataaaggggagcacggctctctacccagagcatgcgcgagcacgcctcaaggccccgatccgagacaggtagctcaccgcaatccacccatgggtggatcaatcatgagcgtccccgttgctgcaggttcggcgagtgtcgatgtccaacgatccatcgttcagcatacaacacgtccatgtgtatatttagccaaccacaggacaccatcatcagcggcacggccaaccgacaagatactgacctcactcttccaagg

SEQ ID NO: 49173 - DNA, 290 bp, Zea mays
  Clone ID: MRT4577_144851C.1
gtaagatactaaccttattcatatcttaaatattatgttgtctttagcagatcgtgaataaagccgtgtaaaacattggtttgtactgtagactgcactgttcatagagtgaagtttgaaataggagatgagaaatatgatgagtaagctgctggagacagccttaggagttccattagttgatttcgttagcaactcattgtgaaagtgccttctgacatttctagcctggtacactgacagttgttgcctttgtaggttgagaagtaaactcaaagacattgctgatc

SEQ ID NO: 49174 - DNA, 394 bp, Zea mays
  Clone ID: MRT4577_144852C.1
gagagggactcctacactgcgtcgaagggcacagcatggtacatgcatatgacaggcacaggcgcatatcaagaccagaggagcataatgcacactccaccatgtgaacaaataatctacatcattgctggagcattggtgattacatatcacataactgcagaatagattccaacgcctctaccgttggttattggctacagagagagctcatgcgctatattgcatatacgcacatctccgttcttgaatgcatacccatgtccaaaccaagtccataagatctttaactccaggatgtggctgttgccgcacagatcaatgctcagtgactgaaggctggacaatataatcacttgcagaacgtctgatgcgtgggactatcaaacatggc

SEQ ID NO: 49175 - DNA, 289 bp, Zea mays
  Clone ID: MRT4577_144853C.1
tcgcccgccgagaggacgatccgccagcactaggctgagtacctgtcgttgccgccatcactgactgaggacgatggccacgccatgccataatcatctccatacacgggcttgccgctccaggaaggctacctgatgtctgtggatgagctgctgctgataccctctctcaacttcaccatggaggaccacgggcttgtaccgctctggattcccgaacgcctccaacttgctcgtctatagagacgctccgactacgctccgtcctgtgcctgtgcccggagccata

SEQ ID NO: 49176 - DNA, 519 bp, Zea mays
  Clone ID: MRT4577_144854C.1
gccggccgggtctggaactccttggccagtgcgctctctctctgactgcctccaccttctttctccgagcttttctactctttgggacttctccggccattgcctgctgtatcctgaacctctccaagacttgtgccgactgccaactcccacgtctctggttgaatgagagaagcctttcacttgcaaggaagcctatggtctgcctacgcttactgcttcatatggggtgcgatccttgaccagcacgagtagaccacaccattgctcgagggatgcaacgtgactctgataaaggcctggcacatgcctgtgactcaatatgtattaggatcccgttaccatcgcatagaatactcttgatacagaaagaaccgtctgactgacactgctgctcgacagtgagatgctcacgcttgctagatggccatcctctacttcccattagtcacctcccacctatgtgacagaaatcaccaagtgtctgccctacctatcaatgatgaagaagtgcctgca

SEQ ID NO: 49177 - DNA, 313 bp, Zea mays
  Clone ID: MRT4577_144855C.1
aagcttcatccttagagcggccccctttcttttcttttctttatctctcccctcgtatgaatcaagcagtctgatacatttttaattttccttcacttcctttactttccgtaaatactgctatccattccatgcctcccctctgtatcgctacaactccgtccatcatgtcccctactccctcttcttttatgttaaacctcaaaactctcgtcccaagacagctccataaacagctcgcaacaaacggaaatcggtaccacctttaattaacctaccaggttcactgggcccaccttcttctaaatcccaa

SEQ ID NO: 49178 - DNA, 745 bp, Zea mays
  unsure (1)..(745): unsure at all n locations
  Clone ID: MRT4577_144856C.1
ccggccgggtttaccttcaatctccaagatcccgaagcttttcatcatgacgtttacgaaatttcccacgatgccgataccgtcaatgagttccaccgcttgatggctgagcgaaagcaacaacggctctgcgagttacacgaatccctcgagtctctcgccgttgagatcatcgccaaccccaagttgatggactctgaggattggctgcatgctcttcgacttttccgcaccaaatcttttgactcgatcgtccgttattttgcaagctacctccccgctaactacggtgatcgtaacgaacgcgatcacgatactatttctattgcttcatcctcttattccgaagccaacagcgtcaagacagacagcactacgggcagcagcgtcgacggtgtttcaagtttctttgatgatgagcctgtcacgaagaagaagtcccccctgtctattcacacagatatgcggtcatcttccatcgtgcaggcgcctccttcgccgccccactctgtggttgcgcactcagatgagtcttctgcttcgtctcctatggagtcgcaccgatactcttctaatcccccttctcgttccatgtcgtttttctgcgtccgtgtcaagggcttttcttcatgacttgccncgatgactcgttcacgacgacgatgagacctcacagtccgatgancatgacgaggncgtcattttccggatttggattgtgcagagagccagtcgtcactggaca

SEQ ID NO: 49179 - DNA, 158 bp, Zea mays
  Clone ID: MRT4577_144857C.1
tggggcccacaggtgatcagggccaccacatctacaaatacaattaccacctcttcactataccaaagaaggacaaggttattttttctgcgcgttacatcttgtgtgcaaaaattcaacacatactgctcaggtgcaaatctcagcaggaggaagac

SEQ ID NO: 49180 - DNA, 627 bp, Zea mays
  Clone ID: MRT4577_144858C.1
tccggccgggtcctgcttgcacgcaagccactccgaggccaagtctagggtttgggaatcagtaggaggggagaggggagcgcgctcagggtcagggaggcgaagatgatcgaggtggtgctgaacgaccgcctggggaagaaggtgcgggtgaagtgcaacgaggacgacaccatcggcgacctcaagaagctggtggcggcgcagacggggacgcgccccgagaagatccgcatccagaagtggtacaacatctacaaggaccacatcacgctcaaggactacgagatccacgacgggatggggctcgagctctactacaactaggcgctctgaccccaaccgtgccctgatgttaatccgaattctgaagtcatgggtgcgcttccagtcgcagcgtctttagctaacaagctcgcatacatataggcaacttgagtgagctatgtagtacggatatggttgtgtggcaaactgccaatgactattgacatccttgcatatattgtcatgtgacaaggatcaaccagcaaaactggtgccctgctgctcgcagaccttattaccttaaataacacaggtggtgtgtttttcaattatgcgaaaaaaaaaaaaaaaaaagcggcc

SEQ ID NO: 49181 - DNA, 391 bp, Zea mays
  Clone ID: MRT4577_144859C.1
gggccaaaaactgggggggggacaaaggaaattctttaaagggcccaacccaacaaagcaaagctttgccctgttaaaaaaggaagggaggggctaaaaaaaaaagggggggggccctattctctggacccaaaaacatataacggggcaactagttttaccctcaaacagaaatataaaaaagttttggggacccaccccaatttgtccgaaaaacgagggaaaacctcacctttgccacaaaaatttcatacggaaaccgcctcccttgattatttaacaacccggacatttagggcctcaaaaaaaaaaacccctagcggatgggggaccgggccttccaaaacattttaaaaggggcaactaggctttaaacaaaagccaggggccc

SEQ ID NO: 49182 - DNA, 264 bp, Zea mays
  Clone ID: MRT4577_14485C.1
ggagaggagttgaaaggggattcaatctctgctgcgggcgaggaggagacggactggaataaggaaaccgaagaaggcttcgtgataatgtcttttctgtcaccaaagccagcgcccaaggctctcttctacggcaacctttacaagcgtggaaagtacaacaaagattggaaagaacgatggttcatgctcatggacaacaagctcttgtattacttcaagaacaaacaacagaagcaacctatcaacgacgggattcctttg

SEQ ID NO: 49183 - DNA, 755 bp, Zea mays
  Clone ID: MRT4577_144860C.1
ccccgcgtccgcggccgcgtgggtccgaagcgaagtcttgctagggtttgggttggggggaatctgacgcgagagcgggagcgaagggggaggagaagatgatcgaggtggtgctgaacgaccgcctggggaagaaggtgcgggtgaagtgcaacgaggacgacaccatcggcgacctcaagaagctggtggcggcgcagacggggacgcgccccgagaagatccgcatccagaagtggtacaacatctacaaggaccacatcaccctcaaggactacgagatccacgacgggatggggctcgagctctactacaactaggcgccctgacccaccccgaccgtgctgcgtgcccccctactgctgtgaggttaatctgaatttttctgaagccatgggtgcacttccagtcgcagtgtctttagctaatgagctcacatacatataggcaacttgagtgagctatgtagtacatacatggttgttgcaagttaccaatgactattgacagccttgcatatattgtcatgtgacaaggatgaacctgcaaaattagtgtgctgctactcgcagaccttaccttaaataacacaggttggtcgtgataatcacggtcctgtgcttctgttatgtgataatgtgaaatatacttggccatgtttggatgttgtagtattagatggagtttgtaaaactccaaaaagattacagttttagtgatactgtggtttccaataccacaaagtttattggatc

SEQ ID NO: 49184 - DNA, 232 bp, Zea mays
  Clone ID: MRT4577_144861C.1
tgggttttttttttttttaaaaagatcccaatgattttattctaagaaccccattaagaaattcttgcacgcatacatgcacattacagtgtcaaggtgatatacgatgttgtggggaatcgatgttcgtggcatgttcagtgtttaaccctttcgctgccaacgggacctgccagacactccggagcaatgggctgtaagctctttccagcagcagaagggttaagggaga

SEQ ID NO: 49185 - DNA, 791 bp, Zea mays
  Clone ID: MRT4577_144862C.1
ccggccgggtcctgcttgcacgcaagccactccgaggccaagtctagggtttgggaatctgtaggaggggagaggggagcgcgctcagggtcagggaggcgaagatgatcgaggtggtgctgaacgaccgcctggggaagaaggtgcgggtgaagtgcaacgaggacgacaccatcggcgacctcaagaagctggtggcggcgcagacggggacgcgccccgagaagatccgcatccagaagtggtacaacatctacaaggaccacatcacgctcaaggactacgagatccacgacgggatggggctcgagctctactacaactaggcgccctgaccccaaccgtgccctgatgtaaggttaatccgaattctgaagtcatgggtgcgcttccagtcgcagcgtctttagctaacaagctcgcatacatataggcaacttgagtgagctatgtagtacggatatggttgtgtggcaaactgccaatgactattgacatccttgcatatattgtcatgtgacaaggatcaaccagcaaaactggtgccctgctgctcgcagaccttattaccttaaataacacaggtggtgtgtttttcaattatgtgaaaaccttggccctgtttggttaatttagggtgtgattggttgtaggacaaccggggacagccacgtcctcagcgtcccctttcgtgcttccaattctgatctactgctagggacgaaactgaggattgttgtatcaataaactacagtttgagtacttacaaatatgaaaataccgtgatcgg

SEQ ID NO: 49186 - DNA, 889 bp, Zea mays
  unsure (1)..(889): unsure at all n locations
  Clone ID: MRT4577_144863C.1
ctcgaggccggccgggaacaacttcctgcttgcacgcaagccactccgaggccaagtctagggtttgggaatctgtaggaggggagaggggagcgcgctcagggtcagggaggcgaagatgatcgaggtggtgctgaacgaccgcctggggaagaaggtgcgggtgaagtgcaacgaggacgacaccatcggcgacctcaagaagctggtggcggcgcagacggggacgcgccccgagaagatccgcatccagaagtggtacaacatctacaaggaccacatcacgctcaaggactacgagatccacgacgggatggggctcgagctctactacaactaggcgccctgaccccaaccgtgccctgatgtaaggttaatccgaattctgaagtcatgggtgcgcttccagtcacagcgtctttagctaacaagctcgcatacatataggcaacttgagtgagctatgtagtacggatatggttgtgtggcaaactgccaatgactattgacatccttgcatatattgacatgtgacaaggatcaacctgcaaaactggtgccctgctactcgcagaccttattatcttaaataacacaggtggtgtgtttttcaattatgtgaaaaccttggccttgtttggataatttatggtgtgattggattggttgtagttgtaggacaaccggggacagcctcttcagcgtctcgtttcgtccgtccaattctgatctactgctagggacgacaccgaggattgttgtatcaataaactacagtttgagtacttatataaatatgaaaaaccgtgatcgaaaaaaaaaaaaaaaaaaaaaaaaaaaaaaaaaaaaaaaaaaaagggcggcctcgcgatcangaactagcgaacgc

SEQ ID NO: 49187 - DNA, 309 bp, Zea mays
  Clone ID: MRT4577_144864C.1
atggcgaactcgaccgtgggcttcacgccagcgcgggagcaccagagagcgcgggacaagggcgagagagggggcgagagagctcgactgaggacgcaaatgagtgggggaaagtgggcgagcggggcacagggtctaaagggacgagggcatgaggaggtggccggagaacgcggacatgggcgcgtccatggcgagggacgtgggcgggagggtttttgtaacacccctggtgtttatattccgctcgacaacgagtatggatttaagcacgtaatatcagtggataaaacaaatgctaaattttaa

SEQ ID NO: 49188 - DNA, 813 bp, Zea mays
  Clone ID: MRT4577_144865C.1
cattgggtacctcgaggccggccgggaacttcctgcttgcacgcaagccactccgaggccaagtctagggtttgggaatctgtaggaggggagaggggagcgcgctcaggcctcagggtcagggaggcgaagatgatcgaggtggtgctgaacgaccgcctggggaagaaggtgcgggtgaagtgcaacgaggacgacaccatcggcgacctcaagaagctggtggcggcgcagacggggacgcgccccgagaagatccgcatccagaagtggtacaacatctacaaggaccacatcacgctcaaggactacgagatccatgacgggatggggctcgagctctactacaactaggcgctctgaccccaaccgtgccctgatgtaaggttaatccgaattctgaagtcatgggtgcgcttccagtcgcagcgtctttagctaacaagctcgcatacatataggcaacttgagtgagctatgtagtacggatatggttgtgtggcaaactgccaatgactattgacatccttgcatatattgtcatgtgacaaggatcaaccagcaaaactggtgccctgctgctcgcagaccttattaccttaaataacacaggtggtgtgtttttcaattatgtgaaaaccttggccctgtttggttaatttagggtgtgattggttgtaggacaaccggggacagccacgtcctcagcgtcccctttcgtgcttccaattctgatctactgctagggacgaaactgaggattgttgtatcaataaactacagtttgagtaaaaaaaaaaaaaaaaaaaaaaa

SEQ ID NO: 49189 - DNA, 641 bp, Zea mays
  unsure (1)..(641): unsure at all n locations
  Clone ID: MRT4577_144866C.1
actctgccacacgnacgacacttgttatctctaccacggcacgccgacattacgtttcatttgtacagccagccagcggaggcgggcattcagttcatatttcggcctgtacttctccactataaaaacaatcggtcctttaggcgtcaatgagcacggccagtatgatcggcacaactatctgcgtcacggatcactcacagtcagaataataagagtagctgaactatgattaatagggcgagacttcctgccctcctggcatcgaacgagtggatgacaccagggtttctcggtgcaacggcacaaaaaaaattaatgtcctttaacgcataactcggtcctgatgtcctgcgacggtctacaggaaactgtgcgaatcaattgcgataatatatagcgccactagaataagttggctgtagtgacaatccaatatttcgcttgacacattgcaaacaagatacgagctcatatcttcaagggataaaactaggcaagactaatgcagtgcatctaacccatactaaatgcgaagcactcactgccaattttcaagccaggaaaccaataacatcaattctgttaacgaatcagccatccaacataagagcagccaatcgcatactgataagactatt

SEQ ID NO: 49190 - DNA, 875 bp, Zea mays
  Clone ID: MRT4577_144867C.1
aactcgcagatggaagcccgaatacatcgaactgcaaccgctcgacgtggggtagaatataatctggtgcgctccccccgcgaacaacttcctgcttgcacgcaagccactccgaggccaagtctagggtttgggaatctgtaggaggggagaggggagcgcgctcagggtcagggaggcgaagatgatcgaggtggtgctgaacgaccgcctggggaagaaggtgcgggtgaagtgcaacgaggacgacaccatcggcgacctcaagaagctggtggcggcgcagacggggacgcgccccgagaagatccgcatccagaagtggtacaacatctacaaggaccacatcacgctcaaggactacgagatccacgacgggatggggctcgagctctactacaactaggcgccctgaccccaaccgtgccctgatgtaaggttaatccgaattctgaagtcatgggtgcgcttccagtcgcagcgtctttagctaacaagctcgcatacatataggcaacttgagtgagctatgtagtacggatatggttgtgtggcaaactgccaatgactattgacatccttgcatatattgacatgtgacaaggatcaacctgcaaaactggtgccctgctactcgcagaccttattaccttaaataacacaggtggtgtgtttttcaattatgtgaaaaccttggccacgtcctcagcgtcccctttcgtgcttccaattctgatctactgctagggacgaaactgaggattgttgtatcaataaactacagtttgagtacttacaaatatgaaaaaaccgtgatcggaacaaaaaaaaaaaaaaaaaaactcgagactagttctctctctctctcctcgtgc

SEQ ID NO: 49191 - DNA, 576 bp, Zea mays
  Clone ID: MRT4577_144868C.1
tgggacctcgagccggccgggacgacgttgaacccgccgtgcgacccattcacccccgtggaccgtgccggtgccgcggcacgccgccgccgaaacgccatgagggaagcgatccgtcggtcggaagctttcgttcttcaccagtatctctcctcgtcctcctccaagcggaatcgttccgggcgacgactcccttacccctccgagtatgactagcgcgaccgagggctcttctcggctccgccaccgacggctcgtcgggcgcgaacccggactctgcagcggcgtagcagaccgaccagccggcctctcccctctcaggcaccgcgtccgccgggggtggcttgtctcgggagatcagcaagaagaaccccggcgcgcgcctgagtatgctcttggagcgctggggatgcctccgaggtagtcgaggtcaacaaggtacccataatgcggcgcgatggacttacctcgtgcgacctacaggttcttggacatgtattcgctcgttcctccagcgtccttgctatggagaatgcgatgatgatcaaccatgaatccgtcatacgggtaattact

SEQ ID NO: 49192 - DNA, 436 bp, Zea mays
  Clone ID: MRT4577_144869C.1
agcgcgctcgcgcctgttcacagccggatgttgatagagctacacccgggtcctagccgggcaggttctgttcgtggacgggaagttagacaaggcgatctcagcattcgaggagcttgcgcgggaggaccccttcaactatcgtcctcttttctgtcagggcgtgctgaaccttccccttggaagggaggcggaatcatagttcatgctcgagcgatgcctctaggacctcggctacgcgctaatcatagatccgtcagtgatgtatacaccgaacgtggataccgaattctattgtgataagcctcatcccgcgaatgtttgacctgttactctacagcggatgatcttaatataatggaacacttgcatttttgtaccctatacgaattataattagggaaatttcctaacatgtttccgttattcttattat

SEQ ID NO: 49193 - DNA, 278 bp, Zea mays
  Clone ID: MRT4577_14486C.1
gaacattggatttttttatatttcttattgtcttgtttcattttgtgcttaaataactgtatacactgaggtattcaggggtaaactaaacctattacacggaccaagcaataaaaaacagactggggagactatggactcccacatcccttaaaacaatacacaagagttaactgctcacctagttaaaaaaaagcgaaaacttaagggtgaggctacatctatagtgaaccagcaagacatgacattcgaccatcgcctaacacaaaatgtgctcc

SEQ ID NO: 49194 - DNA, 350 bp, Zea mays
  Clone ID: MRT4577_144870C.1
gactcccatacatgctcagcggacgcctttctttttctttcggcatattccattcacctcccatccatttgtcaccaaaagcgaaggcggtggcggccgagctgaggtgggagatctaaagcgcgcgcggagcagaggagatcaacacacttcaacccgtggtcgtgctttttcccccgggagtggaagctcatcttttccttcctcacggggttcatcatcaccggattcattatcactaactttacggacaacttctccgaggagggtctttataactctaatttccttcctgaacactacatgaaaccctgacgaaccaggtgagggagttacaagaaacgcttgtt

SEQ ID NO: 49195 - DNA, 276 bp, Zea mays
  unsure (1)..(276): unsure at all n locations
  Clone ID: MRT4577_144871C.1
gtgcgtgactataagatgctggctgatatttatgtttcaactgggagaagggacagagctgaggatgttctgagaatgtctatgtgaaagagaactggacttgagacgcaggctgtagcttgactgaatgtggctaaagattgcaatacatgctagaagtagaggactagagtgtataattntagtatgcttgcatgttctttaaaaaatgattacatcaataagcgtaatcaacatttgaatctcatttgggatttcttggactatataaagatc

SEQ ID NO: 49196 - DNA, 754 bp, Zea mays
  Clone ID: MRT4577_144872C.1
gggtacctcgaggccggccgggccgggatgccttaacattcctcccaaccacactcacctgctatcttcatagccttcgtcctgtccagtatcacatcatgtcagactactgcacgaaagtactaggatagaactcatcttacaatgttcgtctactttggctaccctccgctaagggtatccttgctgctgatgatcccactggcaccattggcaagagcctttccaccatccatgtatagaacgatgtggagaacctccgggacctccgcgagctcctattctgctgtcctggagctctctagaacatcatgagagtgatcctcttcaaggataccctgaaccaaaagaccaaggatgggaagccttttgtggatgtcctctaggagggaggcgtcctccctggaatcaaagatgactatggcaccattgaagttgctggcactgataacgagaccaccactcaaggtcatgacgaccttgacaaactgtgccccaagtactacgaggcaagagcccgctttgtcaagtggcacgatgttctcaagagtgttcctaatgatgcatcacaggttgtcatccacctgaacgctcaagggctggctcgctatggcatcatctgccacgagaatgggctggcgccaactgtagagcctgagatccttgtggatgtgccacatgagattgatatctgcagctacttgactgagaccgtgcatgctgactgctaaaggcgctcaactagcaccatgtc

SEQ ID NO: 49197 - DNA, 556 bp, Zea mays
  Clone ID: MRT4577_144873C.1
ttttttttttttttttggctggaacggtaaaaatatattacaaggtatggacaaatatacacagtattgagtttaactctctattacaattttttgcaaaaataatgcaaatatttcctaagctctataccggaaggcttaaaaggaagcttcatctcagcaaccttcggaatgtgctttgggttatcaaccttcggcaccgctatctagtttaagcagacttcgagcttcgtctccagccaactctcgtccgcctttagcccaaatctgtgtgatgaatctattttcgatgcttcgggcttcaccagggatgttaataagatctgatagtgatgggctgtaggttggtttgttcaccgtttttgcatgcatgcatccggccttcaagaatgcagcagctgtgccgcgagaagctaacaaagcatagaagtcactgtgcccagttatcacttcatcgagcgcatcaacttcattttcaatgtgcttgaaggtatctgatatgtcctcagccgaaggggtaacatctttagagctggccccaactgacttgaagact

SEQ ID NO: 49198 - DNA, 212 bp, Zea mays
  Clone ID: MRT4577_144874C.1
agcttcgtggggagggggtccttcacctgcgggcgctgctgctgtaatgtgcggaggcccgtgaacgcggacaacctcgacgacgcgcaccatacgctgctggagatcgcggagctggccacgcctttcggcaccttgacccagcgcgtggccgcctactttcgcggatgccatgtttgctcgcgtcgttagtttctgcctaggcctgtacg

SEQ ID NO: 49199 - DNA, 184 bp, Zea mays
  Clone ID: MRT4577_144875C.1
gccttccttccccacttcgttttaccttatgggggacataaaccttctgggacagtggtagattttttttccctctccttattttaaaaccttttattatttgggagtgtataataggagcttatgtcacctctgcggcttcccccgcggctgatttggtttaaagggttagaccaggaccctt

SEQ ID NO: 49200 - DNA, 925 bp, Zea mays
  unsure (1)..(925): unsure at all n locations
  Clone ID: MRT4577_144876C.1
cccttttctatgatgcagcttgacatcgttcattgtcattgcattttgtacttttctgaagatcatgaaaacaatgaagtgttcatggttcctcagttctgttcttgatttatatgtatcttctatagaaaactggttcagagctggtgtttatggcctccctctgaaatcaaatctctctctctctctatctctctctctctctatatatatatatatatcttctatagaaaactggttcagagctggtgtttatgcattttggttgaaacagatgaagagaatactatcatgaatgcatctccaatacattttgttaagctatctctggcacaaaagaatgataacatgatttcttcatggaaatgtctaggtggtggagagtagtttacttaagataagttgaattatggcttacaactcgttagagttctagaatatgatttggtagattgaaatttgtggctgctgtctccccagtctgctaaattttgctcttcggctcaatttcactttcatattatctttttcatgtcctatttgcatggtctgatctacacatagaacactttcatatttctgttgttgttgttgttgcagggagacaagggatggaactcttgagcactaaacacaagttggtcgaaggaaaatcatgatgagcaaagtcattgttgtgttaacgttttgggcatgccaagaactatttttttggttatgagtttgtcaaacatatgttgagtttgtcgctcatttcttaagagctatttctgtgatcgaagaaatttgtttattttagtggcatgaataaaaaaaccaagcaaatccatggtagaaaaaaaaattatgtacaaaaaaaaaaaaaaaaaagcggccnnaaataaaagaaaaaaaaaaaaaaaaaaaggggcggcccgttttaggg

SEQ ID NO: 49201 - DNA, 417 bp, Zea mays
  Clone ID: MRT4577_144877C.1
tgggttcttttgagcgggcggccttttttttttttttttttatgaaaaaaaccttccggagagaagaggggggtggaaaataagaaccactcggagtccgaaagcctttacaaatttacacggagatgatattgcccggggaaaaaaggtgctggttcattggaaggtagcgctggttttattcaagctacaatctaatgactcaaggttcgctggcgcgtatcagacacaccaactggataggggtagacaaagttggcttctgtgtagaacttcttttctttcgactgcttttcctagaaaaaaacgacgagggcgcctacctggcatattatgcgtacattcccaggatgctgcgtccatggaataaaccactgcgaattatctccatttttttatcacgcgcctatttacact

SEQ ID NO: 49202 - DNA, 273 bp, Zea mays
  Clone ID: MRT4577_144878C.1
ctcggctcgagagagatctcatcttgcctgcccacccaagcttccctttcgttcctcctcgccccagcgatctcggtctcccgttgaccgagcatggcatcccaccactgagaggctcgcataggagcaggatgccgtagaccatgaagtcgtcggtgttcagcggcgatgggacggcccccttcttcggtttcctcggcgccgccgccgcccttgtcttctcatgcatgggctcagtgtacgggaccgcgaagtgcgtcgtcgtcttggcgt

SEQ ID NO: 49203 - DNA, 1356 bp, Zea mays
  Clone ID: MRT4577_144879C.1
cattgggtacctcgaggccggcctggagcaagccgccgccgccccctgtgttcctctccctctgttctccctctccctcaagcgtctctctctctgctctctcacgcaggcactggaggacgccgcccgcaccgcgcgatgccgcgtccagcgtgtccgacctgcgcgcacagccgccagccgacccacggcgccctgcacagccgtgacgaccgcgcgcctgccccgcgcgcgcgagaaccgcgccaagcgcccgaagtccccgcacacgtcggctcgaccgcgaccctgacccgacgccgcgcaccccgcgcatccgtttcttgttcgtgataatggaacttcacagcatccgtttcttcctcctcccattatttcttttcttgaaaccgacgcgtcaatggcctggaaggaccaccggccattgattcctctccctggccgacccttcttctcctctccctctctctataaaagtgaaccgagcctctctcccattctcccctacccgaacttgtctctctttctagctctcctcgctcgccagtacaccgcaagtcgccggagtttgccgtccgtcaccggagttcgccggagttcgtcatcaccggagcccgtggagttcgccgaagctatgccatccgccgtccgtagtcaagcccctgctcttctccatccggccaaaacccgtcgatccatccccgtcacacgcacgaacccaagactataagcgggctacattaggtgtgctttatgcaatttgaccatttcctgcatttgcgtaatgaggactctagagagaagcctcgtagtgagaccctagccattcacctcggaagtgaatacgggtatagctaacccgggctagaagggaatcgcgactcatgggtaaagatgcgccacctctgcaaagtgtaaaactgatatatcagtcgtgctcacggttatgagcagcctggactcctcacatgataattgaacttgaagatggaaataaatcaagattcgatgatctgccaattgttttcttaagtggtttcacttaagtgtttttgatatactcttatacctttgtttaatgggaatacttgggattcacacttattagtaagataggtgttgttaataaaatgttgaccaactaaaatgcttactgctcaaccttggcctcaccttgtcaaacttgcattaatttttccctcacttgctgatccccgacgataagtgagctcacccttgcttaaatcttgatcagaagtttgcagatgaagttatgatgctgagctccatggatgctagtctagtgaaacccccggtcatcttcctgtggatggatgtccatgtttcgcttactcg

SEQ ID NO: 49204 - DNA, 252 bp, Zea mays
  Clone ID: MRT4577_14487C.1
cgaagccagctgcgtccggtggtgtaggcgcgcgcgcggcgggcggtaaggtcagagcatgggacgtcagtcggtccgcgcgtacggacgtccgctcgtatggcctgactctgtgttgagagttgcggaatgtgaggcgctacctcctgttcgcgcccgccaaggaggtgatcaggttcgaggagcaggaggaggacatcggctgcccgtgcgagtcgtccgcggcgcttttttcgttgtcgtgcttctgct

SEQ ID NO: 49205 - DNA, 479 bp, Zea mays
  Clone ID: MRT4577_144880C.1
gatcattatagactatgtcgagatataaatcgtctagacctaagcgcaaggacaaatagctgctgaggcatgggagggggaaggtgacgccacaagcgctgaatctgctgcatctgatccgcgagattactaaggcagatcggacttaacctcctgatcaagaaagcattgctggtactatagatgactatgcaaatgcactgtattaaagtaccacaggctgtggcgcttgcatcggttatctaggacgatgcagattacgaggcctgagctgactgcgtggaagagcaccataagacgcagtgccaccagaagagcaataactacttgtaaagaatgtgatacatacctgatgttgttcaatcatgacttgactggggaaatgttctgaactaagagctaaaatatttgtggctgcgagagtgggtattgacagagatagagcatatgtgaaaagtatttcaggaaaaacacatgaa

SEQ ID NO: 49206 - DNA, 325 bp, Zea mays
  Clone ID: MRT4577_144881C.1
cattccctccttttccattattgtaaccaaacatattcaccaaaaaattttaccgcagacatatacatttaaaaatctacaaccgcaccctaatatttttttccaaaccaaaatgacaatttcaatagggcatatacatataaccattaccaaatctacaaggccacccttataatttttccaaaccaaacttacattaaaagtaccaaaaagagcattgaaccaattaaagaatctaaaaagtccaaaattaactggtttgctaaaacaaaattcctccccatatccttcggaaaaaatattttgcagcttccatccacctcaa

SEQ ID NO: 49207 - DNA, 341 bp, Zea mays
  Clone ID: MRT4577_144882C.1
ccagacccaaataataggagttccatttaggtataaaaggggtacaaaaaacgccacaccacagaaacaagggcatgttcagttttttttgttcaccacgatcccttgttaacaccaccttagccaaataaataaccccgtttatgtataggccagcgggggcgtgagtccatccaaggaagtactccgtattttgaaggagtataacacaaggttttgccggagcaggggttgaacctaaccaccagaatccgggttactggcctgggccttccataggtccttgaagaggccgggctgcttttgatgctgctgctctggttaaggagtcaaaacaaaat

SEQ ID NO: 49208 - DNA, 211 bp, Zea mays
  Clone ID: MRT4577_144883C.1
tacacttgtcggtattatgatgccgagtgctttgagtaaagatataacctggtggggcgcccagtgttccacaaaaggattaccgggatgcgccatattcaaaggtatggtcggctcttacttatgtgcagctgctgtcaagtgctgggaacaagatctgtggtaaaatccggtgtagggcacatttgctggcctccttgctccacttctt

SEQ ID NO: 49209 - DNA, 937 bp, Zea mays
  Clone ID: MRT4577_144884C.1
ccggccgggtgaatatagaaattgcagtgtgtgactactcgaaactcgcatgatttctgttgtaatgcgcattttctgtgatttgcagttactaccactttcactattaagctttgctttttgcggacttgggaagaattgccaagatttcatacagttaccttatttgggggcattgttttctgaaaagtcatggttgccttcatcaatgctgatgtgttacttttatctggcttgtgttgaaagttactaagtgattgatcaaccttgagaagtcacgtttctagtgttattgatgctcttacgcatagaagaacacgttgcttgcaatacagtactcagtatttaaagttccttgatgcctttttgttccttaaatagtaggtggcagaacctaaagattgatacactgcataaattgtttgtggatcatttgacagcctaaaactgagattgtgtggagcttaggaaattctgctatgatttatgttgaaattaagtctggtagaaagtgcagtagaaatactcaattacccaagtctccttttgctaagactgtttatttgcggattgagaaatggtggccgtttcttgttccagctgctgctattgtcctaaaattgggtagaaagtgtatgacaaatactcaagtacatgcagttcgtcctgctgttcctggattgtttccttacatggtcccaaacagtgaatgttccttgctacttctgttgctggaaatattgccgtagttatatttggtgaatactagagtcttgattatgatatgtaggctttgggttatgacctggcagctaggatcaacttttatttttgttagtttgatgtctttttctaatccgttgcttctgttctgctatttgtagtcgaggatcctgttcctgatgacccctttcagttgctcccgaaaagaacttac

SEQ ID NO: 49210 - DNA, 431 bp, Zea mays
  unsure (1)..(431): unsure at all n locations
  Clone ID: MRT4577_144885C.1
aattncccggccgacccacacgtccgcccacgcgtccgtgtcaatatgctcgtatggagagagtgcaagttttgctaccttgtacagattccaccaatccagtgcttttgatgattcaaaaaaaaaaaaaaaaaaaaaaaaaaaaaaaaaaaaaaaaaaaaaaaaaaaaaaaaaaaaaaaaaaaaaaaaagaaaaaaaaaaaaaaaaataaaaacaaagaaaaaacacaaaaacaaatagtaaagaaaaaaaaaaagggggggcacctaaaaaggttaagcctaaattacccttaaaaggaaaataaaaacttttaaaaaggggccacaaaattaaattcaagggccctttttttaaaacttcctgaaggaaaaaacccggggtttacccaatttaacccccttaaaaaaaaacccctttttccaaaaggg

SEQ ID NO: 49211 - DNA, 188 bp, Zea mays
  Clone ID: MRT4577_144886C.1
gcgctgtccgtagaccccgcccgaatcaatggagattagggctcctccgacgcgctccgatcatcgtctcccgtccccctcccccagcttccgacgaaccccccttaggacctccttccttccaggaagcgtgtacacttaaaattgttcaagtacctcagtcaacattcaacaaatctaagtgcaac

SEQ ID NO: 49212 - DNA, 486 bp, Zea mays
  Clone ID: MRT4577_144887C.1
taggggccttttttttttttttttttcggattaagtgcccagatatcttaagagctattgtattacgagctgaacttacagtccaacacagtagttcagtacagaacatagataatccagatttaaaacatcggtgccggaaacgtctcgagaggcaaggctgcctgaaaaggtacataaaagagctacggctataatacttcgacaaaatggcctcgatcagcatgctgatatacttcactgcttccttgctgcgacaatgttgtcagcctctttcttcacaggctcttccttctctgacaagatcagctcaatgtggcaaggtgaggacatgtagggattgatgcgcccgtgagcacggtaggtgcggcgcctctgcttctgggcttgattcacctggatgtgtgaaacatagaggttgtccacatccaagcctttcacatcagcgttactctcagcattcttcagcaaatccaggatgaacct

SEQ ID NO: 49213 - DNA, 736 bp, Zea mays
  Clone ID: MRT4577_144888C.1
agagcgtcagccttttttttttttttttacaccaaattagtccatgcagattaagtgcccagatatcttaagagctattgtattacgagctgaacttacagtccaacacagtagttcagtacagaacatagataatccagatttaaaacatcggtgccggaaacgtctcgagaggcaaggctgcctgaaaaggtacataaaagagctacggctataatacttcgacaaaatggcctcgatcagcatgctgatatacttcactgcttccttgctgcgacaatgttgtcagcctctttcttcacaggctcttccttctctgacaagatcagctctatgtttcacacatccaggtgaatcaagcccagaagcagaggcgccgcacctaccgtgctcacgggcgcatcaatccctacatgtcctcaccttgccacattgagctgatcttgtcagagaagcaagagcctgtgaagaaagaggctgacaacattgtaacaacaaggaagcagtgaagtataccagcatgctgatcgaggccattttgtcgaagtattatagccgtagctcttttatgtaccttttcaggcagccttgcctctcgagacgtttctggaaccgatgttttaaatctggattatctatgttctgtagtgaactactgtgctggactgtaagctcagctcgtaatacaatagctcttaagataaaaaaaaaaaaaaaaaaaaaaaaaaaaaaaact

SEQ ID NO: 49214 - DNA, 265 bp, Zea mays
  Clone ID: MRT4577_144889C.1
gagggaaggggaagtgaacggagggagcggaagaagatctccggctctcaaagctacatcctgaacccatcgcgtaagaacgggcaaaagaatcggagctgatccggcagacgctctctctcggaatgagtacgatttgacgcaattgcggccgaactttcttgcacccaagatgagtgggcatggtgacactgcgacctcaggtatgcgtaaatggctttctgtgaccacctcggagtggcgttgcacaaattcctggtgctcg

SEQ ID NO: 49215 - DNA, 238 bp, Zea mays
  Clone ID: MRT4577_14488C.1
gggtggctttttcttccccttccggttcggtttcggtttcggagggttttcgggggttcggtttcggggggaaccgaatcaaaatggcggcttcgattgttaagtcccgttgtttggtggggggcttggcttgggcaacggacaacaattccttcaaaaacgctttaagaacttacgggagggtcttgaagtcaaaaataatcttgaatcggaaaacccaaaggtccgggggttttgg

SEQ ID NO: 49216 - DNA, 1077 bp, Zea mays
  Clone ID: MRT4577_144890C.1
cattgggtacctcgaggccggccggggttagactagggtttcccagctcttaaggccgccgccgcctcggtgcctcctcgcttcgaagtgttcgtgcgaaggcgaccctccctccttcgctccttccgcgccgcctcccggccgtcgccgccatggtgaagtactcgcaggagccgggcaaccctaccaagtcggctaaggccatgggcagggatctgagggtccacttcaagaacacaagggagacagcctttgcgcttcgcaagttgtctttgaccaaggctaagcgataccttgaggatgttattgctcacaagcaggcaattcccttccggagatactgtgggggtgttggtcgcaccgcgcaagctaagtctcgccactccaatgggcagggccgctggccggttaaatcagccgggttcatcctggatttgctgaagaatgctgagagtaacgctgatgtgaaaggcttggatgtggacaacctctatatttcacacatccaggtgaaccaagcccagaagcagaggcgccgcacctaccgtgctcacggacgcatcaatccctacatgtcctcaccttgccacattgagctgatcttgtcagagaaggaagagcctgtgaagaaagaggctgacaacattgtcgcagcaaggaagcagtgaagtatatcagcatgctgatcgaggccattttgtcgaagtattatagccgtagctcttttatgtaccttttcaggcagccttgcctctcgagacgtttccggcaccgatgttttaaatctggattatctatgttctgtactgaactactgtgttggactgtaagttcagctcgtaatacaatagctcttaagatatctgggcacttaatctgcatggactaatttggtttacttagggtctttggttttaagaataagctagtccatcatcttctcactcaaaaaaaaaaaaaaaaaaaaaaaaaaaaaaaaaaaaaaaaaaaaaaaaaaaaaaaaaaaaaaaaaaaaaaaaaaaaaaaaaaaaaaaaacaaaaaaaaaaaaaaaaaaaaaaattatataatgaaaccaa

SEQ ID NO: 49217 - DNA, 465 bp, Zea mays
  Clone ID: MRT4577_144891C.1
gccggccttttttttttttttttgcttttttattttttttatttaaaaccaaaaaggggggtcccatttaacataggatttaatttttctggaaaaaccttacttgactgggtttcctgccccaagcttccggcaaattatgaacccaccatccaattcatcccatttttcccttgcttttgaacccatttaagcccttgaaacggaaccgctggaagttaaaataaaaagggaaaatccaaccttaaaaagtccatttgaacccttttttggggaagttttccaattctttgttaacaatacggaaagcattttcctcttttggaggtccagcggaaatttttataaaccaggtttttcgggggtttcattttttttttatacggaacgtgggggctttcaattggcccacaaaaccaggttaaattatttggaactggaaccctggaacaattttgggggggg

SEQ ID NO: 49218 - DNA, 578 bp, Zea mays
  Clone ID: MRT4577_144892C.1
accttcttccaccctactataatatactgcgtgtaataggttccagaacagacctagctggttttgcaccacaacgtccgacgttgtctccgcaactgccgatcaagctgaggctgtcgctcaagctgcacgtgccgcaagcaaacaccctctacctggaagacaccagcaccgccgctcatgccaccgggggacttcaagtgctcccccttataaacaggccccgcctgagttagttcaggcccaccttgatttcgctgaagatcgtccatggttacagtcttgggtggcaactgaaagcaccaccccttgcactgctgatcacatccatcgactaccatggatcttattattatctatctagctcgtggtgtactgtgaacactaatatatccggccgaacttgatgccatacatagaccattgtgtctgtgtgctgggcagagagagtagaaacatcacccttgaggtggctatcattatctgccagtgcctggtcaccctttgtgctcatgtacttaccaatgtgtaccagcatgttctgtgcatcgacagcatctgctgtaaccatatattaa

SEQ ID NO: 49219 - DNA, 623 bp, Zea mays
  Clone ID: MRT4577_144893C.1
ttttttttttttttctttttttcttttttttttttttttttttttttttggtgtttttttttttttttttttttttttcccaccaaaaacgcgggctttccttcacttaaacggttccgccaatttacaagctacaggcggaatcgtgcacaacacacaacccccctaacaggggggggggacattttgtttgaaacgaggctttacttgagcataatttcaacccttttattcattcgtgtataattcaactcattaaactaaagctgctcgcgcgggggcagtaaaacccagacactgatttattctgtaaaaatacagctttaccgaccaaaattgagatcggttaaagcctagggagctgttaaaatggcgttatttgaaaatttctttattttctgcggttatgacaccaattttttggttttgtcgttttcagctgaggcactaggaggggggtatgctcccacttcttgttacaaatgttgggggaacaaaagcagccctatggatctgggaatggtaaaatctgagtccccttccaggttttgctgttccttctcttttctcaacggaattcacagcagttaaaaagttcactgaacaaccttcttttgccatag

SEQ ID NO: 49220 - DNA, 144 bp, Zea mays
  Clone ID: MRT4577_144894C.1
cccttctggagccggctgcacgaccacttccacgcgcaccgggacttcgcgtcggagcgcagcgagaactcgctcctgcaccgctggtccaccgtccaggacaacgtcaggcgcttcgaccgctgcgtcgccgacgtgtcggga

SEQ ID NO: 49221 - DNA, 286 bp, Zea mays
  Clone ID: MRT4577_144895C.1
gggtgcttctctcccggggtggcttcatctcttgtgcgttggatccggtgttgcttcggggtcgtgtatctgagttggaggccaccaatgctggttagtgtcctttcttcttcttctttgttctttcccgtgggttgttttaccttctgacctcattttgtttgaatacttcttgatagggatgactcgtcagatcacagttcttgaggggagcgcggtcaagatcaaacttatatggctcgacgatgcgctgacttcgaggagaagaactcccaaagccagctcg

SEQ ID NO: 49222 - DNA, 278 bp, Zea mays
  Clone ID: MRT4577_144896C.1
ataacacatacagcaggatttacatagcatttaacaagataattatttgctttaatttccctggccgatttgttacttatttaagattaaacttgggacgttccccggattaaaaattattaacttccattggttttttattccttaaaatttttggtgggttcaaaattgggcttggttaaaaattttgggtggcctttcacacccattaaattttattgggggctggggacatttgaatacttctttatacctttcttctcttgtgaactttcttt

SEQ ID NO: 49223 - DNA, 340 bp, Zea mays
  Clone ID: MRT4577_144897C.1
cggcgggtccacgccgtcgcggtggcccaaggaggaagtggaggcgctgatccagatgcggaacgagaagggcgagaagtaccacgacgcgggggccaaggggcccctttgggaggacatcgccgccgcgatgcgggggatagggtacagccggagcgccaagcggtgcaaggaaaagtgggagaacatcaacaagtactacaagaaggtgaaggagagcaacaagaggcgccccgaggactccaagacctgtccttacttccaccagctcgacgccatgtaccgcaacaaacaccgcagcggcacaggcggcagaacggcacccagaacgaacatggcc

SEQ ID NO: 49224 - DNA, 1312 bp, Zea mays
  Clone ID: MRT4577_144898C.1
ttccatttccttccctgctctgatggccgtcgcccattgggtacctcggcggagggccggccgggatccccttcctattctgctttcccctcgctccagagtccagtccccagacgagcggttggagcttcgacgtgcggtttccatttcctgccctgctctgatggccgtcgccgaagtggcgatcgagattctcccgcagcagcagcagcagcagccgccgccgccgccgcgggaaccggcggtagtgcctccgaacctctccgtgccgagagtgctccagtatctgtacctcttgagcgcgtgggtcgcctgcgcgggcgtggctgccgggaccgtggcgcgccgggccttgggcgactcttccccgttggtctacgggttcctcaaagtctcgatcggagccctcgttttccccgcgctgctcatcctcgtcttcgccctgcgggtcttgcgcgccatgcttgcggtggggttcagacggtcactccgcactcacgccagggagattcagatccaagccacgaagatatttagagcgttaacgtggaaggtgctgcaggaccctatcgtgctcgcgtggctcgcatctttgcttttcatcctgcttcttgcagcaagtgttctggtgtttgtgggacttctaccaatggaggagtctcgcagagaaaggattggttatgcgctctctgatgtgggggtattgggtgcaatggcaatgtattgccttatcattatacccagttttgcgctgaagatctggaggagcaagtagggtggcgatgctgcacaaggcacaacactggcgatatctgaggcaaggacagttggagaaggtgcaaaagatggactcctagttaccgtgggtgaagccagctaattaatgttttagagaaataattctctcttggagactactactactgttctacctcagcatcaccggtgctggtgcgtgtgtaacgtggtcactgtgggtatcatcactaccctaccctaagccctatcagaacataagcaccccttggagatttgtgccgtctaaatgaatatagttggttcagcgtcgtgactggatatgtggttgtaatgattattacgtatacagctagttgtggacttaaaaaaaaaaaaaaaaagcggcagcttgcgggcatgtggccatgtgggcgactaggcgagttcttggttagtactactcagctgtggattgttgttcgaatcttcatttagctgatgaaggctaccagacggagatgggtgactaacctagacctaggtgagtgaccctcaaagagcgttcttgagactg

SEQ ID NO: 49225 - DNA, 113 bp, Zea mays
  Clone ID: MRT4577_144899C.1
ccggacgatgatctccgcggactgcccgaacgtgatgctcggtctcacgcacgttacgcatcagttgtggtagtcgtcgaagcatttgtttagtccggtggaccaggcggtga

SEQ ID NO: 49226 - DNA, 367 bp, Zea mays
  Clone ID: MRT4577_14489C.1
ccggccggggctgagcaagtagcgattgcttgtaacccgagcgggggcaataaggtagtgtggatgtcaattttggtgcatgtgcctgggtctagtgctacaaactgtggaccacccataccaagttatgtagtgggtttcgggtgcctttgcgaaagcctttgcatcccaacacctaaagtggcggacattacgtgaggctggcttcacagagcagtgagtactacccaccaccagcggtggaaggaacatgtgtcctctctagtagaccactatctttttaaaaaaaaaaaaaaaaaaaaaaaaaaaaaaaaaaaaaaaaaaaaaaaaaaaaaaaaccaaaaaaaaaaaaaaaaagggggcggcc

SEQ ID NO: 49227 - DNA, 485 bp, Zea mays
  unsure (1)..(485): unsure at all n locations
  Clone ID: MRT4577_1448C.1
cggggncaacatccacanataaacgacaaagcacagtcaggggaacaaatccttcacagcgattgttggagcgaaggcgaagacgccacccttcgctcgatgccttcaccacaatcgttggaccaacggagacaagacaacagacaggttcacccttcgtcccatacgtcatcggacgaagacctgtgacgaggtcatcccatcttgcgacctcgtccagcatggaggcccacgtgtgatccggcccattgtaacaggccctgtgtggccggtgcgcgttacgggcctaatttgtaaaggcatccctgtaattacggtccataaccccgctttatgggaatattctggggataacctaagtgtttgagggcacatgcgttcttaacacgggacgctggggactcagatacctataaatacccccgacagggcccttgagagggttgaataacagagctattggcattttcggcgagaaccctgtt

SEQ ID NO: 49228 - DNA, 277 bp, Zea mays
  Clone ID: MRT4577_144900C.1
cggatctcgaccttgctcacctgttagaaagccactcgcctagctccacttgtcccagctgctaggaccggcgacctgctaggtactccctcgagccgatggtgagggccctgctctaccccttttcccgttagatctaaattttcatggaggtgagcgcggacgaggtcaggtatgtcgcctccttctcttcctccaccggcttctacacgctctaggcccgcgctggtgttgtcggccattccttgtgctcgacctcgcgtctacgttggactcc

SEQ ID NO: 49229 - DNA, 1032 bp, Zea mays
  Clone ID: MRT4577_144901C.1
gtgtgattgatcccttctggcccttttgcatgtttgagcttcgaggaaaatgcaatgacgaagagtgccagtggcagcattttgagcatcatgattggagaaagctagagcttacaaaacactctatgatctctgtttcaggccagatcccttatggtttgtctcagtatattcttccagtgccagtgtatcgtgttggttcaaatcttattaaagctgatctgaacttgacacagtcagtgttggctagcagtttatggcaatattggcaaagggggttttgtgcttcctttcctttacctttatctgttcaaagagttcttccatcagatgcaccattctttcaggctggtgatggccggattgctgattttgataggaacagacaactactaaaatttcgaatgctggatagcaggaaggtgggtagagcacactgtattgcagttatcatcacatcacagaagtggcatacatattggagtctggttctttacactaaacttattcttgaagttttttgctctttctattcttgcataatggcatattgattatgttatattggtacttgttaacactgcactcttttcttgtggttccaatgaaaaaatgctctgattttgacaatttcctcctgcactggaccaagaatttacagacatttaaagtatacatttcatagtagttgtaagttggaacatgatgatatgacatttttggtttgaatgaatatatttacttcattgatatctgatctgcttgcattttgattattgctgtgtaactttatatcgtgtagtaagattgtacagggttctgttgatattgaattcttcttggaggcagcccttgatttatattgtggaaaagtaaacaagcctgacagaatcaaggctctttcatttctggcgcggtccattgaggctgatccaagtacagttatcctgtgggtgttttatcttcatatttactatcaaaaggatgaaggacttggaaaaatgacatgtttcctgatgccggtacccgttg

SEQ ID NO: 49230 - DNA, 253 bp, Zea mays
  Clone ID: MRT4577_144902C.1
ggcaagtacatgcagaccatcctggagaaagcctaccagaccatcgccaccgggacctggctgcgtgcagccggtggctgcagggtacaaatccctgctaggtaacccgcagcgatgctggacgtctgctcgctcaaggacatgggcccgtccatgggcttcccttcgctgcaagacctgcacatgtacggcggcggcggcggccactgcctggacctgcagcatcagatggagcggccgatggaggccttct

SEQ ID NO: 49231 - DNA, 437 bp, Zea mays
  Clone ID: MRT4577_144903C.1
ggggggggtggtgtttttttttttttttttttttttttttttttttttttttttttttttttttttttttggggggcctttattagcttaatgaaaatttgaacaaaaatccacaggtgggttgttttaaaaaaaaacccgccttatgggcggggggggggcatgcccaaaaggtggccttggtaccctcttaccaaaagaacacaacttggtgttttcgtaataaaaataaccacagatccagtaacgaacctgtaaccaacttttttaatttataggggacaaattttcaaggggggcttatttttttaaagggcttaagggagggttgtaaagatacccagagtgaccaagtttcaaaagcatccgatccggggatgttgaggtaaaacaaaatatgaaagatttaaaaaaaaaattatttatataaaaaatta

SEQ ID NO: 49232 - DNA, 454 bp, Zea mays
  Clone ID: MRT4577_144904C.1
ggaataaaaaaaacaaacggggggggacgggaaaataaaaaatccattttaggggtgtgattgggttacaggtggggttaaggggggtttaaaagggaaaaaccaaatgtggggggggcaaattagtttaaaggggggtaaaaccaaaacatgtggttggggcaaattagtttacagggggataaaacaaaaaaaaggttaagggggggtggtaaaaagggagggtgttatttttggtggaaacagtaaattataaaaagaaaatttatttcaccttttcaaaaaaatccttgatttttaagggggttaaaactttgaatttaaagggaggtggaataattccgatttaaatggtgggggaggaaatttgcccctaaaatccttttttaaaaggaaaaattggagggggggtgggataataaaggtccaaatcctcgggggattttttttaaaa

SEQ ID NO: 49233 - DNA, 238 bp, Zea mays
  Clone ID: MRT4577_144905C.1
gacagatcagagccacagctatcaccatcaccttgcacccaacgcccacggggactgacatatctaccatagttgccggcggcgacatcaccaccatagcacttgtccacagctgcatttacagcaccaacaatactctactcatgagcaatgccatctacagatacgttctgaacacatgagtgctaccgcacgaacatgatagcatgcatcatctgcggctggttaccgacatgca

SEQ ID NO: 49234 - DNA, 253 bp, Zea mays
  Clone ID: MRT4577_144906C.1
catttgatcgttctggtcgccgcaaacagatgaaatatcatcattgcaagagagccatcttgatcactgtttgcacatacttttaagaaaatgagcatgattacagcataacacatggcaggaccttctcaggaattgccgatcacacagaggacgcaccatcaattccacctactgcacccgaagtcgttaactttaaggatatggacattgatcgacagtacaaacacgccactttttgagatggatgggg

SEQ ID NO: 49235 - DNA, 403 bp, Zea mays
  Clone ID: MRT4577_144907C.1
agactttccgtagatggcatagacagctactgcaactattcccgttcgagaagacattactaagtccttgaaaatgtcaaaagatacagcgatagtgctaacctctttttttcggccaaatctccggttcagcgtaatgcacagcaaaacttctgcctcatcatatggaaaggacttccaagaactgataggggcatataaggcttcatgggaaggacagcaaattcttcatggaattgacactgactccgaaagcagttcatatgaatctctgaatgatagtgcatctgacgatgaagatgcatatgttatttctgcagaccacggggataagaatgtaggaaaaacaaaaactagcatgactttggtagaagaaaacattgaaaatgagttggatttgtat

SEQ ID NO: 49236 - DNA, 863 bp, Zea mays
  unsure (1)..(863): unsure at all n locations
  Clone ID: MRT4577_144908C.1
cgccgcgccaggcccgggaaaaaaaaaaaaaatgtaagcgcgtaggaggggggcctgctttcgccgctctcgccgctttgggttggggtttaagcgcgtgtaagggaggccggaggcgacgacgacggcgccggcgtcggagaagaagaagcagacaactctcgtatatgtcttcttgccccttttccgatctggtggtcgtagcgctcatcatcgccgtcgtcgccgtcatcctccgcgccctcgcttgctctggccgatctatgcgcaaggggctcaacggctggaacaaatcctcgtcgatgctcagggacgggttcggggtgaagtattccggattcctccacataaggccgtgcggcttctgtagaggagattgacggattcggccgatttgcgctcgtctccgtcatttttttttgcacccagagtttcttgtttttctttagaagttttccccccatagttttggcaattttggcgacaagttttggagttctccccgtcggaagagatagaagagagatgtctccgttgaaccagcaacaggttctcctcaagaaggccctggcgaagaagcccaacgctaagaagatgtctgagtttggccttaaaccctctgctgccctcttgaagtcccggacgcagcagctgccggcgccggtccagccgaggcgccgcgtccgcgtcctatttgaggaccccgacgccacggactcggactccgactcggacgacgaggaggccggcggcaccccatcaaggaccaagcgcttctcttttgaggccttcatcggcaaggccccagccaagccggttctcccggcgggcggncgctgttgncgcgttgcaacaanggcggg

SEQ ID NO: 49237 - DNA, 444 bp, Zea mays
  Clone ID: MRT4577_144909C.1
aacttaaaactcggacttttttatagagaaagaggagaaatcctattatatggggtacaaggatgaaatgaaacttccaaccaaaacttactttagttatcttgtctagatacatgccaaacttggagtaattttgactgtacttaagatacgtgaactgaataccttttcttttaagatctgcgcacttacaacgatttcctttttgacaaaaaaaaagcagtcaaactgctgaaaaatcatttgccctgacctttgctccctaggaggctacggaaatgatgtgtcctacatcttacagaaggcaatcccactctgcagatgcctgcaaagttggagcctccaaacaaatcactacagatagtgtacatagtgtgtcgagtaaaaaaaaaagaatcacaattcacaagtgcgagcatgtcttgcccaatcgatgtggcagcg

SEQ ID NO: 49238 - DNA, 376 bp, Zea mays
  unsure (1)..(376): unsure at all n locations
  Clone ID: MRT4577_144910C.1
gagaatataaagaccttcctttcatccatcccacagtcagtcgttgacacaaagagaaaatccacagccggcgggcagaggcttaattggcccctctgacttcctagccttattcaacatgccaccgagctttgcaacatttactagcatgggccagcttgcgctgccaaccatgcaagactaactagcctcgggttcaaccctaccggggcttcntattaacctccacctcggactgcttcttgtgatgccgtgcacgcccccccgccaaaagcgcttctttccctactacccccgataatgcttagacctgaccggcgcgggggccggggcccacgccgtcctgctttaacctttttcgagggaaggaggaaag

SEQ ID NO: 49239 - DNA, 150 bp, Zea mays
  Clone ID: MRT4577_144911C.1
atctatttctatgttttcacgagcgcacggcacaacagacatggtggggtttctgtacaaatacgggtgcgtccaaacaaggagaggggagaacacaatccatgctcacgcgaccatggcctacaaaaaatgaatgggttgatgatgaag

SEQ ID NO: 49240 - DNA, 879 bp, Zea mays
  Clone ID: MRT4577_144912C.1
cctcgaggccggccgggaaagacttgactcaaccccaataccaaaccgctgcacactcgcaaacatgccaggaacacggggcccagtcccagtgccgctcgaaacaaaaggccaaaacctcacccaggacatcctcgaccttctcgacacaaaggagcccctccgcacagatgaagacttccccgcaatctcccaggccgaaatcaaggccgcactcgacaggctagccagcagatccatggtcgaatacaagtcactagactcggaaaaggtcgtcctcactcccgaatccgagggcatagtcgcagagggaagccgcgagttcaaggtttggaagttggtcaaagagaggggcagcgtcccaatcgctgaactaccgaccatctttggaaaagaagtcgctagcgttggacagggcaatggcttcaagaacaagtggatcaagaaagacggagacaacctagtcctcatacagaccgaagagcccgcagacaccacccgccaattactgcagggtatcaaagacacacagtcgctcgacgactcgaagctccttgcccagctgaagaagaagaagctcgtgactgttaccaaggtcatcacatacacaatcacaaagggtccaaagtatgcaaaggaaattcccgtagagcacaccgacctgacggccgagctgctcacaaacgacgcatggaagactgcaaacttcaagccatacaactttgctgcactcggagccaaccaagatgccggcgcattacatcctctgaacaagttcagacaggagttccgcaacattttcttctcacaaggcttcgtcgagatgccaaccggacacttcgtcgacacaggctttctggaaccttgacgcccttttcg

SEQ ID NO: 49241 - DNA, 797 bp, Zea mays
  Clone ID: MRT4577_144913C.1
gcgattgggaccctcgaggccggccgggagggcgctaatttcagccgtgttctcctctctctcgttcgagagatttatactacgtgtataaaaagcatcgtccaacagaggtacctttgctgcgcctctcgatctctagctatagcccgtagctagctagccctcccggcgaatcggccgatcagccggtcgggaacgatgaagaaagatgatgacctcgagtcggcgctgctggccgccaaagagccggcgccggcgcccgccaagggctacgcgtacgcgctcacctgcgcgctcctggcttccctcacctccatcatctacggctacaaccgcggggtgatgagcggggcgcagaagttcgtgcaggccgacctcggcgtcacggacgcgcagctggaggtgctcatcggcgccaccagcgtctactccctcgtcggctcgctggcggcgggctgggcgtgcgaccgcgcgggccggcgccgcaccatcgcgctgtcggcggccttgttcctcgccggctcagccgtcaccgccgccgccgacggctacgccgcgctcatggcgggccagttcgtcgccggcgtggcctgcggattcggcctcgtcgtcgctcccgtctacatcgcggagatctcgccggccaacgctcggggcttcctctcctccatccccgagatcgccggcaactcgggcatcctgctgagctacatcgccgacttcgcgctcgccggcctcccgacgccactcaactggcgcctgatgatcggcatcggcgccgtccctcctctattcct

SEQ ID NO: 49242 - DNA, 535 bp, Zea mays
  Clone ID: MRT4577_144914C.1
gggtttgtgcggggcgggcacgagcacacagacacatcccaatcctagtcctacttgttcctcttctcatggctaaaagagaagctgaaccatggccatgagaaagagaaatgctaatgctcctcctactactaggatggacatgctcgacactgactttgcctgtccatgctgattccacagccacagtggtgagggccaaagcgacatgaacaatatgaatgtggaagcatattgatgaagctgaaagggaaactaaaactcaactgcaaatgcactcgctgtgcctattgctatatatagagaatgggtaggggagggtgagcgtgagcgcactgacaatggcgacgatgatgatgaagcttgacctatgccaagaaactgaaacctacacctacaatggaatgggctggtgttgtcgtatgccatagccattagccagacatggccttgaatagcgatatggttgaccgagatgcctgtgcgcaccttatctataactaacactaatacaactagttagggctattcctat

SEQ ID NO: 49243 - DNA, 628 bp, Zea mays
  Clone ID: MRT4577_144915C.1
ggcgtacaaggtatttaatgattccttggaccagtgattaacagtagtatcatcatatcatatataggagtttacataataacagctagctagaagcagcagcagatgcatgcagggggtagctaataacaaaagggagggataaaagctagtagtactgatttagtagcaagaaaaagaaagaaagaacgaacgaacaaattaaacagatggggcccagctcgggctcgtatcgtcctttggggttggcgcatccatggcgccatgcatgcaatgcagttagctactcatcctcggggccatggttttccacctgggggtcctgaccatggccggccctccccttgccaatgccgtcctcctttccgggaaaatcctaagggccgccggcctgtccaccttaattattagggttattattattgcccccgccgccggaggcctgttccttgtccatcccaaaccccggggggccgtagcgcacgtgggggtacttgaccaccgggtccagaagttccgagctcgcctgctttgcctggcccaagcgggagtagaggcggtccagctcgtcaaagtaggggcacgttttggggtgcgccggccgttttttgccgctctccttggcctt

SEQ ID NO: 49244 - DNA, 167 bp, Zea mays
  Clone ID: MRT4577_144916C.1
caataaataacaaccatcttcacaaacattctaccacctagctacttatatgccataactaaacttaactgacaaatcttatacgtcaactgaactatatgatgatctctgccatcctccccaacgttaccctgctattgctctaaacgttatacctctcctccatt

SEQ ID NO: 49245 - DNA, 242 bp, Zea mays
  Clone ID: MRT4577_144917C.1
cgcacgcgtacgagaactaactggcgcgcgactgatgaatcccaaaatctccatggcgacgcaccgcgggtggctctcactcctgctgcttgcgggcgtcagcctatgccagacggccctgctcgcacggcgcttacgcggcgggcgcggcccgatgctgggcgggtggaacacgatccctgacgtgagcgagtcgcacatacagaagctaggggggtgggctcagagacatgccaagcacc

SEQ ID NO: 49246 - DNA, 303 bp, Zea mays
  Clone ID: MRT4577_144918C.1
cctctttagttttcagaatcaccaattttcactacacggcatatgcgacatacgagtgcggctttgttaaatgactttagaggtctggacgtaaacaggatcctagtatatgatttcgtgaacaatgataatttatatcagtggcttcatgaaactattgaaccaaatgttttacatcgagatataaaatcaagcaacatattgattgatgatgaattcaatggcaaagtatcttactttggattgcctaaacttttgttatcagacaattgccacattacttcttaattcatgcactcaacc

SEQ ID NO: 49247 - DNA, 689 bp, Zea mays
  Clone ID: MRT4577_144919C.1
ggccggactcgcatctcgcgggatcggacccccagcgccgccgaccgccgtcctcactccctgccccccccacgccgccacacgaaccacctcagctccctgcgccactaccctcggcctgccgccgcacgcctcccgcgctgtcgttgtcagccctccgctccccgagacgccgcgtccgccccacttttccgttcgatttggtgggccgagatctctcgctcgtggagtcgtagtacagcgcttcccgcacggcgatgtcggcgacgccgctgcccccgccgggccccgatggcgcggtggcgctcctgcctccgccgggtacggacatgactgggatctgcttccgcgaccagctgtggctcgacacttacccgctcgatcgcaacctcgtcttcgactacttcgcgctctcccccttctacgacatcacctgcaacaacgagtccctccgatcgcgccaaatccaccccctcgacatgtctcatctgacgaagatgaccgggatggagtaccttctgagcgaagtgatggagccgcacctatttgtgatccggaagcagaagcgggagagccccgagaaatctagccccatgctcgcctactacatccttgacggctccatctaccaggcgccacagctctgcaacgtcttcgcctcacgcataagcagggctatgcatcatata

SEQ ID NO: 49248 - DNA, 3177 bp, Zea mays
  Clone ID: MRT4577_14491C.1
cattgggtacctcgaggccggcctccgatttttcgccaggtgggagtcgctcctcccgtctattgtgtcctccctaggcactgccgtcaacgcgggggacatcgccgccaccaattccctcctcaccgccgtggtgtcgctcttctcccgcttccgcaacgcattcgacaacaatgccctccgcctcgacctcaagtactgccttgacatctttgccgccccactcctcgaggtcttcctcttcgcctcccgccgccttcaggccaccgccatcacagccaacccgctcgagctccgccccatgtttgagtgcctccgcctctgctgcgagatcttctactcgcttaactccatcgacctgcctgaattcttcgaggataacatgcgccagtggatgacagagttccgaactttcgttaccacatcctactcaccgcctgttgaggcagatggtgcccctgatgctctccgtgctgctgtctgtgataacctgcagctttatatggagaagtacgaggaggagtttaggggatacctgaaggagtttgttgaggctgtgtgggggctcctcatggcgcagaccgcttcgccttcccgtgtgcagcttgccgttactgcgataaggttcttgactacagttgctgagagtgtgcaccatgctttatttgggagtcctgaggcgatgaagcagatatgtgatagtgtcgttgtgcctaacttgcgcctgcgggatgaggatgaggagttgtttgagggcaattgggtggaatatgtcaggcgcgactctgagggtagcgatgcagatacactcagacgggcagcgtgccggttgctgcggggccttgcagcgaactaccaagagcaggtggctgcactcgtctcagcacaggtccagcagatgttggttgcatatgctgctaatcggtcaaacaactggaaggagaaggatgctgcaatataccttgttattgctcttatgcagaagcctggtgccacaggtggtggcacacctgtggttgacatggagagcttctttacatctgtgattgtgcctgagctccaagcccctgattggcagtctgagccaatgttgaaggcaactgtgctcaggttcttgaaggagttcaaggatcagatccccaaagctactgcactggcactcctacaaagtgtgatgcggtttttgacgcatgagtccaatgttgttcattcatatgctgcaacttttatcgagaacctgctgataatcaaggatgctgtcccggtaccaggggtgaccacagtgatcaggtctccacgttttgttgctgctgatatcaatccatttgccccacagatcattcagaacctgtccacagcactaggtttccctgattcacaagagaacccctacctgatgaagtgcctgatgcgggtgcttgggattgctaatattgctggtcaaattgttcatgagatcacagctcaacttgtgggtattctcatggaagtgtgtaataatcccaagaaccctgacttcaaccattacttgtttgaggctctggcagcagttattggccggactggtgagcaggacccaacactactccctgcttttgagaccagcctctttccagtgctccagaggatattggttgaggacatctcagagttctggccatatgcttttcagatatttgctcaacttgtcaatttgagccgaccacctctctcacagaattacatgcagctatttggtgttctcctcagtaatgcaacctgggaccggccaccatgtgttcctgccttggttcgcttgctgcgagcattccttaggaaaattctaaatgagctaaaccaagagggcaggcttccaaatatcttggcaatatcccgtagtctcctctcacgcagcagcactgaagattctgctttctacatgctgaacacaatagtggaaaacgttggttttgacatactgaacccatatataagtgagatatggagtgctttgtttactcggttacagactagacaggcagtgaaatatgtgaactctcttgtggttttcatgtcgctagtgctggtcaaatatggatcaagtgttcttgtcagttccgttgattcaattcagccaaatcttttcacccaaatccttcagcgattttggattcccaacctcaaattgatcaaaggtgctcttgaagttaagttgacagcagttgcttcgacaaagctgctttgtgagtctgcggtgctgttggatgctgctgcagctcagttatggggtaaattacttgatagtattgtcacactgttgtccagaacgaatcaagatggaacacaagagcaaaatgatggtactgatgcagtggatattcagaagacatcaagttattctgtctcatttgtacggcttcaatatgctggaaagagtgaagatgaccttttgaaagaagtaaatgatccaaaacagtttgtggtcacatccttggccacactttctgcccagtttcctgggaggtttggtcctgtcattgagcagcatgtggacctagcaaacaaaagtgtgcttcttcaactttgtgcagcctacaatgccaacattgtctaggtaacaacttcaatgatattattttataagtttaaaccatggatcaaactatgcattgagaatggatgtttcatccaagtttaatttcattttatatggcatggtagtcttggaaacaatgccatgaaactctccactaggaatggtcttggactcttggtggtctcaacgttcaagtacggagtaggatttagctacatggctgtcccattagtagccattcttgctacagacacaattaatgactaaatttcttttttcaagatgttttaggcgatgttataactcctaaatatcatgtgattaacacgtctgtaggctatttaaccgagggagctatttatcttcactggaaggtgcagccccgtccccgtatatgaacaaggacattccggtcacgttcaccgttttacatgcatgagtcttcgagccgttggatggaacgcacgaaatccccttgatctttctacaaggaataaaataaatttgtttctagcaaacaacgccacaaggatgagtttctcacacactactggccatggtgttggtttaggtgaagttaggatgatgatgatgtcctgtac

SEQ ID NO: 49249 - DNA, 1008 bp, Zea mays
  Clone ID: MRT4577_144920C.1
cacttttccgttcgatttggtgggccgaggtctctcgctcgtggagtcgtagtacagcgcttcccgcacggcgatgtcggcgacgccgctgcccccgccgggccccgatggcgcggtggcgctcctgcctccgccgggtacggacatgactgggatctgcttccgcgaccagctgtggctcgacacttacccgctcgatcgcaacctcgtcttcgactacttcgcgctctcccccttctacgacatcacctgcaacaacgagtccctccgatcgcgtcaaatccaccccctcgacatgtctcatctgacgtacaacacttagcttggctccccatctcccaccaattcgtctggatttttttggtttggtattggtattcgattggtgttgtggtcgcaggaagatgaccgggatggagtaccttctgagcgaagtgatggagccgcacctatttgtgatccggaagcagaagcgggagagccccgagaaatctagccccatgctcgcctactacatccttgacggctccatctaccaggcgccacagctctgcaacgtcttcgcctcacgcataagcagggctatgcatcatatatcaaaagcctttaccatagcatgttcaaagttggagaagattggaaacgtggaaaccgagcccgatgcagtagcctctgaatcaaagacccaaaaggaagcaatcgacctgaaggaactcaaacgaattgatcatatcctgtcatccttgaaacggaagataggggctgctcctcccccacccccttaccccgagggctatgtcccaccatcagcagaacaagagaaagcgccggatgatgtggcagcatcagaggcaccgcctcaacttgaccctatcattgatcaaggtccttcgaaaagaccaagatttcaatgaaagatttgtagcttaaacctgctgactcgacaacttcctgtatgctttaaagtcgccgacgtggactttataaatccattcttgctggttggtt

SEQ ID NO: 49250 - DNA, 1562 bp, Zea mays
  unsure (1)..(1562): unsure at all n locations
  Clone ID: MRT4577_144921C.1
agaaaaacctcgaggccggccgggatcaaaaaaaagcatctcgcgggatcggacccccagcgccgccgaccgccgtcctcactccctgccccccgagactgccccccacgccgccacacgaaccacctcagctccctgcgccactaccctcggcctgccgccgcacgcctcccgcgctgtcgttgtcagccctccgctccccgagacgccgcacgcctcccgcgctgtcgttgtcagccctccgctccccgcgacgccgcccttggctttctgcccaccgacgtatcgacagcgccgcgtccgccccacttttccgttcgatttggtgggccgaggtctctcgctcgtggagtcgtagtacagcgcttcccgcacggcgatgtcggcgacgccgctgcccccgccgggccccgatggcgcggtggcgctcctgcctccgccgggtacggacatgactgggatctgcttccgcgaccagctgtggctcgacacttacccgctcgatcgcaacctcgtcttcgactacttcgcgctctcccccttctacgacatcacctgcaacaacgagtccctccgatcgcgccaaatccaccccctcgacatgtctcatctgacgaagatgaccgggatggagtaccttctgagcgaagtgatggagccgcacctatttgtgatccggaagcagaagcgggagagccccgagaaatctagccccatgctcgcctactacatccttgacggctccatctaccaggcgccacagctctgcaacgtcttcgcctcacgcataagcagggctatgcatcatatatcaaaagcctttaccatagcatgttcaaagttggagaagattggaaacgtggaaaccgagcccgatgcagtagcctctgaatcaaagacccaaaaggaagcaatcgacctgaaggaactcaaacgaattgatcatatcctgtcatccttgaaacggaagataggggctgctcctcccccacccccttatcccgagggctatgtcccaccatcagcagaacaagagaaagcgccggatgatgtggcagcatcagaggcaccgcctcaacttgaccctatcattgatcaaggtccttcgaaaagaccaagattccaatgaaagatttgtagcttaaacctgctgactcgacaacttcctgtatgctttaaagtcgccgacgtggactttataaatccattcttgctggttggttatttacaggccaaagacagaactaacctcgtggcatgatatctcgttctctgagttactagcttgaatcttgtagattggccagtgccatttgctccgggcttgtaatcttgtagataggccagtgtcatttgatctggtctatctacttagctatcataacttatgaggtggttatagttttgccttggtgcaaatctgcaagactggacatctcatacattatttactatgcatacttacgtgtnagttgtcaagtcatatgacctgatacagacggtgacggtcaccaattggaactgccattttctgttggtgtggatgaagtttgacactatga

SEQ ID NO: 49251 - DNA, 441 bp, Zea mays
  Clone ID: MRT4577_144922C.1
ccgggagtcataacgcttacctgctaggaaataattgcttcccctagcccgcgacgcaggaccgcatccgccataggcgcctgcgcagagcaactatgctactggctcgtaccagtatcggtgatgctgtatgtagcacggagtctagtacgttctcctgcgggtgtctggtgagaatctgtgagagcgccccggaaacggctgatgcgcttttccattattggctacacacctagcgccgactctgcagatcacggctctccagcaacccctgccgttggaccaggtcctacgtgccggacagcatgatcgaagaagctccctagcatctgcacttgaagacagccgcccctcctatggcgtgaaagagtgacacaatactgctgattctacactgcgaactcaacccaccctgaaacccctagaggtcttccactacta

SEQ ID NO: 49252 - DNA, 297 bp, Zea mays
  Clone ID: MRT4577_144923C.1
tttcctagcacccgcccgggcccccatggggggaggagtgggcgaacgcgcgggctggctctgcaccggattctcgcgcaacggcctgtacgccgcacgcaacgcgtactacgccttcaacatgaacttgcaggcgcacaaccagatggaggggagcgacgagttccaggggctagctccggccagcgctgacaacccgggcacgagcccctggagctggagccacagatcaggccgaggccgaggcagagacagaggagcacgacagggtacagcccatggccaacatgggtctgc

SEQ ID NO: 49253 - DNA, 589 bp, Zea mays
  Clone ID: MRT4577_144924C.1
aaaaaaaaccggcaaacccttggggaaagggaaaaacaaggtcaaaaggccctttttggaaaccaccccaaaaagccgggggggtttttttaaaaaaagggcccacgcccccccagggggcccccgaacaaacccccgggggggggtttttaaaaaaaggtaaaccccccccccaacccaaggcccaaaaaaaacccccggttcctggccaaaaaacctttgggggggggccaaaaaacccgggggggaaaaaacccatagggggacccaagggaccgggcccatatttttgggaaggaggggccccccctaagaatccgtggggggctaaaaaaggggggggggatggtccaccacttttggaaacccccccagaccctgggggccccggagggcccccacagggggggggccttcagggtttttcccaaaaaaaccttcccgggaacccccccgggggaaccccccggggggccccccccaggggaaccccccgggcggccccccccggggaaaccccccccgggccctcctttagggaaacccccccccggccccccccccagaaagcccttggggaaagcccccc

SEQ ID NO: 49254 - DNA, 663 bp, Zea mays
  Clone ID: MRT4577_144925C.1
ataaattgttctcttcaacagatttttcctttctttttttaccattacatcatcactttcctttgtcaaacttctggtagatataatgtgtccatgatgttttttttcttttgaaaactaatgccatgtttttcccctacatttctgaattttcaagtgtcaagtgtgcacagataaaatgtcatgtttccccctacatttctggtttttcaagtaccaagtgtgcatagataaaaacatcagcttgatggttcatttaccaagattgcttattagttgtaattcgtaaacaatccaaaacaccaaaccaaaaccaacaccaaaagctaactaaaccgttacaagcaagagcgaactaaaccaagatagaagtttgctattggattacaaatgtttctggaagctctgctgagccgtttattcaataatcttcagatacattccatctgcaagggaatgcccattatatttacaacttcctgatggtgggctttcaaaaaccaatgcatttatatcccctatgtggggaggtgttcttatctggaactcaccggactgttcacttggttccaagaaaactcatggtacccagaagaaaatgtcatctcaggaacttatggaggcactcgaaatattgttggacaactaaggcagctgtttggt

SEQ ID NO: 49255 - DNA, 632 bp, Zea mays
  Clone ID: MRT4577_144926C.1
tcgggtcgccccacgcgtccgcgctcggtccccagctttgaccgcctcccctcccctccgctcctgttcctcctaccccacccccccgcaggagcggcgcggcggccggcggcggcataagccaaaggcacgatgttcgggcgcgcgccgaagaagagcgaccacaccaagtacctactgagatcctgggggtgcccaagtcggcgtcccaggacgacctcaaaaaggcctaccgtaaggaagctatcaagaaccccccgacaaggccggcgaccccgacaagttcaaggacctcgcacaagcctatgaggtttgtgagtagctccagtacaaacgtgagatttatgatcactgctggtcgaagatgcccttaaggaaggaatgggtggaggcgggacccatgctgatccatttgacattttttcatcattgtttggaccctcttttggaggaggtggtgccagcagcaggggaagcaagctaaagaggggagtagatgtctcccactcacttaaagtttctctggaagatctctacaccggaatctgaaacaagctctttctttcgcgcagtgccatctggtccaagggtaagggtaaggggccaaaatctggtgcttcaatgacgtgccc

SEQ ID NO: 49256 - DNA, 487 bp, Zea mays
  Clone ID: MRT4577_144927C.1
aaaaaaaaataaacccccgcggcttgggaatttcgaagggtaaacggggcaacagggtccaagacaacttcgtttcctccccctgggaaggaacaggggggtctaaaaaacaggcccagtttttgggggggcatagcaggcctttttgaacccagttttggggcacgggccccttttaaggggattaaaaaaggccggccccaaacataaaacaacccaggggtttttttcccctcgcacccataaatagcccttgggggggccgcccagtccagttaacgcgatccatttttccaaccccgggggggacaaaacaaacccccacttgggggattcaggggcgagcttgctcactgatgtaaacaggggggccagcgagctgttaaaactgtcaaccactttcctttgttccgggcttgggctgagcttggaaaaactgcattgatgttttgcacccactgggcgtttgagcttggccccaacaccc

SEQ ID NO: 49257 - DNA, 737 bp, Zea mays
  unsure (1)..(737): unsure at all n locations
  Clone ID: MRT4577_144928C.1
cgtgcgtatcgtgcgcttgagagctggcggngnaagccgaggagagaggaagcgatcgggaggaggaaggggtgtagggaaagggaaaggaccgggagaacgtgagaaggaaaaggagaggagggaacgggaggagaaggagaaggagaaggaaagggaggaggaagagcgggagagggaacgggaggaaaaggagaggaaggaaagggaacgggaggaagaagagaggagggaagaggaagaagagcgggccaggaaggagcgggagaaacagcggaggagagagaaagaggaggaggagcgtgcacggagacgcgaggaggagaggcagcgggaggaggaagaaagagagagggaagaggaagaagaacggcggagggaggaggaagaaggtggaggcggacgtggtgacgagccagagagggaggacgagggcggtgacaagccgccataccggttgtccaagaaactgaagaaacgctaccatgcacgtgccggtatgttcagcaggagtggctgagcgagcagccgagcagagctggcctctgctccgtacaaataaacaggtggcctcgtacagatggccaattgccacatcaccaccactcgtacagagtaccacctgccagtcggctatgtatgcgttcgttgtgtcgtttgttaagctttgctgcatgctgagtttagattccgcttgtataaaacgtaccctaaataagcagacaagtttcaggctc

SEQ ID NO: 49258 - DNA, 1182 bp, Zea mays
  Clone ID: MRT4577_144929C.1
attcggctcgagtgccgcggttccacccgatggcgcagatgtcgttcaacgacgactcgttcgtgttcgtcgggttcagcacccacatggggcaaaaccacccgcagttcctggccgggaagggctccgtgctgcaggccattgggaagaaggtgctggcgctggcgctggggcagcgggacccgaccgccgtggacaagctgctgtccgcgcagcgcgagtcgacgatactgccgtgcgtatcgtgcgctgaggagctggcggagaaggccgaggaggagaggaagcgacgggaggaggaagggggagggaaagggaaaggaccgggagaacgtgagaaggaaaaggagaggagggaacgggaggagaaggaaaaggaggaagagcgggagagggaacgggaggaaaaggagaggaaggaaagggaacgggaggaaaaggagaggaaggaaagggaacgggaggaagaagagaggagggaagaggaagaagagcgggccaggaaggagcaagagaagcagcggaggagagagaaagaggaggaggagcgtgcacggagacgcgaggaggaagaaagagagagggaggaggaagaagaacggcggagggaggaggaagaaggtggaggcggacgtggtgacgagccagagagggaggaagaaggcggtgacaagccgccataccggttgtccaagaaactgaagaaacgctaccatgcacgtgccggtgtgttcagcaggagtggctgagtgagcagccgagcagagctggcctctgctccgtacaaataaacaggtggcctcgtacagatggccaattgccacatcaccaccactcgtacagagtaccacctgccagtcggctatgtatgtgtgttcgttgtgtcgtttgttaagctttgctgcatgctgagtttagattccgcttgtataaaacgtaccctaaataagcagacaagttttcaggctcaaaaaaaaaaaaaaaaaaaaaaaaaaaaaaaaaaaaaaaaaaaaaaaaaaaaaaaaaaaaaaaaaaaaaaaaaaaaaaaaaaaaaaaaaaaaaaaaaaaaaaaaaaagggggggggccgttttaaaaggatcaaagtttacttccccgtgcttgcaaaagtaatagtttttttttagggccaccaaaattaaattaatgggccggggtttaaa

SEQ ID NO: 49259 - DNA, 373 bp, Zea mays
  Clone ID: MRT4577_14492C.1
ggaaatataactgggaaatttaaaggggggccacatacaggggcccaaaaaacttccttattgaatgacaactaaaaagccatctaaaaaagggcccccccaagggcccccccttggaaaaaggctggtgggaatgccaaagcaatttggaaaaagggcagcaactggggcagttgcaaaagggttggggaaatagccacaaactgctgcaaaaacggaagcaatagggggtgcctcaaaaaggaagccgggcttgatgcagctctctggccaaatgggaggacaattggctggtggaaataagccgaggggttcacggcggggaattgggcaaaagaaagaaatagtggcagaaaaaagtgggccttaactt

SEQ ID NO: 49260 - DNA, 263 bp, Zea mays
  Clone ID: MRT4577_144930C.1
cctacgcgtacgccaacgcttccgctagcttaactgtgctgtccggaccaacaactcggggcccggttaactgatggccgcgcagagtgtcgtcaggtcgctcatctccatgctcgtcatttactgctgtttcgaccgcttctgcccgtacccgacctacaccgacattacgctgtgcttctatcacatagtgactccaactatgcatctgacacactaccactgtctacgctcaccaacagcgtgcatatgcacattgacct

SEQ ID NO: 49261 - DNA, 282 bp, Zea mays
  unsure (1)..(282): unsure at all n locations
  Clone ID: MRT4577_144931C.1
cggacgcgtgggtttcttatgagttatagttcaataataaatctaaaagaggtctcttgatatttataattttntgccgggcattgtaagttgcattttacctttcattccctatctcctgcaactattattatgtttattacatgtgctacctttggtgcctctattcatacataccttactgctacaacaacttcaactacttgtgctagctgacttcgctgactactctcagctacaacaatttttcctactcaatcaactgtattcatttgactatgc

SEQ ID NO: 49262 - DNA, 286 bp, Zea mays
  unsure (1)..(286): unsure at all n locations
  Clone ID: MRT4577_144932C.1
acccacgagaacgatttcacatatctccttccatcatcactttctaaactgctctantataaacattcggcgccgaattaaaaactttgaccaccgccaaaaaaaacaaaaaaaaaaacatctcgcccaccccttctacagaatccaaacttacctactcctccatacaacatcataactcttctatacttccacctaacaacaatttactgcccttctttatacaacctcctaactctcaaaaccctgacaaaacccaacttaatcatcttcaaacatatccccc

SEQ ID NO: 49263 - DNA, 304 bp, Zea mays
  Clone ID: MRT4577_144933C.1
agagaagagatacacttagaccagtagcaagccaagcagcgcccacgcccccacgagggccacgaccaccaccacccccgccgccgccgcggcaaactgctactgcccaaccgcgggatggaggtggacgccactgccttctgcccgccgccccagcccgcgcctgccgcctccccggcttcaaagccgcctgcgccggtgctgggtgccggtggagcggtcgcgccggtggcagggcacggccgcggcgcagggaggcagtaccgcggcgccccggatgcgcaagtggggtaagtgggtggcg

SEQ ID NO: 49264 - DNA, 241 bp, Zea mays
  Clone ID: MRT4577_144934C.1
acccactcttttttttcaaaacaattttatccactctttttttttgtttcataacaattacaatgtctcttgtttacaatgacagcatcactaaacccccacaatgttcccccacatgatacaacacaccgcattatgtacctttggcatggtgctacactaacacgactcttacgagacatgattaatcattaccgatcgaaagaatggaaattattcctccaacaacaacaaaattcca

SEQ ID NO: 49265 - DNA, 248 bp, Zea mays
  unsure (1)..(248): unsure at all n locations
  Clone ID: MRT4577_144935C.1
cctgcatcntatcgctcttattggactttttttcatcaaaggcgttaccatcaagctggtttccatttacgacgaacgtattctaattgacattcataacttctacaacatcctcattgatgaactcccttccaatgtagctaaccttctcttatcaattttaataaaaaacaaaaccaaaaatgttgtttgtgtaatttcttaaggcctttttttatcaaaatacccctctataaattgttataatt

SEQ ID NO: 49266 - DNA, 210 bp, Zea mays
  Clone ID: MRT4577_144936C.1
tcattaacagtctgtctcaacttgtaccaacgcacatcagcctgaaaagtactttcacatctaccattccgatagactcaaagccttcggacctatatctgtgtctctcaaccgtgccaaccataatcaacaggtcattgtattctcttgtatcaggcaaattttaatataatatatgactgtgttaaatattattatagactctccttc

SEQ ID NO: 49267 - DNA, 403 bp, Zea mays
  Clone ID: MRT4577_144937C.1
tggcatcaccaagcatcagaatttcttccaaagatgaatgctggtttgatctttggtccaccagcactcgatggtcatgtcttgcgcgcattaattctgcgataacaggaccgatggttgcttggattatttcagattatggaccatttgcagtatgattgctcgagagaaatctggagctcctgttcagatccactttgtgacagcaaggcatgcttcagcatgaagatccatgtatgatacctctgaaaggtttacttaggcctagactcagtttgtctctgattctgtacattcttgatagattatatatttgctcaagaatgttgttcagtgcagcattcaactgcaaattttattgctggatgaatcgctatccactagtacataccgatttccaggc

SEQ ID NO: 49268 - DNA, 599 bp, Zea mays
  Clone ID: MRT4577_144938C.1
cgtgcaggaaatgtacaaacagaataccacggtgtccggtttgacgcccaagactcagttcgcggaggcagctgcagattctgccgggtgccatcgtgacgcaatactcgcgctggcatccttcaacttgtctagccagagattgatatcagccagcagagacggtgctgtcaaagtgtggaaatagctgctccagcatgggtaagatgacaagtcctttggcgtgtacatatttgcctggttagtgcttacacagtacacatatgccactagttattgttgtacagaagattgatccacacaagagtcgaaattgacacgtaagctttcatcctgtgtgacctgacctgtgtatataaataccaatggcttacctaccttacagtagtatattcatggattagtaaaagatatcataatgaataggaggtaggaaggctgtctaactacaataacatagggctccaaccataatcctccacacaaaaatgatctttttttgtcggtgctgttattttggacaatgaaaggaaatcttgttagtgttcgggttgcaaattaaagaggcccgaaggctgaagtagcttagctacatggtt

SEQ ID NO: 49269 - DNA, 266 bp, Zea mays
  unsure (1)..(266): unsure at all n locations
  Clone ID: MRT4577_144939C.1
aagcagtggtaacaacgcagagtacgcgggtgtcacagaaatgactgtatttgttcgatgtgtgattccttccgcctttggtcgtcatgtggtctgtatgatatatgtggataactgtatctgtatgaacaggtatttgtgcaaatgctccttgcatttgttgccccctcaaaaaaaaaaaaaaaaaaaaaaaaaaaaaaaaaaaaaaacaaaaaaaaaaaaaaaaaaaaaaaaaaaaaaaannattctgcgttgttaccactgct

SEQ ID NO: 49270 - DNA, 112 bp, Zea mays
  Clone ID: MRT4577_14493C.1
ctttttccgaaacctagctcgcccgcccgacctccgaccatctagaaccttgcctccgaggtgacgccctcagcgccccgcctgcgccgattgatcatcgcttctctccccg

SEQ ID NO: 49271 - DNA, 370 bp, Zea mays
  unsure (1)..(370): unsure at all n locations
  Clone ID: MRT4577_144940C.1
aattcggcacgaggctccgtttcaatcccgggcggccgcgctttcgcggccgcctcagcaggtggtcgctatcccctccctatccggcgtgccgcgatggtcgccgcccctgctaccctcacgcgtcggcctgcgtacctcccctctggcccgccatagctgccgtccaaccccaaactccgcagcgggggcacagacctaagactgaagagccatcgcgcaggtggaaatcgctcgcacattccatagacgggcgctcaactctagatccccttccaccgagctggagctacaccttacacggtcgcggccgtgacgctccggcgccactcgacgcagtccagntcgcgattcttgactacgctgtcta

SEQ ID NO: 49272 - DNA, 1739 bp, Zea mays
  unsure (1)..(1739): unsure at all n locations
  Clone ID: MRT4577_144941C.1
gtaccctcgaggccggccgggccggcgaattggaccgggaacgctctcggatccatccacctccaaagtccaaaagcgaagcctacgcccgccccaacggtgaaaacgtcggaaccctagatccctctcacggtcgcgcctgtgctccaaaaccttagatccgacatgcatcagcccagagcccgctacccacccgggtatggctccagcgggggaggcggtggcgggggaggcggtagtggaggaggaagaggaggcagcggcggcggaggaaaccacaactactacggccggaacacacatccacagcatcaacaccactaccagcagcagcagcagcactcgcataggaactcctcgcaccagcagcagtggctgcggcgagaccagggccccgccgttgcggggccagtgtctggaaacgctgtgcctaagacggcgcctcagcttgacgctgttgactcgagttctcaagattggaaggctcaactaaatataccagctccagacacacgctacaggacagaggatgtcactgcaacaaaaggcaatgagtttgaggattatttcttgaaacgtgagttgcttatgggaatatatgagaagggatttgaaaggccatctcctattcaagaagaaagcattcctattgcgttgactggaagtgatattcttgcaagggcgaaaaatggcactggaaagactgctgccttttgcattccggcacttgaaaaaattgatcctgaaaataatgcaattcaagttgttatactagtaccaacaagggaactggctctgcaacttcacaagtgtgtaaagagcttgggaaatacctaaacattgaagttatggttagcactggaggaaccagcttgaaggatgacatcatgcgtttataccaacctttcatctactcactccgaacttgagttgcaagcacccanaaacgcagttttcatgattttcgtaatggtgcttgcagaaccttgtgtgcacaggtctgtttaccagaggaattgatattcaggctgttaatgtgggcattaattttgacttccctaagacactctgagacatatttacacagggttggccgttctgggagatatggacaccttggtttagcagtgaacttgatcacttatgaggaccgtttcaacttgtataggattgagcaagagcttggaacagaaattaagacaatacccccgcagatcgacctggccgtatactgccaatgatgaatgcgacattcaggagcatcaaacacttctctttctatttgagaaacttatcaggcaaatacgtttgtacatagcaacccatcagggctttgttttggcaccttgatgacgtttgtaagcttacctggattagtagaggaagtgcttcctgtaggcactgatactaacccgtttagctgaggacatgcacactgggctgcttggaggcccagaactatgatgagatgagacaatatcttacctcacttgacattttcactcgacttgtttgccagtctcagttctacttgacttgcctgttctcatttgattcatcttccgttttcttctttcctaatgttatgatgcatatggatgtctttctgtagctgtatgatgtgttgagtttattttttcttggtgtatgtatacagcttaacttgaaattatttccatatcaactaatttgcgagattgaatcggattagggtcgagccctttcttattcattttact

SEQ ID NO: 49273 - DNA, 2114 bp, Zea mays
  Clone ID: MRT4577_144942C.1
ttgggtccctcgaggccggccgggccgggagccttcccattggaaagcgaacgctcacagctcacagctcacgcacccatccacctccaaagtccaaaagcggaacccacgcctgccgcaacggcgaaaccgtcggaaccctagatctctctcgcccgcgctccgaaaccccagatccgccatgcaccagcctagagctcgctacccacccggctatggctccggcggtggaggcggagccggacgtggcggtggaggcggaaatggaggaggtggcggaaaccacaactactacggccgaaacccgcagcaacaccactaccaccagcagcagcagcagcagcagtcgcagcactctcataggaactcttcgtaccagcaacagtggctgcggcgagaccaggcccccgccgttgcgggggcagcgtccggaaacgctgtggccaagacggcgtctcagcttgacgccgtaggctcgagctcccaagactggaaggctcaactaaatataccagctccagatacacgctacaggacagaggatgtcactgcaacaaaaggcaatgagtttgaagattatttcttgaaacgtgaactgcttatgggaatctacgaaaagggatttgaaagaccatctcctattcaagaagaaagcattcctattgcgctgactggaagtgatattcttgcaagggcaaaaaatggcactggaaagactgctgccttttgcattccggcacttgaaaaaattgatcctgaaaaaaatgctattcaagttgttatactagtaccaacaagggaactggctctgcaaacttcgcaagtctgtaaagagctcgggaagtaccttaacattcaagttatggttagcactggaggaactagcttgaaggatgacatcatgcgtttataccaacctgttcatttacttgttgggactcctggccgaatacttgatcttaccaggaagggcatttgtgtgttgaaagactgttcaatgcttgtcatggatgaggcagacaagctattagctccagagttccagccttctgtggaggcacttattcatttccttccacctagtcggcagctgttgatgttttcagcaacctttcctgtaactgtcaaggaattcaaagataaatatctgcctagaccttatgtgattaatctaatggatgaactgaccctgaaaggaatcacacaatattatgcttttgtcgaagaaaggcaaaaagttcattgcctgaatacacttttctcaaagcttcaaattaatcaatccattatattctgcaactctgttaatagagttgagctactggctaagaaaataactgaactcggttattcatgcttctacattcatgctaagatgttgcaagaccacagaaaccgagtgtttcatgattttcgtaatggtgcttgcagaaaccttgtgtgcacagatctgtttaccagaggaattgatatccaggctgttaatgtggtcattaattttgacttccctaagacatctgagacatacttacacagggttggccgttctgggagatatggacaccttggtttggcagtgaacttgatcacttatgaagaccgtttcaacttatataggattgagcaagaacttggaacggaaattaagacaatacccccacagattgacctgtccatatactgccaatgatatgtgacagtttcaatgagcatcggacacattttatttattttgagaacatctgtacatagcaacccatcaagtgagttctccaactaaggcgcaactatttcagaagctacctaaatggctacattcctttgtcgtcacacatcaatttctcccccattctcgtcgggttttgttttaatgccttgatgtcgtttgtaagcttacttggattagtagaggaagtgtttcctgtaggctctgatctggtactaacctgtttagctgaggacatgcacattgggtgggctgcttggggcccaaaactatgatgagatgagacattatcttacctcgcttgacattttcaatttacctgtttgccaaaaccaataaagccccagttctactggagttgcctgtgttattatttgattagttttcc

SEQ ID NO: 49274 - DNA, 348 bp, Zea mays
  unsure (1)..(348): unsure at all n locations
  Clone ID: MRT4577_144943C.1
cggacgcgtgggccagcccgaaagccgccggcggttctccatcttcctcccggcggcgcctctggggcttatcctctgagtgcgntgcctgctgtgggcgctncgtgtggggctttcnctccnngtgctgctcgaagtngcttgctggtttctctcggctttcctcccgactgtggggggggggggggttggctcngccctctcctaggtccntccgnctggccttgctcgtgtctggcttgctgttttcgtgttctgttccccttcctccttggtttcttttctgttctcctgctggcgtcccttctgttggtcccctttctaggtcaaacatctcttctcgggcgg

SEQ ID NO: 49275 - DNA, 391 bp, Zea mays
  Clone ID: MRT4577_144944C.1
ggtaggttcgattcaacaagggggactggggtccaggagcgggttgtttggatcaagggccaggggaagaaaccagcgacagaaaagggaataaacgacccattgcatatgcggcagaccatgatgaggggaaggtacccacagcaccaggcaaagcgtcaagaatcaatgatcggtgcatgggtggcgaggttggaggaagagacagaggggaaggatgggaaacaaaagcgacccatatgaagggcttcggacgacgacaggaaccttccggaggtgcacaaggcactctatgaaaaggtcggagtatgcaagcacacacataagaacggatacaaggagcgaatgactgaatgcggaaccacttgcagaacgagaggagaagcaccac

SEQ ID NO: 49276 - DNA, 247 bp, Zea mays
  Clone ID: MRT4577_144945C.1
ccggccgggattttttcttctcttcactcctcaagctctggctcgcgcacacgatgcgaaagcgttgtcaattctgcgcaaccatggcttttcacctcttctagttgttttgtttcacttgctactctatgtgtggacgggcgtgcaggacgagggcgccaagccaggcacgtagaactacagacgcgaatgacgacgacgagccgaacggaaagaacaaggaccagcaccgccccgacgacaacag

SEQ ID NO: 49277 - DNA, 782 bp, Zea mays
  Clone ID: MRT4577_144946C.1
ttctctcgatgccggccgaccttctcactttctcagtagccgccgcgcaccgcactcgcacgccaccctgccgcagtgccgcatccaaatccaactcccacggggtatggatcctgatcaggtcgccgacgccggggtccaggtccagcacgacgacctcggcggcagcgccacatccgcaaacgggtgctgtgacggtggcagtgacgacagctgggcgcgcgcgttgctccggctgggatgggacctgtccaggaaggccgtcatcgctggcgtggcggccacggccgcgcccgtcgtggccccgccactgcttgtcctgtccctcgccggcctcgcgctgtccttgcccttcgccgcctacctggccagcctcgccgccaccgaccgtcttatgggcgcgctcctgccggcgcctcgtactacccagccgtactgcggctgcgacctcgaagacgatgaattcttggatccatctgaagcgccgggcgccgaggccactgcactcgaccactggcgcgacacggaggacgacgccatcatggaggaaaacgagagctttgtgccgttgccgctgtcacgacaacctcgattctccgaagagccgataacatcatcgtcgacagacgtggaggataagatggctgaaggtgagtctctttcccgaggattgggccacgagtcactagtgttggacaataaggaaggcacaatcatggaggacaccgagtacattaccatggaggcaccgccgagaggctccgatgtttttcgatcagcag

SEQ ID NO: 49278 - DNA, 217 bp, Zea mays
  Clone ID: MRT4577_144947C.1
gtcacgactcgccctcactctcggccttgatgaagatatggctgatatcattgatgaactaattgctatcagggatctcattcattccgtgaattgtgcttactaggctgggcttcaggagaagttccctccagttcctcttctggtgtcctacctggaggactctaagatgacgtggtccgctgcttcatataattcaagcactagcagcagcggg

SEQ ID NO: 49279 - DNA, 243 bp, Zea mays
  Clone ID: MRT4577_144948C.1
gggcgagcgggctaccacgcgtccggtgaatgagcgtgggctgcaccgccggctacgtggccgcagtggtgggagcgaggagtggtggatgtatcgcgatgcaggatgtcgtcgtcgtccatcgtgcccatgacgctgaagaacgccatcgagctggggctggtggaggtgctgcaggaggattccggctgcgcaaggcggccgtggcgcccatgaggtggtggcgcggatcccggtgcgccc

SEQ ID NO: 49280 - DNA, 246 bp, Zea mays
  Clone ID: MRT4577_144949C.1
agccggaaagctcctcaacctgcactcctcgccagcaagcttacttcttgaggctccggggagcagcgccggtgctaggccaccaggtcaagcaaagcccttagttccgccgacgtacgaagaagcttgctggcacggctggttcgaccgcgacatggagacaatcgccttcgaatcaaatccagcgccgacccgaactataatcaagcaaaccgacaacctccggactggcagcagacgcagtcg

SEQ ID NO: 49281 - DNA, 276 bp, Zea mays
  Clone ID: MRT4577_14494C.1
atccctatgaatgtccgaggccggatacccctggacgaatcccacgcacaccggtcatagatcaccaagcggccagccctctatttattttttgatggtttaaaatactaaaatagtcatactctttttttttctattttctaaaaaaaaaccacacatttaggcttccagcattattaagcggtacacaattgtgttatggggggtgggagccgtgaacccctgcatgcacgacccctaaaacctcatcggccttaccagccggttgaccggtcc

SEQ ID NO: 49282 - DNA, 419 bp, Zea mays
  Clone ID: MRT4577_144950C.1
cttgcgcccactcgttccagagatgggggaagtttcagagaatttggggggagtccaacattccctgctgatggccttaagatttatccaacagttgtgattcgaggaacttgtctttatgagctctggtgaactgtcagatatagaaattatccacctgagctgatggtggatattgaggcaagaactctgtatttggacccacctttcacacaagtgtatagtctccagagagatattcctatgcctattgatacttatggctgctagagacgtaaccttagctagcttgctttggctcgaatggaagatctgggcttaaaatgccgggacgtcagatcccgtgtggcagggactcaggattatcactacatgtatcggccagatgcagtagagctagatagacgtgactatgctgc

SEQ ID NO: 49283 - DNA, 726 bp, Zea mays
  Clone ID: MRT4577_144951C.1
gggtacctcgaggccggccgggccgggaaatcgcagtcagccagtcaccttctcaccgtctctctgtctctcagccgccaccgccagaaaccgagcgccagccgccagccagcctccaccatcagccgcccgccaccaccaaaaccgagcgccggccagccagtatccaatccagcaatccctccaataggggacgaggtgcaacgagcaagtacaataacctacagtgcttggaatttgtggaaggagagatgctagtgaatctttgataacaggtgcccaccacaacaataacttctgcaaggcatcgttaatgatgtacggatgaaaggcctagcacacgaggagcacctgcgaggctccaatcctgctcctgccgtcctgcgtcagcgtccctggctccctggcgtctgccggtctccaagaatcctgcgtcagcatccctccaatccgaggagcgagtgagcgaccctggtccctgccggctgcctaaagaaaatcatgtgtacactaaaatatccttgctgtttttgttctttgctgcccaacagtccaagttcatgtccaagactgaagactctaagagacctttgctgttttgttgaagtgaataatttgaatactttgaagtttggttcaagtgtaaacgctatgtactcatatattgcttgcttatgtaacagtaatcagatttagtaaaaaaaaaaaaaaaaggcccctagggcc

SEQ ID NO: 49284 - DNA, 344 bp, Zea mays
  Clone ID: MRT4577_144952C.1
ctgggcggggagggcacagctgaagaggcaggacaggaggaggaggacgcacacgagcaggccgaaccaagagaaactgcccaacatggcggaggcgcggcgggagaacgccaccgccctcaagacccaccgggccagcagcaggaggcagaagcaacctcttttaccagctgggggcaggagccgccgctgcggcaaccaccagaagcgcacctccagctacagcaagaagagccgaaccacgtgcaagaggcgcccccggatccaagccgaagccaaccgggcggccgacgaacaagcaccctccggcgcatacaacgacgagtcacgccggcggcacgaac

SEQ ID NO: 49285 - DNA, 192 bp, Zea mays
  Clone ID: MRT4577_144953C.1
gcattccaattcgcaaaagcagcgggcagttgccatatgtaatgggatgttgggctggtttatcagggctctcctgaatccgactgaattgagatcgttattcctcagggaatttcaaagagccaatgtgctgaaataaggaggcaagagtgtgcataatatgaatccaatgatggtgttttcgtaccagag

SEQ ID NO: 49286 - DNA, 276 bp, Zea mays
  Clone ID: MRT4577_144954C.1
aaaaaaaaaggcctttccgctttttttagggcgaaaataagggcccccccaaattttgtttttaaaaccctcccgtaaacacacttttggttggaaaacctggaattataagggttataggcccaatttttttaaagggcctttaggggtttaaaactatttccaagttttcgggaattggaccccggggtttagggttgagtaaccgaacctgccaatttcctagatgctttggggctttggggggttaaaatgcacccccccggcatgggggtt

SEQ ID NO: 49287 - DNA, 394 bp, Zea mays
  Clone ID: MRT4577_144955C.1
gccgcttgtcacaccagaacaacagatttcagtggtatatcatccatcagcaatacattggttaaacaaatagatcaacgagtacaacaacgcccagccttagccgtccttctaaaaagagcgactaaccgatgtaaagatagacatcccccgatacagaagttcagttattcctaaaggccaagctcaataccaaattcctcgtccttgtcgtgctcctaatcagaaagctgcataatcaaaatccacaagctacgtttcatgccgcatggctatcttatctacactacaggcagactatttgtcaatgctaagatttcacgtccccatacagaaaaaagtgaaaacactgctatcacctgggagctctgggatcacgagacgtacttgatca

SEQ ID NO: 49288 - DNA, 495 bp, Zea mays
  Clone ID: MRT4577_144956C.1
gacatacttttcccccgccgggcaacaactcaaccgccgcatccttcacatcacccatgggcgcctgcgcagcaggcccatatacgcttgaggggcaggccccacctgaagccgccgtcttcacacccaaggttgcctcccgaggccactccaatctccgttgaggttgcggctgatgaacaggtacctgataaggtggtggtggatgagccggctgctgcggcccacgttgagcatcaaaaggctaatgaggtgctcgctccagaagctgccttctccgagcccgaccacaaggaggacagaagccgtgcacaagaccatcttccatgatgagaagccagcggcagcatcccatgcagaggaaaaggaactcaccgacgacgagaccacgacgacggcaggatgcgaagaataacgccgaggaggccgtgaaggagaaactggcgcaacaaatctgatcgactgtccctgcatgcgtgccaaataatataaatg

SEQ ID NO: 49289 - DNA, 498 bp, Zea mays
  Clone ID: MRT4577_144957C.1
cacaagtcttactggagaaatccatcatataccgcaactaggatcttcttcacaacagttattgctctcatcttcggaactatcttcttaaacttgggaaagaaaattggcactaggcaggaccttttcaattctttggggtccatgtatgcagcagttcttttcattggaattcagaatggtcaaactgtgcagccaattgtggatgtcgagcgaacagttttctaccgagaaaaggcagctgggatgtactctgctctaccctatgcttttgcacaggttcttattgagatcccacacatcttccttcagacagttgtgtatggtctcattgtctacagcctgattggctttgattggacagttgcaaagttcttctggtatatgttcttcatgttcttcaccttcatgtacttcacattttatggaatgatggcagtcgccatgacaccaaacagcgacattgcggctataagtctcactgcattctacgcaata

SEQ ID NO: 49290 - DNA, 492 bp, Zea mays
  Clone ID: MRT4577_144958C.1
gttagtggtactattgtactgttaactcacaaccattgattgacactatattaactgaagtgttgttgtactagtttcctagccgagaacgtaaaaatctgttccaccaacaataatttgttgttttcttctctgtgtgttatctaatggttaagacctaaaatttctccccagtttttcttggtatggcctctcctaactaactatgtgaatgtggaaacgttctctgtttgtttggctgcaaccctctcgtttaatatatccagagcttcttgaggtaacctggatagataggaattcggatccaaataaaccccttcaatcatgaaccttaatagaaatcctaaactaaatagaaaaggatgtatctgtatctttcttaaacctattttacctacgctttttttgtttatgtgtactcattgatctggatcttttttcttggttcattggtcgttccacgtacgtttttgcctattttgacatcttttt

SEQ ID NO: 49291 - DNA, 362 bp, Zea mays
  Clone ID: MRT4577_144959C.1
catgcgtccgacgacctcgtggaggccagtgaactcgcacacagaaatagtactgtggagtacgtataaatggggagcggtagccaaacagacaggatgtggactccaatcccttcttttattgccatcagcgcctctagggagagacgtggggggtttcttttgtaatcccacgggccgagggatgctgcctacccaaggaagcggaccttggaaaccctagcattcgcgctggcgccttgttcgtaatctctgaccggcgtctattaaagatcatgcactgcgatttaaggggagtattcgggcctacaaagaacgggccaactgaaggtgaaaactgatcttgaccctgctctggcgga

SEQ ID NO: 49292 - DNA, 1643 bp, Zea mays
  Clone ID: MRT4577_14495C.1
ccgggtttctaaacttagtgttgatcacttgactgtaggaaaccgtccaccagcaaagtttcttgttcctctaccagcatcaccttcaatgaaggatgacgagcactctcccttgcacgtcgccgccgctatcatcatccccagatccgtgctcttcttccctgtccagccgatacactctcccctctgctcccttccttcaacggtattatatgttcccgttgcaacgcacgggcactcatctagtaaagattgatgtttcataatgattttcaatattggtccactctgggacataaagtttaagtactaaagatgaattaacaattttaattgtcttagcctgatgtcatctttctatagcctaatactatttccctcttttgtatcgaactagagaaaaatagcacccctacttgttacagaatagactcttgtcagcatagcttcgccataatttacatctatgcaaaaatgattgtttgtatgtttcaggaaagaaatttctagctttatttacttttatcaaaaccattagtataggtatcacagcgtactgaatgaaacatgctgcatttgccaagaacctgcaactttgaaagtgctaaggatatacccatgttcatttctgctaaaaattagcttcatatgcatcattgaaacttcataaatcaattcatcatctacaaccattcagcacacccttgccaacattcatgacacagaaagttagtgtagaaatatatggcagggctagagcatttcagttatactaccaggtacagatacacaattattttctcttgtcactaacatgtgttacagaacattaaccatttattttactttacaatattttcttatgcacgatatctttgacgctgctggatggctcgcatgctcaatttacatgcattagaaattttttagtgcattccaattctatcaacctacaggtatccattctttccttttctatttgcatatatgtagcaacccacttttctatttgcatatatatatgtagtgtgtcttcagatatattgaattgtggtaatattattattattatccttttcgttgcagagcattccattaatccaaccttattccagagtagttctgtgcactttaaagccgaacgtttgtggatccagaaagaagaaaattttgtatgtatatatgtgtagatccaggtgatcgctattgttagcttttgtttacaatggtcgccacccaaaaaagttgtaactcgctcatttctagacttgtgaataatgttgttagcactatgtttgcttttgcagtgacactatctgacgcttgtaatgttgcttggtcatgaactgttgtcgcgctatgtaaagatctagacataatcactttgtttgcatgcttgttgaaaaaaaaaaaaaaaaagggcgagttacaacttttttgggtggcgaccattgtaaacaaaagctaacaatagcgatcacctggatctacacatatatacatacaaaattttcttctttctggatccacaaacgttcggctttaaagtgcacagatctactctcgcactaaggttggattactcccatggtctgcaacgaaaaggataataataataatattaccacaattcaatatatctg

SEQ ID NO: 49293 - DNA, 363 bp, Zea mays
  Clone ID: MRT4577_144960C.1
gacgttgcatgcacacgctcgtatgcttgaaagcggtacagcctttcttcttttttttttgtatagccatgtggttatctggattacttgaagggagacaggactcaaatcttctacatcgtgcgtcatgggcggtttataacactgggcaaaaagcaagcaatgtaaatgtatctcatgtgatacagggttctatccatattcataacaaccggttttgccaaaactctgagaccctccacatgcatctcagcacgtgaaccagatggcaaagaggatgcttgctgacacactcacctgagcggcagctggcctttctaacacagccacgcctggggacactgaagataccaccgctccaga

SEQ ID NO: 49294 - DNA, 588 bp, Zea mays
  unsure (1)..(588): unsure at all n locations
  Clone ID: MRT4577_144961C.1
tggcctatcccgaacggnnnccccccccacgtacaccgaccagctagacgaagaaaccctagatagatttagaacacaagattgtctctaatccgaccccggtgggagtactgcgcacgcgcagaatgcccgagcacgaaaaaagctatgaaggcagaccctcaatgtccggagacgaacgtgtgaatccaagcgccgcgaacgccgacgccgacacgcctgaagacgattctccgccgccccaaaagagtagagcctgacggttggaacaatatctcccgatggctgctcttccccacaccccaatgagacgctgaaggcatcgaatggtcctctatctatatgtccaaacaggaaaggataatgcgataacggtaaccataaggagggcgacttgatgcgtgctcgatctgaggagaccgaacaagggggagatcagcgtcgaggagaacgagaaaatacagagatactaggtccaagcagagacagcatctgctgcggctacatatgaagtgacctcaggaccgttctgatgaacatcccgtgacaatgatgatcatgactgacagcgtgatggtcgtgctatgg

SEQ ID NO: 49295 - DNA, 643 bp, Zea mays
  unsure (1)..(643): unsure at all n locations
  Clone ID: MRT4577_144962C.1
ccgggnacaaatgcatatctcttattacttatgtaccaaatctacgactaatgtgttttcaagtatatttctatactaagtcgtagattgaaagggaaatggagtcttcagcgaagacaaggcttccactccattttatcggtatcatttacccttcgctgccactccacatcactctcaatcggtataatccttcatcatatttacttgtaccaatgggggagaaagtaacataagggctcttaacgtctccgttttttggcgattaatgccaaaggggcagaaaatattaagcccaaagcaaaagggctgcaccatcaatttcaaaaatttgaaatgaagatttatttggttttcacaaatgattgtttttcaattggtatattgtgatagcaatttcttcaattggtatatattcaaaattggtatctattaaaactctcttgaaaactaagaggaaaatttcattcaggggggggtttgtttagtcaaaggaaaagcatttgaaacagggggagaaatttcaaaacttgaaaatgcttcttgcaatcttattcatatacctttgactatatgcaaaagactttgaaaagattttccaaaaagatttgcaaaaacaaaacaagtggtgcaaatgtggtct

SEQ ID NO: 49296 - DNA, 573 bp, Zea mays
  Clone ID: MRT4577_144963C.1
ccgacgtcatgggactagaattgcagtatttgcctccctatggtctattttattattatggcagcactgacacaaacgccggcacgcgtactatatgaactgagtactactgacttatcagtgaattctggagaccatcattgcgtctctaataaaaacatgacaaatcaaaactatatagagagaaaggatgaacaattatgttactgtagaataattcaacaggacatccacatatatagcttcagatcatcaatcaagaagcctggactataactataatcatgcactctactgtaagagctaacgaggtactgccgaataagttgtaaaccacacagggcacaacttgtagttttccttattgcattaccctggccaaactgtttttgccagaaacattattcattctagtgttccatcttataaacaaactgcatactgccatgattcgatgatcgacctaatgaaaatagcactgccctgatcagcacaccgacacagtaatgcgatctgtgtcgcgagtagggcctgcgtgcacatagattatgcttgacctgacgcacatgattg

SEQ ID NO: 49297 - DNA, 770 bp, Zea mays
  Clone ID: MRT4577_144964C.1
tattgccgggtttacaagcctcacaataccggcggccgccctcaattttttattttggggatgaatgatgcacgaatgcgagtattgcaatgccaataacttccgaaataaatgtagcaggacaagtctactattacaatgaatatatcaactggcatgtctcacatgtggtgctgccagtgccagcaaatacatacattttcttttcctccccggaactgattgatacgagcccgtgcccttttgaatgaaaacatgacatagttgaatactaatcgtagggcctgtttgaacctgtccgttgtggacactgaacaggtcaagatacggtctcagataaaatgcggccgtcatgcttgaagacatgactacagaatctggttcttcgtaagaaactacttacgtgcagcgatggtggtggaagagccagcgtttagcaagctggtacaagcactggtcaagttctgctggatctggatcaccacggttagttacgaagaccggagcccaggaacgttgctgaggcccatcttccgtagaatttgtttgggaatggctggcgggactgcgagccccatgctctgactgaactcttcagccagcatcacgagtctggccttgtctcggttggtagccttgtgcgagttgtagtaccccagccatgcctggtaggctgattccttgctcttcatctccactttctgactggggctttcactggtgcctgaatgcttgaatcaaccgaaggtgttgcagcctctgatattgac

SEQ ID NO: 49298 - DNA, 675 bp, Zea mays
  Clone ID: MRT4577_144965C.1
atcttctatcatcatattataattgtcccctcattcatctcacagtccctcccaggactcccctgccctcctcacccgtcaccaaccgacctccagcccccagccgatcgacgtcgacgatgatgtgagccacgcggaggcagctcggatctggaggcgtgctcgtccagttggcgcaggggctccgcctcgccggcgatcccgccagtagctactccagccccgcacaaagatataactggacgtgaagcatggaatagcacattaaatgaacaaatgaaggcagaccgttctggtatcttgatgggatgacgaggctgccaattcaccaagagcgtacagaatatccagaggatcgcgtgagcagtaagggcccaatacgtgtcccagaactacaatcacggaggagctgtgccctggtctgcgtgtgggtgccggattacatagccttcgacccagtgaataggtcctgcacgttatgtctgtcgatgcaggcattgaacacactggctgtgcagctggcgagtcaaagtacacgactgctgtgcagatatctgtccctatcgtctgtaatacttcaacatggagacgctgctgtgagttcgtgtccaacactcacagtgttatgcagcttgggatgcacatgttcccggattgaaagttctagctccatat

SEQ ID NO: 49299 - DNA, 834 bp, Zea mays
  unsure (1)..(834): unsure at all n locations
  Clone ID: MRT4577_144966C.1
ttgggtacctcgaggccggccggtcaggaggctgccacggcattcagctcttcacaggtactccgtccattttgctgtaaacctttgcaaacccaaagcaatgccccgcaccgaacgagtccgaaaacgtgccttgttgtacaacgcaacgcaacgcaacgcaagcatgcttgtgagcaaccgattaggacagcatggcctcgtcaatcggttgttgatcggactagggggtacggtgccgtactccccgccgcgcctggctgtgctatggtgtgtcctgacacacagtcgatgccgtgccagtggttgccctcagactttggccgtccttcgttcgattccgatcgagtgacgggtgtgggcgtgagctgacagccgagcccgtgatcgacgagttccggtccggcccagaaagaataatcttatctggaatggcgtcctagtcaatggagcaggtgagggtagcgcagatcacgtacggatcgaccttcactgcagttgattattcccccagatctgtgatccaggcttgtttatgccttggaggctcgccaatccaggcagagattggcaatggcaaagcaaaacacgcacgcatccgcccaccattcctgtcgcgggcgattgacgacgctgtcgcgtgcaagggtcggcgtggacatggctggtcgcgggcgttcgcggagtacgtgaccaaggnggtgggacgacaacttgccgcggacgctgctgctgtacacgccaacaccgctcctcgccgagtctactttccagacggtggctgnaactcgcgccggttccgcacgccacggtcaacacgactgaacttcatcc

SEQ ID NO: 49300 - DNA, 287 bp, Zea mays
  Clone ID: MRT4577_144967C.1
attatctattatacatattctcaacaaacccattttacaattgaaaaatgggatcccccattttgcagggcaagcaaaaacctggtaaagctactggcattaaacttttgctttaaaaaacatttaaaggtgctttttgcgacaaaaaaaacatccaataacccccttttgagaagggtttccgatccccctaacccatcaagtgtttccttgcaagaagcattttcaacatttaatgagcatggtttggcatggcatacttaatcctgggggggagaaaggaaccc

SEQ ID NO: 49301 - DNA, 565 bp, Zea mays
  Clone ID: MRT4577_144968C.1
agcggggatacccatggcgaatagccatgaacaaggcaccagacaggacagccgagagtacagtccggattacattcaaaatcccatcataccgcctaccatatctgctagaacatgatcaggagcacgttctagggagcatactcaggaggaggaacaagaagcggaaaaagaccaactgaccgaacaaataggtggcctatatgggtgactgtgggactgaccatcacagaccaaagtacagtcctatggtccatcctaagcgtacagcaaagcatacagcttccatcagcgcttgcatctgtgcttgtggtaaagattctagtaaagatccctgcaactgttgctagaactgaggctatcataaagttcctgaaaggtggtgtgagtggtggattgattaagatgtatctcaagatggttgacgacttgatacaccagcttatgcaggtgatgaatgtggagcctgataagaacgctcagatgaaagagtaggtgattaagtaggtatattatgacctctaggatatcttcctggagaagttcaagctgctggagatcctgg

SEQ ID NO: 49302 - DNA, 243 bp, Zea mays
  unsure (1)..(243): unsure at all n locations
  Clone ID: MRT4577_144969C.1
cttactgtgcgttgtggctacttttgactgctatcgaagaataagcaagcatcggtagagcaatacncaactccgatgccgagaacatcaacaacctgtccttaattgagtttgagctggtgaccgtgacggagtgaaaaccgccattgcttaggagtattgctggtttgctgtgtcgaaccacccaagatcatcgccaatctatcatgactcgaggtggatgataactgggcctaatcaatt

SEQ ID NO: 49303 - DNA, 319 bp, Zea mays
  unsure (1)..(319): unsure at all n locations
  Clone ID: MRT4577_14496C.1
tccacccctgcggccactttcatctcatgcctctgaaaggcctcatctactccgtgggtggcaccaaggtgccactgtttgacttaacancctactacgtttatttatttctcgaactatcgctcgctcctgtccctagactataacatgacttactcagtactatgtaatgatgccgcgtatcatcctgctcaatgtggagtaccttgcaagaacgattaatactatactctccacataaattataaacatttaaaggcactcatcgccgtatcactacttccttttctgtaatgcatccgacaattccctcttttat

SEQ ID NO: 49304 - DNA, 460 bp, Zea mays
  Clone ID: MRT4577_144970C.1
gccggccggttcgggtgttccgtccttcttggagtggtggaagagggctgcagagacagtgcagggaatggtcaagaaagctggattctctcgtcattttgggagcctggaagatttggaaccactacaatagatatgtgtttgatggagagaccccagcctttctcgaaccctgaagcactctgaagcagactgatgatgagagaagcctttgagagctagcaggagtcaagggtctctcctatttaggagctcccttgctggtcgtctaaagactcctctttctcatggatttgtttctttatgtttatttctgcactccgtaaggagcgttttttttatttgtatttcggtcttctatggaccttttttctctgtaaaaggttccatttcacatgtttcacataatctttcagatatactgcattactaccaaaaaaaaaaaaaaaaaaggccccta

SEQ ID NO: 49305 - DNA, 606 bp, Zea mays
  Clone ID: MRT4577_144971C.1
gtcaatacatagcacttcagctctatagagacaagcaagttttgttacgatgaagacaaccttattacaacaagcataataatctcgtgtctgttgacactaataagttgcaaaagactacatcacttaagttgcaaaagactacatcactagtgtgatgaccatgacgagatcatggatccatatctttgacagacagagaagacattcttcctctaaagactggagttacttcatgcatgacttgacccttgtaactgctaagccatctcatccctcaaccacatcaatgcagcctctctatcatcattgcatgcactcaagaatatctgtcgattgtcagggtccttgaacaccttatatgctttgaccttctcctcttttgtgacttccaatgtgtttagaactgctatgcaattcttaattgagaaatcatcacctcctcttgcctccctttctcttgccaattgtgtcgcttcatcttcagcttgtttgcttctaatgtctaggtacctctccatcaatacttctatgttggaactcttcttcggcctctttggtcctttttcttcttcattccttgaaacaacagaagtcctttttgcc

SEQ ID NO: 49306 - DNA, 409 bp, Zea mays
  Clone ID: MRT4577_144972C.1
ccacccaccaacccgggaaaaaaggccattgccctgaccacccccctaataagcggggaagggccaaaattttgggggtgggggctaaggtctgccccagcaaggcttgttcttgatccattcatttttagcagcggggaaacttttttaattaaaagtttatcactaggctaattttaacgcagggggtcccggcccccaaatatttaaaaagtgggggtcccaaactttttttagtgaaagcccctccgtgccacggaagcctttcagaaatgcccattgaaactaggaggggaaacctttggtggtttgaaaaggatggacccccttttttaaaaacctggcccatttggcaagaaaatcaaaaaaggctgttttttcccagcgaacccttggttcaccccgaaat

SEQ ID NO: 49307 - DNA, 201 bp, Zea mays
  Clone ID: MRT4577_144973C.1
acgcaagaagcttgtctctgccaccaaggagggtctgaagcttgatgagatgagtacaacatagaggggtaggaggagctgagggagagttttttgggtctttgcatggtcatcaaggaggttttgggtgacaaagttgagaaggtggtggtgtctgatcgcgatgtttacttaccgtgcttgtctttgagtctggggagg

SEQ ID NO: 49308 - DNA, 272 bp, Zea mays
  Clone ID: MRT4577_144974C.1
gcgacgcacaaggagaagaccatccattgtcacaagtcatcatgaaacacggtacagggaaggagggagggaacaacgtctcagctggatctatttttttttatgagaataatccaaatagacattggctaaccgaacccaacacgagaaccaatccacaggagggttaaaaaaaccggcggttgttctttgaaaagaagtccgtccattagaagaatgaccaggccatcgccgagaccaacggcaaggccaagcccgcggttaacccaagc

SEQ ID NO: 49309 - DNA, 670 bp, Zea mays
  Clone ID: MRT4577_144975C.1
tccagtgcgaggctcctatatggaatgtgacgtagctgagtttccagcaacgaacggcgcatccgacatgactgctttgggttggacgatcgcgctctaaaccctgaatgacgtgtctgagccccactcacgtgacatcatccacgtggactgcacacgggaggcgatgacgctcgatccacacgtaaaactcgaacctcgaggccgaccgactcaccgcgttacctgaagaagaccctcggcaaaggtacgatgaccatgaccctcgcctacaactccaccgtgtactgcctgaagctgatgcaggacgagaaagactgaatggtctcacgctaccgctcgcccatcccagaaaccttccactacgaacactggatcgccatcctatacttaaagctcggatcgctggcgcatgccaggccagacgccagagcgttgcacatgaattactgcgatgggctgactcgttacttgcacacggacggctagcaacatcctcgtgtgagaactgaccggacactggcttacactgaaattgtgagggaactatacttctggactcactggattagtgtatagacgagtcgtacgactgtcgaggctatggatacgtgtccccgacgagaactgtgggtcatgtgtcatgatgctagagtacactacatgcttc

SEQ ID NO: 49310 - DNA, 446 bp, Zea mays
  Clone ID: MRT4577_144976C.1
attcggctcgagctaggatccccagggagacttacctgccccaggccttattcatcgggagggggcacagaaagaacatcatccccgacgaggctcccgcctatgccgctgctgtccagactgccatcctgagcagagcgggcatggagaaggtgcaacacctgaggaggatggacgtgaccccattgaccatgtgaaggccaactgccggaggagggaggacatccctgatcccgaggaacgccacaattccgaccaagaaggagaagggattctccacatacttggacaacaagccaggcatactgagacagccctacaagggggagaggacctgaacagacgacaacaacccgttgggcaagccctagctgtcacgactatcacctgcaccgtggggtgtgctaaagacaacggcatggttagggataaaatccaagacaggg

SEQ ID NO: 49311 - DNA, 260 bp, Zea mays
  Clone ID: MRT4577_144977C.1
tataccgagtatattaatttgtgctagactgtattaccatagttagggagtgaattaccttgacgcgaagcaccctacctattgctagtcctcctacatcgtctcatcgcttaatcttggggatttgattcttcactttctgcgcgcactgtagagggtgctctgtctgcagcaattttaggataaccagcctggtgtggtctatcgctatcgatatagtaagactactgctcagttataatcagcggcgaggaggaaga

SEQ ID NO: 49312 - DNA, 873 bp, Zea mays
  Clone ID: MRT4577_144978C.1
atggacgacctgctctcgccctgctcgtccttttccccgccctcgccggcgtccttcttctcccacgccggccacccagtcatcgagttcgcctcctgtgaggtccccgagcaatggctactcgacgacctcgtcgtcgccaagaacgagggctatgacgacgtggacgacctgtggcccgtgcggagctcgctctccccggactccgaggtctccgagcagccgcttcctccccagccgccgccaccgtcacagcaggagctgacgagcgtcacggcggccccggcgcagcagcagcagcgcctcgggaagcggcgtgggcggaaacccgggccccgcccggacggccccgccgtcagccacgtggagtccgagcggcagcggcgggagaagctgaaccggcggttctgcgacctccgcgccgccgtgcccaccgtgtcgcgcatggacaaggcgtccctgctcgcggacgccgcctcctacatcgcggagctccgcggccgcgtcgcgcggctcgaggccgactccaggcgtgccaccgcggcgaggtgggaccccgccgtaacggcggcggcctccgccagcgccgccgctatggggctggcgggagccggcggcggcgccgacgaggcggtggaggtgcggatgctggggccggacgcggccgcggtgcgcgcgacgagcgcgggcccccacgcgcccgcgcggctgatgggcgcgctccggtctctggagctccacgtgcagcacgcctgcgtgacccgcgtgaacggcgtgaccgttcaggacgtcgtggtcgacgtggcgactccgctgcaggacgacgacggcggactccgcgccgcgctgctccagatgatgcaggacagctag

SEQ ID NO: 49313 - DNA, 362 bp, Zea mays
  unsure (1)..(362): unsure at all n locations
  Clone ID: MRT4577_144979C.1
cggacgcgtgggcggacgcgttggcggtcgcgtgggcggacgcgtgggctcccggagaaccagaatgctactctcacccttcaaggctgtggcggggccatggacgaccttgtcgagcgctttaaggacgggctccacatgtgcatgaccgaggtctatgacaagaagccggagttgttcgagcctctcatggcctgtcaggctcccaagtacatggtgttcgcctgctcagactgccgcgtgagccctgcggtgacactgagacggcagcccggcgaggtattcaccgtccgcaacatcttcgccatggncccagcctacgacaagaccaagtacactcgcatcgggtccgtcatcgagta

SEQ ID NO: 49314 - DNA, 209 bp, Zea mays
  Clone ID: MRT4577_14497C.1
gcacgaggaatcgcaggtaaacactaaacattttgattctgatacctataattttcttaaataaaatagtctgaaattgtttttattattatctaaaaaagtatccacaatgaagcgagatatgtagaaccaggtctgtctagttacttaaacatccttctctaacaatatccttattatctgcctagttacttaaccatccttctttt

SEQ ID NO: 49315 - DNA, 145 bp, Zea mays
  Clone ID: MRT4577_144980C.1
ggggtggggttttttttggaggacaccaagtaaatcctgatgcaaagatcgtctgaacaaacaaacattgaaatattcccctacaggcagccaatgagccaaatgaacccccattgcttaccatgcgaggtaacaagatcactat

SEQ ID NO: 49316 - DNA, 285 bp, Zea mays
  Clone ID: MRT4577_144981C.1
aaaaaaaaacaacggggaattttttttccaaatttaaaaggggccaaaataaagggccacaggtacctttgaaggaaaatccaaattaacccagggtcctacaaggggggttttaagggggtttggaaaggacattttgttcttttaaagggttggccaccgccccccccaaattgggggccttggaaaccttttaaaacagaacctttggttggcccctttggggactggaaccccaaaccctttttggcctttttataatcctggggcttttgggggcccccc

SEQ ID NO: 49317 - DNA, 2400 bp, Zea mays
  Clone ID: MRT4577_144982C.1
atggtggtggatcgtcgatggatgtatgacagttggaagatgaaaggtgctctatcaagtgagtgggtttccaagactgacacatttctcgaccttgctcttgctcgatcagagaccgaaatcgatgataggtgcccttgtagcatgtgtcagaacatttatttccttaatagaaggactatatcgatatatctttgtaagaatggttatattcatggctatgaggtgtgggtgaaacacgatgaggacccacctcctcgtattatatcagaagttcagtcacatgaagaggggtactacgataggatggaagagatgcttgatggtaaggagatcgcgagtgagaagaagtgtatagtatgtgatgagcgtagattcgcagaggttgataacgatgatggtttgatcgtgacgattgaggatcacccgtttaggttcgatatgaacgcttttagaaaggacacgattgtgatgaagggaccacccaagtgtcttagtggtccagagattgtcgcgagacttaatgatttgaaattcctacatggttatgctgcgggctttagaaggtctatgaatttgaagacgagcaagttttccaggttgaagagtcatgactaccacataataatggaaagactccttcctgttacattccatggttttgtaaaaaatgatctgtgggaagcgttagcggagctaagctacttttatagacatctttgtgttaaagaaataaagaaagagatgatggagaagcttgagcaacaaataccgattttggtttcttcaatccgatgcaacatctacttgttcacctaccatacgaagctaaggacactaaagaagctacgtgcaatggttgctaataagagacgagttgaagggtgcatcgctgaggaattcaaatacaaagagatagcatcgttcacggtcctgtactttgcagaggaacgcaatgtcgacgcgcctacgttgcagtatcatgtcgacgagccccctatcagtgatcttgaaatttttcaatggaggagcaaaactataggacctagcacagcatactatttcaccaatgacgaatggaagactgctttactctacatgtataacaacatggaagagatgagtcagtttctactattccgttctacaaggttcgaagatgaccatcctctagcaaccacgacaaattccggagttgtaactagagctgtcgatgatgatgggaaggtgactaattattatggagtcattaatgatatactcgagtacaagttttttggagataaacaactcaaagtggtgttcttcgattgtgattggttttctccaaatacaacgagagaaaaccaatatggcatggtggaagtcaaacactacgatcaattaaaaggccacgacaatataatccgtgcccaccaatgcgagcagaatgctgagatcatgcgagagatgatgatgaagatgatggtggagatgatgtgggagatgatgctggagacgatgctggacttggatcgacgactcgttcatagacacagaacactacagaaacagtacaagttgccggaagatggatcatatgatatgaacgctcgttatgtgtttgagtataacgcgaacgatgtcgttgcagatgcaatgtactatgcacgaattcaggctataaaggcatggtgttggtgtcgtggatggccacccgatcagagggttatcgggccttgtgcagatggtgggcttcccctgagttttgtgccatttccgaaaggaacacgtgaaaccgtgggactgagtcgttccacaactacagcggcgatggacatgtgcgcttggctaagcgaatggtatgtcacatgcatggttcactcttgtaggttgggtatttttgattctacgattgattctaggcagctgagacgccgtggacgacagtccacatcctcgtcttcgcagtcgtcccgttcacgatcatccgcccaagaaatagagcttgcagtgttgcgtcaacaggtagagtatcatcaatcagttttgagggaacaattggagtaccagagacaacaagctgagtaccagaagaagaaggacgggtattatacaaacctccaggcccataatcaagctcttctctcgctggcacagcaagcgggcgtccggatgccgacatatgggatgccgcctccggactttgcactgccgatgccaatgctgtcgcctccacctccgcctccgtcacaattccctatgggatttcagacaccacccgcttcagttgccgcacctggagatcgatctggtcaagacgacacatcacattcttgggtgaacaaccttttcaacacgcagagtctagccggaggaagtggctataactcgaaccaatcaggtgatggatatgagtga

SEQ ID NO: 49318 - DNA, 888 bp, Zea mays
  Clone ID: MRT4577_144983C.1
atggagaagcttgagcaacaaataccgattttggtatgcaaacttgaaaaaatatttccaccaggtttcttcaatccgatgcaacatctacttgttcacctaccatacgaagctaaggtaggagatcctgtgcagtatagatggatgtatcacatcgaaaggacactaaagaagctatgtgcaatggttgaggaacacaatgtcaatgaccctgcgttgtggtatcatgtcgacgagccccctatcagtgatattgaaatttttcaatggagggccaaaactgtaggacccaacacaacatactgtttcaccaatgacgaatggaagactgctttactctacatgtataacaacatggaagagatgagtcagtttctcctattccgttctacaaggttcgaagatgatcatcctctagcagccacgacaaattccggagttgtaactagagctgtcgatgatgaagggaaggtgactaattattatggagtcattaatgatatactcgagtacaagttttttggagataaacaactcaaagtggtgttcttcgattgtgattggttttctccaaatacaacgcgagaaaaccaatatggcatagtggaagtcaaacacaacgatcgattaaaaggtcacgacactataattcttgcccaccaatgcgagaaggtgtattatatgacatatccatctaagaaaaagggtttggttgattggagggtagtgtacaaagttaattctcgtgaacaactatatgctcctggtgatgctggttatgttgaaagtcaaatcgagcaggaagtggggctgctgagattttccaagacgacgaacttaccagcacgtttaatgtacaaactgaaatgttggaagaatctttattag

SEQ ID NO: 49319 - DNA, 693 bp, Zea mays
  Clone ID: MRT4577_144984C.1
atggctgtgatgggttcaacatcggaaaagatgtacctcttccaggtaagtttatgtagccgcttccgcattttcgtatctccgatgatctataatgtctgcgtgacgggtgaaacgctcttgggaaagaacgacttagtggcgagggagcatgttgaggaggttattatgcgccccatttggtctcgcttcggccttcgaaggccgaaggttgaaatcgatgaagccaccgaagcatgccagaaggcctttggcactgtatgcttcttcattggtacaagagacttgattcaagaacatatagcattcagagtatggccacttttagagagctgggagatgccaaaggagactgtcaccaagtctggcgaaggtgagctggttcgactgaaatataccttcaaatatggagataaatttgatgaaccgaatgatgactggctgaaatatatcgaagctacaagtaatgaactgcttgggccgtattcaaaagtggaagataatgtgttatccacatcattcggggcccggggaaaaaagagattaaacagagtttttgatgctattggttttgtttaccccgactacaactacccgctgcgggacgaggaaagaaaaggaaagttgctgcttcggccaagatcgctgctttggccgcccccgatgagcctgcgccgaagagcaaaaaactaa

SEQ ID NO: 49320 - DNA, 550 bp, Zea mays
  Clone ID: MRT4577_144985C.1
gccaaaccactgcggcctgctgctttcacctccctctccctctcgggctctctcctaacatctcgagctcgatcgcaagccctcaccccctcagacactccttccccaccaccgacatacgtacatgaagcacccgagagacgccggcgccgtgccgctctccctcgcgctgtccctgggcggcggcggtggcgtggccaccaagcacggcatcagcaagaagccccggcgcgcggcgggcggcgagttcgtctgcaagacgtgcagccgcgccttcgggtcgttccaggcgctgggcgggcaccgcaccagccacctgcgggcccgccacggcctcgcgctcggcgtgcccgccgccgcgccggcgaaggaggataccgcgacgaagccggcagcggcggaacccgcgcccgcgagccacctgtgccacgtctgcggcctcggcttcgacatgggccaggcgctcggcggacacatgcgccgccaccgcgaggaagcggccgccgccgccgcgcaggcgccgcccgtcctcctccagctcttcgtgtag

SEQ ID NO: 49321 - DNA, 738 bp, Zea mays
  Clone ID: MRT4577_144986C.1
atgtcgatagatctttgcaagaacggttatatgctagactatgaggtgtgggtgcaccacggtgaggacccacctcctcgtattgtatcggaagttcagtcacacgaagagggggactacgataggatggaagagatgcttgatgatgtacgccatgaacttctaactgccgattcggagaaccccggtcaacccaccgattatgaggatctagctacacccgaggttcagaagttcttcgaactccttaaagctgccgaagagccgttgcatgagcacacgaaagtgaccgtccttgtatttgtgactcgacttatggctattaagtctaagtttgcattctcaaacaactactacaaggagcttttgaacttgatcagtgatgagaccgcaagtgagaagaagtgtactgtatgtggtgagcatagattcgttgaggttgaaaacgacaatggtttgaccgtgacaatgaagattgcacgtaagcagcttcgttacatgcctcttatacctcagttgaaatgtttgttcatctccaagaatacagccagacacatgaggtggcacaaagaaggggtacgtgagaatccaaatgtcatggcgcacccagctgatacagatgcatggaagacactagatgcttttgattccagctttgctgatgaagtgcggaatgtccccttcggtttggcaatagatggtttctcgcctttcaatctaactgcaatgttctactga

SEQ ID NO: 49322 - DNA, 572 bp, Zea mays
  Clone ID: MRT4577_144987C.1
aatatcgcacgacgcaaccgatccccaaatccccaaatcttcccagtttccccctcccgctcgacccagatcgaggcctcgatccaccggccatggcgctggagtgggtggtgctgggctacgcggcgggcgcggaggcggtcatgctgctgctgctgacgctgccggggctcgacggcctgcgccggggcatggtctcctcatcgccgccgcgctcctcctctactggatcctcttctccgtcacccagctcgtcgtcaggctcgaccagatgcagcagcgcgtcgacaagctcaagaagcgcgacgactgatggggctcgcgctcgcgccttccccgcgtccacccggaggtctcgttcttccctctgcctcgtactttctgtttttttttcatgttggagtgcggatgtcttagatctcgatcgtaatttgaggcatggggcttccttttgcccttaccgtcttcagataaaaagaacaacgctctttgaaatgatgatatatttaggatgtttggacaaatggtatcgtaattgatgtgttcaccaatgaggtgattggtttcactcg

SEQ ID NO: 49323 - DNA, 943 bp, Zea mays
  Clone ID: MRT4577_144988C.1
gcgtccccgaccgtctagtgagtttttgatactctattatgtgtttgatattgtttgcaagggcataggggttatgcacttatatttgatattgtttgcctccaggcttcgtatgggcaggagatggttcaacgccatgggcaggagtacgattggaggagccagccaatcgaccctcaggcagcatatgctagcggaggaggacaagcccacggacggttgggtatttttgattctacgattgattccagagagctgagacgccgtggacgacagtccacatcgtcgtcttcacagtcgtcccgttcacgatcatccgcccaggagatagagattgcagtgttgcgtcaacaggcagagtaccatcaatcagtcttgagggaacaattggagtaccagaggcaacaatctgagtaccagaggcaacaagtcgagtaccagaagaagagggacgagtattatgcaaacctccaggcccaaaatcaagctcttctctcgcaactatcccaacaagcgggcgtcccgatgccgacatatgggatgccgcctccggactttgcactgccaatgccaatgttggcgcctccgcctccgcctccgtcacaattccctatgggatttcagacaccacccgcttcagttgccgcacctggagatgggtctggtcaagacgacacaacacattcgtgggtgaacaatcttttcagcacgcatagtccagccggaggaggtggcgatggatatgagtgataatgatgtaaaacacttgttgcaacctttcatgtgaaagcctatccgtcgaataatgttcattttggagttcggacaactatgtttatgtaaacacttgttgcaaccatttggaactatgtcgttatgttaaagaaaaaaaaaaaaaaaaaaggcccctaatatttgtgaatgtgtatacttatgtgagtat

SEQ ID NO: 49324 - DNA, 1150 bp, Zea mays
  Clone ID: MRT4577_144989C.1
cattgggtacctcgaggccggccggggtagacccgtcccacgcaacacctcagcgatccaccgccctccctcttcgctaaagccgtaatccgaaatcccgcccccagacccagatcgcacgacgcaaccgatccccaaatcttcccagttcccccctcccgctcgacccagatcgaggcctcgatccaccggccatggcgctggagtgggtggtgctgggctacgcggcgggcgcggaggcggtcatgctgctgctgctgacgctgccggggctcgacggcctgcgccggggcatggtctccgtggtgcggagcgcgctcaagcccatgatgtccgtggtgcccttctgcctcttcctgctcatggacatctactggaagtacgagacgcggcccacctgcgacgacgagcacgcctgcaccccctccgagcacctccgccaccagaagtccgtcatgaagtcgcagcgcaacgcgctcctcatcgccgccgcgcacctcctctactggatcctcttctccgtcacccagctcgtcgtcaggctcgaccagatgcagcagcgcgtcgacaagctcaagaagcgcgacgactgatcaccgcgttcgcgccctccccgcgtacccacgggtctatcatgactccccagcggaacgctttctcatctttgtcgcgctgctcctctactggatcctcttctccgtcaccagctcgttcgtcaggctcgagcagatgcagcagcgcgtcgacaagctcaggaagcgcgacgactgatggatccgcatccatccggtgggctcgttcttcctctgcctgccttgtgttcctgctttatgttgtggtgctgatgttttagatctcggatcgtaatttgagacctgctggtagcatttgcttcctttgccttgccgtcttcagataaaaaagaacagcgctcttggaaacgatgataatgtttaggatgtttggacgaatggtatctgtcgtaattgatgtcttcatccatgaattggttggtgtcactcaatgtacactgagatattggttaatagctactagtgctgtttttatcatgtgattatgcccatgctgtaatgagttagttcttgtttgtaataagatgacattagaggtcggattttatatcttgcct

SEQ ID NO: 49325 - DNA, 366 bp, Zea mays
  Clone ID: MRT4577_14498C.1
ggggatcggaagcactaggctgtgacctctaacttcagcctcaatattgcgcctcctggatctggttgctctttttacacgcgctgctacggcctaccaattttgtccacaagtgctgcacacagctcctactcctctctttcttgacgccgtaccttttaccacctgtcagctcagtatgcgaaaacccactctttcaaccctatatgctccaacacggaatcctacttggcatcctagctttatcacccttgggtcttgaacattcattatccctacaacagccattaccttagacgcatttattggcgcagaacataagggctcaacagctgccacaactcgtgctagcacaccttgctgcct

SEQ ID NO: 49326 - DNA, 6283 bp, Zea mays
  Clone ID: MRT4577_144990C.1
atggaggaggatcgtcgatggatgtatgaaggttggaagaaaagaggtgctctatcaagtgagtgggttgccaagactgacgcgtttctcgaccgtgcttttgctcggtcagagactggaaccgatgttaggtgcccttgtagcaagtgtcggaacatttgtttccttgacaggaggactatgtctatacatctttgcaagaacggttatatgccaggctatgaggtgtggatgcaccacggtgaggacccacctcctcgtactgtatcggaagttcagtcacatgaagagggggactacgataggatggaagagatgcttgacgatgtacgccatgagcttctaaccgtcgattcggagaaccccggtcaacccaccgagtttgaggatccagctacacctgaggttcagaagttcttcgagctccttaaagctgccgaagagccgtcgcatgagcacacgaaagtggccgtccttgtatttgtgactcgacttatggctattaagtctaagtttgcattctcaaacaactgctacaaggagcttttgaacttgatcagtgatgtacttccggagaatcacaagatgccaaaggacatgtatcagtccaaaaagctgctctctggcctcggtatggactacgaaaaaatcgatgtctgtgacaataactgtatgcttttctggaaggagaccgcgggtgagaaggagtgtactgtatgtggtgagcgtagattcgttgaggttgaaaacgacgctggtttgaccgtgacgacgaagattgcacgtaagcagcttcgttacatgcctcttatacctcggttgaaacgtttgttcatctccaagaatacagccagacacacgaggtggcacaaagaaggggtacgtgagaatccaaatggcatggcgcacccagctgatacagatgcatggaaggcactagaggcgtttgagttccggcttgttgatgaagtgaggaatgttcgcttcggtttggcaacagatggtttctcgccattcaatctaactgcaacgtcgtactcatgttggcccgtctttgctgttccatacaaccttccaccagctctttgcatgaaatatgaatttattttcttgtgtcttgtaatacctggtccggatcatcctggaacaaagatcgatgtgatgatgaggcccctgattgaagaattgaaaattttgtgggcaggagtcgaggcgtacgattgttacaagaaacagaagttcaacctgagagccgcgtttttatggtctattcatgattttatggcttatggtatctttgctggatggagttgtcatgggattttgacatgtccgatatgcgttgaagacacttcatgctttcgactaaagtttggtggaaagatatgttacttcgattgccatagatgttttttgccagaggatcacccgttcaggttcgataggaacgcttttaaaaaggacacgattgtgacgaggggaccacccaagcgtctaagtggtccagagattctcgcgagacttaatgatttgaaactaaacgaacatggaaatcgttttgaaggttatggaaccgagcataattggactcacaaatgtggtctatgggaactcccttatatgaaagccttgattctaatgcataacattgatgtcatgcaccaggaacgaaatatgggtgaaagcattatcagcacttgcatgaatatcactgacaaaacaaaagacaaccctaaggcaaggaaagacttggccttaatctgtagaagaccaactatggagataggagagaatcagaagaagccacgtgctcctttcagtattaaacctaaaaggaagaaacaattgatgaaatggttgaaaaacttaaagttcccagatggttacgccgcgggctttagaaggtctgtgaatttgaagacgggcaagttttctgggttgaagagtcatgactaccacataataatggaaagactccttcctgttatgtttcgtggttttgtaaaaaatgatgtatggaaagcattagcggagctaagctacttttatagacatctttgtgccaaagaaataaagaaagagatgatggagaagcttgagcaacaaataccgattttggtatgcaaacttgaaaaactatttccaccaggtttcttcaatccgatgcaacatctacttgttcacctaccatacgaagctaaggtaggaggtcctgtgcaatatagatggatgtatcacatcgaaaggacactaaagaagctacgtgcaatggttggtaataagagacgagttgaagggtgcatcgctgaagaattcaaatataaagagatagcatcgttcacgggcctgtactttgcagaggaacacaatgtcaatgcccatacgttgcggtatcatgtcgacgagccccctatcagtgatattgaaatttttcaatggaggggcaaaactgtaggacccagcacaacatactgtttcaccaacgacgaatggaagactgctttactctacatgtataacaacatggaagagatgagtcagtttctcctggaatttgattctgaaaattgcatctctggctgtgaacgtgaccagattcgtcgagagggaaaagatgggggacttaatttcttgtgttggtttcgagattatgtagataaaaatgacaatatacacccggaccttcgacaattatccctaggagcagtaactggcagatgttatggtcggtatgatgtcaatggttttagattccgttccacaaggttcgaagatgatcatcctctagcagccacgacaaattccggagttgtaactagagctgtcgatgatgaagggaaggtgactaattattatggagtcattaatgatataatcgagtacaagttttttggagataaacaactcaaagtggtgttctttgattgtgattggttttctccaaactcaacgcgagaaaatcaatatggcatggtggaagtcaaacacaacgacagattaaaaggccacgacactataatccttgcccaccaatgcgagcaggtgtattatatgacatatccatctaagaaaaagggtttggttgattggagggtagtgtacaaagttaatcctcgtgaacgactatatgctcctggtgatgctggttatgttgaaagtcaaatcgagcacgaagtgggggctgctgagattttccaagacgaagaacttacaagcacgtttaatgtacaaactgaaatgttggaagaatctttattaggtgatcaaaatgatgtagaggttcctggtgttgtgactttgcctactggcgagtctgtccccgccaccacttgggagcattatcgctatggtgtctgtagaacgtttggcaacacacaggcactagtttgggatgcattctggaaacggtacaagttgccggacgatggatcatatgatatgaacgctcgttacgtgtttgagtataacgcgaacgatgtcgttgcagatgcaatgtactatgcacgaattcaggctataaaggcatggtacagagcaaatgctgatgatcgaccgatgccaaataccaaggccgagtggtcatcaatttacttgacggaggagcaatacctagaggtgtcggtgccgtggatggccacccgatcggagggttatcgggcattgtgcagatggtgggcttcccctgagtttcgtgccatttccgaaaggaacaggggaaaccgtgggactgagtcgttccacaactacggcggtgatggtcatgtgcgcttggctaagcgaatggaagtcaaatccggtcgtacgcccacggatgtggaggtgtatatgcaagggcataggggttctgatcctcagaatcctgatgtgttatgcactcagacggccaccgaccgtctagcttcgtatgggcaggagatggttcaacgccatggggaggagtacgattggaggagccagccaatcgaccctcaggcagcatatgctagcgcaggaggacaagcccatggacggttgggtatttttgattctacgattgattccagagagctgagacgccgtggacgacaatccacatcgtcgtcttcacagtcgtcccgttcacgatcagcagcccatgagatagagcttgcagtgttgcgtcaacaggcagagtaccatcaatcagtcttgagggaacaattggagtaccagaggcaacaatctgaataccagagacaacaagccgagtaccagaagaagagggacgagtattatgcaagcctccaggcccaaaatcaagctcttctctcgcaactagcccaacaagcgggcgtcccgatgccgacatatgggatgccgcctccggactttgcactgccaatgccaatgttggcgcctccaccaccgcctccgcctccgtcacaattccctatgggatttcagacaccacccgcttcagttgccgcacctggagatgggtctggtcaggacgacccaacacattcgtgggtgaacaatcttttcagcacgcatagtccagccggaggaggtggcgatggatatgagtgattgatggaaaacacgcaacctctcagtttcgtcgtctacggacatgaagataaggttcgaaatgagtgatcttggattaacgctttgtttttacctgggaattggggacttggggtatgcaaggaagatctatctttggaacgtgctagcatggagtcctacaatcttttccacactcccatggaagctcgctcgtctaaagctgtcgaaaactagaacatcgatagctgtggacaccactgaataccagggcatcgttggctgcctgtctctgcactggaaagacaaaacggaacaaacaaacaaaactaaaggaacaattaactttggatgccactactacaagctcgccgggatagagaagaagattatcgggtacagggatgaagacatgggtggtgatcttgattcaagagggagcaccatggatattctgttcttcctcggcacctgtccgaagaactccatcgaagaaaagttgagtcttagcaaaagcctaaggagactccgtagttcagcaggacatggatcagacctccacagcaggatccagcacagcatgagcgtgctcaactccaggtgcacaacatcgcaaaaccagcagcaaccaggagagaaccccccttgtcgtcaagactatcccccgcaacaaggccacggtggcaacgtgaccagaggaaaggggacatttccacttggcaagatagagctccccctcttcatcggcacaaaccccaacacaagatcagagcatgtgaccttcgacatagtcgacatgaaactccgtaaaatgtcggacgagaaaactgaagcagttagggccgaagtccacacactgctcaaagccaagtttatcgaacgagtcgactaccccacatggctcgccaacatagtcatggtcaaaaagaaaagtggcaaatggcgaatgtgcatagatttcactagcctcaataaagcatgtcccaaagacaatttacccctccttagaatcgacaagattatcgattcaacagtaggctgtcaggtcatttcactcctggattgtttctcaggataccaccagatatatatgaaggaggataaagcgaagacaagctttataacacccttcggcacatactgctttgtgcatatgcccgaaggcctcaagaatgtcggctccactttttcatgcctaacaaagccactgcttgaagagcagttgggccgtaatgttttcacttacgtcgacaacattgtcgtctcaagcaaaaacaaggaagaccacattgctgacctcgtcaaaacgtttgcaagaatgtgcgaagcaaggcgtcacctaaatccagaaaaatgcatcttcggtaatcgccagggaaaaatcttgggctaccttgtatcccatagaggcatcgaggccaaccccaccaaagtcaaagcaataatggacatgcagcctccgcaaacagcaaaagacatccaaaggctcacaggaaggctggtcctcaacaactccaaatgcaatatgacagaaatggagaaaatagcatacgctgtgctcatggcatcacgaaagctgcgtcactactttgaagcgcacaagataagagaggcaacagaccgaagcctcaacgatctattcaacaacccagaagctacaaccaggataggcaagtgggtagcagaactctcagggtacaatatagtcgtcgagtcgagaaattcaatgaagtcacaatcttcatttttcagataa

SEQ ID NO: 49327 - DNA, 615 bp, Zea mays
  Clone ID: MRT4577_144991C.1
acgcccaccagagttttccccatccccctcccaatccccctctcccaagcaaaccgatctccggcgaatcggaaggcgagagatccggccgcgatggcgctggagtgggtggtgctcgggtacgcggcgggcgcggaggccatcatgctgctgctgctgacgctgccggggctcgacgcgctccggcgcgggatgatctccgtcgtgcgcagcgcgctcaagccgatgatgtcggtggtgcccttctgcctcttcctgctcatggacatctactggaagtacgagatgcggcccacctgcgacgacgagcacgcctgcaccccctccgagcacctccgccaccagaagtccatcatgaagtcccagcgcaacgccctcctcatcgccgccgcgctgctcctctactggatcctcttctccgtcacctccctcgtcgtcaagctcgaccacctccagcagcgcgtcgacaagctcaagaagcgcgacgactgatcccctccccatcgcgtcacggccccggccgacggtgtcgttgcttcgtcttcccccgcgtttatgttcctcctagatacaccctgtgatgcatgtgttccgtgttcttcttcctttgtagtg

SEQ ID NO: 49328 - DNA, 1312 bp, Zea mays
  Clone ID: MRT4577_144992C.1
gaacaggtctaccgtacacccatgtgtcagccactggacactgggttcctcaaacgtgtcgtctgcgtcactgccaatcaaacttggcactgcctacgccgcgtccaccaagagcctctcatagccttccttcaatccgccggccgggccttaggcccatagacccatcccacgcaacaccttagcgacccaccgccctcctctccgctcccctcggtaaagccgaaatccctcccccacatcgcacggcgtacccgatctccaaatcgccccccccaaaccctcttcttcccccttcccgtgctcgacccagatcgagggctcgatccgtcggccatggcgctggagtgggtggtgctgggctacgcggcgggcgcggaggcgatcatgctgctgctgctgacgctgccggggctcgacggcctgcgccggggcatgatctccgtggtgcggagcgcgctgaagcccatgatgtcggtggtgcccttctgcctcttcctgctcatggacatctactggaagtacgagacgcgccccacctgcgacgacgagcacgcctgcaccccctccgagcacctccgccaccagaagtccatcatgaagtcgcagcggaacgcgctcctcatcgccgccgcgctgctcctctactggatcctcttctccgtcacccagctcgtcgtcaggctcgagcagatgcagcagcgcgtcgacaagctcaggaagcgcgacgactgatggatccgcatccatccggtgggctcgttcttcctctgcctgccttgtgttcctgctttatgttgtggtgctgatgttttagatctcggatcgtaatttgagacctgctggtagcatttgcttcctttgccttgccgtcttcagataaaaaagaacagcgctcttggaaacgatgataatgtttaggatgtttggacgaatggtatctgtcgtaattgatgtcttcatccatgaattggttggtgtcactcaatgtacactgagatattggttaatagctactagtgctgtttttatcatgtgattatgcccatgctgtaatgagttagttcttgtttgtaataagatgacattagaggtcggattttatatcttgccttggtagcatatgcttcctttgccttaccgtcttaagataaaaaaaaacagcgctcttggaaacgatgatatgtttagaatgtttggacgaatggtatcctgtcgtaattgatgtcttcatccatgacttggttacttggttggtgtcactgaatgtacactgagatattggttaatagctactagtgctgtttttatc

SEQ ID NO: 49329 - DNA, 297 bp, Zea mays
  Clone ID: MRT4577_144993C.1
aacttgtggggggtataacaccaattccagaaggcctcaagtgctaccctggacttattccataagggcacggacggaaactacttactgtttcttccatcctgctataagaggaaacacctctggaacaacattctcaaaaaacaagcaaacaacaaaattggcataaagtctgtatagaatccgcgggaaaacctctccaggccgtccttgcactcttgcatagacctcttcgacttggctccctgggttgaaccaatggcacctacgctggccttgacttgtgcagaaacctcg

SEQ ID NO: 49330 - DNA, 1453 bp, Zea mays
  Clone ID: MRT4577_144994C.1
tctaaacgaaaggaacaacaaaacttcattttcttggatgtgcgctgtgttcaggatttcagattgttcaacggagaacctccacgcgtcgtgagagcgcgagctctgaccgaagatctcagtggtcggcaccaaatttcgcgtgcacacctgcgcagccggcccttcccgtacgcccatgactcagccaccgcgttcctcgacgcgtcgtccgtgtagcatccatagagacccgtcccacgcaaacacctcagcgatccaccgccctccctcttcgctaaagccgtaatccgaaatcccgcccccagacccagattgcacgacgcaaccgatccccaaatccccaaatcttcccagttcccccctcccgctcgacccagatcgaggcctcgatccaccggccatggcgctggagtgggtggtgctgggctacgcggcgggcgcggaggcggtcatgctgctgctgctgacgctgccggggctcgacggcctgcgccggggcatggtctccgtggtgcggagcgcgctcaagcccatgatgtccgtggtgcccttctgcctcttcctgctcatggacatctactggaagtacgagacgcggcccacctgcgacgacgagcacgcctgcaccccctccgagcacctccgccaccagaagtccgtcatgaagtcgcagcgcaacgcgctcctcatcgccgccgcgctcctcctctactggatcctcttctccgtcacccagctcgtcgtcaggctcgaccagatgcagcagcgcgtcgacaagctcaagaagcgcgacgactgatggggctcgcgttcgcgccttccccgcgtccacccggtggtctcgttcttccctctgcctcgtactttctgtttttttttttccatgttggagtgcggatgtcttagatctcgatcgtaatttgaggcatggtgcttccttttgcccttaccgtcttcagataaaaagaacaacgctctttgaaatgatgatatatttttgtaggatgtttggacagatgggtatcgtaattgatgtgttcaccaatgaattgattggtttcactcaaattaaactgaaagatgggtcacaatagctagttcaatcgtgaaaaaaaaaaaaaaaagtcgagatacaaaaaaaaaattggttattagctactagtgctgttttgatgatgtgactgagcttatgttgtaatgagctagttcttgttcagaataagctgacattaggggccggattttatatcttttgtataaaaaatgagctccaacttggaagctagtcgtgtagctgttctagttctagactgagatgctcatctagtgatcaggtgacatgaatgaatggatagtcacgtttgctgtaatactgttctatcttctagactggaatgcttatataggtgattcaagtcaaaaaaaaaaaaaaaaaaaaaaaaaaaaaaaa

SEQ ID NO: 49331 - DNA, 481 bp, Zea mays
  unsure (1)..(481): unsure at all n locations
  Clone ID: MRT4577_144995C.1
aaaagaataaaggttttacaggagggaagatagaggggtaaaagtgggaaacagttacataaaaagggacatgggaaataaggggggggggggggaagatagaggggtattaaaattaggggcctttattttncctttattttaaaatagggggggggaggnnttggggggtttttggaaaaaaaaaaaggtatataaaaagggacaggggttaaagattccnaagggatcgaaggatataattttaatggggaaaggggaaaaaggttatttgaaaaaaaggtggttgggaaaattattaagagagttttaagaggggggaagggtntgntggggggtgntttaaattggggagggaggaattaaaggggtaatttttggatttggtttaaaaagggtttgagggatacaaattgggcctgtntttttgggagaaaaaggggggaagaggggggtttaaaattttaaaagggggttggtt

SEQ ID NO: 49332 - DNA, 578 bp, Zea mays
  unsure (1)..(578): unsure at all n locations
  Clone ID: MRT4577_144996C.1
gcacaagaagcacgaacaatggatggcaaaaagacgngcgtgacaatgctcctggctcttcgtgcgagggccgatactgggaccatgaggccaaggctcaccagccgagaacaacttcccttgttccacaggacctgtgaccagagaaggatgaggtatgggaaaacccttgggggggccgtacagcatccaacaggcaaagacaactagcatctaaactttatcaagcttgatcctccaacaatcatcaggcctataacaacagttacctttggtgcatgcatgggcacaaaacatcagggcacaacaactacaacaacttgggctagagaacctagctgcctactctcagcaacagnagttttttacattcaaccaactaggaacattgaactatgtattttatttgcaacaacaacaactaccattcaggcagctacctgttgactacccccaggaatttcttccattcaaccaactagcagcattgaactctcctggttatatacaggagtaacaacttctaccattcagccagattgctggagagagccctgctaactttttgacacaaccac

SEQ ID NO: 49333 - DNA, 300 bp, Zea mays
  Clone ID: MRT4577_144997C.1
tcgacccacgcgtacggcacgccatggcctccctcgcctctgccgccgtcactgccccttccttcgccgaaccattcccagcccgcgccgtggtcataaggatgtcattcaacgtgagcgcctcacttggcatcgccattggtaccatcaccgttccaacgcgcgacacatcactattagccagcagtgacacggcctacgacgttctgcttgtctcacattatagacgtctcgtcgtcaaacacagcatgacaatttccaggtttgttacactatcacattcagtcccatggctcgcat

SEQ ID NO: 49334 - DNA, 323 bp, Zea mays
  Clone ID: MRT4577_144998C.1
cttcaaatgcgctaattatatcacaaggctcacttggtcccagcgccgttattccagagttcctgccaccagacactccaatgggcttctaacagatagctgagcagaccaacatgcagcaacaagcgcttggggggagcatcttacagcaactaattgtccaattgcaacagcagtggttgccacatgtgaaaatacaaagtcatctacaactgcaacgatcggcaacaggtctctaccaggctgtgccacctatccatcgtgaaccctgccacctacttgcaagatcatgtggttgcgttctacccacttgctatggggaa

SEQ ID NO: 49335 - DNA, 368 bp, Zea mays
  Clone ID: MRT4577_144999C.1
ctcgaggccggccgggctgccgcacacggcacatctcagcgcctcgcctccaccagtccacctccacaacgtcaccttcacctcctcgccgccaccccgtgagccggcaacctcccaccatctagcctctgcgcccgcccggccaccgggcactggccacgtccggccgacggccgcctaaggcagtgaggcctgaccacgccctcccttctccactttgtgtctgtgcccggtcttggattcgtggttgtctccgccactgatctcctcctagcacggcagcaccccagagccctagcgcaagcctgacgctccagatctccaccctgaccatgtcggggcggagacaggcctggcagtttgcggcc

SEQ ID NO: 49336 - DNA, 301 bp, Zea mays
  Clone ID: MRT4577_14499C.1
acgggaggggcggtcatgtgattggggacaaaaaacacaatcattccttgtcgggggaacaatagtttacataatggtccaaacggaaaaccagcgtgcgctaacttgcattcggacacctaaagggcaccggcggggcgcttcttaccttgccggggacaaagatggggggttgagcccaaccgttgcttttcacggggtccccaattggtccaaggagggtttatataggtccctttccggtgaccacggcctgtgcaaaaaatccatacatggaaaacttggcggggctgcctggctt

SEQ ID NO: 49337 - DNA, 718 bp, Zea mays
  Clone ID: MRT4577_1449C.1
gggcccggggatcggcgcattaccggactttctgggtaactgattcccattatttaacagcaaccgggccggcgatcgccatatttaccaacccgaccaaacaaggctatgacgacggactgggcgaaaaaatcattggcacgtttggcaactgtgctgggggaacaaccccctgggggacagtgttaagcgcagaggaaaatttccaaagccaggttccagaagcagtctatgccgatggctccgccgtagatccggcccaatgtccgcttaaaataagtaccaacgggttgagtggccaaggcaatgtgtttggcttggcgggcaataaatatggctggatggtagaaattgacccggccaatgccaacgattacggcgtcaaacatacggcccttggacgctttcgccatgaagctgtggcggtgcgggcaacagcgaatcaacccttggcggtgtattcgggctgtgatcgcactagtgggcatctctacaaatttgtgtcagcagatactgtcaaatcccccaccgataaaggcaattcccgtttatttactgccggaacgctctatggggcgaaatttaacgccgatggtaccggggaatggattgccttaacccctgataccgtagtaaatcctgttcgtcctagcgatattgctgttgatagttctactaccggaattgtctatttgccccatccagaccggaaccaggc

SEQ ID NO: 49338 - DNA, 708 bp, Zea mays
  unsure (1)..(708): unsure at all n locations
  Clone ID: MRT4577_144C.1
gggtacctcgaggccggccgcggctgacgtccggtgtgcggtgtgccgcacgttgcgggcttgcggcggctgcctgccagtgccgagcggcggtggcccggtgcactgcatgcggccaggcgccgaatggggggcagctggtgcatgctgagtcaccgctcgtcggctcggttcggtatgggggaaactccggccggcgcgcacttccacggcgccgcgaccacgcgtcattttggttggtaaccgactaaccgtacaccgtagctcggcgcatgtcatgtactacgtactactacctggtactggtaaagtggtaatagagtggtcgctgcagcaggtagaaacctgcggtctgtcagtgaagagttgtctccatcagcattctctaaattttatcatcttgaaagaaacaactgccatcatgcggcaacggcgtgacgtgtggacaaaggggacgagcgctggagaagaattttggcctgatggctgacacgcccttgaaaatcactatcagtggcgaactgacgatgcaggactgcctacctcttgctttctaactctgtttagtttcggatccgtagagaaaaacaccgcccttatgcttgtgccttcatttctgatggacaactggaaccaaacgtatgagcaaacatctcgttgggtgctacccaacctattttctctaaaaaaaaaaaaaaaaaagcggnc

SEQ ID NO: 49339 - DNA, 587 bp, Zea mays
  Clone ID: MRT4577_145000C.1
gcgacggtaaataaattaatcgataaaaatattagtgtacaacgattataaaattataaggtgtcatgagatagcagatagtgtcagccgagatagatatagtgaaggctaccatgggacaatatagttcatgcattgaaagctggcatcgggcaacaaaactctgcagcaagcgctatgtatgtttcacttgtcacttcatttcgttttaactccaaggtgctgcaacaacaacgactcttcgttttcacgtgaaccacgaatcatacaaggtgtagttccacacaccaaaaggtggtatttaccaaccttagtccggttaaacattgtatagaaggtagcaatttcataccctgattaattttagcaatctagctacctggttcatcagagacagacaagtgtaggaggaaaggaaatttcagggacctcctcactcagtaggcggtgtaccacaagtagttggacttgtcccacgtcatgtcgagctgctccacaaatccatccttggtgaaggtgcagtttctaagacctgatagtatatcttctcgtagttcctgctggaatggggatcgtggggtcgctag

SEQ ID NO: 49340 - DNA, 205 bp, Zea mays
  Clone ID: MRT4577_145001C.1
gccgccggggacatccaatacacacgcgtcctcttactctcctatctccgccaccccgattgccccccctccccccagttcttctctcatttctcacccgcgcgcgccggtacccacctttcgatacaccatagaggcagggaccccgataccatgcggcacggccgaaatccatttcggaaacgcatgctgctacctgcaccgc

SEQ ID NO: 49341 - DNA, 285 bp, Zea mays
  Clone ID: MRT4577_145002C.1
attcggctcgagctcaaaagaagcccgctctttttctactccgccctgagtacttcaatgttgagaaaatgggcgcgagcatggagctccagaaccgtctaacatactgtgctaagctccaacttctgttgctcggtagtatactaaattaaacagggcgtatagaactgatccttaacaacaggcgtctgtacatggatctagggagtgatggagaccattattgatgccatgcaggtaaggtgccttatacatccgccgcaaagaggaaggagaggttgttaa

SEQ ID NO: 49342 - DNA, 278 bp, Zea mays
  Clone ID: MRT4577_145003C.1
gaaccagaaaatactttatttctaggatacatggtttgcgtagttaatgctcttaattcagctgactataattcaaagtcttaactcatggaagatcatgtatgttttttataattcataagcaattcactcggttagtataaaatataattcactgttttctcttatggtattattttttagaatatactagattttgttatctataattatgtgtaaaattcaaactagtaaataggtcttttgatttttccattggtatatgatatagttaatat

SEQ ID NO: 49343 - DNA, 255 bp, Zea mays
  Clone ID: MRT4577_145004C.1
acacctgtcgcccacgaccagccccaccgataccgccgggttgaggtgacaaccgctgatgtgcccgatggcgaccgccatggtcagtaccgtgagcccgaaggccagggccacccccaacaacccgatgccgactgcgggaaacgccgcggccaacaccgcactcccgcaaccgcccagcaccagccaaaacgtacctaaaccttctgtgactgaacgcttgaacaaagacatgtacccgtccttgatagatcg

SEQ ID NO: 49344 - DNA, 238 bp, Zea mays
  unsure (1)..(238): unsure at all n locations
  Clone ID: MRT4577_145005C.1
cccacgcgnccganggaanngaaggcccagagaacagcccgcaacgacaagagcaaggaagcgagcaaagcgggggaggcgacaaaaaagncaggaccgagggacaaagaagaagagaaccagcacacacgaccgccagggacgggcaaccccggggagaagcggaccagcgaagaagcngagaagaggaggaagagggaagagacaacgcacaagagagngannggccaagaagagg

SEQ ID NO: 49345 - DNA, 1009 bp, Zea mays
  Clone ID: MRT4577_145006C.1
ccacgcgtccgaccgaacaaacaggccagcgctctgtaccggcgtttctcctcctgtctcctccccgctcgcgctgtcgcttcgccgcttcagatccaaacccgcgtattaaaaagcgctccaagcgaccaaaaccctaaccctaatcaccgcaattccccaatcatcggccccgcgcaaaaccctagcccagcgccacctacccgtccctctcgccgccgccgacatggcaggctcatccggcggcgcagcctcctcttcctcctcccgtggcgtgccggagaacaggttctataatcctccccacgtacgacgccagcagcagcagcaggggcaacggccgttgcggcccgcatcaccgtcgccctcgccgcggccggtgcggcagaagccccctccgccggcggcggccgttgccgcgtcggcggatgtggacatccgggtggattccgacgactcttcgtcgacgacctcgtccaagccatcggtggcgtccaccgcggctactgcagcagcgggtgaggtgaatgtggccgtggcggaggcggaggctgggaatttggagaggttcctcgcctccacgacgccctctgtgaccgctcagttcttgcccatgtcaagcctaaggatgcggcgaggtggtgatgctatggattcacgaccttatttctgcctgggagatctttgggaatcattcagggaatggagtgcttatgggccggttgagttccacttgtgctaaatggcagtgactctgtgattcagtattatgtgccatatctttctgctatccaactatttgcagatccatcgagacctgcttcaagaaacaggtatttttctcgcttaaggcgtcctggggatgaaagtgatggggactctatggatactagcagtgagagcagcattgagaatgacgttgagcggctaagagtctcatcatcactggaaagtacacatcgactggaaaatggtggcatacgaagtgatgatggtgaaggcgatgcat

SEQ ID NO: 49346 - DNA, 1555 bp, Zea mays
  Clone ID: MRT4577_145007C.1
cattgggtacctcgaggccggccgggaaaccttcataccgcgattcctcaatccccggcatcgcgcaaaaccctagcccagccccaccgccacatacccgcccctctcgccgctgccgacatggcaggcccatccggcgccgcggcctcctcctccacttctcgtggcgtgccggagaaccggttctacaaccctcctcacgtacgtcgacagcagcagcaggagcaacagcggttgcggtccgcgtccccgtccccgtcaccgtcgccgtcgccgcggtcggcacggcagaagcccccgccgccgccgggggccctggcctcggcggcggatgtggacagtcgggtggattctgacgactcctcgtcgacgacctcgtccaagccgtcggtggcgtccacggcggcggggaatttggagaggtttctcacctccacgacgccttccgtgaccgcgcagtacttgcccatttccactgcagtcaagcctaaggatgcggcgaggtggtgatgctatggattcacgaccttatttctgcctgggagatctttgggaatcattcagggaatggagtgcttatggggccggtgttccacttgtgctaaatggcagtgactctgtgattcagtattatgtgccatatctttctgctatccaactatttgcagatccatcaagacctgcttcaagaaacaggcgtcctggggatgaaagtgatggggactctatggatactagcagtgagagcagcattgagaatgacgttgagcggctaagagtctcatcatcactggaaggtaaacatcgactggaaaatggtggcatacgaagtgatgatggtgaaggcgatgcatcttcaagttttccaatatttcagtatatggagagggatcctccatatggtagagagcctctgacagacaaggtatcaactcttgcacacagatttccagctctgaagacattcaaaagctgtgatcttctgccatcgagctggatgtctgttgcatgactttctcatgcatgcagttattgtgaccctcctacgccagcatgccctggctttgggggaattaaccgcggcacgactgcagctgggaaactatctttgcctatctttgggctggcaccttacaaattacgtgcctccatttggacatctgacaaaacccaagaacgggacctcgtcacctctctgatgcaggaggctgacagctggctccgcagaatacaagtagaccatccggatttccggtttttcgtatcccatttcagtacaacgtggagatgacccgtggctgtaaatggttcatttagtatgaatatggcatagagacacctgagtgcccttttgtaacgggggggaatgtatgagttataagcctgcgtgcataactttttctcttgtctccagtaagctgtatcttttgtaggtttgttttgttgtggggtgaaagtaaagatggatggtggaaaaagcaaaattggaggcattgtggaactgaagtgaaatatggggaaaaaagaataaagatttccagttattagagttgag

SEQ ID NO: 49347 - DNA, 205 bp, Zea mays
  Clone ID: MRT4577_145008C.1
aaaacgggcggaacaaggggggggatcaaaacaactcgcactgggggccacccatacatttttaaaagagccctcccgcccagtttatatataaatcgatactgggggctgctccgggaaaaacaggtagttttattttattttttcccggggttaaaaactcgggcaggggggggaacgaacgtgtacgttggggaggtttatt

SEQ ID NO: 49348 - DNA, 264 bp, Zea mays
  Clone ID: MRT4577_145009C.1
tggtcgcgtgggcacagagcggtgaccaggggcactatgaagatctgacgggactggatcagcatgctggacctgcgggtggacatggagacgcgcaccctactgtacgcgggcgcaacgtgcggccatgaggcgtgtgccactgatactagagagttcaagcgggatgtcagcatgcctgaaagtgagcccaaggatgatctgagggatgcatggactgatcctagactgccgaagtacacacagcaatctgtgatacatacg

SEQ ID NO: 49349 - DNA, 456 bp, Zea mays
  Clone ID: MRT4577_14500C.1
ggccgcttttttttttttttttttgtttttttttttttttttttttttttgtttttttttttgtttttcaaactcccatgaaccttttttgagcactaatacggtctgcacaattgggcacgtgttacaaattccgccttgcctccctgggtttttttaataaaaaggggactttgtacatgctgagctattttgttggggggtaaactgataatacagaagaacgaagctctctaggttttagttccttctttcttggtatagaagagaataaccggcccggctgataagggcttagttctgaaactacaacgggatttcattacaagcggccggaggggcaaacataggagaggggtggtgtgtacctaacgacttgtttgcgtctgatgtctaaaggtctcgaaggagacaggatatgcttttgcacacctgtttaacagacacctgggcaag

SEQ ID NO: 49350 - DNA, 243 bp, Zea mays
  Clone ID: MRT4577_145010C.1
attgttgctttgttcgggcccagaaaataactttgggaaaactggggtcccaaacccacaaaaccagtatcttgcctgactggctgtttgccaccaaaaaaattaaccggccccccccgcccggaaaatgaacacctctcaaccccggaggttagaaccgttggaaaaatgggttcacaaacaaaatggcgccaacccagggggaaagcgggcttgcctccactggtttttcaagggggggaa

SEQ ID NO: 49351 - DNA, 186 bp, Zea mays
  unsure (1)..(186): unsure at all n locations
  Clone ID: MRT4577_145011C.1
cgcttagcttccgctctctcctctttcttctgaggggtggcccctctcgcttggaacttcattattacgtctccatcntcttccctctcgttttctctctactcatggtgggcggctgcactaccgtggcgggattcggctaagcatgtcgattaactggcagctcttgctgttgttgtccgaagg

SEQ ID NO: 49352 - DNA, 472 bp, Zea mays
  unsure (1)..(472): unsure at all n locations
  Clone ID: MRT4577_145012C.1
cccagcgtccgcggncgcgtgggcggacgcgtggggccgcccttttttttttttttgttaaaaaaagagggatttctgctgtccctcaaggaaggcagattttctattcatgtatggcacacaatatgcgcactacttgcctataacctctagtgtcccccggaaggatttatttgccctggtggttggaaagtgctacataatactattacggtttgatgccatcctgaggcagcatcaaggtgcgcgagccagttgcttcctgaaatatgggaatggttttaaataaggaaccgttctatgtctgcacaagcggttatttgcgacatagaactgatgttgtatgattgggtactgctttgnaagacttaaaaacactgggcttgatttggacttttatgtgttcattgtaactggtgtgccatatgtggtgagagtgttgcacataacatgtttggtgtttatttggaca

SEQ ID NO: 49353 - DNA, 311 bp, Zea mays
  Clone ID: MRT4577_145013C.1
actcatcaagcgttgggggccaatttgaaatcctttattatggtttcatgattaagtgagactaagggatacaggatcacatacacgttttgcagacaccaacttataagggcaaaacataaagaacagtaaacctgtctgaaaaatggtaaactcactagaacgacagaattaggtctccaaagatggcctgaaatttccagacccctttatgtcttccaattatgaatacccatacttgaagccctttagaatcaccaatatgtatttaaatcgtaatacgatttttcacagccatattggtataccct

SEQ ID NO: 49354 - DNA, 609 bp, Zea mays
  Clone ID: MRT4577_145014C.1
cccacgcgtgcgcggacgcgtgggccgtcacatgagacatggaagagtacctggtcaaggccctggacaatgttggcacacatgtcgacacactggcctacctgttcacagagctatcctaagagctagcatcactaataacaaccgtagagtgctaggaccaatgcgtgcaccactgagagacatcctcggacacatacagcctcaagcaacgcctgatgatggaggctgtcatgaggaactgtaaacataaccttgtcccttatgtgggaccactatgcagtgcaacaccttatttgatgcccaagctgatgctcatgcggaccctgctccgaagccttcgtcttggccttggtctctagaatggactctggattgcgataagaattccaaaaccagttgaccaaatcagtcacaaaatgacttaggagaagcattaactactaaagcttctactagtggtttccgacttgtcggtcaggtattatgtgcagaatccttggccagtactgtgcatagcaacgtacccagcaacgtatatcggcagggacattgtgagagatcagctgacggaccagcacttgacatgattcatgtctttggacaacc

SEQ ID NO: 49355 - DNA, 381 bp, Zea mays
  Clone ID: MRT4577_145015C.1
tgatggacaccactaataggggaaatctatgtgatggtggcgcataatactatcatcaaaatcaaattaaccgtgctcgattaaaggaagtccagctataacagatctcttacataacaacttgtagaccatgctgttcttgcaactgcttatgcgtgagggaaacatcaaaaccttgttggggcctactaaaaagccctggaatctcactctcgctgaagtaacgcgtttgctctttctgctctggagctggcctgaacagagcccccttaaaaccgggaatttgtgtatcttttcttcattggttgcaaatgtcatcaagcggtatacaatcacatctttgttctggccaattcggttagcacgatctacgctttgatt

SEQ ID NO: 49356 - DNA, 824 bp, Zea mays
  Clone ID: MRT4577_145016C.1
aaaccttctcctgaaatcctctgaaagatatcttgtggataagaaagtgtctgaaagtagtgcacctcttgatgtggcagcgggggtacatggtgacggtatcatgagacgtgtggtatcattcacagctagaaaaacatctcggttacctgttgaagcaaatcataagtctgcgctggttaatctggatagaccgtgttctatgggcaaggagaaggagtccgttgccactatgagcgaatcctttgctcccacgaagaagttaaagataaaaggtccatctcaaagtaaatatcttcccatgaataccatttctacatctgtattgcatagcaaggaaaaattgaagcatgaagaggcttcccacttggaagatgatgaagttttgaatgcaatagctgttgaagcaaatcataagtccccgctggttaatctcgatagaccatgttctatgggcaatgtgaaggagtctgttgtcactatgagcgaatcctttgctcccaggaagaagttaaagataaaaggtccagctcaaagtaaatatcttcccatgaataccatttctagcaaggaaaatttgaagcatgaagaggcttcccacttggaagatgatgaagttttgaatgcaatagctgttcatgaaggaaagcttgagatgtacctcaatgatccctcatggcgtcacatgcaacatggtggtcagaccgctgatgctcggagcaaagccagatgatttgcagaaaggtttcagtttatatgcaggactatccgttcagctgtggaacaaagttcactgaagagccgaaaaaatgatcttgccgctg

SEQ ID NO: 49357 - DNA, 802 bp, Zea mays
  Clone ID: MRT4577_145017C.1
gccggcctgtccgggaggctttcagttccagccccacctcgcctcgcttctcccctccccttcccaaaccctacaccccgggccttcgccgtccccgactcaccgccgggcgccggccacccccatagcgcagcgccggcgccgaactgaactcttccgtgcggtcggccgcgcgtacggccacccccctcggcgccgcccgccgcctttgatgtctcccacctgcgacctcggcttcctttggccccggtcgcagaagagcccccaagaggtctcccgagcggccgcttccggagcccagcgattggcctccccacggcagccgaaatgagcggcggcgagaagatgttgctgtttgggtcctttacggaggacgagactaagttgtttcagggtcagcctctcaaaagtccaaataaaagcgtcaacaaagaatgtgaacggacggagatccagtttggcaccctgaacttttcagtgctgagtttagagaaggtatctacttcaagtgttgttcttcctgcaaaatcagcaaacagcgagaccagtgccatcgcaaaggagaatacatgcagtaatgaaaagaaagctgcaggatcaagccttccaaatggcggatccattctggctaatggatgcccccctgttaatgttcctgccaacaatggtttatttgagaatgtgaagaagacagaggctgttgtcccaccagttgtgcctgttaaaagcatcagcatttcaacaccacaaatgacattggaggtgcataacaatggcaccgaaccgactcaaagcagaaagt

SEQ ID NO: 49358 - DNA, 210 bp, Zea mays
  unsure (1)..(210): unsure at all n locations
  Clone ID: MRT4577_145018C.1
ctccatctcgnccgtcgctcaccgggnaagctacgctacgacgaagctggcgtccgtcaccgcccgcgccccggtcgcggccctgcgcccgtcggcgtctctcaagtcgtcgtcgtcgtcggcggcggccttccttggccactctagccgtcttgtccgcactgttaccgtgtcgtcgactaggcgcagcctaaaggcggtggccaaggg

SEQ ID NO: 49359 - DNA, 480 bp, Zea mays
  unsure (1)..(480): unsure at all n locations
  Clone ID: MRT4577_145019C.1
gtcagtgtgagcaatgacctgaatgaacaattgaaatgaaaagaaaaaagtattgttccaaaaaaaaaaaaaaaaaaaaaaaaaaaaaaaaaaaaaaaaaaaaaaaaaaaaaaaaaaaaaaaaaaaaaaaaaaaaaaaaaaaaaataaaaaaattttttactttnaaccaaaaaaaccttaagggcaaattttgaaaatatccatcaaattgggggccgttcaaacataaatttaaagggcccaatttgccctataggaagtcgtataaaaattaattggccgttgtttaaaaacgtcgtaactgaaaaaaccttggctttcccaaatttaatccccttggaaaaaatcccctttttcccagttggctaaaaaacaaaaaggcccgaaccaatcgcctttccaaacagttgcccaacctaaatggaaaatggacccccccttaaccggcccattaaacccggcggttgtgtgggtaaacc

SEQ ID NO: 49360 - DNA, 667 bp, Zea mays
  Clone ID: MRT4577_14501C.1
gccggccgggccgggatccatcacaccatccccttttgctgaaatctttccctgaatgcgcctatcccacaatgcccagctcgctccatccaaatctgggcacccgctcactcgcggtcctcccgctagccaccgacgcccaccgagtggctcagaagatgtctcccttttcagcaagaaccctgtccaaaagcccaagcccgatgtgcaatcgtcctcttctccatacatccgcgacgagctcgtcaagtgacatgcacctgacaggaggatctacctgccggatggcctgctggaccgatcggaggagacgaagtacctcaccgaacaggaccctggagactatggttacgacccttttggcctgcgacaataagccacatgacttcttcaagcaccatgcctacgagctgatccatggcatatgggccatgctcggggccgctgaagctgccatcccatatgtctgcaacaatgacggagctaactgtggcccagaggctgtctgcttcaagaccggcgcgactgctcctggacgataacaccctcaactacttcagcaacagaatccccatcaacctggtggtggacgcgatcgagcacgatcatcctcgtcagaggcggcgagtactaccggatcaccaacggactggaccttgaggacaag

SEQ ID NO: 49361 - DNA, 304 bp, Zea mays
  Clone ID: MRT4577_145020C.1
gtacgacaggcgcggagataggaaatatcgcacaacagcaagggatgaaaacggaagtgcaagagggaagaagcagagctaggacgcgagcgaaaacgaaacatggagaaggggcacgacaggccaaacgacaaagaaaggcgacatagggacaaggaaagaaagcggagaacacagaggagaggagggggaggagcacagccggcggactgtcgaatacaagaacgagacgggagcccgccgcgcccgacgggacaccatggacaccatgaagcataaggaggagagtggaagcaaggacgac

SEQ ID NO: 49362 - DNA, 519 bp, Zea mays
  Clone ID: MRT4577_145021C.1
gattcacgctttcaacaccatcttccattagtttttacatctctaacaccagcatactgttactacgtcgccagaaacatggatagcagcgaaaacccctcactcagtattcaaaggaacttgaaccttactcacgatatcataacactgaccattgatggaaccatgcctagcacacacacacttcatacacatgctgcttacatggcaggttactcacttagaacttgcacgggtccgaatatcgcttctgcctgggccatcttgaaggcgctgcagcctacaaggtggaggactacgacgaccacggcttctacgacaagagcgactgtggccttgtgccactggccccggcgctcctccaggaggccccacttgccagactggcacccttatcacagctgcccccggtcagtggtacgcagacccggagaccgcgtgcgccgtctgtgcatgccctcggtgcgttaccacacacgctccactaccttagctgaaaccgactaccggcacaggggt

SEQ ID NO: 49363 - DNA, 189 bp, Zea mays
  Clone ID: MRT4577_145022C.1
cgagaaattgtgcgggacatcaaggtgacgcttgaatatctagctcttgactatgtgcaggagttggcgactgccaatatcacctcctgcgggttgtcaagagctatgagctgcctgatgggggggtgatcacgatcggcgcagagagattcacgtgcccggaggtcgtcttccatgcatccatgtttg

SEQ ID NO: 49364 - DNA, 159 bp, Zea mays
  unsure (1)..(159): unsure at all n locations
  Clone ID: MRT4577_145023C.1
gaaaagggacccgccccggagggggccattaaacccgggcggtgtggggtgtacgccccaagggaccccaacaattggccaagggcctaaaccccgctcccttgggtttcttccctccccttntcgcccaaaattggcggggtttccccgaggaagccc

SEQ ID NO: 49365 - DNA, 249 bp, Zea mays
  Clone ID: MRT4577_145024C.1
atggcttggcggctgcgggggagcgtcgcgtgggctacaaccctagggaagtgggcgctgcttcgaaccgaagccaactcacgcccgcttcgggcgttaagtggccgcacggcttcctgcggaagcgcgtcgtggagaagcggcgcgagaagcggcgcgtttggctccagcttctgcttctggcggccagaagccgcccagaagctgaaccaaacagccgcattgtccggccggcaaacaacagcgtag

SEQ ID NO: 49366 - DNA, 638 bp, Zea mays
  Clone ID: MRT4577_145025C.1
cggacgcgtgggttgtgaatgtcccaaatcagatgaccatgtttttcgcacttccggagactctataaggagggtgttcatacttcatatgctccagtacagtacaggaccacatagttacatacatcccacaacttttttattctgtatttgtgcttggagggacacgtgatagtactgctactcttaatgtgttgatctctcagccaccagacaccagacacgcagccggggttggccagcgccagccaccaggccgccgtggctccgacttccaacgtcgtgccccgcctggcaaccgaccgcatccaccgcctcctggctggctgggcagggtagacacaaaggtctcatccagtgctccactcctccgcatccttttctgctccgagacacctgctgaagctggaagtacatggtacaaggatgattactttaattgaattggtctgccactggctgctgccatccactgcgggctcgatcgccacgccgacgccatccccgtcctcgagcgcgccgtcacagtccggcacaagaatcgtatgctgacagcgagcctgaggccggtgcagccgacggcgacgactaccagcagctgcagcctgtcgagcccgactagaggggtgagtggtgct

SEQ ID NO: 49367 - DNA, 506 bp, Zea mays
  unsure (1)..(506): unsure at all n locations
  Clone ID: MRT4577_145026C.1
ttttttttttttttttttnnnnnnnnnnnnnnnnnnnnnnnnnnnnnnnnnnnnnnnnnnnnngcactggcngcaggcagtgtgccttgctaataaccctgcttcgaagaagtagtggcccggccgtgtcggtgcggcaggcgagtagccggtgccggtgccgccgggcgtcgccattattgccgtaggcggactattctctggccgggcgccggcccacggcggctggtacccttcgccgccgccagcgacgacgtgggccagagcccgcaccaacgtcgacgtctcgagagcctggtacgacgagtcaccggacaaggcaccgccggtcgtctccgctgccgcatcgtcaccgtcgtgctcctccgccggccagcagcctgctgattgccggcgcgcgtccgccatctcgatcttccgctcccaccacgcactacgtacggtcggcacggccgccctgggggctggggctgcaatgccgcgcgctactggtgggcgcacgtacg

SEQ ID NO: 49368 - DNA, 2054 bp, Zea mays
  Clone ID: MRT4577_145027C.1
gttgctagtactattggacaatatggtaatggtttcaagacgagtacaatgaggcttggtgctgatgttttggtcttctcccgtagtccgggaaaatcaggcaaaaggcctactcaaagcattggcatgctatcttatacatttcttaggagcactggcaaagaggacatcattgttcctatgattgattatgaatataaacaaggctgggaaagaatggtccggactacattggatgattggagcacaagcttccaaaccatcattacatggtctccatattcaactgaagcagaattacttgaacagtttagttctatgaaagatcgagggacacgaattattatttacaatctttgggaggatgaccaaggggacttggagcttgattttgatgctgaaatacatgatattcaactcagaggtggtaatcgtgatgagaaaaatatccagatggcaaatcagttcccaaactccaagcattacctcacatataggcattcattgagaagttatgcatcaattttgtatttgcgacttccgacttacttccaaatgattttgcgcggaaaagagattgtacaccatgatattgtgactgacatgatgttgaagaaagaggtcacctacaggcctgtggcacctaatggacatccgaaggattcaaatatggtagctgatgtaacaattgggtttgtaaaagatacaaaacatcacattgacgttcaaggatttaatgtataccacatgaaccgtttgataaagcctttctggagagtgtggactgctgctggaagtgcacctcgtggtgtcataggtgttcttgaggcaaacttcattgaacctgctcatgataagcaagactttgagcggacaacacttctagcaagacttgaagcacgattagttcaaatgcagaaggattactggtctgggaatgctcatcgaataggatatgttgcaccacgatttggcaggaatactgaggcaggagatggagaagactctcctgaaaacacagcaagtgcacaaccatcaccttatcattctggtaaagggtacacacatgcaaaagacttgagtaataatatcaaaaagggtggtaaggcaagcacatcatttggtattcagcaaagagctgagaagtccgcaaggactaaacgatctacgaagtcaatactgcacgggctgtctgatagtgataatagtgattctgagtttatgggcaccctgtcgaggtcaagatcgcacaccctgaagacaaaccgaaaattgtttcaaaatggcagtactggtttgataacacctcaatccagtggactgatagaaagagagagggtcagaactaaatcccagccattggacccaaaagcaacaagcaacggagatctacatactatggatgagtatcagtctgttatcatgcagttaagggatgaaaattcatcactaaaggaaagattatcaaagatggaagaatcgatgtcgcaagagctagtggttgagtgtgacaagaacaagtctttgacagagagggtggaggatctgcagagacaacttgagtctgcaaccaaggaacaggaggcgctgatcgacatcttctcagaagaaaggaaccgacgagaccaagaagaggagagcctgaggaagaagctgaaggacgcatcttccaccatacaggatttgctggagcaactgaatgctgccaggaaaggccgcaaagtttgaggaaataaactagtaacgttgctccttgcgggcatcatcttagattagagtttgagggttagctgcatctacattgtgctccaggtcgtttggagcatcccatgtacagccaagcagtagtgaccactgaagaacacgttatgctttatctgcagttagcagttaccctacaagaaataacttgcgtaattatctttttatcctgttacgtcatctcttgattacttgtcggtttctgtgctctggttgctgctgctttgggcttcgggaatacttgtactaccagttggccatggttggtttgaaaggttatgttactgcaagcc

SEQ ID NO: 49369 - DNA, 663 bp, Zea mays
  Clone ID: MRT4577_145028C.1
gcccctcctcgagttttttttttttttttttttttttttttttttttttttttttttttttttttttttttttttttggggggcaacgggaggtcctctggttcggaaccacaccttttttttacaaccacgtaatcgactccacggacttttccacaaaaaagcatttttttttttttacaaccacatcatcgagcccacggccttttcgactaaaaagcatgggaaaaaagtttaaaaggggaaaaacacaggcccggggagtaaccagcgcaattttttttttggaaacggggcccccgaaaagcaaaggcccccccagggggaggcaagctggggacaaaacccaggggcaaattccccaaggcccaggggacgggaaaaacaaaaggcaaacggggccaagcccggggggggaactttaacaccaccctcaacaaattaaatggggcataccccaggacccacaacggggctcaccgccgggaaaatatgacagggggacggaattattttttttcgccggaagggttttttcccccctttccaccggagcaggccgaaagaaagtcatccggaacaaccctttttgctccttttctcccaaggggctataaaacaactactggatattattcaacatttctggggttgggcgggtcc

SEQ ID NO: 49370 - DNA, 687 bp, Zea mays
  Clone ID: MRT4577_145029C.1
cttcgtgatgtgcgtttggagccatcaaaagaaaacattgatgtgctcaaggaactcgcaagcaatttagaaaaaatgggacgatatgagtatgcagtaaagttttacctgctaattgaaaatgttgctactcaaaatgatggtggtttatgctttgatcacaaagaaatgggtagttggtatgtcaaagctgctcagtgctacatgatcttaggggacaaaaaaaatgctattccttatttttataaagcgttacaaagcatgaaggacaatattggtatacgattgaccttatcctcccttcttattgatgacgacaagacagatgaagctgccactttgctttctcctcccaaaattccagagttgcagtctgctaatactccagaccaacagaaaccttggtggtgtgatgggaaagttaagatggcgcttgcaaaactttattacaataaaggaaatttggaagattttgtggacacaatttttcatcctattctagaaactttgaatgttgaatatgctaatcgaaaggtcaagtcaatgagaaagcttccaaacattgttctgcatgaaagagtcaaagtattgggtgagcaacggccagatagtgtatttcaaggattaaggccaatagcatcacctgatgaattacaaaaggcaaacagagcaaagaaattaattgag

SEQ ID NO: 49371 - DNA, 1002 bp, Zea mays
  unsure (1)..(1002): unsure at all n locations
  Clone ID: MRT4577_14502C.1
cggccggaatccactctctttcctcccacccgccagacgtcacccgcgcgtgcagccagctgccttgctacccccgcgcgccgccagccgagcggacgccggccctgccccgcagaccggcacgcggcacgccgcagccagctgccccacacgacgccggccgccctcgcactccccaccgcgctacccggcagccccgcactccccggtcctcgctcggcgtccctgattcccaccgcacggcggcccttcttctgccaccgcacaccgcgcaggagcactgcccttcgccctttgcttagctgcagcaggagcgccgcccagccggccaccaccaccgcagcttgagagttgagacctgcagttgacgaccagaggccagagggcgttgctgcgctgcgttccgctctcccttttctgctgcgacgacggctggtcgagcgccgccacacttcgcagcttcgctggctcttcgcaggtgacgagcgcccaccagtcagacatgggacaaggtggacaagagaagtcgttcaatttccttcaagttttgctagggtttgtgcatgttcaccatatctttgttgcaaactttgctcattccattcaatagagtttggcttggcaccttttcctctcctgaatcctgagggcagcatagctggaggaactgctggtgttgtggtggaaacagcactttacccgattgatactataaaaaccaggcttcaggccgctcgaggtggaagccggattgaatggaaaggcttgtattctggattagctggaaatctcactggcgtccttccggcctctgcgatatttgtcggngtgtatgagccaactaaaagaaaattactggaaacccttcctgaaaatctgagtgcagttgcccattttactgcaggggccattggaggtattgctgcttccctcgtccgtgtccctacagaggtggtcaaacaaaggatgcaaactggtcaattcaagtctgcacctgatgct

SEQ ID NO: 49372 - DNA, 304 bp, Zea mays
  Clone ID: MRT4577_145030C.1
gcaaagggcaaatatcaaactttataagggttcaagccatactgttgcaaaagagttttgggtacaacacaaaggacacaacgggttctttaaaccaacgaagccccaaccctgttttatgacccaaaaacccaggttgttttttagacgcccccttcctttttggggtcccccagggggccccagacgacccaattccccaggtccagaagaggtttaaatgaaccttggtttattgccccccgggggggggaggcacaaggggggaggggcttccttttggaaggtggaacctggtaggggg

SEQ ID NO: 49373 - DNA, 544 bp, Zea mays
  Clone ID: MRT4577_145031C.1
acatgaaaccctgcacaaggtcgggagcaccagcagctcctcctgcaaccattcgaggaagcgaaggccttcctcttggtcgggtacttcggagtctgcagtccgcgcacccagatcgcggtacgcatccatgaactgtgtgtgcgtccgctcgacttccaagcgcgccgaggcctcggccttgtccacacggccgcgcagggcgttgaaccttgcctcccactcctcgtcacgttggctggcgagactgttctccgcccgcgccactttagcctccgctcgcgcagtctgcgcttcagcgatggcctggttagcctccctcctctcctccgccagccagcgccggaggtccgtcttctcggcctccaaggcagccaccttctccaccagcctacggtttttgctctccgcagccgacttctgccggagagcatccgcatgctgcgcccgaagactctcgacttcggcagcgacgtctgcagtcaggacgcccgacaaaacacggtcggcgaagtcggccgcctgacaaaaacacatgagaccc

SEQ ID NO: 49374 - DNA, 502 bp, Zea mays
  Clone ID: MRT4577_145032C.1
ggcccaaagcaaccatttggttggttttaaaacaatgaaacgaaatgacaatttcgattttgcttttgggcaatatatcaaaaaaaaaaggggctccgggttcatgctaaatcgggtacttacacaagagctactctcggcgctacgggggaaaacaagggaagaagattaagaagaggaaaaacggacatcgattctggacaaatctgggtggggggctgcatctttacaaagtcagttgcttatcggacaggaaggggctggggtcacaaaacaaaaaccttggcgtgactcgcgaggggcctgtttgcaggcctgcagggcagctaaactactggcggggcgggcagctaaactaccggcgattttgggggggggatcccgggccccaaggaatatgctttctcagcatcaggcaaccttggtgggaacatcccccattttttacgacagggtgctttaaccccttcccatggggcttttccattttttgccttgccct

SEQ ID NO: 49375 - DNA, 677 bp, Zea mays
  Clone ID: MRT4577_145033C.1
ctgtcgcgccgccgctcctctcctaccagtcgctcaaaccctagagctctcgcctgctcgcctccgccgccgcacacagctccccatcttcatccggcaaccatggccacccatacagcaagacaaagtccgtcaccaacgtggttttctacacccagctcacatgatatcgctgacgcgtcacctgccggaggatggctactctggagaggacgtgcgcgtcactgcgatgcgcacgcagatcatcatccgtgccacgcgcacgcccaacgtgctcggctacaagggccgtccgcatcacgcgagcttacctccgcctgccgagaagaggttcaacttccctgataatgtgcggcgagctttactccgagaaggtcgtcaacgtgggctctgtgccatcgcgcacgacgagaccctccgatacaagctcctcccaggtcttgacgtccacaggactagctatgacgctcttcatgatgttatgaacagtgcagccaaggtctgtgaggcgattgagagtggaaagctcatgacccctagagccacgtccatgaacttcaaggatgtatacatgatctcatctggtctcgcagtgaacgggtacttgactccgctgtgacacacgttcctctcagacgggtgagtgctcgcgatcaaggtgaagatcatgcttgact

SEQ ID NO: 49376 - DNA, 278 bp, Zea mays
  Clone ID: MRT4577_145034C.1
cagatgttaataaagggaaccgaaacaagacggcttgattagcactgttttacatcacggacttctcttgtggctaaagaaagttttttttcaaacacgcgtttaaatggataccccaaaaaaaaccttagggggggcatttaatgagctaagggcttctgcaaatcacattatctttaatgatgtgcccatcctgctgatggggctggctgctgggccccataagcacatgcgtgggccacccaatggtttcttactgccgccagtggatcaaactg

SEQ ID NO: 49377 - DNA, 343 bp, Zea mays
  Clone ID: MRT4577_145035C.1
cgagatggcacagcagcaggagccaaacacgtccgcaatgccgccctccttcctcctggcgcttgcgcctgcgagcgccactcgcatttcctcccactgccttctccacccataatcttctccgcttcggcgccaaccccaaccaccttgtacagtctccatacacactacgtcaccgctcggctccatggccgccatccccgcgcggctccaccacctcgtcgtcgtcatcctcctcctcgtgtcgtccctcaccgctgctcagtcacgcgcattcgaacgggcgccgccggcgtacacgcggtacctggtcgacgcggcggctatgccggcggtggacctg

SEQ ID NO: 49378 - DNA, 714 bp, Zea mays
  unsure (1)..(714): unsure at all n locations
  Clone ID: MRT4577_145036C.1
cccagcgtccgggcggnagcagccagcgctgacacgactcggttagagacgtttgatctcaacaccacggtctgcgccatggtcttggatggcctggttgaagagacagttgtagatctgactaactactgctagtgagttctcagaagaaggaaaagaagggtacagatgtaaacgaggagtgctgagaaagatgcatgcgtgctcttcttcatccttggtccgcctgcctttgctttgcagtgtctcttgctgctgccgtttgctgggtgttttgtagtggagtacttggccgttgccatggaagtatggaaaccagtcgtaagcttgttcgcttcggattaaagccagatttttgccgctgcaatccataaagacacaaacattgtagtataagtcggtacggattcaagtcaagcgatctctctgcagccgccaatttgctgtaggtcttctgcggaatgatctgactaatggatgaatgattgccatgaaccgcttgcacgttttgctcttggtagtggtactgcctgctaccctgtcctgtagttggctgtgtgttgttggttcttctcgttcagatccctgtacagtgactggctgacagttttgaattggggttggggctgccatgccactgccaccttctacggcggatgcgtcctttctcaccgatccttgaagcatgaatgcatacattaactaatttgatct

SEQ ID NO: 49379 - DNA, 561 bp, Zea mays
  unsure (1)..(561): unsure at all n locations
  Clone ID: MRT4577_145037C.1
ccggccgggacagatcccctagcatctcgctcctggttctggcgtacctcctcgctgcgtgatgggtcaggtcgagcatggttgcttaaggcgtcatacgaatcaggtggttgtgtgttatctactgacttctgcaccgctttcatctgtctttgcctccgctatcattcctctaaatgctttgccgtgacgtttcctccgagattcccttcctcttgctgatcgctcgacaacaaaactcactacacgatgcctgacgtcgcaacagaagcccccaagatggacgagctagtccatctcaccaccatcccctttcaccccgttagtaaggaagactcttccgacgacgaggatgacaagcccgttactgtcttccatgacaacgacaacttcatcgtcaagcaccctctccagaacaagtggactctttggttcaccaagcccccgagcggaaagggcgacaactggaacgatctcctcaaggaggttatcacgttcgactctgttgaaaagntttggggtgtctataacaacgttacacccgtttactatatctccctc

SEQ ID NO: 49380 - DNA, 401 bp, Zea mays
  unsure (1)..(401): unsure at all n locations
  Clone ID: MRT4577_145038C.1
actaactcctggctcgcacttcgaggacaacgcgctcaccctcaccctcaccctcacggtctccgtcccttccgccgccgctgcctccgtgtccctctccttctcgttgtcctccgccttcccctaccccgaccccaagcccgcctgctcccaccccaaccccaaccgcatactccccgctcaacgcgtcctccgacgctgcatcgaaccccaagcctagaccgancgtctgtccggcgacaaggacgtacctgaagaccgaccacaccaacgccacggactccatcaagggctgcacgatccaccagggggccaatgacggttcccactacctgccgaaggcgaacccgaaggcgcacaccgcacactaccaattaaagctcgcgctccacaacacagtc

SEQ ID NO: 49381 - DNA, 141 bp, Zea mays
  Clone ID: MRT4577_145039C.1
ggccgtcgaggactgcggcgcggcgtcgttccaccggtgcgactcggtgcgcgtgcagggcgggcatacagcgggcaagagccgctgccggttgtacgaggtggagagcgcgggcgcagtggacatccgaccttacaaggg

SEQ ID NO: 49382 - DNA, 366 bp, Zea mays
  Clone ID: MRT4577_14503C.1
ctttttctctttttgccctatatggtttctaattaaggggggcattttttaaaaaaaattttgaattgcggggccaatggatcccattattccgttcattcaaaaaataagccggtcctccatccgaaagggcatgttttttggccaagggcacataacgctttcggcgtataggtacaggatttttttttttacgaacttttacattcattggtactagggctactttctgaagaagtatttgcagggtttctgctgatatggggactattatagcatacgggacagcagggggagtagccaacactggtttttgcattggagggggccccaaatgggctcttgcttgggaccaacgccaacccc

SEQ ID NO: 49383 - DNA, 554 bp, Zea mays
  Clone ID: MRT4577_145040C.1
aattaacaatcgactatattattatatttatataaacatttgttttttttttttgtggctcgcgagctaaacgagtcagctcaaggtcacaaataagtcaaacgaagcctattctctgtcttgcttttttaacaagccaagtcgaaccaattcattaacctaacaaggaagtcgagctcagatgagactaaccaagctgcctcggtatccaatgctagtgacaactgagacaccaaagcgagggtggtagcaggcagaaggacaagttggctggatcccgtgtcccgtgatgagccggcactgcccccgaaggcccgaactacacactctcatatcgcacgcggcgacgctcagaaggaatggcccggccatcgctttaacttctgccaccgttggcctccactccatggatccatgtgagcgactggccgtggcgcggaacgcagccgtcgtcttccagtctgtgctcaaggggaaccccgtcgagctcttcgtactcagctgcgtcgatcgagctctttcatagcgacggggtcgaagaatcttgggagatg

SEQ ID NO: 49384 - DNA, 336 bp, Zea mays
  unsure (1)..(336): unsure at all n locations
  Clone ID: MRT4577_145041C.1
cgggtcgacttagcgtccggaagattctaagaacaacaaggaaaaggatcagtctcgtccgatgggcgccgagaaacaacaaacaacgctgactgatgaccgcgccatgccatgcaggaaatgatcgtgagcatggcggtggccggcgcgatcatcggcgcggccatcggcgggtggaccattgaccggttcggggggggggcgtcnatcctggtggccgactccctcttcttcgcgggcgcgggggtgatggcntcngccacgcgccccgcgcagctcgtggtgggccgcgtcttcgtcggcctcggcgtcggcttggccttcatgncctccccg

SEQ ID NO: 49385 - DNA, 329 bp, Zea mays
  Clone ID: MRT4577_145042C.1
tacaagctttttttttttttttttttttttttttttttattttattttttttttttttttttttttttttttttttttttttttttattttttttttttttttttttttttttttttaacccaagcccccaacccccctggggggaatttttaaaagtccaaattccccccccggcggggcttccttatttattggggcccccatcccaattttggggaaacaaataaaaattttggcccctgggttaaaaacgaataggctcaaaaaacccttgctttccaaaacttaatcttaatgaagaacaaccggctttcccctggggggaatt

SEQ ID NO: 49386 - DNA, 596 bp, Zea mays
  Clone ID: MRT4577_145043C.1
agggagattgggatacagcgcgagggggacggaagggaaggtgcgcaccaccggctccctccccggctccccctccgctgcgagcaagtgcctcagcttgctcctgcagcagcagcagcagcaaaacgacggccaaagggcggcggccgcggctgccgcagcagcgctgatgctgggcggcgacgaggcgcacaagttcatgaaccgcccccgtctcgaccgcggcgacttcgcgagcatgatgaacccggggtcccggcagatttacctcaccttcccggcggacagcaccttccgcgaggaggacgtctccaactacttcagcatctacggccccgtccacgacgtgcgcatcccctaccagcagaagcgcatgttcgggttcgtcaccttcgtctacccggagacggtgaagctgatcctggccaagggcaacccgcacttcatctgcgacgcgcgcgtgctcgtcaagccctacaaggagaagggcaaggtccccgacaagttcaggaagcagcagggcgagagggtggacttctccggctgcgggtctcccaccgggctggacgccagagaccccttcgatctgcaccaga

SEQ ID NO: 49387 - DNA, 543 bp, Zea mays
  Clone ID: MRT4577_145044C.1
ggccttcgggtccattcgccagatcttctgccgtcgacgagtaccagctaccagccgccgaatataacacacacctgtaaatagaggccaccacttttgcgggaaccttgactatgatgtccatatgtgtgatgatgagcgccttctcctgaagcctggaatgctagaacgagtggttctgaatgaaggaatttaatggatcatatgtgctcttcctgattaatggactgtacataactttaccgactatgtatgagcccacacctcatgcctggtccatctccaggagttcactgtccaccatgggatttgatccatggaaacaaccacccttgagactgatgttttacttttacgatcaacactgcatgctgctaccctggcttatcaccatttcttctccaatccatccatgccaatatgatgtctgacttgatagtggacataattggaggttgcaccaacaattccttgaagtaccatgacagtaaggattgctgtcttctgaaatcatttagatgaacatatacaatgtctggccct

SEQ ID NO: 49388 - DNA, 155 bp, Zea mays
  unsure (1)..(155): unsure at all n locations
  Clone ID: MRT4577_145045C.1
agcnanagagtatccnggcngncggacacaatacccgcgacgcgggcgcggtatatgaccgccacatcaatattttctccggtgggggacgcgtgcaccaaatagaacacgctctaaatgctgaaaagggggggtgtaacacatatatcggtgtg

SEQ ID NO: 49389 - DNA, 720 bp, Zea mays
  unsure (1)..(720): unsure at all n locations
  Clone ID: MRT4577_145046C.1
ggccggnngatattttatatcacttacatagcctaccctacccaacccaaacttacttacactaagttaaccaacctaaaagcccatatgcctttatccgagtatggcaagagaaatttagtcaatggtcgccgcattgaccaacgatactatttacgatcttcgtcgttaatgaacgaagatttagatacttacgacgacgtattcgattttctttcagaattatctgactacgtcgaaggtgtcacgaacgaaacggatctagcttcgttacaaatacagttattagcagccctctcggctgatatcatgttacatccgaattacgagtcgttacccgatctatccaaaataagccttgtcccgaattgtcgattgatccggacttatgtattgagaatatcgataagtcactatcacaatatagacaagtttatagatcgtatgactagtatcacggtcatcttgataaattctacatctttactagacgaaataatcatgtattatacgcagtattctcgatcgacgttgcgatctacgttaaaagaattactgcgtgtacgtactgtcacgcgcgttccgcctgatagatttctcgttaaaagaaaactacacacaactagaaatacctaagtttgatttccataacaagttactcgcgcgcatatcgtttacgtaacttagcgaatatcgtacgatataacaaacggttgaaat

SEQ ID NO: 49390 - DNA, 207 bp, Zea mays
  Clone ID: MRT4577_145047C.1
ccgggggaacctaagggaaagtttttttaaaaaaaaagcccaggattgctcttttccaaacaattaaggggttttttacaagcaagcttgctcacacatgggccctaaattttcgtaaaaaaaagaccctttcttgaacaagcaaacaacccaaaacagactgggttttttccattccccgatggacggggcacccgtttaaagcaa

SEQ ID NO: 49391 - DNA, 225 bp, Zea mays
  Clone ID: MRT4577_145048C.1
gggaagaacagggttctgggatcacatgtggtttaacagatgcagtcctaaaaaataactggacgaccgatagaggaaaccgcacaagtactgccgtttcagtggactcaaaaggcaaaatcaaggcacagaagacatcaaaggacccggctagtattaactcagcacatatttctgtttgccataccaaaataccaatcactgacgccaattcagcgtgtccac

SEQ ID NO: 49392 - DNA, 485 bp, Zea mays
  Clone ID: MRT4577_145049C.1
ggaccccgggttggccaaaaataaaccctgggaaaaaaaaaggccccgatgggcaaaaaggggaagaaaaaaaagggaaggttttttttaaaaaggggggaaaggaagaaccccaaaaaaaataaaacttgggggggggaagtttggtaagaagttaaattttaaaaaccctggaggggccaaacaaagggccaataagggggcggaataaccataaaccgcaaaatttggaaaggggaacaaggtgggccacttgaacccgggaaaggtggacccaacaacggagaccttggaaagccaaaaggcctttggcagaataaggaaaggaaaccccgcccaagttaaaaaacttttcccaaagttggaaaaggattttgcccaaagaaagccacttttcctgggggaaaaagtggaaaggggggcccccagaaccaaaaaagggaaaaaagggctttcaaacccaaaatttcgggggggggggaaaa

SEQ ID NO: 49393 - DNA, 322 bp, Zea mays
  Clone ID: MRT4577_14504C.1
cccacgcgtccgaaaaaaaaaaaaataaaaaaaaaaaaaaaaaaaaaaaaaaaagactataaaaaaaaaaaggccggcctttttaaaggatccgggcttccgtattagtgcttccaaggtcatagcccttttcttgggacgcctaaattctttctcattggccgcctttttacaactacctgcccggaaataccctgccgttccccatcttatacccctttggtaaccataccattttcgccaggtggctttccctcttaaaggcccgtgcgtatcgcccttaacacatgttgcccagcgctgattggaaaatgggaccccc

SEQ ID NO: 49394 - DNA, 710 bp, Zea mays
  unsure (1)..(710): unsure at all n locations
  Clone ID: MRT4577_145050C.1
ctaaagcactttcgtttagggtgttaaatacgcattacaaatttcattagactgaatacaaaagatatgcatcagccatttactcacaagttttcttggaggttttggcccctccataaattataattccttggcggttcatgaattttcttgacaatgtgtaactaggggtggtaatgggctctaaattttacactataaaattcaaggatgggattgtattaggattgagctctatttctattcgttttgaactaaaattgattaaatgctcaaacaaaccgtgaagaaacatctagatcatgatccattaccgcgcctatgcgtaacttttgcaatggacggattttccctggcggccaaatcgccaaaaaattattcttgggagcggaccaccaagaaaattgaatttactttgctctctatatacacgatggccattgcatgacacggttgcccctaaaaaaacatttccttggcggtttccccaatctccttggcggttttagcgcctcaggtttctggctgctcttcagcttattttgtgttcataagtatgcattatctcagtttgttcttatgtattcacatccatgaggaatgttttctgtctttcagatgttctacaagcaggcaaagaagacaaaccaatgctgcacaatacntgtaaattttggctcttcagtcatggttgcaaagtggtcaatgct

SEQ ID NO: 49395 - DNA, 763 bp, Zea mays
  unsure (1)..(763): unsure at all n locations
  Clone ID: MRT4577_145051C.1
ccggccgagatgcactgtggctgcacccagcctccaatcctccattcaagttccgctcccaaaggcccaaaccgaggttaaaaaaacaggcgatggcgacaccgcgaaacacgacgccgccgcgaatgattgggagtgagagggatcgcgtgagcggcgcgtacggagtgtacgccacgcgacgcggggcgggaggcagatgaatgatgatgacaagggcaagcgggccgcgacaagatccacgatcctaggaggcgctgatcccaagagcaggtcgcctgcctgtcgcaagtagtactgctcaccccacagagcagtggagtggagtggagtggagtcaggccaatccaatccagcagcatttgcagctgcaggtgggcatcccacccccatttccatttcacgctcccgatgcaatgcggtgtggcagcgctgctatgccggtgccggccagcgcagtctgacaggggagaggagatgaacagttacacaagggccgagcagcagcagcaccatcacgacaggccaggaccccccaccactcctcaccgcggtccgatgcggcagcacctttatggggaggaggcgaggctcatcggccgctacacagttctggtcctctggtcggnccgcggncggtgccagcttggncggagggacaccgtgcgtactcgcacattggcttcggcgggcgcaaatacactcgatgccctcgcaggcgcagaggtggcaagcaatgaattgaaactgctgctgctgctgt

SEQ ID NO: 49396 - DNA, 1018 bp, Zea mays
  Clone ID: MRT4577_145052C.1
ttgggtccctcgaggccggccggggaacggtactttttcagcctcaaagcaggctctgaactagccgcacgtacgccggcgcgtggcgcggcgcgttccacacttcctggtctgctgcccgaagcatgcacatcggcggccaggcccaaatcaaccgcgtagccatccgcggccaccaaaagcagcacagaatcaaaaatatctgcctgcctacctaccgatggccgccgcgttgtagttgtagtgtaacctagccacacgacgcatccgcggttcatcggcctcgcaggaaacgagcgtcgagcaaaaggtcgaattctcaactctcaagcaccagcaggaatcgagcgagcgagcgagcagtgtccgccccccatggccatggtcgcgtccacctccttcgcgtaccacaagccgcgtttcgcggtggtgtgcaggaagaacagggacggccgggacagggagcgggagcgggacggcaaggagcacaagcaccccttcaaggtcgtcgagatcacgccgccgccgcggtgcctcggcgtccgttgcttccccaccaacatccactgcggcgagagcgtgacgatcgaagggcaggcgtacacggtgtcggcggtgacgcaccggtaccagctgcgcaaggggcggtacgagccgagcgagaagcgcctcgacgtcctctccaccggcagatacatcctcaacctctacctccaaaacctgctcgaccagtcctagctaggcagctagtagtagtgccttagctactgcctgtctgtctgtatctgtgtacatcagcatcgcttcatcactctataattctaccacgctactgtatatatagctatctagctgtaaataacaatcaattggttcggctcctcctgctatgtccatcgaacacttgtcccagtgggtggtggacgatcatggccgatcatgcgtgaaggggatagtgtttccctgcgtgcggctctgtgtaactgaaaaggcgagattgaggcataaagttcagtat

SEQ ID NO: 49397 - DNA, 360 bp, Zea mays
  Clone ID: MRT4577_145053C.1
gagacaaacccatccccaataattttttggggcatacacgggacaaccctgggggtgggttttacttgggaagggttatttaggccaaaaaaattcaccaggtggtgggggggaaaaaaaaaagggggggtaaaagaaaccaggaggggtacatttccttaaaaaaaagggggccccaaaaggtgggattatttgggggggaagaaaataggaaacttgtacgggggcaacatgggtgacacattatggaaaagccgccaacaggttcctttaaggtgggtgggggatcccccggtccaactttggcctgaagggcctgaaaagcccctgaacaggccatgccgaagtattcccaagggc

SEQ ID NO: 49398 - DNA, 1921 bp, Zea mays
  Clone ID: MRT4577_145054C.1
tacctgggacggccgggccggccgggcccactttccaattcgacatcttcgccctcgaatcgagcttccctccaccgaatcgagttcctccatccaaatcgagctcattgccgccggatcgaggtctgcgtggatcgagctcgagctttggagaaggagaggaaacgggggacgggcacggggggagcaaggcaaccaaacgggtggagggaaacacgccaaacaggctcctcgatcgttccgggctcgggctgccacccgccattcggtgtcccctccttgacaggtgcccgagccgcgccgagctccagcctcatttccacggtccgcgccggcactcttccctctcccgatcgtcctcctcgtcgcctgccgcctcttccttcttcccactccactagcttcaggttggactgcacaacgtggagcggagatctatccgaacacgggattgattcatctggtggtgttacaacatagggtttttgatatagcaatgggattactcatgtataaatgaacaaagtttggagacagttggacctgacaattgccactttttacatgttttaactcattttttttctgggaaacaagtaattctgaagttaccttggaagtcctttgcgcttttgactggtcgggttgcataggccattgttgagaggtgatttggcctaagaatgggggctccaaaacaaaggtggacttctgaggaagaggctgctcttagagctggaatagcaaggcatggagttggaaaatggcgcacaatattgaaagatccagaatttagttccaccttatgctaccgctcaaatgttgatctcaaggacaagtggcgaaacatgaatgtgattgtcagtacatcgagttctcgtgacaaggcgaagtctgcattgaagagaatacgaactattcccaagaataatgagcacaccatggcaattaccagagttacttctgatattgatgatgagattgttgacgaaaagcctatagtatcattgcctagtgaagcaaagaacacatcaagttcgaagaaatctcacaggctagataatattataatggaggctataaagaacttaaatgagcctacgggatcacacagaactactattgctaattacatagaggagcaatattggccacctagtgattttgatcacttactatctgcaaaactgaaggacttgtccaccagtggcaaattgataaaggtgaaccggaagtacagaatagcacctagttcacccaattcagagcgccgaagccccaaaatgccactgttggaagatgtccaaagagagcctgtcaagatatggagtgatgatactaaaacccttaccagatctcaagttgatgctgaattggcacgtatggcaaccatgactgctgaggaagcttcagtggcagcggctcgagcagttgctgaagcagaggccatcatggcagaagctgaagctgcagcgaaagaggcagaggctgcagaagcagaagcccaagccgcacaagcatttgctgaagcagcgtttttgacattgaagaacagaaatgctggaaaattgatggcctaaggttgatcctacttggactctcggcctcgcggctgttctgaaacggcttttctgtgccatgtagatttgtacaacagtacgtgtttactacacttcggtttaaagcagctgccccggtgagtgtatcaccttatgttagtgggagccatgtgaaaactccagcctccagcgcactagtagcaacaatagcagcttgccacaacgccattcagaaaactgggtggcataaactcttccagtgtcaaatgtttcgctaacgatttgcagtattgcattgtgcatgaacagcctttgcattagtgcattattgcgctgcctgccaacagtcggcccgtttgctg

SEQ ID NO: 49399 - DNA, 370 bp, Zea mays
  Clone ID: MRT4577_145055C.1
gcgcccacgcgtccggtggacatgtttttagcagtgggcatctatgatcatgcagtacggactgggaatcacgggacggggaaaacttttgcggggctttccgatacaaaccgtttgggctgtcctcgcaatatactcccatcctcagggcatcctatagatctgccctctttggtttgcacaccggattttactcgctcgttgccaagcgttttagatagctttagcggccgcggttgcgtaaccaatttgcgtagctggggcagagtaccttatggcaacgtggtattccttggccatggccattctaaccctcatgtcgacgagcttaaccaccttgacaaccttctgctggacctggtcagagagc

SEQ ID NO: 49400 - DNA, 266 bp, Zea mays
  Clone ID: MRT4577_145056C.1
agccttctttctttttgctttgtgtagaattgaactccggccatccctgggaagccacagacatcatacaaaaaactggatcattagaactatgggctcatatagaaatctaaaatgagggcaccaccaatgactgggttagctgaaaagaatgccttttggagtttgacaaagcataggttggcctgaatggaagaaggttgcccccttctgttaagagggtgccaggaagtaagcgcagcggggctggtaagaacagcaacagt

SEQ ID NO: 49401 - DNA, 768 bp, Zea mays
  Clone ID: MRT4577_145057C.1
gggatgcgggcgttcgaggcggcgaagggcgcgccggcgccgcgcatcggcgtgcccgagtacctggagcgcgtgcaccgctacgccgcgctggacccggagtgctacgtcgtcgcgtacgcctacgtggacatggccgcgcaccgccggcccgccgccgccgtcgcgtccaggaacgtgcaccgcctcctcctcgcctccctcctcgtcgcctccaaggtcctcgacgacttccaccacagcaacgccttcttcgcgcgcgtgggcggcgtgagcaacgcggagatgaacaagctggagatggagctgctggacctgctccacttcgccgtcgccgtcgaccaccgcgtctaccacaggtaccgcgagcacctggagacggagatgctgcgcagggactaccaccacggcctgatgcccgtgtccggcagcgcggcgcccagcaagccgagaacgaccgcgtcgtccgtcgtcaacaacccgcctctgccgccgccgttgacggagggtcgtcgtccggccgaagctggcgacgacggcgacgaccgcgaggagcacgagtaccggaaggtgcccaacggcctgccggcggtcaacactatgacgacgtcgtctcttcgagagctgtggaccttcgattactagcagtagctgtccaaactaagagtgtgtgtgtctacggtgtaccaggagtactgttgcgtgcaactgtgcgtgctaatccaattccaacgtgtatatatatctgcagagctgtgtttgtgcctt

SEQ ID NO: 49402 - DNA, 412 bp, Zea mays
  Clone ID: MRT4577_145058C.1
gtttggtttggagctgtttatgaaggtgggcggccagcggcgcgtgcgcagatcatgcactggtaggactaatttgcaagatcttggaccgggatggttcgcctgttaggtgtgttttttgtgcttcacaactgctaacggaaaagagagggtgcccataatctagatagctttgagtgtgtaaaaattatatcatggtcatagtgaaccatatgtttgtcatatttggagttagactgcaacagtcactcgtagtgaactaggtaagtccatttaactgatgtacagttatgatgattgatagcctaattcagttactctgttttgcattcctgtaccaacttccaaacagtatggtaaagcagtttctgaaactcgttgaatacttaacttatcaaaggaggaaacaatg

SEQ ID NO: 49403 - DNA, 145 bp, Zea mays
  Clone ID: MRT4577_145059C.1
cccttcttgttgaagtgtcgaccttaggtcctcgtgtccaatgtggcagctggggcagcatgaagacaaaagtcgtgggctcaataatcctggtgtcgaaaacagggctgtcaaggagcagatgggttgagcctgtaagaatgct

SEQ ID NO: 49404 - DNA, 590 bp, Zea mays
  unsure (1)..(590): unsure at all n locations
  Clone ID: MRT4577_14505C.1
cccacgcgtccgcggaggatggccaagacggatcacttacatcaagatggaactttgcacagagaccacactcaaatagtccagtcatgagcagggttcaaggttccgatgcctattcaagtactaaaaccgaggaatctggaggcgcaccttcctctgcattagcgaagctgactacccgactcaactttttgaaagaaagaagggccttgcttgccagtgagatgcaaaacttagatctgggccgctcccaggcccagaggcatacagctcctccgaaagctgagactccaactgagaagtagaatcgttttactgcatcgttgttaggccacaagctcaggtaggattgcaggcagtaacagaaaacttcgattcgacaatgcacagagactatctagctatagagtaacttgatttgtacatcgcacaggcattcatgtcttcaccctgatgattcatatgtcaagttttttagcgacaccgacgaacaacctggtttgtactattttatctccaaataaacaatactcctactctgggacaaaaaataagataatcatgaagntatggaaccttattatattgta

SEQ ID NO: 49405 - DNA, 549 bp, Zea mays
  unsure (1)..(549): unsure at all n locations
  Clone ID: MRT4577_145060C.1
gagctcacnattcggcggccgcagctcttcctgctgacgctgtcttcagcattgcgggcgagaaaccggagcccgagcctgtgatccgatgaacttcagccgagcgagcctgatcgacccgaacgagctacgcagagtaggagctagaaacagcaagatgtgtgggacgaaacggtcagctcagctggccacggaggagagacgagcagagaagggaggagcatgaggaggaggaggcaaagcaaatgatcaggaacatacagtagtagttcgacaggattgatcaggaacaactgatcgcggcggaaaacgatggattacgcgagcgaggagataatagcaatggtgtcgagcaaacggataaactggaggctgtggagtcgagtgaagtgtggtggtgtggtggtggtgaccatgagtccatgacaatggtgtgtggaggcagtgggacaggggggcaggcaagggcctgtagaagaagcgtacgggctaccagaaggagattgtgcctgccgctcctcgccccagcccgaatcccgagcttacgta

SEQ ID NO: 49406 - DNA, 790 bp, Zea mays
  unsure (1)..(790): unsure at all n locations
  Clone ID: MRT4577_145061C.1
atagttgttgccgcaggctccgcctctgacattgcttctctgctccgggatgcctgtatgttgtatagaaagaagtgatcctcgatgttcaacgtgtgacgatgccgcgactgatgcacctgcgagcgagatgcctacgaaggtgctgtggccccaactgtctactcgaccacagtgatgatggtgtcctgctagaaaatggcgccttctgtgaaatctggcgcccgtccattaacattgagcggcaccctcactacaatgacatgattgtagaggccatcgctgtcctctacgtgactgattccctgaggtccgagggcgtctctgagcactgataggaacaaacacgcagaccagctcgccgccctattctacgatcaacttcatgctatctgaataaactcgatgctttctgctagatgacgataccgaaaaactcctgtccagctgccgaactccgcaaccaagccttagagcgatcctccctgaggacccaatgccacccccgacatgaagacctcatcgaatgctaactcatgtaccgctgcgatgtgcaatgccgacgacgtgcaagctgatgtggacgccatcgacaacgagcgcgccatccctgtcggtactgccgcgcgatgcctttcacgtgcggaatcaactaccaggctcccagcgtcgtcgccggcggtgacctggccaaggtgcagcgtgccgtgtgcatgatctcaactccacagnggntgtgggagtcttctcccgcattgaccacaagttcgacctcatgtacgccaagcgc

SEQ ID NO: 49407 - DNA, 1996 bp, Zea mays
  Clone ID: MRT4577_145062C.1
cgcatgccccaaaagcgaagccaaccagcacaaaaaggagcacaaagctctctctccctcccccctctctctctctctctcctgttccccgcgagagtcgctcaaggccgcggcgaggagaagcggcagcgcgtcacctctccaatggcatccccgtccctcctccgtgcaacctgtgcgcttctcgagtgctgaggctccctgtccctaagacaagcttgcgcgcgcgatggagggtttttcgagggacttgctgtgcgggattggcaagggggacgcgccgccaccggagaagaggccggggcagctgcgggaggagatggaggaggtggagcttagcctcgggctgtcgcttggcggccgattcgggctcgacaggaaggggagcaagctcccccggtcgtcgtccgtggcggccatgctgacaacgccggtggaggtgccggcgccgcccgccctctcgcgggcgagctcgctgccggtccaggcggaggcgtcggaagttgagaggaagcaggggctggatggatggggttcttgccgtgagggcggcggtctcggcgtgcaacacgcggcgaggctgccggcgagcgggaacccttcctctgcctcttcggtaggtgaaggacagattttgcaaggcaccctcatgaggactagttcactccctgctgtcattgaggcttctggcaatgatgactggaagaaacgaaaggaagcacagagcctgaagaggctcgaggttaagaagaagaggattgagaggaggaactctctcacctgcaacacttcaaaagaagctgctgggcagagtccagaagagatgaatgcaaacactgacaaattagtaagttctgatgaaactattgccagcgctaacgaaagtcatagcagtggcaagcatctggtgaaggggcttccaccaaagtaccaggctacaattacatcacaagacagttcgtcagcaatgcgaaagaagccaaactcggccttcaaaggaacagccatcactgaggagcagaactcatcatcgtctgttccttcctccggtgaagctataagtagcgtgacggcaccaagtctgcctctgttgtctttggtccccataacagcaacccttggttccagggaagaccaaagcattttaggcagggctggtgcaagggcaaacggcatgggggacgtggaaaggaggatgatgcaggagatgccgggcgtgttcaccaagggcctgtccaacggcagcagggtcgaaggcttcctgtacaaatacagcaaaggagaagtgaggatcgtatgcatctgccatggaagcttccttactccttcggagtttgtggagcacgccggcgccggcaaggtagataacccgctgcgacacattgtcgtcagcgctaccccgaacctgtgactgtgaggccaggcagacccgtgcacaagctatagtgttctgtagactcaggacctgagcctagcgtcagagcaatgtcaccgttagactgtgtggtgcggtgcttatgcccgattaaattggtgggcattgtggtaacataacctgttgataatgttttgacaatgttttgatccttcctatgcgtgattttgttctgcaaagacctgtccaacggcagcagggtcgaaggcttcctgtacaaatacagcaaaggagaagtgaggatcgtatgcatctgccatggaagcttccttactccttcggagtttgtggagcacgccggcgccggcaaggtagataacccgctgcgacacattgtcgtcagcgctaccccgaacctgtgaggccaggcagacccgtgcacaagctatagtgttctgtagactcaggacctgagcctagcgtcagagcaatgtcaccgttagactgtgtggtgcggtgcttatgcccgattaaattggtgggcattgtggtaacataacctgttgataatgttttgacaatgttttgaacctgttgataagttttgacaatgttttgatc

SEQ ID NO: 49408 - DNA, 449 bp, Zea mays
  Clone ID: MRT4577_145063C.1
agccttcggggaacggaaagaacaacattcaatggcttcaacgcttcaagcctggaacaattttttggaaggctaaaccaaaaattgaagtgttgtaaaacacaccccccttgatttggtggggcttaatgaagaactggcttgatatggtggggcttaatgaagaactggtaacctggaacacttattaaccattttagaagatcccagatgatgattggctgccacttttaaagaattaatacccttatttccattatttctttacccaatgaaatggtggcaccggcttaatgaaaaccgaagaccttattggttttttcccttcttttgtcaacttgggttgagtgatggaacttattttttctgtgccatgtgttaaaacctgggctatggacacattggtgggccatatgcactggccccattatctattccgggagatctcc

SEQ ID NO: 49409 - DNA, 400 bp, Zea mays
  unsure (1)..(400): unsure at all n locations
  Clone ID: MRT4577_145064C.1
aaacaatccatttaaacnaaactaaatattattaaaacaaatacagttaatgtgttaanctacctaccgaaggaaatgaaaacctacgataatataactgagagagtgagactgactgacatcnatccnatcgctaacctttaatggtgcggtcgagccactgaccccaaattatcaattatctagctagcaacatcatcatcgatgatactaatacgattattatgtgatgattatctggcggcctcggtaccctggcggcgtcgctgtccccatccacttcctccgccctcatttccctagcttcttcaacttcggcaactttccncacttcttcttcaacacccctagctgcttctgcttccgtaactgcaatttcccgaccttgctgcttctgctt

SEQ ID NO: 49410 - DNA, 703 bp, Zea mays
  unsure (1)..(703): unsure at all n locations
  Clone ID: MRT4577_145065C.1
ccacgcgtccgatgaccattaattgcttcccgagatggttttgtttacataattcttcgagttctgatgtaagtaactatgagtttgtgatggctaggttgtttatttgtcaaactctgattgctgaattcttgtttcagagtgagctgctggctgccgagatcaattacatggccaaaagggagactgagcttcagaatgaccacatgaacctcaggaccaagattgaggagggagagcaacagctgcagcaggtgactgtggcccagtctgtcgcagcagcagctgccaccgacgtggagctgaatccgttcttggagatggataccaaatgcttcttccctggcggccccttcgcgacactggacatgaagtgcttcttccccggcagcttgcagatgctggaggcacagcagcgccagatgcttgccaccgagctgaacctcggctaccaactggcgccgcctgacactgacgttgccaacaataaccctcagcagttctaaactggatccatgagaaagccaactgtgaccgatggaagctggctgttgcctctagatgatattggcttccataacctagcttattatgggngtgtattggtgccttttgtgtgtgattctccttgctactgatggagaataacctaatcgattgggcataatgatcaaatgctacagcacccgtgaggctgtgatcg

SEQ ID NO: 49411 - DNA, 1485 bp, Zea mays
  unsure (1)..(1485): unsure at all n locations
  Clone ID: MRT4577_145066C.1
ggtccgnaaaaaaaaaaaaaaaaaaaaaaaaaaaaaaaaaaaaaaaaaaaaaaaaaaaaaaaaaaaaaaaaaaaaaaaaaaaaaaaaaaaaaaaaaaaaaaaaaacgaaaaaaaaaaaaaaaaaaaataagaaaaacaaagacaggaccggccggcctactgatcgctatcgctctcttgtgtactatatcccttcgaggaaatggatgcccttttatggacttcttcattgttaccctcgaggccggccggcctgctatattaaaccactttaccccccctctcgcggacgctcgacgcagctcccttttccttgcttgcttattgcaagtctctgcaagaacctgctagagaggaacaagctggtatcgtcgccagcatgggtagaggaaggattgagatcaagaggatcgagaacaacacgagccggcaggtcaccttctgcaagcgccgcaatgggctcctcaagaaggcgtacgagctctccgtcctctgcgacgctgaggtggccctcatcgtcttctctagccgtggtcgcctctacgagtatgccaacaacagtgtcaaggctactgttgagaggtacaagaaggcacacaccgttggctcttcctctgggcccccgctcctagagcacaatgcccagcaattctaccagcaagaatcagcaaaactgcgcaaccagatccagatgctgcaaaacactaacaggcacttggttggtgactccgtgggaaacctgtcactcaaggagctgaagcagctggagagccgccttgagaaaggcatctctaagatcagggccaggaagagtgagctgctggctgcggagatcagttacatggccaaaagggagactgagcttcagaatgaccacatgaccctcaggaccaagattgaggagggagagcaacagctgcagcaggtgaccgtggcacggtcagttgcagcagcagcagctgccaccaacttggagctgaacccattcttggagatggataccaaatgcttcttcactggcggccccttcgcgacgctggacatgaagtgctttctccccggcagcttgcagcagatgctggaggcacagcagcgccagatgctcgccaccgagctgaacctcggctaccaactggcgccgcctggttctgacgctgccaacaataaccctcatcatcagttctaaactggatgcatgtacgagaagcttttcaagcgaactgtgaacggtggaagctggctgttgcctctagatgttcttggcttccatgacctagcttattgcggtgtgtattgttgttgccttttgtgtgtgattctccttgtgctactctacctgatggagaactaaacctaatcgattggacataatgatcaaatgctacagatcctgtgaggctgtgatcaggttaaggcaaaacaagtatactgattgcttaaatgggtttacgagtgacgacaatgctatttgttgcttctattacc

SEQ ID NO: 49412 - DNA, 1146 bp, Zea mays
  Clone ID: MRT4577_145067C.1
aggccggccgggatgtatagtttaccctcgaggccggccggggctctcgtttgtactttctccctttgaggaaagagtttccccttttctgtgcttcaagttcttctggtatcgccagcatgggtaggggaaggattgagatcaagaggatcgagaacaacacgagccggcaggtcaccttctgcaagcgccgcaatgggctcctcaagacgtatgagctctccgtcctctgcgacgctgaggtggccctcatcgtcttctctagccgtggtcgcctctacgagtatgccaacaacagtgtcaaggctactattgagaggtacaagaaggcacacaccgttggctcttcctctgggccaccgctcctagagcacaatgcccagcaattctaccagcaagaatcagcaaaactgcgcaaccagatccagatgctgcaaaacactaacaggcacttggttggtgattccgtgggaaacctgtcactcaaggagctgaagcagctggagagccgccttgagaaaggcatctctaagatcagggccaggaagagtgagctgctggctgcggagatcagttacatggccgaaagggagactgagcttcagaatgaccacatgaccctcaggaccgagattgaggagggagagcaacagctgcagcaggtgaccgtggcacggtcagttgcagcagcagcagcagctgccaccaacttggagctgaacccattcttagagatggataccaaatgcttcttcactggcggccccttcgcaacgctggacatgaagtgctttctccccggcagcttgcagcagatgctggaggcacagcagcgccagatgctcgccaccgagctgaacctcggctaccaactggcgccgcctggttctgacgctgccgacaataaccctcatcatcagttctaaactggatgcatgcacgagaagcttttcaagcgaactgtgaacgatggaagctggctgttgcctctagatgttcttggcttccatgacctagcttattatggtgtgtattgttgttgccttttgtgtgtgattctccttgctactctactgatggagaactaaacctaatcgattggacataatgatcaaatgctacagatcctgtgatgctgtgatcagg

SEQ ID NO: 49413 - DNA, 833 bp, Zea mays
  Clone ID: MRT4577_145068C.1
ccggccggcctgctattaaggcactttacccgcaccctctcggtgacgctcgacgcagctcccttttccttgtttgcttattgcaagtctctgcaagaacctgctagagaggaacaagctggtatcgccagcatgggtaggggaaggattgagatcaagaggatcgagaacaacacgagccggcaggtcaccttctgcaagcgccgcaatgggctcctcaagaaggcgtatgagctctccgtcctctgcgacgctgaggtggccctcatcgtcttctctagccgtggtcgcctctacgagtatgccaacaacagtgtcaaggctactattgagaggtacaagaaggcacacaccgttggctcttcctctgggccaccgctcctagagcacaatgcccagcaattctaccagcaagaatcagcaaaactgcgcaaccagatccagatgctgcaaaacactaacaggcacttggttggtgattccgtgggaaacctgtcactcaaggagctgaagcagctggagagccgccttgagaaaggcatctctaagatcagggccaggaagagtgagctgctggctgcggagatcagttacatggccaaaagggagactgagcttcagaatgaccacatgaccctcaggaccaagattgaggagggagagcaacagctgcagcaggtgaccgtggcacggtcagttgcagcagcagcagcagctgccaccaacttggagctgacccattcttagagatggataccaaatgcttcttcactggcggcccttcgcacgctggacatgaagtgctttctccccggcagcttgcagcagatgct

SEQ ID NO: 49414 - DNA, 742 bp, Zea mays
  Clone ID: MRT4577_145069C.1
gggtacctcgcagccggccggggcccattccccttttcacctcccaagtccggcttcctcaatccgcactcctgcagcgcgtgtccgcctcttgccgccatcggcgcctccgcactcggcctccgcggctccaccctccggtccattgccgacacgctccacggatccggcgagcggcctgcgccatcacatccaccggtcaccggcccacgcctccacgggcacggtcgcacggatccgccgctgccgtgccatccaccccttgccggcggctcggccagctccactccacgccgcggtggccacagtatcgcgccgggcgccggcctctcctccttgttcggctgtcccaaggctccggccgccggctgccggctgtggctgtacgactgtcactgtccgcagtgcacagtgacccgctggccgccggcgcacgggtccaactagccaactgttaaggccgcaggtgcacagtgagtgattcttcctgttccagtgttacatgtacagttcggccctatcctctccctcgccctaacctcccgtcaatccggcttcctgtgaagtctggaattcggaggccccggaatcatgatgcagcaggctcccgcgcccacctccggaacttgccggagcgccgacccgccgccaacccccaccccccaccccgccccccccccccccccacccccgcgatccccacccccccccaccccaactcccccccccccccacccccccc

SEQ ID NO: 49415 - DNA, 118 bp, Zea mays
  Clone ID: MRT4577_14506C.1
gccatagactccactctcttttgtcaaaggggaagaaaaatcatggatgttacaggtttcccataatcaaacgctctttttttcgcatattaaactcccaccaggtcaaagccgaaaa

SEQ ID NO: 49416 - DNA, 606 bp, Zea mays
  Clone ID: MRT4577_145070C.1
gaccacccgtccgatgaacaagtcaaagtcttggaccacccaaaattgcatgatggatttcatgagaaatgggaccatggactagtggcagaacttaccatggagcatgtccaactgtgggccattgacacgattgttacatttgattcatatggagtatcaggtcatccaaaccacaaagatgttcatcatggcatatggttagttcagttgtctggtttaacactgcatgaattgctgaaatggtttgttaacattgggactccgatatgttgggcatcagacctgttgttctttgactgtgcacaacttatgcttatttcatttacttgtgtatttttatgctacacatatgcatgtcacatttatgaggtagtttcgtattttcttcactcagagtctaaaatctttatttctatatgaacagcaagtttctccatacgaacaggcaagggaacgtggaagcttgggaactagtaagtttctccccctaaatccttcggcaaccttattatttggatttatttttcagactgatattcaccgtagagaggaagagaatatgtgtgttactttcttgactttgtcagtgctatgtttaagctg

SEQ ID NO: 49417 - DNA, 870 bp, Zea mays
  Clone ID: MRT4577_145071C.1
cggggccgggatagttcctgctaactgatcgagatcgctctcgtttgtactttctccctttgaggaaatagttccccttttatgtgcttcaagttcttctggtatcgtcgccagcatgggtagaggaaggattgagatcaagaggatcgagaacaacacgagccggcaggtcaccttctgcaagcgccgcaatgggctcctcaagaaggcgtacgagctctccgtcctctgcgacgctgaggtggccctcatcgtcttctctagccgtggtcgcctctacgagtatgccaacaacagtgtcaaggctactgttgagaggtacaagaaggcacacaccgttggctcttcctctgggcccccgctcctagagcacaatgcccagcaattctaccagcaagaatcagcaaaactgcgcaaccagatccagatgctgcaaaacactaacaggcacttggttggtgactccgtgggaaacctgtcactcaaggagctgaagcagctggagagccgccttgagaaaggcatctctaagatcagggccaggaagagtgagctgctggctgcggagatcagttacatggccaaaagggagactgagcttcagaatgaccacatgaccctcaggaccaagattgaggagggagagcaacagctgcagcaggtgaccgtggcacggtcagttgcagcagcagcagctgccaccaacttggagctgaacccattcttggagatggataccaaatgcttcttcactggcggccccttcgcgacgctggacatgaagtgctttctccccggcagcttgcagcagatgctgggagcacagcagcgccagatgctcgccaccgagctgaacctcggctaccaact

SEQ ID NO: 49418 - DNA, 839 bp, Zea mays
  unsure (1)..(839): unsure at all n locations
  Clone ID: MRT4577_145072C.1
ctatatctatantgcagcacggacctcgcacccggccgggatgttttttccatctgcctcttgctttatgataattcaacttgcgctgattatattcttggctacctagctagaaatgtctaattaaactttgtttgctagctagattttgttgcttcttttcgcatctgatctttttatctcttctgagtgctccgcaaagccttccagtgttgaagaagctgctggaagaagagatgagctttctcttgaaggaaaaagagatgatcattgctgctggtatcgtcgccagcatgggtagaggaaggattgagatcaagaggatcgagaacaacacgagccggcaggtcaccttctgcaagcgccgcaatgggctcctcaagaaggcgtacgagctctccgtcctctgcgacgctgaggtggccctcatcgtcttctctagccgtggtcgcctctacgagtatgccaacaacagtgtcaaggctactgttgagaggtacaagaaggcacacaccgttggctcttcctctgggcccccgctcctagagcacaatgcccagcaattctaccagcaagaatcagcaaaactgcgcaaccagatccagatgctgcaaaacactaacaggcacttggttggtgactccgtgggaaacctgtcactcaaggagctgaagcagctggagagccgccttgagaaaggcatctctaagatcagggccaggaagagtgagctgctggctgcggagatcagttacatggccaaaagggagactgagcttcagaatgaccacatgacccctcagaccaagattgagggaggggagagcacagctgcagca

SEQ ID NO: 49419 - DNA, 1253 bp, Zea mays
  Clone ID: MRT4577_145073C.1
gctagattttgttgcttcctttcgcatctgatctttttatctcttctgagtgctccgcaaagccttccagtgttgaagaagctgctggaagaacgaagagatgagctttctcttgaaggaaaaagagatgatcattgctgctggtatcgccagcatgggtaggggaaggattgagatcaagaggatcgagaacaacacgagccggcaggtcaccttctgcaagcgccgcaatgggctcctcaagaaggcgtatgagctctccgtcctctgcgacgctgaggtggccctcatcgtcttctctagccgtggtcgcctctacgagtatgccaacaacagtgtcaaggctactattgagaggtacaagaaggcacacaccgttggctcttcctctgggccaccgctcctagagcacaatgcccagcaattctaccagcaagaatcagcaaaactgcgcaaccagatccagatgctgcaaaacactaacaggcacttggttggtgattccgtgggaaacctgtcactcaaggagctgaagcagctggagagccgccttgagaaaggcatctctaagatcagggccaggaagagtgagctgctggctgcggagatcagttacatggccaaaagggagactgagcttcagaatgaccacatgaccctcaggaccaagattgaggagggagagcaacagctgcagcaggtgaccgtggcacggtcagttgcagcagcagcagcagctaccaccaacttggagctgaacccattcttagagatggataccaaatgcttcttcactggcggccccttcgcaacgctggacatgaagtgctttctccccggcagcttgcagcagatgctggaggcacagcagcgccagatgctcgccaccgagctgaacctcggctaccaactggcgccgcctggttctgacgctgccgacaataaccctcatcatcagttctaaactggatgcatgcacgagaagcttttcaagcgaactgtgaacgatggaagctggctgttgcctctagatgttcttggcttccatgacctagcttattatggtgtgtattgttgttgccttttgtgtgtgattctccttgctactctactgatggagaactaaacctaatcgattggacataatgatcaaatgctacagatcctgtgatgctgtgatcaggttaaggcaaaacatgtatactgattgcttaaatgggtttacgagtgacgacaatgctatttgttgcttc

SEQ ID NO: 49420 - DNA, 1365 bp, Zea mays
  unsure (1)..(1365): unsure at all n locations
  Clone ID: MRT4577_145074C.1
cggggcgcccgtctgcccgcgcgccccgctcccccttccttagcgcgagatggatccgccgcgaatcccccacaaatcgcgccaggtcgcaagctcacgcttccatccatggcagccgcgtcccgctcctccttcatggcagtcgcgcatccttcccaaattacctccgcgcgccagggaaggtccttcccaaatcacgcatcctggcgcgagatggaaccgacgcgaatcgcccacaaatcgcgccaggtcgcaagctccatggcagccgcgccctgctcccccttcatggcagctgcgcgtccttcccaaattacctccgcgcgccagggaaggtccttcccaaatcacgcatcctggagcgatccatggcggctgcgccccgctcccccttcatggcagccgcgctccctccgtccctttccatccatggcgcctgtaatctcctcccatcattggggcgaccttccaacgatgctgcaacacaacgacgggtattaaagtcgaggccgccaccccacccctttcctcctcacagcttccactgttcttcgattcgcccagttgagttcaataaggttgcggcggtgttgggggttgcggcgggcctcgccttcatcatcggcttcgtccgctgcgatacctgtgaagttaacaatctctgtcatgcatgtgatccatcgaattgcaaagaataaaaaagaccagatctccaaaaaggaccagcagatctggtcattttcccaagccatttacaaatttcttctagcagttgaactttgctaattgaagctgcaaaaggaacttcgatacatcaacattacgaggcacaacaaggtgagtgaaagccctatggtgtaattcatatagtgacatgatttcacttgtgttggtttgcagttatctgtagcagtcccaaagtacctcttgcgtcaacaaacatgaaacaagttcttcttacccaatgatgaacaaagatatataacaacctagggagactgtctgcataagctcacttgaaatcagaacctcgatgacgacatgatgactgatgagattaaatgccattaaaatctcagaatgcgagatcacacagttggggacctcttcaaaggaaccaaataatacagatgagttgaatggcaaatcttccatagaaatatctacctttctaagtaggtgggcaatgtcaatgatgttgtgagtcacctggtctttagttaggtgtttctttcctcatagaggggctttttattgtaaatgtactatttgttccaagcgaaaaaaatcttttatgttcgaagggttgnccattcttataacaaatgtatcttttatttcaaaaaaaaaaaaaaaaaagcggcc

SEQ ID NO: 49421 - DNA, 1391 bp, Zea mays
  Clone ID: MRT4577_145075C.1
tttgtttacataatcttcgagttctgatgtaagtaactatgagtttgtgatggctaggttgtttatttgtcaaactctgattgctgaattcttgtttcctcagcggcgggaaaaaaaaaaaagcatctcttttctatctaggttatctctttacatgctaaatttcagccgtatttctttctggatcagttctgtatacttctgtgatacacatcttgcgatgcggcttgtagtagtttctgctagctgagcgagatcgatctcgtttgtactttctccctttgaggaaacaactccccttttctgtgcttcaagttgttctgagatctccagcatggggaggggaaggattgagatcaagaggatcgagaacaacacgagccggcaggtcaccttctgcaagcgccgcaatgggctcctcaagaaggcgtacgagctctccgtcctctgcgacgccgaggtggcgctcgtcgtcttctccagccgcggacgcctctacgagtacgccaacaacagtgtgaaggctacgatcgagaggtacaagaaggcacacgccgttggctcttcctctggccccccactcttagagcacaatgcccagcaattctaccagcaagaatccgcaaaactgcgcaaccagatccagatgctgcaaaacactaacaggcacttggttggtgactctgtgggaaacttgtcactcaaagagctgaagcagctggagagccgccttgagaaaggcatctctaagatcagggccaggaagagtgagctgctggctgccgagatcaattacatggccaaaagggagactgagcttcagaatgaccacatgaacctcaggaccaagattgaggagggagagcaacagctgcagcaggtgactgtggcccagtctgtcgcagcagcagctgccaccgacgtggagctgaatccgttcttggagatggataccaaatgcttcttccctggcggccccttcgcgacactggacatgaagtgcttcttccccggcagcttgcagatgctggaggcacagcagcgccagatgcttgccaccgagctgaacctcggctaccaactggcgccgcctgacactgacgttgccaacaataaccctcagcagttctaaactggatccatgagaaagccaactgtgaccgatggaagctggctgttgcctctagatgatattggcttccataacctagcttattatggtgtgtattgttgccttttgtgtgtgattctccttgctactgatggagaataaacctaatcgattgggcataatgatcaaatgctacagcacccgtgaggctgtgatcaggacatcatgaaaaaaaaaaaaaaagcggccgttttgaatagcacttttatctattacgagg

SEQ ID NO: 49422 - DNA, 192 bp, Zea mays
  Clone ID: MRT4577_145076C.1
cctctatttcgtctcccctttttttttatttttattacaacggtctttgttatcagtgggcagaaaaaagtggagagtgtggacagatgtttacgctaccccaacaccggctgtacccaaaacattaacaactcatgtaacgagtttcagcgaattcaccaaaacctaacaaaaagaaacctgcttcaaaca

SEQ ID NO: 49423 - DNA, 371 bp, Zea mays
  Clone ID: MRT4577_145077C.1
ggcttgaccctcagagcggcctcacgcggcgggaatatttcaaggccgcggcgcaggccaacgggagcatttaagaccaggtgggggtgctaaccaccccggccgccacgcttgtcggcgtctacgacggccacgggggggccgacgcatcccggatactccgctcccggctcttcccgcacgtccaacgcgtcgtgcaggagcaggggggcatgagcgccgaggcgattcggagcgcgtccggcgcggccgaggaggagtcccataggcaggcgaggcaggagtggaggaacccgccgcggattgctgccgagggctcccgctgactgctcggggccaatttcggggacacgctgtacctggccaacccc

SEQ ID NO: 49424 - DNA, 180 bp, Zea mays
  Clone ID: MRT4577_145078C.1
gcataagtatctaacatccgacagggtgctttgaagaaaattactgacgctgtctccatcatgatttgtgtcctaaacaaaagtgctcatgaaaaaagagctcccttccacacgagactcatgatgttaatgaccaaccggtaaaaactaggccatacaataccgattcatgtggtatta

SEQ ID NO: 49425 - DNA, 428 bp, Zea mays
  Clone ID: MRT4577_145079C.1
gtctctctactttctagtattaattatcaataagttggtttggaaaaaaaaaaaaaaggaaaaaaaaaaaaaaaaaaaaaaaaaaaaaaaaaaaaaaaaaaaaaaaaaaaaaaaaaaaaaaaaaaaaaaaaaaaaaaaaaaggggagaaaattttaagggatccaaaattaacaaaccaaaaaaagggggggattatttttaatatagggccccttaaatccatttaatggaccgaatttttaaaccttggggactggaaaacccttgaggttccccactttatacactcttgggcattggaaaattttggaagttgggtaaataccaaaagggccctaaccaaccgcttttccaaacggttgaaaacccaaaagggcaaatggaaccccccttgaaaaggggctttaaccccgaaggttatggggga

SEQ ID NO: 49426 - DNA, 966 bp, Zea mays
  Clone ID: MRT4577_14507C.1
agtccccggcctgcttctgcctcccggggttcgagccacggtccccgcagcagtggaacctccgcgacgggtcggccggctgcgtgaggaggaccagcctcggctgcggcggcggcgccaacgccagcagcgacgggttctgggtcgtcgaccagatgaagctgccggaggccaccaacgcgacggtgtacgccggcctgacgctggagcagtgcaggcaggcgtgcctcagcaactgcagctgccgggcgtacgcggcggcgaacgtcagcgggggtgtcgaccgcggctgcgtcatctgggccgtcgatctgctggacatgcggctctacaccacggacgttgaggacgtgtacatacggctcgcgcagtcggagatagacgcgctcaacgccgcagcaaaccgccgggccccgagcaagcgcgtggtggtgatcgctgtcgtggcgacagttaccggcgtgctccttcttctgctgtcggccggctgctgctgcgtctggaggagaaagaggagggagcgccacggcgagacggatccctgcccggcgccgccgagcggcggcggagacgacgcgctcccgttcagggcaaggaagcagcaggcgctggacgaggactggaggagcgccgagaaagacgttgacctgccgttgttcgatctggcggcggtcctggcagctacgggcagcttctccgcgagcaacaagatcggcgaaggcgggtttggtcctgtctacatgggaaagctggaggatgggcaggaagtagccgtcaagaggctgtcccggaggtcgatgcagggggcggtggagttcaagaacgaggtgaagctgatcgccaagctccagcaccggaacctcgtcaggctgctcggctgctgcatagacgaggacgagaggatgctcctgtacgagtacatgcacaaccagagcctcgacacgttcatattcgatgaaggcaagc

SEQ ID NO: 49427 - DNA, 511 bp, Zea mays
  Clone ID: MRT4577_145080C.1
ccggccgggatactactcaagacagcgatcgacggatcaaagagagacttcctcacttctctcccatacggccgccgcatgctcgactgctctctaatgatcctccggatccagggatggagatgaacaatatcggctgcggcgtgctcgtacgcggctcaggcaacgtgcatgtgatcgggcaagggacggctccgtctcccagaagctgctgctcctaggcccgactccgcatcatcggcagactccgcggcctacgtgttctcgcactacatttcctgagactacagacaagaaccccgagatggacggaaaagactaaggggatatgcagatactccgttgtgctgtacagctctgatcgctccctcgcattatcgaatgttaggggtgaactcattgaatgcgcttgcgtaattataacaccttcctctacctattatatgtgtctctcccttcctctttctacttcataatccatgaaagaaaatgtatcactcctgctacagac

SEQ ID NO: 49428 - DNA, 289 bp, Zea mays
  Clone ID: MRT4577_145081C.1
ccagcggccggcccgacagcaaccagtaccatgctgcccagctaccgtaccatactcccagtggcgtaaacgctgccattacgacctactactgattcatgatattagcgaaatctactctatgcatccctctctatgtatatatgcaataatgcagtaagacgacacacattatcatgtttgccataaccaataatatatgcatcatacgaaagggttgggtttaccccattaagggtggaacggaaaactaaacaaattggagtttgacctgggcgggggccccttt

SEQ ID NO: 49429 - DNA, 236 bp, Zea mays
  Clone ID: MRT4577_145082C.1
cgtcggcaagcgacagaagcgtaagaaacaagtacgtaaccagggccgtaacccgccttccttgaggcagacgcacgaaacgagctgtcggtcgtcggtcttggtctgattcctcttcttccgcgccgcctgtccggccggcagcggcagccatggcctcgaacaggagcagcagcacggttgtgggcgatatgcagagcagttgtacagggttgggcccaactctccttccactc

SEQ ID NO: 49430 - DNA, 315 bp, Zea mays
  Clone ID: MRT4577_145083C.1
ctgccagcgacttgagaatccaggaccatattcttaggaatatggagtgattgtcactgcgaaacttaccatggaatagcgcaccctgcattcaaaaatcctctatggcccgatggtgatctgtaggcactcaatggcgcgagtacaattccacaccttagcagctcacagctatggttcctgtaatagggtaccttaacatacttttctgcgtcccttccatcggcttactcttacccagcgacgacactcctaaagggatcagacttactacatctcgattgcctgaacgctcagacgcccgtcacaagtcca

SEQ ID NO: 49431 - DNA, 499 bp, Zea mays
  Clone ID: MRT4577_145084C.1
ggtaccctcggctcggccggaacctacaaacctgccgtgggcgccgctctcgaccccagcgtcgagcggccgcgctctgcagcgcactcaccctccgctgagcacatgatccaaccctagaccggggccaaaagatctgcagctcgagacgaccatgaactggtgccttatccgaccgaaggatgacaaggaggcaagtcgtcgctctggtcgagagcctatgggtctgtctcctagacctggatgaaggtccaggcacgctgccatggaagccgcgaccgcgacttgctgtcctgaccacactgagctccataggggcactccctgcttctgaagttgtggcgggtccaatggagaccgcaggaaggagtctggccgtggtggcgccctgagccaagaccgatgtgggatcaacctggcgaacgggaaccaccgtgagaaagacctgcctcctcatgactcacactggcaactctaaggggatgggccccatgagggc

SEQ ID NO: 49432 - DNA, 557 bp, Zea mays
  unsure (1)..(557): unsure at all n locations
  Clone ID: MRT4577_145085C.1
attgggtacctcgaggccggccgggattcttactctctgacactaccctctaaaagagcggagacgccggtccgtcaaaatgacctctcagccgtcccagtacacaaggggccaataacctcgtccaggtcgagaacatggggcgaccagcgcatagacctaaccgcagctagctcctgtncatagagactcccggctgcgctcacatctcgcagccgtgacgcctgcgcactcagtgctctcgaacggtgctaccgtgcgcccgtcaactatcactgtcccgatacttgctctgcatgctctagtgagaagcgagcattttgcccagcaaggtagactacatcgtacccacaagctcttttagaggcgccttcggatgtcatgctacacgtggatatcgaatgtcaccagcgatgcgggactcccgcgtctacgctaaagatcctgctgagaaacgagatgagaacttcatgatccatctcatgatggctggtgttgcatctgctgctcctaagactagctgctgatcccatcgagcgtgtgaagctgcttattca

SEQ ID NO: 49433 - DNA, 200 bp, Zea mays
  Clone ID: MRT4577_145086C.1
atgggttcggtttattttaaaggggggaacatcatataactccaacaaaactgaatccaccaaacacttaattatagcatttggggtttaatactacaagcctattatttattcttaacaaaatctatataaaaaaaaactttcaaaaaacttttcattacaatgtaaacctatccaaaatttggttcttaccctcccaa

SEQ ID NO: 49434 - DNA, 4532 bp, Zea mays
  Clone ID: MRT4577_145087C.1
agcccaatcagtcatcgttactatggcataactcaatttacttctacaaaatatacgttaaacacagatgctttcaaagaatggaattgccaatcaccgcatgctacatgagccatcctaccacctggggtgtaaccaaaatgatcccctttgcggttgtttcctttcaactagtctttttgttcagggctgctcacacagcagatgtggctggctaattacagactcattcacggctaggctcacatttacaacaggggaccaggctgaatgccagcccaatgttaaaacacagttgcaaaacccacttgcaaagctatgacaaaattacaagctacacaactgtgggcacttttcgccaaaaccaatggtatctactctgtcgtatacattgtacatcatcttgcctagatcaccaccaaatcttgcaatgaaagacttagttcttgtgcaagttgtgctgtttgaccaccccgcagaatcaatggattcagactctgttggatcttttgcaaatggttaaagcaccgtgaacaacgttgcaacctctgctcagcctgaatgtcaactccaacgcctaaatttgctgataatgctgaatgaattactggtccaaaaatctttataagatccaacaacatttccaaagagaccatagcatgcctttcagtcttgctacacagtaacccagcaagaacaggcagaaaatttgagaaaaattccaggttgaaaagatcaagctttcctttgagagcactaacaacatctgcttgaacagcattgtcaggtagctttgccactgcagcaattgctcctttaataccactttgttcaaagacatgccgcatcatctctagttttgtcagccgaagttttacagcatttaggaattcatcatggttccgcactaaattgacaggagccatcgcttcatctacagttgacaggtccttttcaaatgttgtacttggttccgccagatggaatggatggttgtcatttctcgatgcccgatcaccacaagaaccagtttgtggtgaataatcagtgctagaagtctctcttttttcccatctctcaacaagagactttgttttccccagtggcacagcaactcctctaacatatttgaccttggcagtctctgttgttgagcatggtgattcaaaggctgcataaaatagagttctactgttacatcaccatactagcaaacaccgtgtcaatgtttaagaacaaagagaaatggctgtacatttatcatcatttaactgctgagaatggtccagcgacactgttctttccatcttttctgctatttgtgcaataccttcattatccacatcgccaaattcttctttcttgtgatatggagttagcccaaaggagaattttaagctagacaaaccctctgagcaaacatcaggttcagtgaacactgatcttgatgagctatcactatcagcagcactgccactaagtgagggttttcttctgtgaacagggatccgaaaatcatctgggactgcagctgtctctccagtccctcgacgaacattgcttactgttttgtcctctaaaatgtctctgggcacaacaataggtgctgaaacagcctgagatgtagtgtaaatatctttcactaaagctgattctgtaagattgcttttcttagcagttgcagaattattagccatcactgcacgagacgctaatgaaatgtctctctgcccaacattacgttccacattttttgtgttggtggaaggactatcaacaagcttcatacgcctcatcagggtagtactctgaacagatgactttaaagacgaatcaggtcttcgtggaatagtgctgctcctatctttcttggtcttatctgtacttgctggagtcaaatgtgagccacgaaccctgctttgagcaatcccagactccttgattttgtatgaacttcttgaatgtgccattgctgaagcaggacgagaatttgcagtgctatcaactggtttcacaggattatcttccatagactgcacaagctcagcaaaaaaattcgctttgggcaatacaccaagagcatagggtccaatgagtgatatatcagcagcccatagaccaacacggcactcatggtaggagcatcccaagagtttcccttcataaatactaaggtcagccaaattactccaacccatgtcaacaacatcatggcaccttactggttcccaagagaatacctggaaatattcatgttctcaagtaccaagcaaataaatatcaatcaagaacctatcagaatcaatgatttcaagtcgtccgactaatcgcgattagtcgcgattagtcgggctggtcggctatttgggctcgattagctggacgactcgactagataggctggtcggccgactaatcgccgattagggcgactaatcgcccgattactgtttcctggtcgtcctggctagggttttgttattgggccattttcaacccatctacagtatactttagactaccctctcctctcctctgtaatacctagccgccaaacagtgcactacgtctcctactctcctctcttgctagctcgactgttccagcccttattcacacttggtcgccggtggctgccccttcagacctacagctcaccgacggctacatcatcagcggctacaccaccctgccccttcccatgctcgcctgctacagtctccacatgcggagactgtcttaaggttcaccagctgcagtctccaccctgccccttcccaagctccagcagacctgcaccattgaggagatgagctcgtcatctcaaggttcctcatgctctgccccatctcccccttctctgcagttctgccaaattagtggatggttgctggctgccctaatcctaagcctgtgctaagtagtgactttctaatttatataatgtagttgcatacatgtacatttatatatatagctatataagtataactactagactaggacgaccagggaacgactaggagtcgactaatcgccctagtcgtcgcctaatcgcgactagtcgcctaatcgcgactagtcgcctggtcggtcccagggatcgaccaggcgactagaaatcattgacagatacaataaaatctattggatagttgtagtatacaaacaagtgaatcaagcatactgcatgctctcaagtcttgctcaacacagtgttttctggctgcatttgctaggggggctagggcttttcctagtgcatgaggctatactgttttattttctatgtatttttgcctgttagggctttgtactttggtccatttcggacctttctctctttcaatataatgacgcgcagttctcctgcgtgttcgagaaaaaaaaacacagtgttttcttcaatctcaactggaagatatgtaagaagataagatgtgtgcacaatgtatgtagtatcatgtgtgcagatcatccatataaaaatgcatcccaacttctagatcctaaagtatcatggaattactactgtgattcacaagaactaggaatgatagatggccagcttcagaatctaaacaggcaataaacttttgattgaagagcaccaattgacccagtaaccttcaggacagctaaataagaactgccattagaaatgtgctcacagaacaccaaaagaactcctttagtggacggctaagccatgttaaaatgcactcaactctaaaaacaattaaatatgaaatgcaggcctttcaacataataaactgtttcttaccttcatttaagcagatcaccttttgccagaaccattccagaacaagtagaccggaaaccggattaagttgcttcgcctttatgaaactaattaaccaaggcttgtgtttaactaaaacttcactatttaatcatttgtttcacactcaaataattatactgttagctacgcaatcatcttaaagcgtagacttctaaataaattccaagtgtaggtaaactgttagtaaattgcctttttaaaaaaggcatagtttgatgatgaaaagctttctgcggattccaccatgtacaataggtacaacaaaattgactaacaactaaaaagttgcagtagcaatgcaaataagtgaatcaagtatactgcagactcttaaatctcactcaacaaactggagtaaagtgctaatcagcacagggtaaccaataaataaattcgttgggacagaaacaagaagacataagcatgcttacccttgtgaaaaccctgagcagcagagggcaggtcttctcgcggtcgattggttcggggcggaggcgcgccatcggcggagggccccggtgctgcatcggcgggcccggccgcgccggcctcatcggcatatcggtcatgcctgccatctcccctcctcagcaacgaggctctgctctgccgccgggtggattttgacaagggaaggcgctcgccgccgccgccgccgccgattttcggcggagagaggtggtcgtgggcagggctggaggatcc

SEQ ID NO: 49435 - DNA, 593 bp, Zea mays
  unsure (1)..(593): unsure at all n locations
  Clone ID: MRT4577_145088C.1
tcatggtgttactgttngattagnaagcctcggtggtggtggaactatagagatagaggtcaaatataagagttatgacgatatcgagcgtgaaaacatggtggagaatacctttcgtgtctgactttcttgtgaagagcagcctgggatctgctcttaggatggttcttggatctgaaagtataaatgctagtcagtttgtgaagtctgcatttgggcaactgagttctttcacatacacctatcttccaaagccatcatcattggaaagtggagttgatgtttctaaaagtgatgaagaatcctcagatggcccaactaattcaaatgagcttcaacaacagaatattgattctgaaatcatttcagattctcattctcatagtgaagttcaatctcctactgctgttgttaatagtgaaggaaattcatcgtctgatatgaagaaatcagatgaatatttttggagagctctgaacaatgtactaaaccaaaatgtactacagaactttggattttctctcccggaggtcaagcaattggggtggttttgacctattaagttcacttggtctgaaatcacgcaatattgc

SEQ ID NO: 49436 - DNA, 512 bp, Zea mays
  Clone ID: MRT4577_145089C.1
gctcaaactaaaaattacttgtatgaatatattagcgtggacatattcaatcaaatatatacaatgaaaaatgctaatgagatatggcttaaattacatgagccccattatggcacaagcaatgtccatgagcaaaaaacattgtttggctttgaatgaatacaattcttttaccatgaaaattaatgagcttgttcaacatatgtattatggattaaattaaattattaaagagattaattatattagcattaatatgctagatgatgtgaacattgcacaaaagatcatctccccattaccacaacataaatatgggagcaacatcaccatacttcataatatggaggacttgagccaaatgaccccggtgctattgatcgactagaatttggcatttgagatgctacgaaagatgggtgaagaaaaagctgcttagtccaggacatgctttcacatgtgaagagcataaaaagatgaagggcaagaaaaatgtggaaaactcaagtttt

SEQ ID NO: 49437 - DNA, 310 bp, Zea mays
  Clone ID: MRT4577_14508C.1
tttttgtttttttttatttttttttttgtttttttttttttttttttttttttttttgggggccccaaaagcatggggaaaccttattttccatcctgtaaccatttttttttaggaaggacaatagcattttccattaaccaaaggggggaacgaaaacaaattttgtaggggtctcgtaaaacaacaatgtccgaatattgctcacacatgtggggacaaaaagttttatgaaacaatcctgggatcattttgtagaccatccaagggctccaacacctaaacgggtaagagggggccccacttccta

SEQ ID NO: 49438 - DNA, 313 bp, Zea mays
  Clone ID: MRT4577_145090C.1
ctctagacgactggatcccccgggcagcaggatttctgtacgaggtcactgtcggtgagtgcgcagtggggatcacttgtccgctcagttcagacacgagacggaactttcccagctgattatgttccaacagtatatgggatctttagtgccaatgtagcgatggatggcattagattgaatcatggactaaggtacactgccggacaagcttagcacactacgctacagtcactgagttacaaaggatccgatatgcttctgttgggcttttcgcataactacaaggccaattaacgaaacatctacaaaa

SEQ ID NO: 49439 - DNA, 904 bp, Zea mays
  Clone ID: MRT4577_145091C.1
tccctcgagctgccggattacgtgtcttccttctctctccggcgtcgcgtcgcgtccctccttcctccctctccatttccggctttccgccaccaccccccctctctctctcttcttcttcttcttcagtcctccctccccgcgccggagttggagggagaggggagaagctttccggcgccgacgccgacgccggacccggcaccgacacgatccgttttggcttccaaggtccgttcttgctcgtgtcggttttccacccgcgtgagatgcagatggattggtggggaaaagtgtcagctttggcgcgaatttggcgagatgcatcgagaacggtggatcaagtgcatcacacctgtagggaggccccttggacagcagtttgtgctgcaaattctatatagctctgtcgcagcatggcctcggtgggcgtggcacgctcttctttgggatttcagaatggcacaagttctagcagtgacccagatcgtcttcccaacgagttgggcagtatgagcataagggacgacaaggacgttgaagatattgtagtcaatggcaatggggcggagcctggtcatatcatagtgaccagcattgatgggagaaatgggcaggcaaagcagaccattagttacatggctgagcgggtggtaggtcatgggtccttcggaaccgttttccaggccaagtgtcttgaaactggtgagaccgtagctataaaaaaggttcttcaagacaagagatacaagaatcgtgagctgcaaaccatgcgagtgcttgaccacccaaatgtggtggctctaaagcactgtttcttctcaagactgagaaagaggagctttacctcattttggtgcttgagtacgtaccagagactgctcatcgtgtcatcaacattaca

SEQ ID NO: 49440 - DNA, 566 bp, Zea mays
  Clone ID: MRT4577_145092C.1
ccggccgggccggggtcgtgtccctccttcctccatctccatttccggctttccgccaccaccccccctctctctctcttcttcttcttcttcaatcctccctccccgcgctggagttggagggagaggggagaagctttccggcgccgacgccgacgccgacgcggacccggcgccgacacgatccggtaatcctctccgtgctcgcgctgtgcgcctctccgtggatccggtcgggcgtttgattccgcagcggcgtcttccgtagccctggcgatccgtgagatcgaggggcgctggcgtggtgggctggttttggcttccaaggtccgttcttgctcgtgtcggttttccacccgcgtgagatgcagatggattggtggggaaaagtgtcagctttggcgcgaatttggcgagatgcatcgagaacggttttccctcctcttttttctttccgcgcatcaactatgcgccagtacccccgctagagggtcaaccactctgccaggataatcttctccattccatgatcccacccgaactgccctcggaccaagccagcaccc

SEQ ID NO: 49441 - DNA, 395 bp, Zea mays
  unsure (1)..(395): unsure at all n locations
  Clone ID: MRT4577_145093C.1
ccctcgaggcttgnccggggcaatgacttgaagccggacaatgataacatggaggtttgctagatttacatctgtccagccagtactctgataaactggaaaggagcagctgtagacgtctctaacttggtgttggtaccatcatctttatttaattcgtagttttcttctttccatttacttgtatgaccggcccggcgtcctattaccaacaaccagatcaccgcttctagttcaaaatggctaggcaaactacctactatcttgagcttaatatttttgacttgtatccatccatgtcaaacatcagttcggttttcagcacctgcagatcagaaattccccaacgagtaaaaaaaaaaaaaaaaaggaaaaaaaaaaaaaaaaaagcggcc

SEQ ID NO: 49442 - DNA, 1980 bp, Zea mays
  unsure (1)..(1980): unsure at all n locations
  Clone ID: MRT4577_145094C.1
cattgggtccctcgaggccgggcgggcgtcgcgtcgcgtccctccttcctccctctccatttccgccaccaccccccctctctctctctcttcttcttcttcttcaatcctccctccccgcgctggagttggaggagggagaggggacaagctttccggcgccgacgccgacgcggacccggcgccgacacgatccggtggatcaagtgcatcacacctttagggaggccccttggacagcagtttgtgctgcaaattctatatagctctgtcgcagcatggcctcggtgggcgtggcacgctcttctttgggatttcagaatggcacaagttctagcagtgacccagatcgtcttcccaacgagttgggcagtatgagcataagggacgacaaggacgttgaagatattgtagtcaatggcaatggggcggagcctggtcatatcatagtgaccagcattgatgggagaaatgggcaggcaaagcagaccattagttacatggctgagcgggtggtaggtcatgggtccttcggaaccgttttccaggccaagtgtcttgaaactggtgagaccgtagctataaaaaaggttcttcaagacaagagatacaagaatcgtgagctgcaaaccatgcgagtgcttgaccacccaaatgtggtggctctaaagcactgtttcttctcaaagactgagaaagaggagctttacctcaatttggtgcttgagtacgtaccggagactgctcatcgtgtcatcaaacattacaacaagatgaaccagcgcatgcctttgatttatgcaaaactgtatatgtatcagatctgtagagccttggcatacattcacaacagcattggagtgtgccacagggacattaagccgcaaaatctcctggttaatcctcatacccatcagctaaaattgtgtgactttggcagcgcgaaagttctggtaaaaggcgaaccaaacatttcttacatctgttctaggtactacagagctccagagctcatatttggtgctactgaatacacaacagccattgatgtttggtctgctggctgtgtgctcgctgagctgcttctaggacagcctctgttccctggagaaagcggtgttgatcagcttgttgaaatcatcaaggttctgggcacacccacacgtgaagaaattaagtgcatgaatccaaattataccgagtttaaattcccgcaaatcaaagctcacccatggcataagatattccataaaaggatgcctgctgaagcggtagatctcgtgtccaggcttctgcagtactcaccaaaacttcggtcgactgctttggaagcattggtccatccgttctttgatgaacttcgggatccaaacacccgcttaccgaatggtcgttttcttccgcctctcttcaattttaagccccatgagctgaagaacgtgccggcggatttcatggtgaaattggtccctgagcatgcacggaagcaatgtgccttcgtagggtggtgatctctggataagaggatgacgactcgatgattagctgaggaccaagttaatgtctgttagaaactgccggagatcgacattgccagatgtggtgtggtataagataggcaatatgtgtgattattttttgttcgaggttatcaccccccttgccccagaaaagatgagaagatgtcgatgtaacaagccctctgcgcttctgtaagtagatgagtgttgctgcatgccccctgggtacatgtatcggtttgagcagaattctgtttgcctgaatcgtgccatcaccacgcagggatccatcccttgtgtgacgatgttcagcccaacatttgtttatggattcaggctattcgttcatttgtactcctcgcatcctatggatgattaagcaatatttgcaatttttctaaaaaaaaaaaagttataaaaaaaaaaaaaaaaaaaataagnttnttgtgttttggttaag

SEQ ID NO: 49443 - DNA, 277 bp, Zea mays
  unsure (1)..(277): unsure at all n locations
  Clone ID: MRT4577_145095C.1
cttattaattgtatcttgtatacntttcattttcagactagagataaaacaactggtcaacttaaaaataaatgtggtctcctcaaaacacttggacaaagagttaatccttaccttcctcatatttttggaaccatcaagtggctatttaacaataatagttcaaaatttaagcatcatgctgctcatctcatctccattatagccattgtcattaagcatttccaggacgatcaatttatgtctcactagagtgtttaactgtatgattacttat

SEQ ID NO: 49444 - DNA, 471 bp, Zea mays
  unsure (1)..(471): unsure at all n locations
  Clone ID: MRT4577_145096C.1
tcccgctcctcctcctcctcctgcccctcccccaccnacacccgacgggacgcctccccactttcccctcccccggatccgcatggcgcctctgcagcccgcgccgctcggcctcccgtagccgacgcccggccccgtcccagctcgtatcgtggcggcattcggtgggggaggacgcggttctaagctgtgatttggcctcgaaattatttgggatttcggtgacgactgtcgagaggtgcctccttccgagcatcttaatcctgaataaaaggcaggctcatctttgcacagagtcattggagtgtgcttgacgtttcagcagtactgtgacctttattacatagttttccgcagcattgtgcgtgatgtaagagatggatttgggagcttgtctcgaacagggcttgaggggaagtttctggaccaccggcgaggcacatatcacggagatggccatgaactgcgtga

SEQ ID NO: 49445 - DNA, 402 bp, Zea mays
  Clone ID: MRT4577_145097C.1
tcgagctcacttgatggcggccgccctttctttttttttttgttgggttttttttttttttttttgttttaataaccaacaaaaacaggacatacctatggaatgaaacaaacaggtacagaaacggggaagtttaaaaacaaaaacgcttcagcaactcaagaagaacaggccctttttatttttgggatgaatcctgcctttttaaggagcttcagataagaaactttgggttcctccaaaaggctcgggctagctaaattttttggggggagaacttattgggactggtggactgaattttcagggggtgggcttttagggttttgggactgtttggggggggtgccatttggagacgggttactagcttgagttttttggggggaacccttttcaggg

SEQ ID NO: 49446 - DNA, 110 bp, Zea mays
  Clone ID: MRT4577_145098C.1
acgcgctgttccgctgcaaggacgccggcgggaccaacaacgggacaacaactactaagaacgcgaaaaaggctcaaggtcaatcggaacaaaccggttccggggcaact

SEQ ID NO: 49447 - DNA, 303 bp, Zea mays
  Clone ID: MRT4577_145099C.1
gcttagattgcttacaacaaagggggcatccttgagcaacaacacctgctgacaacacaacgccatgggccttacaaagagcataaagattgatgttcgcttaaagctcaaccacaaggcaccctgcgtgtgcccacacctaacacatgtttattgtaaccatacaaatttaggggaggttgcttccacacctaactatcctataccaaacagacgaaaatttgagttcacacttaataattcatggggcacattgatgtacaaaagaagttccatcaaagggaggtgcaagcctatgttctg

SEQ ID NO: 49448 - DNA, 474 bp, Zea mays
  Clone ID: MRT4577_14509C.1
tctttctttcattttttcttttttctttttgtccatcttttcatcttttattctttactttgttattaactcatggcgaaggcctaccccaccgttaacaacgacttcctcaaagccatcgacaatgtcaaacctgagctccttttcctggggggggtgaagaatcgccccccgctcatgctcaaactcgccccgcactctggggacacctcatatgttaacaccaaaaccaggatccacttccctaccttgaacaacacagtcaagcaagcgcacggagccatctacagactgttatttgccctcactctgctctagcccatcaacgatcatttccccatactataactactctaacttacaccatctagctggaatcggggcaaaatagataaccggccgacctgatgacccctaccaccctaagaggcgacacaatcctaacccttctcccacaggcccccttgctaatgc

SEQ ID NO: 49449 - DNA, 575 bp, Zea mays
  Clone ID: MRT4577_1450C.1
cctgcatcgaaatggtattcctactctaatccgagtcgccgctgctccgatatacaacgctgaccccatcttccttatcacgaccacgaccgacggcggaggcaccctacccacggccgacgccgaaagatccagagatccagtgacccaatgccctaaatccccatccgaacgatgctactgatacagtaggtgatcgtgaacaccggagaaaggcatgttacctgctagtggcgcagcaggggatcccacccattagctccgtggctccgcggcggcgacacacctccggtgagaaatcccaacctccaaacgacccgccccccacgctaaggcctcaccaggtacggttccctcccaccacgccaagcccccgtgtctgcattcgtgcccaagttcctcctggaacgaagaatcgcagcggcggtcctacttgttcttcatcgtcctggaccgacgcactcaccctctctctctctcgatgtctctaacaagatggataaggggcacaaaaatctcttcgaggttttatattggggaggcgtggaatccgaccattgatccatacccggatc

SEQ ID NO: 49450 - DNA, 211 bp, Zea mays
  Clone ID: MRT4577_145100C.1
aaataaaaaaagggcctctttatttttggggaagccccaaacatgggacaaaaaactttttttttggactttaaccccttagaaatttaaaaggaggggcccccccaagttggggtgttgggtgaaccctcttggggttgtcaaaacaaggtggttgaatgggaacaattgttgccattgtaaaaaggggcccgcgtttggcgcagggtgc

SEQ ID NO: 49451 - DNA, 900 bp, Zea mays
  unsure (1)..(900): unsure at all n locations
  Clone ID: MRT4577_145101C.1
ataatctcaccgatttctaaaaaaaaagcagaatctctccggtgcgtaccggaggctgagaggagtcgtggccgccgtgtcaggagtattcccgtgtcacaaatccacaccggcgccgcctccccccctctatctccgtctccgtcaccgggaagcggcgaggagccttgcgctgcatcgccgtcgagatggatctcctgaggaaggagctggagaagaagcggaaggcggcgacggccgacttcggcggtaagaactttgtccggcggtcggagctggaggacaagcagctccagaagcgccgccagatccccgccaaggctccttctgtgcccacccccaactcctcctccgcctccgaccctaccaactccaacgccgaccccgcccaggccgggggcgggaaccctaaccctagctcctccgccgccgcggcctctgttcctcccgccctcgcggggaagaaggccacgccggacgatacgctccactccgaggagcgccgcattgatgagctcgtcctcccgcggaacgaggtcatgcggcgactccgggtgctccgcgagccggtcacgttatttggggaggacgacgccgaccgccttgatcgcctcaagctcgtgctcaagtccggggcgatcgacgacattgacgaccttgagatgacagaggggcagaccaacgatttcctccgtgacatgattgagctccgcatgcggcagaaggctggtcgagacgcctacggcaagggtaaaggcaagcgtgtaggtgctggtgatggcggcgagggcggcgccctgggagatgatgtggatgaagggggacgngatgcccggagnagtggggatgatgctgatgcanacnagggactcaagcgaatgaaaganccagtttgaggag

SEQ ID NO: 49452 - DNA, 396 bp, Zea mays
  Clone ID: MRT4577_145102C.1
cttaatcttccctttgggttggggttttttttctctcccaaaaaccaccacaatgggggggattaaccgtggcccctgcggggaaaccaagccaagatggtggcctcatccatcgacgggcggagtacatcccaatcgaaagccatggaagggaccacctacctttagtgtgacggggatcttgcccaccattcctgctccttgggggggctcccaaaaaaaaccgtaggtgccccccccggcgaggggaaccgacaaggcctcccctggcccgcggggggaccccccccggaaaaccttgaagggcccaaccccgctcggcaccctgttttttaaaacacaacttttggccgaaagccctaccttttctttcaaagagaagggacaccccccctt

SEQ ID NO: 49453 - DNA, 737 bp, Zea mays
  Clone ID: MRT4577_145103C.1
tttttttttttttttttgcgaataatttcatcgcagcgttgcaattgcaagctagggcaatgatcagcttacgagtgcaacacagacgttagcttttcttacacccggtctgtgaagccccaaatcaccaataaccaaacacaagatcgacgctgcagaggaaggcatccggcgggtggagcgtggacatataatatactagtagggtgttcgagtttgttttttttttttttaataagaagcacttaattaaccacggcttaaccttaatcaagcgatcgtgacaagtacctaaaacaaacagcctagggtagcaggtacatcatcatgctcgggtccggcacgtccgtccagcagctcccggcgttccagtacgccgccgcggccgacgcgtcctcgccgatctcgaacatcccagcggcgtccagggacgcgaacggtgccatgtcctcggatactgaggagtacggcgccgcgaagccagcgggggtggaggacgtttcctccttagcctgcgccgccacgaagctgaacgccgggagcggcggcggcggcggaggcgcgaagagagacgccagcgccgccgcctgatcggcgaatatcggcgccggcggcggcgccaccacgtcggccgtggaggagaaggcgaagcctttgggcgaggggctcgcgctgccgttgccgctgctgatggagccgcggggcgaggacgccgaggcgcggcgcgggctcttggc

SEQ ID NO: 49454 - DNA, 292 bp, Zea mays
  Clone ID: MRT4577_145104C.1
agggggcttgtccttttctatgggagatactgaattcaaaaaaaaatgattcataccccgtgtcaatcgaccaaattgcccagatgcacgattacagagcgattgttatatactggttttgacagagtggcgggcccacaaagtttttatttcacaaatactccgaccagaaatatatacgatacaagcatactatcaccaatctggatggcgtgagggagacaccaacagcacacaacctagttaggacaggctgtggtttccccctgcccatgagggaaacccctggggg

SEQ ID NO: 49455 - DNA, 334 bp, Zea mays
  Clone ID: MRT4577_145105C.1
tatctggagaacgcggccttagcgttttttttttctttgtgtctcatttatggatagtgtggtcaatacagtttgttttgttgacttccgttgggatggatcttaaacatgctgagctagctgaacaacgtgccttgactgggtttattatatagagctggaggggtgggatctaaaaccggctaacggacgataatcagcttgcaaagttaggtgaagaatcatctccacggaaggcaacaaaacagctgtcttggccacacttttcttcttgtgttacctcggccgggaaccctcttcgggggaagtgtccagcctttgggctttttggtgg

SEQ ID NO: 49456 - DNA, 417 bp, Zea mays
  Clone ID: MRT4577_145106C.1
aagccataaccttaatttccatttttttttttttgaacaaaaaagacaaattcccggttgccttcccatccggcttgcgtgtttgcgcaaagggggtctttgaaacctgggcggggggctaccgacaaccctccctcatttttcttgggtttcaaaagcctactctccaagaccgttggacaaagctagggcggccattttcttgggccgttcaccagattctgcaacctggctgctgttaaaaacagtgcacctctcccgccttgaagatcagcgacccactaccgccccctatgggtagagggggccttattgcctccgaacgcggctcggttgtgtttggaattcccttgtgcggtaagtgagtgcaacgcgtttgtcaccctcgagcgagattcctcctatacctccggtata

SEQ ID NO: 49457 - DNA, 1617 bp, Zea mays
  Clone ID: MRT4577_145107C.1
accataacatagtgtatagagataaatgtcacaatataatcagagtacttattatatagcggaagtcttacaaaataaaatataaatatagatcgaactaaagttcatccttggcgccagaaagtcaactgggagatgccacctagatggctagatcgaatcgaactcctcgatgtgtggctccacttgaaccacctgttcttctcctatgggggtgtgagacagcaagagtgagctcacacatgttcatcactcaacaagttgtggggaataatgtggcatgaactcaccaaaggtgggagttcatgtgatgtgtaaagctgatcaacagtagggttaaagctgagcattgcttttaataagttggtcaaattttattagcagttactaagtgtaagtaaataccaaccataataaataatagaacaaaattaataaataatcccatgaaaatgcaaatgaaaaattgaatttaagttacataaattaatcatgtgagtgttcgagccactcatgaccgtgagcacggctagtataccagttttacactctgcagatgttgcgcatctttacccacaagtcatgttacccatctgccaaggggtcatgaatctcatacacctctaccaaggaagcgaggcagggtaacactacgaggcctttacaaagttccactagcttcagaaaactcgctacagtttctaggaagctctaatgcagggatccctcgcctgaccgccatcgcaacaaaatcaacccaaggacctccctacactgaccactcccctactgcccttgcccctttcgggtaaggtagtcctccactagcttttctaattagttagccaagggcattgcatactacccttgtgatagcactgttttcccggatggttctccatgttcccattaacataatgatcttatcatgaacataaataacataacagaatgacaggaacatggatataatgaaatattaacccaaaaaccgtgtaaagcaatagcataactacccaatgattcaggggtaaacaaggtaaaagataaatagtctagggtgacctattgggtcccgtcaaaattaaacctatgcatgaatagtgataacaaaaaaaaatattgggtaccaaaagttgatcaagggcataacttgtctggcacttgagattccagttaccaggatgattcttcatatcctcgtaacgtcgcgctagtcgtagcaatacaaacagatatggtatagacaaaattaacatcacaccaaacataagaacatactacataataatgatctacgcgtgctacgagatcgtgggatcgagaaccactaaaatcggagttacgattaaggagttatgattttatagaagatatgtgtgattaaaatattaaactatattataaatcggttaatataaattatatgagagattattctataaataattacctcaactttaatctaagttatgaattgaccatagatcatattctagtatattataatgataagcagtttaacaagactaactgttgggggatttcggcttccgaaggtcctcaaaaacatgatttaacaatgtttctggagtataatacatgaacaggtatctt

SEQ ID NO: 49458 - DNA, 588 bp, Zea mays
  Clone ID: MRT4577_145108C.1
aataacagagggtatagagctaaatgtcacaataatatcagagtacttattacatgggggaagttttacaaaaataaaagataaatataaaatgaactaaggatcttccttgttgccataaagtcaactgggaaaccccacctaaatcgaatcgaactcctcgatgtatggctccttttgaaccacatgtttttttcctggggggggatgtgaaacaacaagggtgagctcacacatgttcatttttaaacaagttggggggaataatggggcatgaactcaccaaaggggggagttcatgtgatgtgtaaagctgatcaacaataggggttaaagctgagcattgtttttaataaattgggcgaattttattagcttttactagatgtaagtaaatcccaacccttattaaataatagaacaaatttaataaataatcctaagcaaatgcaaatgacaaattgaatttaagttccataatttaatcatgcgaaagtcctgagctactcatgaccgggagctcgactagtataccagttttacactctacaaaggttgtaccctgtacccacaagtcgtgtatcccat

SEQ ID NO: 49459 - DNA, 231 bp, Zea mays
  Clone ID: MRT4577_145109C.1
cattaaattgtatgtttcctttttataccttaacagcacggattacacttgacaagagcttgattcatttttattcaagcaaatgccaataacccaatccctggctctgagggatgacagtacttccaacagggggagtgtattgggacctttttttctttctttttttaccttttttataataacgaaggaagggggagagatgattgcacagaggtcttccaggttcac

SEQ ID NO: 49460 - DNA, 1137 bp, Zea mays
  Clone ID: MRT4577_14510C.1
tgggacctcgagccggccggacaatttcaaagagagaaaaaaaaaaaagggtttttggttgggagacccgaccaagagaggaaggtcagccagccaaacgccaccgccgccgtgctcgcgccgcacgcaactctcagctctctgacgcctcctcctccgtagattccgacgagagagacgcaaaccaacgaggtaggaaggagcgcgaagatgggagcgggggacggcgaggtcgctgcgagcaaagacaaggccagcggcggcggcgccgagcggacgtcgctggacggcgtgcgggataagaacgtgatgcagcttaagaagcttaatacggcgctattccctgtccgctacaatgaaaaatactaccaggacgccatcgcctccaaggatttctccaaactagcatactttagcgatatttgtgttggtgcgatagcttgtcgcctggagaagaaggaaggaggagcagtccgagtttatatcatgaccttgggtgtactggcaccgtatcggggtcttggtattgggacaaagctgctgaatcatgtgttcgatctctcagcaaagcaaaacatctccgagatatacttgcatgttcagaccaacaacgatgatgcaattgctttctacaagaagtttgggttcgagataacacagacaatacataactactacatgaacataacgccaccggattgctacgttcttatgaaattcattggccaggctgctacaaagaaatgagaagcagcccgcgcagctttgagagaccactgccactcaagttatggtggagatagttgggatccggtcacagtttgtgctgtgctttcatttttgtgatcttgaacgctgtagactcctgagtagcctttgctatcatttacattgggagtcatcttgcttcagggcatggattcgtgcctgaacaatttcttgagttgctgcttttgtgggacagctgtgatcttgtaggtctgtatgcccaatcgggcttgtatcttgatggatcacgatgtcaggatgttctgcatgctcattttggttgaggtgtgacgattcagttattcatgcctaccattcttgtgcgtagacatgataagataatccccgagcttgaaataaggaaataat

SEQ ID NO: 49461 - DNA, 777 bp, Zea mays
  unsure (1)..(777): unsure at all n locations
  Clone ID: MRT4577_145110C.1
ctcctatagggcgattgggtttctcgaggccggccgggagtcatttacttttaaaccaacgaaacaaatcttgaccatgtcgatttacttaaccaaagcctccgaggcagatttaccaactattgcccgcattgcaacatctgcctttcatccagaaacagatgctctctctcgtcgcttattccctcgccatctacagccaaaagacatacccgacggcgaagcagcctatgactggcgcttagcacgcaaagcatccagtctcgcatcgtcagaatctcatctggttatagcagtcgataaggacaaaaatgtcgaagatcgcatcgtgggctttgcactttgggatgcacctccagctgaggggggtgactcgagtccaaacaagcccgtagagtgtgatgcacttgacaaatcagctttcgaggaaatgaaaaaaactgtgaatcaggatgctatagacacgcttggcgagaaaggaattgctggcgtctggcatcttgactacatcggagttggaccaggcaaccagagacggggaataggaaagatgttactgcaatggggacttgaccgtgcatccgaggaaggaaaggactgttatcttgtagctactgaagctgggcggccattgtatgttgccgcgggtttcgaggatattcgaactgtcttgatcctggggattccacatcactccatgattttangagccgggaagtcctgattatcgcattcggnacctttagactgttataaatagctcaaccctgatggtag

SEQ ID NO: 49462 - DNA, 176 bp, Zea mays
  Clone ID: MRT4577_145111C.1
gcgagaggcaagggacgtaagaagtcttctaattctatatcattcagttcgggtccgtgaacgtagcatctccttgtaaccatatatacatgcccgcgctatctatgagcattgcagacattcggataacgaacgttctcatctcaaaactcttctcctgatcctggctcaccggc

SEQ ID NO: 49463 - DNA, 700 bp, Zea mays
  Clone ID: MRT4577_145112C.1
gccggccgggttcgggtacaagacctgcatccattggtaaaccgactacacccaaatgctctgatccctgtatcagaggatttgatagaattgaggatccctatgacgaggaggatcttgtcccagatgtcaacaatgatactgcttacttgaccccagatggaggctattggatcggatctcacagataaagtcgagtcaaatacgggcgaattaacatcagcaccatgcgctcatatgtatgagatccctatagggcaactgtgagcctgcatgtaccccaacttaacccactaacacttgatatacttcggaaggagcctgaacatgtaaacttctataagatcaacatcacatctgatgagactccttctcctgatgaaattgctcgttacaaagtgcttcccaaatgccttgacctgcgtcagagggacatattcagagaggaaactgctccttgtgaaaaatagatcataactgatcctagtacatccaaggctaatacgaatacattcagttatgaacatcaggcgtaaaccgagcaccatttcataatcgtagatggcgtgattcttgcgtgccccaataaagattctatagagagagtctatccgattgccgaagcaactaccgtctttactgatatgcactaccacctttcggtgttgtctgctggggatatccgaaccgtgggtcatca

SEQ ID NO: 49464 - DNA, 277 bp, Zea mays
  Clone ID: MRT4577_145113C.1
cccacgcgtgcggaactatctggagctcatggctaacaatatgaattgctgcacggggcgtgactatcttgaagagtgtagcatatgagactaccccaagtcccatgaggggatatgacacaaatatctctgtatatgcgctggaacacataccgactcacctagtgttcacctgatctgacaaaatctgcttatggatactgtgctgattcaactctatgcacagttccttctagctcatatgtgttcaggcgagcgttctgaatgaatcaagctt

SEQ ID NO: 49465 - DNA, 300 bp, Zea mays
  Clone ID: MRT4577_145114C.1
agaacgtacagcctggtacaatggacagatatcgtactgcaccctgtgagcagaacataagtcctgacatctgtgagatggggcaatacggtgctggactctaacagataccaaggcgcattacactgaaggctctgtcctgatcgactctgttctgaacgtggcgatgaacgaagaccagaactgctactgcttttaaggatgccaagtattccactctatttgacgctgtactgaatctagtttggggacgctcttgatctcaaagatcagggtaggagcaccatgaccgcatgaagc

SEQ ID NO: 49466 - DNA, 435 bp, Zea mays
  Clone ID: MRT4577_145115C.1
gtcatgcgtctgggcgctatggactcagttcagacgtcccgaggttacagctacaacgggccgctgtacaggctcgacagtacgagcttcaccacgcgagaggacctaactgaagcgggctccacgacgttcgacggactggcgtgaccggacacttatgcacagtgctttacatgctggcaaaatcaacctgcacaccactgacgctggtggaacatggccaccggccacaccatcaggctgctccattgaccgagcttcgagagccgcctgttgccgtaccaggacccgtccctgaacgagaccttgctcgggcacctgagccggaactgcccgcacaaggtcacctacctgcggacgccgaatgacatgcacacgcacgtcgccttctacaacaagtactacgaccacctggtgaaccacgacgggctcttc

SEQ ID NO: 49467 - DNA, 890 bp, Zea mays
  Clone ID: MRT4577_145116C.1
cagaacccattcagtcgcggacggcggacgctcctatcccctagcctagcgcgcgcggacgcagccactatgccgggccatccaacccctgccgacgcgctcctcggcggcggcacatcccgccgccacgcggagctgctcctccatagcagtgacgacggcgtctctgtcaaggatctccgcctccgccgcgtcgtcccgcccgccgccggctccctcgataccttccccgagtgcgtcgcacccgtgaagtccaggtttgtcgagagaacgcctctagaggccgtgtcggctgctactgcggcggcggccggggactttgaccggaagttggctcccccgcggtccaagctcgtccgcgatccgcgttcgtttgggtaccggcgcctgctgcctttcctgaacgagctgacgaagaacgatagctcaatcggcatggtgttcccgcaagacacagctgcgcactcaaaggatgggctcggcggatctgattgtcggctggctgatgaatctataggcgttagccactgcgaacctgaagccatggtggttaacaccggaggagacaccgatgtgaaagatgcctgcaacaatgtctcggaagagatcaagattgcccctcatgacctaaccaacaaaccgttgcttgccggatgcacaaggtcgaggtttgtttatcatccgagctcgttcagctacaagaggatgctgccatttctcatggagaatgacatctctgctcaggaatgtaacagggtcaaaattcgaaaaattgcggaggaaaggcagctagcatcaaatgagaatgatgtctcagccagtgggcagcattgtcttgctgcatctgatgactcttctcacgaatgcaatagaggtcaagctgaaacaat

SEQ ID NO: 49468 - DNA, 909 bp, Zea mays
  Clone ID: MRT4577_145117C.1
cacgactctcggcaacggatatctcggctctcgcatcgatgaagaacgtagcgaaatgcgatacctggtgtgaattgcagaatcccgcgaaccatcgagtctttgaacgcaagttgcgcccgaggccactcggccgagggcacgcctgcctgggcgtcacgccctcttcctccctccgctgcgccccactccgcctccgccaaaccgcaagctagggtttccgcctcgacgcggagggctcgccatggatgccgccgcccgcaagagatcccggccggagtccgccaacggaggcgccgcaggcgggaagcgctcgagagaatcggagtcacaacaaactggtctatcaagcaaatcgaagccttgcaccaagtttttcagcactgttgggtgcccctttggtgagggctgtcacttcgcgcactttgtccctggtggataccaggcagtatcaaaatcacacagcctaggccatgctgctgtgtctgcaccgtcaagagctccagcggaccatgctgcttctggtgtcaaaacacgcatgtgcaccaagtacaacactgcagaaggctgcaagtttggtgacaagtgccatttcgcccacggcgagagggagcttggcaggccaccatcctcctacatgtcccaagaaagttcctatgctcctcctatgggtggtcgatatggaggtcgacacgaaccacctctgccagcttcgatgggtcctcctgctggaaactttggcgcctcgtctacctgcaaggtcagtgttgacgccgctctcgccggaggcataatcgggaagggcggggtcaacacgaagcagatctgccgcatcacaggggtcaagctctcgatacgtgaccacgaatcaaacccagacctgaagaacattgagctggaaggcagctt

SEQ ID NO: 49469 - DNA, 348 bp, Zea mays
  Clone ID: MRT4577_145118C.1
aaacagacccactctgctccctcggcgtcgtctgtcgtctgaggtctcctcgcgcgcgtcctgacgtcctccgctgcccgactccggcgtcctccccaccgacccatccacagctcaagccaacattcatccgtatcccgcgcgcgcttgattcgccgcatctgagcgtcacggccatgactgcgcgtcctgcgtcgcctcccgccgccggcggggggcgcgacggatgctcggccaccgcttccccgccgcgctcggcctcccgcgcggtctgctgctggggaggagcgtcacccgccgcggtctgtcagccatggccggtggcgaggcggggggcccgctcggggg

SEQ ID NO: 49470 - DNA, 617 bp, Zea mays
  unsure (1)..(617): unsure at all n locations
  Clone ID: MRT4577_145119C.1
ggtggccgccgcagctaggcagccttcccagcaggcgccacggcggacttcttcgcctcggctttctgagcagcagccgctgccatggccaccctcaaccctttcgaactcctcggcgccgacgacaacgacgacccgtcgctgttgattgcggcggctgcggttgctgggcagaaagtcgcggcgaagaagtgtagtagctgagcaaggagaggaggctagcgttgttgtgggagaaaatagggtcggggcgaggcaggtggtgaggctaatatgagtgaagcagcccccccccttgtgtcnaaatgtcaatcatggactcttgtacctgtatttagcttatatgacacaccaaacagacgtccaagtaaaccaacggtcttaagctagtatagcgtgcaattgtggataaactatcttcttctgggggttctcttgggtgtatgcttggctgtagaataatgtgaatgattgcaagacctgattaagtgactatttctttttaactaagtgtgtctatatataagttatagcgaacttaagtgtacttaaataggttaaatattaagttaacgaaagaaatgaattaaacgggacgtgggtaaaggcttgtattc

SEQ ID NO: 49471 - DNA, 171 bp, Zea mays
  unsure (1)..(171): unsure at all n locations
  Clone ID: MRT4577_14511C.1
tcgnatacacggagcattggcgctcgcgcgggcggagccattgtggactactattacaacggaatcgacatgggctgtgaggatgagcctccataacctgagattgaggaaggggccgaagaagagcttgagatcaactaagatgccccttgatgatgtcataagtggaga

SEQ ID NO: 49472 - DNA, 357 bp, Zea mays
  Clone ID: MRT4577_145120C.1
aacaaagtactgaaaaaccctcagcagaggagattctttaaagccagagacatgaaggatttattgacactacaagatgatgaagggaatggttcaactgaaacgtcaaatattttcggccaattgtccaaagatgtgaacgttggagttccaaatgatggtcaacaggatcagacgaagaatcgagcattttgaagagtctttttggtgctcagggcattcatagcgcgatcaatcatgatgccataatggatgctaatgatgaccagaaagtgcgcttagaagcagaagcttcacaagtggcacaaagggcagctgaagctttacgtcaatcgcgaatgctcagaagccatgaca

SEQ ID NO: 49473 - DNA, 482 bp, Zea mays
  Clone ID: MRT4577_145121C.1
ggaccagctggcaaacagttcttttctacgtccaaatgcggggagaaagagtaaggctaacagtcacccctcttgggggaggggccaaggaaaaaaacggaacaggtgaccaaaaaaacaccaatgcatctcggcggcttacgcccaatacacatgaactggcgatttggcaggaattattaaagatgtccacggtccgtcggtccgatatttttgtttggaggattggggaggcccttacaagaccttgaacagcaggccaccgtgggctggcgaaaaacggggcaaacccaaggaactccaccctcatgaccttgatcacgatgttaagggtacggccccgacgtgtccttacgggggtcaccaatggcgctacctatcaaagcagccttggggacgtcaaaacccttcgggcccaggggcctggaataccctgtggccccccccttaaaggacttgttagaattggcccatgcaccacc

SEQ ID NO: 49474 - DNA, 445 bp, Zea mays
  Clone ID: MRT4577_145122C.1
ggtacccggcgccccccctcgagtttttttttttttttttttttttttttttttttttttttttttttttttttttttttttttgggaaaaaggggggggcgacaaagggattcaacgggaaaccagacttacatatactaaaattaatggaatcccctcaagcttcccggagcaggcagggcaaaacaaaaaagaggaaaaaaacgattttactattggttttagccattagcgacaatttcggggatcttggcactgatctttggatcataaaatctaacggccagcttcagggccacctccttgggggcactgattccaaaggaaaggctcaccaaaactttcacggtgccaagaaacacaccagagagcagacaagggggcgaccttgaattgcttgggaccacgtcagttccctcacaaggctgcatgccaaggatgctt

SEQ ID NO: 49475 - DNA, 761 bp, Zea mays
  Clone ID: MRT4577_145123C.1
tatgcgcctgagatgcaacaatacagaggaagaaacttctagatatactattttgaactgctgctaggtgaaagtcgcaacaatccccacaagtgggataatgacccggcaaaagccgctattagaatggaaagaactggggatgatctccctgactgtcgctccgattcctcgggcaaaaagccccatcgactttgtgttgcttggttgcctggtcaaaaagctcttcattgttctgtcactgttgctcagaagcaggttgactggattttttttatgttttttgtcagacttctgttgtaaattaaattgtgggtcatctgttcgacccagaaatgacattcataagggactagtgtggtgacagaaaattgaaggggatccatagaagagaatccacctgctattcaattttgaatagcaagtggattctcttcatggatctattttaatttctcggtcaccaaatcagtcctaaatgtttgagattgccccatattacatttatgtgttctttgacgcttgttctaatgtaaactttaaatggaattctcagctgaaaaaaaaaaaaaaaaaaaaaaaaaaaaaaaaaaaaaaaaaaaaaggtcgacacaattaaaaaagtccggccgttacatacgcatgcatcacaacttcctaactcttgcatgctacaacctaaatttactttactggcccctaaattaaaactattggcctgggaaaacaaagactttaactgaaaataattgggccgttac

SEQ ID NO: 49476 - DNA, 542 bp, Zea mays
  unsure (1)..(542): unsure at all n locations
  Clone ID: MRT4577_145124C.1
caaagacttcctgntctatcccccactcactcgtaactcgtaagtcataacaagacagcaagcaaggggaagaacaccagctaggcgtacgtgcggtgggtgcaaccgtacgtgcaagactgcaagcgagcagcttatactacaccgtcatgatgaggccaggagcggagtcgttcccggccacgagccacggcgcgcccatggcggcgcccaactccccgtggcagtcgccggtgccgtacctgttcggcgggctggcggcgatgctggggctcatagccttggcgctgctcatcctggcctgctcctactggaagctgtccgggtacctcgacgcggggcgcgaccagcgggccgccggagaagctggcggcgccggcgccggcgccgacggggagaagggctcggcgaccggcgcggccaggccggcggcgggggtccgggagcacgtggtggtcatcatggccggcgaggacaggcccaccttcctcgccacacccgcggncagccgggccgtcgcgtagctcggagccggctcgggc

SEQ ID NO: 49477 - DNA, 247 bp, Zea mays
  Clone ID: MRT4577_145125C.1
caagcagaaggggaccaattccaaattttgtttggtacaaaaaaacacttgtatttgatggaatggccaaacaaatcaaagtccaataccagtttcaaaaaaaaaacgggggactatctcactaattgcacaagcatttaaaataatacattttaaatttaaaaggggggcatatgcatttgccaatccggccataaattgccgggataatgttggtaaaaaacaacttcccaactaaaaattgatt

SEQ ID NO: 49478 - DNA, 377 bp, Zea mays
  Clone ID: MRT4577_145126C.1
aaaaggagtttttatctactcgaacccattccatttatcaactgaacgcctttatattgaacggctacgctgccgctttcctcaacttttcgattcatgcgagagctttcagctcccaccgggtgttgatacacatacgttctcactattcctacgtacgagcgctgacaataagcaaaagaaaactatctgtgaaatagcgtgggctacgtgctatggcccccttgccagggaactccactaggccactactggcgggctgataacgtcttgttccctctgcttacttgagaagatagatcatgctggacggtcctcaggactagagagagacgtctgcgtggcacactgattgagcttccccttgacatttgatg

SEQ ID NO: 49479 - DNA, 211 bp, Zea mays
  Clone ID: MRT4577_145127C.1
ttgacaggtggtccgcaccgtcatgggtggcacggtctactccgtggggctactcggggggtcgctccatcacaccgatccatggttcgctctactaactttgtgcagggtctgacagctttgcttgcaagatacacggacgatgtgcatgttccatgcgaaagcacatttacgaggacagatcagactgctgacaccagtctatcagagg

SEQ ID NO: 49480 - DNA, 285 bp, Zea mays
  Clone ID: MRT4577_145128C.1
ttaatatctgcacctgaattagagcacaataaatatgctgtttataaataacatcactgctattccttctctgaaatcatctctcctctttttaaacctttacttatagctagaatacatcactatttaattgcctctaatactttaaaactactggatggttatgcctggtttaactatttatggagagctatttgcatacttaagttgtgtaaatgtaatttctacttgtgaatctgagctgtagcagcccagagggagctaggcaaactattccagaccacc

SEQ ID NO: 49481 - DNA, 3189 bp, Zea mays
  Clone ID: MRT4577_145129C.1
gaaacccttctctcccccgccccaacccgatctctcgctgcctgcctccctccggtcccccgtggccccgtcccctcttcgccaccgcaccgactcgctctcaaaatcctcgcgccggactcctccgccgcctccgccgcgccatgcccgtcggcgcctgattcatgtctcagccccacgccgccgctcccgcctcgaagcgccccttctcgtccaccaccacatccccgtctccgacgtcctcccctgcgacgccgcttatgaagaaggccaagcacccggccgccaccgcctcctccgttgggacggtcgagaagaacggtatccatcttgataccaccgccgccgccgccgccatgggcgggggccgaacgaacggcgaggaggatgcggaaatggtgcccgtggaccaagatgagctccccgcgcccagcgcgccggcctccgcgggcgttgccgccaacctcttccgaaagaaggccacgcttccgcagccgtcgacctccgcccgcaagcccctccgcatcagaataggtcaaccaaaactgccaaaaaacttcgaagaggatacatggacgattttgaaggatgctatcacagctatttttctcaagcagaaactttcttgtgatgttgagaaactctatcaggctgctggtgatctttgtctacacaagctaggggcaaacctatacgaacgaatcaagaaagaatgtgaaatacacatagctgaaaagatatcagcattagtgggccaaagcccagatttggttggatttttgtctctggtccaaagaacatggccagccttttgtgctcaaatgctgtttggcggccggtgagatttacttcttgatgtaaaatatgtcaagaatgtagcaaatatttgttcagtgtgggatatggggctgcagctgtttcgcaagcatctatcactatccccagagattgaacacaaaactgtaactggccttctcagattgattgagagtgagaggcttggtgaagcaatagataggacattacttagtcatcttttgaagatgcttaccgctcttggaatgtattctgagagttttgaaaagccctttcttgagtgcacttctgaattttatgctacggaaggtgttaaatatatgcaacaatctgatattccagactacctgaagcatgtagagtcgaggttgcaagaagaacatgaaaggtgcattctgtatttggaagctaacacgaggaagccactgatcgcaactactgaaacgcaattgctagaacgtcatacatctgcaattattgagaaggggttcgctatgctcatggatgcaaatcgtataaatgacctcttgaggatgtacaaccttttccagagggttaatgctgttgagctgctaaaacaagcacttagttcatatatccgggctacaggccagggcattattatggatgaagaaaaggacagagagttagttccatttcttcttgattttaaggcatccctcgacaaaatattggaagaaagttttgccaagaatgaggctttctccaataccataaaagattcatttgagcaccttatcaatctacgacagaaccgtcctgcggaattgattgcaaagtttcttgatgagaaacttcgagctggcaataaagggacatcagaagaagagctggagggcatacttgataaagttttggtcatgtttcggtttatacaaggtaaagatgtatttgaggcattctacaagaaagatctagctaagaggttgctgcttgggaagagcgcatcaatagatgctgaaaaatcgatgatcacaaaactcaaaactgagtgtggaagtcagtttaccaataagctggagggaatgttcaaggacattgaattatccaaagaaataaacgattcattcaggcaatcatctcaagctaggacaaagcttccctctggcattgaaatgagtgttcatgtgcttacaacaggctattggcctacatatccaccaatggacgtgaaactcccacacgaactgaatgtgtatcaggatatatttaaagagttctatttgagcaagtacagtggaaggcgtttaatgtggcagaattctttgggacactgtgtcttgaaagcagactttcccaaaggcaaaaaggaactcgcggtgtcattgtttcagagtgtggttttgatgttgttcaatgacgcacaaaaattaagcttccttgacatcaaagattccactggtatcgaggataaagaattgagacggacactgcaatctcttgcatgtggtaaagttcgggttctccaaaagataccaaaagggagagatgtagaagataaggatgactttgtattcaatgaagattttagtgctcccctctatcgcataaaggtaaatgcaattcaaatgaaggagacggtagaagaaaacacgagcaccactgagagagtgttccaggatcggcagtatcaggttgatgcggccatagttcgaataatgaagacgcggaaggtcctgagccacacccttctaataaccgagctttaccagcagcttaagttccctgttaagccagctgatatcaagaaaagaatagagagcttaatagaccgggagtacctggagcgggacaggagtaacccccagatctacaactatctggcttgacagagctttggaggatcattaaagagaccgctcactttattatcagaaaagacactgtaaattggtttgttttccagttccttgttctttcctgtttttcttctctgggagggagttgtagttgtagctgctgcaacgtgtttatatagaacgattttttcggcatcagtataaaatcaggttccttaaggcccgtataagcataatgcaaaaaaaaaaaaaaaaaaaaaaaaaaaaaaaaaaaaaaaaaaaaaaaaaaaaaaaaaaaaaagggaggacgataaaaaaaaaataagagtacataacacaaaaaaaaaagaaaaaaaaattttcaatggggggacatgaaataaacttcgttggccgccagattaacaccgttggactgaaaaaaccctgggttaacccacctaatagccctggggccctatcccattttcgtaaccaacagaaagaccgaataggtctccactgagcccccttctcaaaaattgcaaagcctcaaggaaaagtgggactcccc

SEQ ID NO: 49482 - DNA, 622 bp, Zea mays
  Clone ID: MRT4577_14512C.1
ccggccggatttatctctatagactttgtcattaaaaaaaaaaaaaaaaaaaaaaaaaaaaaaaaaaaaaaaaaaaaaaaaaaaaaaaaaaaaaaaaaaaaaaaaaaaaaaaaaaaaaaaaaaaaaaaaaaaaaaaaaaaattaaaagggggaagggtttggggggtttccttagcccccaaaaaccaagaagggggttaaaaggcaaaaaattttttggggggtttaaaaaaaactttaatcccggaattcccaaaaagggcaaccttttgaacctgcttgttaaaccctgggccgggaaaaaaaaacctggggaaattaaaactttttattccccaaggaaaaaaaagcaaaaggctttcccctttttagggggaaccaaatgggaacccccttaacccggaaaacggggtttggggaaaaaaaaaaaaacctttttttttttaggaaaaccgtttaatcccccccccttaattggttaaagcccagtgcccaaaaaattatttattttaccttttaccccaataaaattgggccccgggaaaccccggggaaaaaaaaagggccccctttgaagggttaatacctctgggggacccaataccaaatattccccgggggg

SEQ ID NO: 49483 - DNA, 232 bp, Zea mays
  Clone ID: MRT4577_145130C.1
cctttctttttttctgggggtgtttaaaaaaaccgaggttgctcagcacacccaaagtcgcgcataatacacaggcagtgagatgtaccttccacacaccaaatcgaagggaggaaatccataacccctttgcatttaccaggagcaagtaaagctcatgagatgacctctcgaactttctacacgagatattgaccatcaagcccatacacctgggaccatcacactgtca

SEQ ID NO: 49484 - DNA, 790 bp, Zea mays
  Clone ID: MRT4577_145131C.1
agatcgagctccaaccactgatggcaaacctgctagcacatcagttggtgtatgagctgagctccccacgagcatggatgctcctcctcttctgcgtcttggtcgcatatgcacgctactctttggccacgttcagtgccaagagagcgaggaacaggatgcaggcgcaagcgcagcaccacgtccacgatgacaactacaacaacctgctcccaccgccttcgcctccggctctgcccgtcttgggccacctccacctcgttggttcgctcccccacgtctccctccgcaggctcgccaggaagcactgctccgacgtcatgctcctccgcctcggcgccatgccggtgctcgtcgtgtcgtcgccgcgcgccgccgaggcggtgctgcggacgcacgaccgcgtgtgcgcgtcccggccgtactccctcgtgggcgaggtggtcatgtacgggtcctccgacgtcggcttcgcgccgtacggggactactggcggcggaccaggaagctcatcaccacgcacctgctcaccgtaaggagggtgcaggcgctccgcatcgcccgcgaagaagaggtgagcgcggtgatggccaggattggcgaggctgcagcggcaggagcggcggtggacatgggtgagctgctcggctcgtacgccaacgacctggcgtgccgcgcagtcatgggcaagtccttcccggggcgagggccgaaacaagctgttccgggagctcgtcagcgacacctcgccgctgctgggcggcttccaacgttgaggagtcttcccgt

SEQ ID NO: 49485 - DNA, 423 bp, Zea mays
  unsure (1)..(423): unsure at all n locations
  Clone ID: MRT4577_145132C.1
attttgtagaaattattttggtttttggaaaaaagagaaagaaaanggtgtttattgttggatgttttttgtttttgtttagntttgtantntttgaaaattgggtggggggggggggtttttattnntttattataaatttaatgggttggttgaatttntganaatttnttagtaaaaaaaggggggggtagtagttggtaaataatataaagaagtggtaaataagaaaagaagaaagattttgaatatagaatttgtaaattttgagataatgtatttatttgattgaataggtgtgttagatttaatggaattagtttgggtgatgggggntaatataaattgaatggatttgataaaaaaagtggaggaattatggaaggaataaaagtagttattaaaaatgtaaaatttattgtg

SEQ ID NO: 49486 - DNA, 746 bp, Zea mays
  Clone ID: MRT4577_145133C.1
cctcgagccggccgggacgaaaccacatcaacttcgaagccatttcagcacccaaaggagagggcaccagcaagaagcctctagaaccttccggtaaacaagcagcagcagagcagaggatggcaatggaccacgtggcgaggctggcgtcggagcgcgcggtggtggtgttcacggcgagcaactgcagcatgggcgacgtggtgacgtcgctgctgagcagcctgggcgtcaacgcggcggtgcacgacctggacagggacccccggggcatggagatggagcgggagctggccaggaggctcggcggcggcggcggcggcgggcgcggcacgacgacgacccccaccgtgccggcggtgttcgtgggcggtgacctcgtcggcgggaccaacagggtcatggctctgcacctctccggcgagctcgtgcccatgctcaggaaagccggcgccctctggttgtagtaaattgagaacgcccgccgatcgaccgcgcgcatgcaagcatggctgatgagctttttacatcagctgtgtgtatatgtaatatgtatgtgaataaaaaagaagcggtcaaagaaggcaaagagatggagagagaaggatccacgtactaagactaagagtacgtgatgaatgcgaggtttttgttgtgtccttggaataaatgtcacctccgttttcactcgtcaaaatgtagctctatgctgatcagattctatcaatggtttgttgtgctatccc

SEQ ID NO: 49487 - DNA, 651 bp, Zea mays
  Clone ID: MRT4577_145134C.1
cgatgcatgtgatgatcaagaaatgattacagatgaggaaaaatacatagagcagaacgcttcccaccagagccggcagccgccgtccgcctggcccgtccgcgggccgtgccggaaatgattacagatgaggaaaagtctgttttccgtaggattggtttacggcttaaggcatatttgccacttggagttcgtggtgtttttgatggtgtaattgaaaatatgcacttgcattggaagcacagggaagttgttaaactaatttcaaagcagaagaccttgtcattcgttgaagagacggcacggcttcttgcatatgagagtggtggtatactagttgcaattgaaagagttccaaagggttatgcactcattttttaccgtgggaagaactataggagacctattaacataaggccaagaaacctcttaacaaaagctaaggcattgaagcgtgcggttgctatgcaacgccatgaggcccttagtcagcatatagatcaactggaaagcaatataaagcagatgaagttggatttggtatgtaacttctcattaggttatttttgagggtgtgttgcactgtattatttcaacaacatctgagctaatttctggatgtgtggcaatatatatcagcaaaattatggc

SEQ ID NO: 49488 - DNA, 359 bp, Zea mays
  Clone ID: MRT4577_145135C.1
tcttggacgcgtgggtattgtcatgaatatgcaccttgaggatgataaacgaaaggtgcccccaacaaagcgctcttgtggatgcacggcaatctaaatctaaatctatcaaggatgcttggaagatcttgccatcagctccaccatccctcactttccttccactgctgtcatgtagtctttagcaatcatgccctatgagtgatcctgctaatcatccagtaaaaaaagttaaaatgccattcccttggactcaacttgcctggatcctgcccatgtgtgtgttttgtaccaactgtcatgtacaaggactatcattttaactcttggtgtagttataattactttgattggtttgt

SEQ ID NO: 49489 - DNA, 454 bp, Zea mays
  Clone ID: MRT4577_145136C.1
tgttcctcatgctgcggcgcctccaaggccactccaactgcttcggactcgggggctttgctacctcccgttcctccgcttctatctacctggccttcaagtgcctccagcatgacctgctcagactcatctcctgccacgacatgaccttcaccgagtaccagatcaagagctacatgcggcagctgctctaggggctggcgcactgtcacgcgcgcggagagatgcaccgggacatcaagagcgccaacctgatgacgagcgacggcagcaagctcaaagtggcggacttcaggatggcgaacctctactcgccagcgccggcggcgccgctgaccagccgggtggtcactctatggtaccgcccgccggagctgctgctgcgcaccacggtgtacgagcccttcacagacctacagagcgccaactgcttctatctcataatgcacacact

SEQ ID NO: 49490 - DNA, 1002 bp, Zea mays
  unsure (1)..(1002): unsure at all n locations
  Clone ID: MRT4577_145137C.1
cgcatctcctccccggcccgtcgccatgatatatactcgcctcgcatgatgcccagcgccgcccggcgcccgcccgtgcatgattaattaggtcgcgcgctagctgtgcggactgctaggagctagctccatcgtcgtccggttgttattcctccttctcaacacacattgcccgttgccaacatcatccttccagcttcctggccgacgagcagtgccttcatatatacaaacgtacaccagctacactacacatctctctagctagctctctctctctctgctccggcagggcttcacctcacctgtgctgttgtgtgcgtgcgtgcttatatgggttcttgggtgcgcaccatcacaacgcccttcaggaaagcatgcaccatcttcggcccgcagaaggacggcggcggcggcggcggcggcggcggcggcggcggcggcggcaagaggtcgcagcaaccaaacccagcgacgatggtacggcacgtcgacgacgccgccgagagggccaagctgcacggggaggtgatggcgtgcgcctacgaagacgtgcaggtcatgtggtccatgctcgaccagacaacaaggattggggatctcagtggcagctcgtgaccgccggcaattgtccgttcatgcattttcctagagccacaaaggtggagatgcagacatggtgtacatagcaaaatatcttctcaccaaacatcccccccccccacccacccacttgctttcttgggccttgaattggaagagctatttgcgccgatcaattgagcccagaaccaagtgcccgttttgtacgtagcaagatttattagcttttcttttggagtttccagctcagttgagagtttgaatcctcagcactcttctctttgaggtactcgattggagtgatgtacattgccacgcgganaaactggnatttntgtagcccagttaattttntggcattagcacanccaagnaattanngggttttggtttagggct

SEQ ID NO: 49491 - DNA, 254 bp, Zea mays
  Clone ID: MRT4577_145138C.1
aaaaaccgcggcatttttgggctggggggggtcccttcccgggggcccgatcttccccccttgctgcacttgaaacctttccgacacccagaaggccccacgggcgccccccacagaacgagaagagactccacacagcactcgccctgtttactacccccactcatctggggatgctgaccatgaaaaaacactctaatgcatcacaggtgggaacagcaagctatcacccctaaactctgaaaaaactgacc

SEQ ID NO: 49492 - DNA, 344 bp, Zea mays
  Clone ID: MRT4577_145139C.1
attcggctcgagaaagtatatacgctacagagctcttgcgggaggctccttacttactaccaaggcttggagagggacggccaccagtggaagcagaatagagtttctctacttgagctccacagtggcggtcatatgtccatagaagccggtaacaaggcaatgcagaaggccatctacgtatgtagcagagactcgctaagatcggatctaaagaaacaaagtgcttgtcataggcagggcaaggagctttaatgaaagataggtaagatactacacctgttttactctaagactgatggatttatctctaaaaaagacatggacagggcaccgaatgctgt

SEQ ID NO: 49493 - DNA, 356 bp, Zea mays
  unsure (1)..(356): unsure at all n locations
  Clone ID: MRT4577_14513C.1
cgcgcttggatccccttccatccttgacgccattggcccttccatccttggtgccctccgtccaacggcagcgatcccattccattggccagccatctccgcctcccttccacaagaacacctacgcgcctcccttccatccaccatcttcacgcttggatccccttcgaggcattagagcttgccatctaccttaggtctacaacangcacagattacagcangcccaccatctatttaagaaatcctccttgtgtaacacccgtgggaattccacaggcaaggccgccacccgcccactccaacctcatgcacaggcaaccgtgaagcatccacaagcaacagttaaacgtaat

SEQ ID NO: 49494 - DNA, 1215 bp, Zea mays
  Clone ID: MRT4577_145140C.1
tgttgctatccttcgcgaccagcgggcacgaaagtgataaggagacggtactagtaaactgactaactgctgcccactcgccggagaaccatggccacggcggcggcgtgtgtgcgggtggcgtctccgttcacgggcccacctatctggcatcccagacacgtcatctcaacgaggcggggacccaggagggccgggctggccgtcacggcggcggcggcgactgtgctcgtcaccggcgcgggcggccgaacaggccaaattgtgtacaagccggtccacgttgaaggagaggtatggacagtttgtgggacgtggcctagtcaggacgggagagagcaaaggcaaaattggaggcggtgacgacgtgtttgtcggcgacatcagagaccccgagagcattgctcctgcgatcgagggcattgacgcgctcatcatcctcaccagcgcggtcccaaagatgaaaccggggtttgatcctagcaaaggggggcgccctgagttttactttgaagaagggagttatcctgagcaggtggattggattggccaaaagaatcaaattgatgctgctaagagcatcggtgcaaagcacatagttttggtgggatccatgggaggaacagacatcaatcacccgctaaacaagttaggaaatgcaaatatactggtgtggaagcgcaaggcagaacagtacctagcagactccggtcttccatatacaattataagagctggcggtttacaagataaagatggtggcttgcgagagttgattgttgggaaggatgatgagatcctgaaaacagaaacaagaactatagccagggccgatgttgcagaagtttgcatacaggcattgctattcgaagagtcaaagtttaaggcatttgatctggcatcaaaaccagaaggtgaagggacgccaactacagactttagggcactttttgcacaagttaatagtcgcttctaaagacataagattgttcttgccaagaagttgagggcattctttcgtaaagcgatatgaaatgtgtgtttagtaaggttagtttcctgtttactaagttcctaatatattacagttgttccatgtagcatccttttttatctcttgctctctagctacttttggctttatttcctgtctagacagcggattctgcataatgctaatgaactttcatatcaaataagattgctcagttatcc

SEQ ID NO: 49495 - DNA, 597 bp, Zea mays
  Clone ID: MRT4577_145141C.1
tgtggttgtatggtaagtttggcaattggaaatccctgtagcgaaaaactgatatttaaaactggggccaggtcagaagtcattctggtcgtgttggtttcatcacttacttccagtgatttcagatctgaatgattggctaacattctgccctccatggatactgccggtgtagcagtagtgaagcaaggttcaagatctggatttatttggtaccgtttatcaaatgatcatagtatgtggttgtgtcctttagaggtgcaggacattggaggtggattttcctcgctctccgattattcatctcggcgcgtttgtgttttccatttcttccttctttgtacactccatttcgacttcgagttgggtcagtttcttctctggctgatctcttctgctgctgttgcggttctgcagatccctttggggcgttccgctttcctgcgaccctgggagtgagcctgagttgtggcagggtcgttggatttgtagttttttttttctgcaatccgtctagtttttgtgtcgatcttgtttcgtcttcgctttcttggtgcgtgggttgcaggattggatccgatctggtgctgggagttc

SEQ ID NO: 49496 - DNA, 1527 bp, Zea mays
  Clone ID: MRT4577_145142C.1
ctctgagatatcattgggtacctcgaggccggccgggacctttgccgccccgcaggccgcatccgaagccaccgagccgctacccgtcgccgccgccgcgaaatggccgccggcgcgcgccccctggtctccgtgagggccctggagggcgacatggccacggactccgtcggtgtcccgcttccggacgtcctccgcgcgccgatccgcccagacatcgtccgcttcgtccacaagctcctgtcctgcaacagccggcagccgtacgcggtgtcgcgtcgcgctggccaccagacctccgcggagtcctggggcacggggcgtgcggtgtcccgtatcccccgcgttcctggcggtggtacccaccgcgccggccagggagccttcggcaacatgtgccgtggcggacgcatgtttgcgcccaccaagatctggcgccgctggcaccgccgcgtcaacattcacctccgccgtgtggccatcgcctccgccctcgctgccaccgccgtcccgtccctcgtcctcgcccgcggccaccgcgtggagtatgtccccgagcttccgctcgtcgtttccgactccgccgagtccattgagaagacagctcaggccatcaaggtcctcaagcagctcggtgcctccgctgatgctgataaggccaaggattccgttagcatccgccccggcaaggggaagatgcgcaaccgccgctacatcaaccgcaagggacccctcattgtctacggcgctgagggctctaagatcgtcaaggccttccgcaacctccctggcgttgatgttgccaatgtcgagcgcctgaacctgctcgacctcgcccctggtggccaccttggtcggttcgtcatctggaccgagtgcgcattcaagaagctggatgaggtgtacggtaccttcgacacgccatcggcgaagaagaagggtttcttgctcccgaggcccaagatggcaaacgctgatctgtcaaggctcatcaactctgacgaggtgcaatctgtggtgaagcccatcaacaaggaggtgaagcgtagggagcctaggaagaacccgctgaagaatatggctgcagtgctcaagctgaacccgtacctcggtactgcacgaaagatggcagccctagcagaggcagcgcgtgtcaaggccaggaagcagaagcttgactccaagaggaccaagctcagcccagaggagacttctaaggtcaaggctgctggaaaggcgtggtacaagaccatgatctcagacagcgactacacagagtttgagaacttcaccaagtggcttggtgtcacacagtgattgtctggtggtagtttgtcatgtcagaaattatgattttgtttgctattgccaactgtcgcttgtcattggtatcttcaggcatgatatctggttttggcttttgtagtttttttgaccgatgatctctttcttccagacacatattacaccaattatgagaacgaagtatatgcaattttcagtaaaaaaaaaaaaaaaaaagcggcc

SEQ ID NO: 49497 - DNA, 965 bp, Zea mays
  Clone ID: MRT4577_145143C.1
ttgggaccctcgggccggccggaattacccggtcctgacacgccggcgaccgaacaggccagattcttacaagaagttgaaggagagggcaggcgagtttgtggcatgaggcctagtgaggacaggagagagcaaggtcaaaatcgtaggcggtgacgacgtgctcgtcagcgacataagagaccccgagagcatagctctggcaattgagggcatcgacgcgctcatcatcctcaccagcgcggtcccgaagatgtaggtttgatcctaccggagggtgccctgatttaattttgaagaagggagttatcttgagcaggtgtggaagcgcaaggcagaacagtatctagcagactctggtcttctgcacacaattataagagctggcggtttacaagataaagatggtggcttgcgagagttgattgttgggaaggatgatgagatcctgaaaacagaaacaagaactatagccagggccgatgttgcagaagtttgcatacaggcattgctattcgaagagtcaaagtttaaggcatttgatctggcatcaaaaccagaaggtgaagggacgccaactacagactttagggcactttttgcacaagttaatagtcgcttctaaagacataagattgttcttgccaagaagttgagggcattctttcgtaaagcgatatgaaatgtgtgtttagtaagaacatcggcgcagcatcgactcggtacatttggaaggagatgaacgctctccgttttcaaccatgaagaagctacagcagcactgttagggcctatttggaagcaaagtgtttttttatatttttccagttaataccatggaatactagaatattttatgttacgaggtgtttgattgtaatcctaaacaccatgttttcaaaagcatggtatcctggtatgtttggaatatttaaaactctgtttcaatccaaagtttttatgac

SEQ ID NO: 49498 - DNA, 1647 bp, Zea mays
  Clone ID: MRT4577_145144C.1
gttgggtacctcgaggccggccgggaccggggttcccccgcggcgggccgggaccctttgccgccccgccgccgaagccaccgtgccgctagccttcgccgccgccgcaaaatggccgcctccgcgcgacccctggttaccgtgagggccctggagggcgacatggccacggactccgccggtgttccgctggcggacgtcctccgcgcaccgatccgcccggacatcgttcgcttcgtccacaagctcctgtcctgcaacagccgccaaccctatgcggtgtcgcgtcgcgccggacaccagacctccgcggagtcctggggcacggggcgtgcggtatcccgtatcccccgcgttcctggcggtggtacccaccgcgccggccagggagcgttcggcaacatgtgccgtggcggacgcatgttcgcgcccaccaagatctggcgccgctggcaccgtcgcgtcaacatacaccttcgccgtgtggccatcgcctccgcactctccgccaccgccgttccgtcccttgttctcgcacgtggccaccgcgtggagtctgtgcccgagctcccgctcgtcgtttcggactccgcggagtccattgagaagacagcccaggccatcaatatcctcaaacagctcggtgcctacgccgatgctgagaaggccaaggattctgttggcatccgccccggcaagggcaagatgcgcaaccgccgctacatcaatcgtaagggacccctcgttgtctacggcactgagggctctaagatcgtcaaggcctttcgcaacctccctggcgttgatgttgccaatgtcgagcgcctgaacctgctcgatctcgcccctggtggccaccttggtcggttcgtcatctggaccgagtgcgcattcaagaagctggatgaggtgtacggtaccttcaacgcaccatcagcgaagaagaagggtttcgtgctcccgaggcccaagatggcaaacgctgacctatccaggcttatcaactctgacgaggtgcaatctgtagtgaagcccatcaataaggatgtgaagcgtagggagcctaggaagaacccactgaagaatatggctgcagtgctcaagctgaacccgtacctcggtactgcacgcaagatggcagccctagcagaggcagcgcgtgtcaaggccaggaagcagaagcttgattccaagaggaccaagctcagcccagaggaggcttctaaggtcaaggctgctggaaaggcgtggtacaagaccatggtttcagacagcgactacacagagtttgagaacttcaccaagtggcttggtgttacacagtgattgtcacgtccaacccttattgttttgccaattcagagattatgattttgatcgctgttgtcaaatatcctttgttattggtatattctgacattagttttggctttggtagtttttttttaccgctggatgtttacttccagacacctattacaccttttatggaaacgaagtatatcgattctcaacactcaccgtgcttctgtttttggcagtattggttactcgagtattcatgttcagttgtattagtgtatgcattttctttgtgcccttctgtttgttgggtatataatagtatatatgttcagttgtttgttc

SEQ ID NO: 49499 - DNA, 1599 bp, Zea mays
  Clone ID: MRT4577_145145C.1
gttgagggcatgggatcgtaaagcgatatgaattcgctgtttaggagcacgaaagtcgctgggacacggtactagtaaactgactaactgctgcccactcgccggagaaccatggccacggcggcggcgtgtgtgcgggtggcgtctccgttcacgggcccacctatctggcatcccagacacgtcatctcaacgaggcggggacccaggagggccgggctggccgtcacggcggcggctgccgccggtggatcgccgcgcactgtgctcgtcaccggcgcgggcggccgaacaggccaaattgtgtacaagaagttgaaggagagggaaggacagtttgtgggacgtggcctagtcaggacgggagagagcaaaggcaaaattggaggcggtgacgacgtgtttgtcggcgacatcagagaccccgagagcattgctcctgcgatcgagggcattgacgcgctcatcatcctcaccagcgcggtcccaaagatgaaaccggggtttgatcctagcaaaggggggcgccctgagttttactttgaagaagggagttatcctgagcaggtggattggattggccaaaagaatcaaattgatgctgctaagagcatcggtgcaaagcacatagttttggtgggatccatgggaggaacagacatcaatcacccgctaaacaagttaggaaatgcaaatatactggtgtggaagcgcaaggcagaacagtacctagcagactccggtcttccatatacaattataagagctggcggtttacaagataaagatggtggcttgcgagagttgattgttgggaaggatgatgagatcctgaaaacagaaacaagaactatagccagggccgatgttgcagaagtttgcatacaggcattgctattcgaagagtcaaagtttaaggcatttgatctggcatcaaaaccagaaggtgaagggacgccaactacagactttagggcactttttgcacaagttaatagtcgcttctaaagacataagattgttcttgccaagaagttgagggcattctttcgtaaagcgatatgaaatgtgtgtttagtaagaacatcggcgctgcatcgactcggtacatttggaaggagatgaacgctctccgttttcaaccatgaagaagcttcagcagcaacacaggttgttcgtccatctgactgctcttggctgcagcagcacttagggcctatttggaaggaaagtgtttttttatatttttccagttaataccatggaatactagaatattttatgttacgaagtgtttggttgcaatcctaaaaactatgttttccaaaagcatggtattttagataacatggtatgtttggaatatttaaaactccgtttcaatccaaagtttttatgacaaacaaaagttagtttcctgtttactaagttcctaatatattacagttgttccatgtagcatccttttttatctcttgctctctagctacttttggctttatttcctgtctagacagcggattctgcataatgctaatgaactttcatatcaaataagattgcccaaaaaaaaaaaaaaaaagcgggcctcgagctcca

SEQ ID NO: 49500 - DNA, 504 bp, Zea mays
  unsure (1)..(504): unsure at all n locations
  Clone ID: MRT4577_145146C.1
gtggggggggggggggggggtataaaaaagatagtgttaccatgtatcctntttcatacacacgtgagtgcgtgacagtgcatcatttttnatacacgggcacacactatgataagcgagtggacacacgcctnaagtgngtttnctnctaggggggggggggggttanntananaggggaacacacgtgaaggcttgcattgagaaaaccatagatcaggtactagtgtgatnatcctgcgtaaggggtntgggtcccgcatgccatgtgtggcccgtgcccgactccgagcataccggagtaccttttgtantanccgagggggggcttggggggtttggggcgttgggtggagcggggcttgngggactctagaccaccgttgatgaggtgngtggtgaggccgtatccggggaggctncccgtggggcgggcagaggcgaaggggcttcagtgggggggatgagggggtggggatgaggggtttggggagtggggggtga

SEQ ID NO: 49501 - DNA, 380 bp, Zea mays
  Clone ID: MRT4577_145147C.1
attcctgggtcaacccactcatgcgcttttgtttttatcatggaaaaacaccgatcaatgggggggtttaattaagacacatgcctgaaacctctcaaacatcctgcctatcatgctgctgcgtttgcaaaagaatgatgagactcgctttttcaattcctccagctggagcttctattataattgcttcaatccataaactgcatgggagacacccctaagttaattttttggcccattggaaggttgaagagagtgatagcaatgccacatagagaatgctagtcaacactaacaaagaattggtttctgatccttttaaaccagaaagaggcataccctgccaagtcaggtgcaatgcaaacttttatgtgggaaat

SEQ ID NO: 49502 - DNA, 1685 bp, Zea mays
  Clone ID: MRT4577_145148C.1
ggatgcgtatctaccagcactaaagcaccggatcccatcagaactccgaagttaagcgtgcttgggcgagagtagtactaggatgggtgacctcctgggaagtcctcgtgttgcattcaacaccagaaaagcttttctgcctcctctccaccttgcttcccgcaactaccacgcacgccgaatacttggcaagaagaaaccctttctcgtcccgttgaactggcgccgtcgactccaccggggcacgctgtcgcgggttgctctccggtcctcgttctccttgctgctgaatccgctagtggagatcgacctgatttctcctgtcctgtcaattggattttagcccggctttcaaggtagagaaagaagctgtctggtccatcatggccttcccaactccagcttctgtttttgttgacgagaaccaacagataaatagaggtaagagggctgctggatcaaggaccaaagggctgaagccgtcggagaatcctgggaatctagagaggagagctcttcaggatttgtccaactttgccaaaggcacaggtttgaagggcacttccaccctgaaagagaggtcccagcgcaaggcttttagtaatgtgaccaacactattaaaggcactgctttgaaggacaggcccatcacgaaagagaaatctacccagaaacagaggtcacagaacccagtgaaaatattatctgatgaagatatcaaactgtgtcatgagtgggctaaggatggggtggaagggtttcactcaacacaaaatgattctcagaagtttgataaggatctgctagccaaacgtgtcaagaagaaagtggcgtcagtaaacttcagccttagcgtggttggctcagatacggtatttgattctctgatgtttccagctatgggtaggttttataatgaaactaaattgcttgagctggtacgtgagattcatcgggacatcaggtgcggatctccgaagctgagtagatggtaaagcaaagttggattcagtctgtcttgcttatgagtagagtgacgagtacccaagattgtctagcagttcattaacatttgcggtgagcgtcgtgccagcgctcccgaagttcagagtgcatggaagaataccgcggctccgctcagctgtttgctcaaggatgcaacgtcttgcaccgcttgtttttttctccagctatgttcttgtggatgtaggtgctataggatttcacaatttgatcactagtacctgatccagtggaatagaattcgcttctttgatgttatgcttctgattcagcggaagcgacagcgcttcctgtttgttatgcttgctgatgggcgatggttgtggaactgctgatggtataattctaatgttttcagcaaaacaaatctatatggtctctatatttattctcctgaatcatatgacttggcggtgctttagatagcgacaaaaaaagggcacaaccactcggaaccatactcccgagcgctgggcttagagtaggtgatcgacgtattagaggcactgctttaaaggacagggccatcacgatagagagatctacccagaaacataggtcacagaacccagtgaaaatattatctgatgaagatatcaaaatgtgccatgagtgcgctaaggatggggtggaaaggcttcactcaactcaaaatgattctc

SEQ ID NO: 49503 - DNA, 377 bp, Zea mays
  Clone ID: MRT4577_145149C.1
cgaagctcggaattcggctcgagtcaggttgatagctcttagtgactcccgcgtaggcccgaacaggcagggggaccatttatcacagcgctcccaatggccccaagagctccgggcgcccctgacattcagactgtggcgctgaaggctgccatccactgacatggctgaaagaaaaacgtccggaaagtgctcacgggcatcaaaggcacacacggacgtgacacatggacacctcgcaacacaaggcgactgagactgacaccgtggactcccacacgctcataaagaggctggacaagccccgcaagaagggaaacgcctggctttagcaccctgccgacaaaaacaagtagcccgtgccggacgccccccct

SEQ ID NO: 49504 - DNA, 494 bp, Zea mays
  Clone ID: MRT4577_14514C.1
aaaaaaaaaaaaaaaaaaaaaaaaaaaaaaaaaaaaaaaaaaaaaaaaaaaaacctaaaaacaaaacaaaaacataaagaaaaaaaacggttgttcttcgtgccgcaacccccctgggggggaattcttcaaatgtccttccccctggcggggggctcgtccttgcttttattgggcccctttcccccctttgggggggggttttacaattccctggcgggggctttactaccctttttgggggaatccccctttgtcccccccttattttcctggggggcctccgcctttcccccgttggcccctttgcaaaaggggccctggccattggcccttccctgcagtggcgcattctgaatggggggtgggggggccttgtttaggggcattattccccttggatgggcggtttcccccccccgttaccgtttcttttgcccgcgccttagggccggttccttttgtttttttcccttcctttttcggcggcttcg

SEQ ID NO: 49505 - DNA, 475 bp, Zea mays
  Clone ID: MRT4577_145150C.1
gttcagacaaaccatgcgcaatttcaaagccggaatacacatgagccctgaacattgccaatagtttgtggccatctgagcgctgacatcacccttgggagctctggacccgtacgctgctaacgtttctaaagtatcccatatcacacgccaacggctggaccaggttcgcggggcggggatccacctgcgactggttcactgtgcgcaagcatatatgggcggtaccgccttgatggcactgtcacttgctcaaggaaaggcctatctatgcgggcacccatcaggccaagtatatggatccatatatgactgcagaggtccccagacctgcgctcgagaaggttatggccaaccacatcttgaagacaaacagggtggaccttttggagcgcttgcactaacatgtcgtcatctgtagggtgtccagattccttgtttaaccaggagggatgtcaattgcgcggacgcgttg

SEQ ID NO: 49506 - DNA, 337 bp, Zea mays
  Clone ID: MRT4577_145151C.1
ttagcctccctatctatgagcactgctcgccggcgccgcctctgcaaaaagctcacttttgccttcggaacccagcggaatccacccgctgaccggaaacactagcgcggccccctcaccccctgtgtgcccggccgtcggagcgcgtcgcctccaggcgtgcaacagcagtccgtggaggtggagaccggaagaggaggaggaggaccaggaccaggcatcatctgccgagagcgggacagcaggagggggctgctccgcttgcgctagaaccaaagctactgattggcttgtcctgaccaccgaaagagggatctttgtggaggaaatagaagtg

SEQ ID NO: 49507 - DNA, 168 bp, Zea mays
  Clone ID: MRT4577_145152C.1
cccgacgacacccagcagtacgagagatgacgccgctcatcgcgctgttcgaggactacatcactgatgatgcgcacggagagggccggtggagcgcgcagcatcgacaaccactactctcgctccgacgacccggtgctaggcaggtacagcggttacaacacacac

SEQ ID NO: 49508 - DNA, 315 bp, Zea mays
  Clone ID: MRT4577_145153C.1
gtaccggttccggattcccgggtcgagccacgcgtccgcccactcgtcctctcactcgtagtctttacgcataggccgacaagcacacgctgagtgtcctttcaaaaattttcgggctctatctaatcctactctacaccctactctcctacccgtccacgatcctggacctcgagctctccatcctcgtcaaccttcatctcctcaaatccatgatcacattcacagagctgctgcttacaaacaccatcgatcccgcctttgcgcgcttcgtccgccacctccagacccttgtcctcgcatcttcatctcacc

SEQ ID NO: 49509 - DNA, 187 bp, Zea mays
  Clone ID: MRT4577_145154C.1
ataccgcgtccatcaagcagctgttcaagcttcgattccaggacaacatggcgttggtgaggggggtctccaatctgagcaagctccaccacaagaaccttgtccacatcattggctactgcgccgacggagaccaacggcttctggcataccaatccttgcccgccagcaccttagaagaacacct

SEQ ID NO: 49510 - DNA, 142 bp, Zea mays
  Clone ID: MRT4577_145155C.1
ggagaagcggaaggtggagccgccctttaagcccaaagtgaaatccccttcagactacagcaactttgacccagagttcctgaatgagaaaccccaactttccttcagtgacaagaacctcatcgactctatggaccagaca

SEQ ID NO: 49511 - DNA, 245 bp, Zea mays
  Clone ID: MRT4577_145156C.1
ggggataaaaaacgggattccggcttggcctttttttttccccataaagaaacagcatcggggaattctccgttccagttttattcagggcccctcgcccgcagttcagggcctatggatttgggtctggccaacaaacaagaacgaaacaggggggcccttcatccttttttacaaacttttatacggaaaactaacccgatttttacatgcccctggaacaagcaaaaaggggtttagggctt

SEQ ID NO: 49512 - DNA, 310 bp, Zea mays
  Clone ID: MRT4577_145157C.1
gagctcactagtcggcgcacggcctttttttttttggttggttagacagatcaccggagagacgatactcaggaaacgggctattgtgataacagataacaaacacaaatgcacgcagatagatattaaatccggaactagacggacatgaccgggagcacgttatagttgaacatgaaccccataagcgaccatggatcgaaaaaaactactagtatttgacaggacctaaggtagaccccccccttaatttctttaaacgacctccgcatacgggtctttttcaacttttcgggcacgaaagatcaga

SEQ ID NO: 49513 - DNA, 372 bp, Zea mays
  Clone ID: MRT4577_145158C.1
aaaaaaaattcataactttggccagtgtacggaaaaaaaacggaatttgcgaaacgacggagtctggtggaccaccctttctgctgcaaagatcaccgattttcttgagggaaacacgggcttaccatcaccccttaatgctgttacccgcggcccattaaattacccataaaccttcttaatgttccgggaaaccttatttgggggtcaccggccaaaacttcaacgattggtcgtaacacactcggctttaaaaactggcaacccaaattcccaaggaggtttccataatggggaaggatgaacccacccctagaatcaaaatcggactggagtcccttgccctcacccctggttaaccggttccaacct

SEQ ID NO: 49514 - DNA, 250 bp, Zea mays
  Clone ID: MRT4577_145159C.1
cggtaccgcaacgagctggacatgaacgttcgcctgggcgggcatgaaggacggagggggtagctataattatagacgatgaatatagacacacatcatgctgagatccgcaccagtatagaaaactaagctgcacgcctgtctgtaattcggatgtagaaacatctacaaggcatccatgaatacagattgcaaaatctgaccatcatttcaaaatatgcagagaactctacaacgactacatctgcac

SEQ ID NO: 49515 - DNA, 1240 bp, Zea mays
  Clone ID: MRT4577_14515C.1
aaatcccctctcgctccataaaccaaccctcccaccatcaccaaagatatatactattactacatagttaacaaactttatctgcctcctgtcctgctaatctatatatcccctctccactactgctaccttctctcgcgcgtctctgctcaaagaataatgtcagcgtagcctagctagctcatagggattcctctttcatccctcctgagatcgacgatctcaccaattaagaacacacgcgcacacagcagctacgtacgtacctagctagctagcatgatggaccatcagctgttcgacgaccccttcgggagcagcatctcgtcgctggaggcggaaatcttctccgccgccgcccagctgccgccgtcgccgccgtggccagacatcgacctcgacgacgactacgacatccacgacctctccgcgccggccgccaacgccgctacgtcctcgggcggcggctacggctccggcggctccggcggccacaggaagctcagccacaacgcgtacgagcgcggccgccggaagcagctcaacgagctctactcctccctccgctccctgctcccggacgccgaccaaactaagaagctgagcatccccaccaccgtgtcccgagttctcaagtacatcccggagctgcagaagcaggtggacaacctggagaggaggaagaaggagctgaccaacgccaactgcaagccgggagttctgaaaaccaccaaggccgtaactcccattgtttctgctacctgcctcaacgacacggagatcatggttcaggtcagcctgcacagcgatgtggccgccacagctctccctctctccaagtgcatcaaggtgctagagaacgaaggccttcatctcgtcagctcatcaacctactcctccgcctttgagaacaagacattctacagcctccatcttcagagaagtcaaagaacgatgaaggaggagtgcccggcattctgcgagcaactggagaagatcgtcaggaagaaagcaggggcgtagccagctgcagcctgcaggaggagtgtgctggcgcatgcgttcaccattcctctgcgtgctactccagccataagcacacacagctagctaattaaggtattttagtctgtaaataatggactgtgtagtcgtgtgtgtgtgtgtgtgtcgtaactgtgaaagtcgccgatggatgcataatatatatgtggtttttcccttaaaaaaagaacaaaac

SEQ ID NO: 49516 - DNA, 335 bp, Zea mays
  Clone ID: MRT4577_145160C.1
ggctggatctggttggggactacataaaggtttttaaaaagcaggtaagggggttgaacaacggccgggcaaattgaacttgttccggggggggaaggttgaaggacccgttaaccagttaaaaggagcagaagccggcccttagaatggcccggccatgcttggcccgccgaagggccggcctgattgacccttccgggccggccgggggttaagttggtttgaagcgttcttcttgaatgggggtaaaagtcgtcaaagattagtagtttaagggtccgtgttcggttttccatagttaactgaatgagtagtccgtagtttgtattccatgc

SEQ ID NO: 49517 - DNA, 355 bp, Zea mays
  Clone ID: MRT4577_145161C.1
gggggtgggtccgagcatgcgcaccggccggggtagggattgcctatacgtaccttcatcactcaactacagggcatggggcgacttgcctggaaaactaaactctatggcgcaggctcgtggccatcgtcgcattcccgtgcgccgtatccttgaccgggggggacaagcccctctcgatttccggttcatagacgctggtaaggagcgctagcacgttcgcacacttgtagactaaatgatccacgactgacatagcatgttgcctttcatgacgtctcatggccggcaagcgtatcttcgcatagtcctttactggaaacacactcaccgtcaaggtggagctttagttccc

SEQ ID NO: 49518 - DNA, 479 bp, Zea mays
  Clone ID: MRT4577_145162C.1
ctcgagtttttttttttttttttttttttttttttttttttttttttttttttttttttttttttttttttttttttttaaaacccaaagaaccttctttttgggggaacggaataaacccttataaaaacagcccccacggagggacttccggaggggggcctgggtttttggcccaaacccggccaggggaaaaccccccttcccggaacggggcggggaaacccaaacaactggggggacaaccggccgtccttttttaaaacaaaactaaaagggaaatgctgttggaaatccccttgggggggagcccgggggcccccccctttggggcgggggggggggggtaaaacaccggggagggaaacccggccgggccgtttcggtttttggggggagggcccgctttcagggggaccacccgtttttcgatctgggccacccccccccccaccccctagaaccccccctgcccctgg

SEQ ID NO: 49519 - DNA, 1020 bp, Zea mays
  unsure (1)..(1020): unsure at all n locations
  Clone ID: MRT4577_145163C.1
cattgggtacctctcgacggccggcggggagagataggcaaggaagataaggaggctctcgccgtctcgcacaggctcgttgttcctcttatccgcggaggaagaaccttggcccgacaccatgctcccaatggccgtccaccccaccaccacgccggccttgtccccgcgcgcccgcgtctcgccgcacaggcctcccatctcctccctggcggacccctcgtcctccccctgccatcgcatcgtcagtttcaaaagcaggaggctgccacttcgctctctccacatcgccgctgccgctgccgccggggcagaggaagaagaggcgcaactaggtggaagtgtgaacgcggtcgacgaggaggaagcggagaataaggtggtggtgcccgagagacaggacccgatgctggtactcaagttcatctggatggagaagaacatcggcatagcactcgaccagctggttcctggctatggcagcatcccgttgagcccgtactacttctggccgcggaaggacgcgtgggaggagcttagagccaagttggaagagaaagagtggatctcgcagaagcagatgatcatccttctcaaccaggccaccgatatcatcaacctctggcagcagggtggtgggaacctgtcgacatgagtccctccccgccctgttctttcaaccgtgcaaagcttgcgttttgttggtttcactacaggctctctctgttgttaatgttaaaagtatggtacatggccttgtagatcggttcaaactgttctcaggtatggccttttccatggaaatcatcttgtgatttatcttagttattatgtgtatcagtcgtccacccccccccgggaaaatcaagaaacatatcctttgttcccaaaaaaaaaaagcggcctcaaaaaaaaaaaaaaagcggccgttgtngncccanaanntgttnttaaaaggtntngncacantttcttaaatggaggcccatttnnggnccnanaancctggatccttnagga

SEQ ID NO: 49520 - DNA, 381 bp, Zea mays
  Clone ID: MRT4577_145164C.1
ttagaaaggcaataacagaggattgttcattagttccttatcaagggtcatgctgttttgcaaactaggcttcccatgaaaatatatgcttttggattcataagtaatgggattggaatttgttttttggtaatacgatttgttgtcttgtgatcattggcagggcaatggtttttttccattgttggttcttttgtgataatatagtttattagtttcccccatgaggttctatctacctttaaatattctacacataaaaaatcttatgatgcagaagtctagtgtcaccggtgaaccattcgaaacaaggtgccttggctactacgcatgatgggaaagcacctcaggatctaatttgatcttgtgtaggcatctgca

SEQ ID NO: 49521 - DNA, 790 bp, Zea mays
  Clone ID: MRT4577_145165C.1
actccatagggcgattgggttgctcgagggcggccggggttgttcctcttatccgcggaggaagaacgttggctcgacaccatgctcccaatggccgtccaccccacgagcacgccggccctgtcgccgcgcgcccgcgtctccccgcccaggccttccacctctctggccgccacctcgtcctcgccctgctctcgcatcgtcagtttcaagagcaggaggctgccacttcgctctgtccgcagcgtcgtcgccgctgccgctgccgccgctgcagaggaagaagaggtacaactaggtgcaggtgtggatgcggtcgacgaggaggaggcggagaataaggtggtggtacctgagaggcaggacccgatgctggtgctcaagttcatctggatggagaagaacatcggcatagctctcgaccaattggttcctggctatggaagcatcccgttaagcccatactacttttggccgcgaaaagacgcgtgggaggagcttagagcgaagttggaagagaaagagtggatctcgcagaagcagatgatcatccttctcaaccaggccaccgatatcatcaacctctggcagcagggtggtgggaacctctcgacatgagtccctccccgccctgttctttcttaaccgtgcaaagcttgcgttttgttggttttcactacaggctctctctgttgttaatgttaaaagtatggtacatggccttgtagatcggttcaaactgttctcaggtatggccttttccatgaaaaaaaaaaaaaaaaaagcggcc

SEQ ID NO: 49522 - DNA, 761 bp, Zea mays
  Clone ID: MRT4577_145166C.1
cgaggccggccgggccgggtttcacgctaaaaaagtacagtttctgtactttattgatcaccagcaaccactagtttttatctatccagctccatgtacacgcagcagcagcggcctctcttccagtacggcgtgccgcagcagtaccaactgcagcagcagcagcaacagtacacgcagcagtacgccgccgcgcctgtgcagcagcagcaggtgtatcagcagccgccccagcagcagcacatgtacgcacagcagcaacaggcgccacagcagcagccccagggcgtggcggcggcgaatccaattgtgtacttcgacgttgcaatcgacaaccagccagccgggcgcatcacgttcgagctgtaccgcaacgtcgtgccgtacactgcggagaacttccgtgcgctgtgcactggcgagcgcggcatcgggcagcaggggcggccgctgcactataagggctctgtgttccaccgcgtcatcccaggcttcatgctgcaaggcggcgacttcacccgcttcgacggcaccggcggcgaatccatctacggcggtaggttcgccgacgaaagtttcgcggggccggcaggcgtgcacaatcagcctggcctcctgtccatggccaactcgggcccgaacacaaacggctcgcagttcttcattaccacgcgcgctacccacacctgaacggaaagcacgtcgtcttcggccgcgtcgtcgggggcatggacgtggtggacgcggttcgagcgcgcggc

SEQ ID NO: 49523 - DNA, 233 bp, Zea mays
  Clone ID: MRT4577_145167C.1
aagcgcaacaaccgtttttgaccttaaaaaacgctgcccgccaccatggggggcacgtcggccgggggcagggcccagttccccaaaagaagaaagggcaacgccccacacgcacgcacacatacgggtcggtcaattcaaccaaaaatcaacaacgaagagggaccgacggcacgatctggacatacacgtgtacaggttttatttttttcacggatttccctccttttctc

SEQ ID NO: 49524 - DNA, 317 bp, Zea mays
  Clone ID: MRT4577_145168C.1
gcaatgatcaaccaacaagaccatggggggaattattaaggacatgtggtcttattcccagggacgttcgcgacaaccccgaaccagagacagagaatgcacctgtgtgttcaccacaccaaaatggcgggcctgggatacatagcctcctcagagaaaacacagcatcggtgctgcctttactcgaacctgtgtgcttgcaagggaaaacgaaagatggccacgcatcgccggaggaggtcgcggatagctcgctcgtaggcctgtcccgatcacgggggcgtcgatgtcgttcaggtgggacaggcttctgcaaa

SEQ ID NO: 49525 - DNA, 246 bp, Zea mays
  Clone ID: MRT4577_145169C.1
ctaagggaaaaagctgggctcggggccgaaatttttttttttttttttggcgagggaaaaaacttacgcaattgatcgcaaattcgacttacatgatgcatagctacatacatatacagatagctaagatatgtcacactttgatccaaacaaaaaaacagcagagagcgagcggagtcctggccacactgaagcagaacagtgcggtatgcggaggatcagattctacacggcgcccagctcctg

SEQ ID NO: 49526 - DNA, 1046 bp, Zea mays
  Clone ID: MRT4577_14516C.1
cctgcaggctccggtgcggaactcccgggccgcctccgcctcccgctcctccactccacccccacccatggccaacctcccagacgccgacgccgcggggttcaagctcttcggcaaggtcatccagccccccgacgcgcagcgcgccgcgggcgatggcgatggcgctggcgcccctccgccgtcgccgccggtccttcctcctcctcctcctcctcccccgcccccgccgcagcctctgcccctgcagcaggcggccggggccgggggcaccggcggcgagccgctgccgtgcccgcggtgcggcagccgggagactagggatgaaaacggtcggaaacggtatttattcgtttggattaccactttcatccctacgggagaccaagttctgctacttcaacaactacaacgtgcggcagccgcgccacctctgccgcgcctgccgccgctactggacctctcgcggcgcgctccgccgcgctgtcgatgcgtctcctgtccgtagtcttaatggttgcagcgccgcataccgaatcattagacttgttccaaatattgagaattttcgcacggcattaggatgtctgcagtgctgggcaaacagtcgtagggtttactctaatgttactggctttcttggtggtgtcaactgggctttactggttgcacgtgtctgccagctttatcccaatgctgtgccaagtatgcttgtctcacggttttttagagtttttacacaatggcagtggccaaacccggttatgctttgttccatagaagaggatgaacttggcttccccgtttgggatccacgtaaaaatcctcgagataaatgtcatcacatgcctattataacccctgcatacccgtgcatgaactcgagctataatgtttccacaagcacgctgagggtcatggtggaacagttccaatttggtaataaaatttgccaggtaatctttgcaccattgaagttactatttcaaaaatacttaccctgacaatgcattgtatgccttctgggtcaggaaattgaaatgaat

SEQ ID NO: 49527 - DNA, 234 bp, Zea mays
  Clone ID: MRT4577_145170C.1
ccaactacagtattcactacaaaccgcataacaacccgagggggaccattatggtcttgctcgttgcccctcctcttctgagtgtcacctttaggcctacattcagccaatcaatctgcctgtgcccgtgtcaggctcatctaccggttcatctacatctgccaactcatgttcaacctccacttcacctgcaacttccagcgcatgtccaactgtcggtgcaagtgcacctgc

SEQ ID NO: 49528 - DNA, 252 bp, Zea mays
  Clone ID: MRT4577_145171C.1
ttctgccccaagccgcgacgccccacgacgccgctgcggtgccaccagagcggtggcttctgcgacgctgagcgcgcgttccagggcgacgagagcggcctgtcgtcggcgtccccgcagccgccgctgttctgcggctcaccgccacggcgagcgtcaaacccggtggtccacgacagtaggttcggcgcggactgcccgcccgtgcccgtacaggggctgtccgtgcaccggcccagcccgcggtcgtcg

SEQ ID NO: 49529 - DNA, 167 bp, Zea mays
  Clone ID: MRT4577_145172C.1
aaagccgcagtacggtcggaattccgggacaacaaaatcaggacgcgcggacgcgtggaggaccgtggttcctagagccggattgtagctctaattatagatataaggattaatcaattgaaataattttggatccattcttgacaacctaaggcccagtttgtttc

SEQ ID NO: 49530 - DNA, 363 bp, Zea mays
  unsure (1)..(363): unsure at all n locations
  Clone ID: MRT4577_145173C.1
gcgtccgctgcttttgcttctggntctttcgtagnatataaacggngggggccggncgcctgtctggattcattctgcgagagatctgctggggcattgattcgtcaacaggctcagctctgatcagcttcaaccaccatggggagtcaggagtcggagcaggccaaggtgcttccgggaaccgactgcccgcagcagccaccggcgagcaggacctggcagaggaggttcgacgatgaaggcaagaaggtcgccatgttcagcatgaccatgaccgacctggtggaccttatgcccttgatggtcaaaatactcaagctgcaggtggaagaacacgccaaaggccgtgttgcggtctaatga

SEQ ID NO: 49531 - DNA, 226 bp, Zea mays
  Clone ID: MRT4577_145174C.1
gtaattccaaactttgctttttctcaaacatcaccggtgcatcatcttatactaggtctatgtcccgtgcgttgccacgagaaaacatgaaatcgttatatatgtggtactacaaatcaaaaaaaaaaaaaaaaaaaaaaaaaaaaaaaaaaaaaaaaaaaaaaaaaaaaaaaaaaaaaaaaaaaaaaaaaaaaaaaaaaaaaaaaaaggggcgggccgttttaaa

SEQ ID NO: 49532 - DNA, 229 bp, Zea mays
  Clone ID: MRT4577_145175C.1
tctatgtgtgcggcatcacttttgtacaaaggcaggataaggtgattaacagcgaactgtgtgactaaggcgagacagaatgaacaatcggtaaactgagagagacaagggcatgtatattttgtaacgaacgctactacacttatgtaccaaattgatgtgaacagtaagcaagagtatatgcagcatgaatatcagttcaggagatgtattgaatacaatgtttaaa

SEQ ID NO: 49533 - DNA, 680 bp, Zea mays
  Clone ID: MRT4577_145176C.1
ccgggtcgaccatgcgtccgcccacgcttccgcccaagtgcctccgccgctgctccacatcctcttcccctctacaaggtgattctgatatcatcaagactacaccaggtgagcagtaaaagagtggtggcagtacatcctctctagagttgttactcagaagagaaagagcccatccacacctcctcactcactggtgctaaaaaggttagagaaattcttgaaggacatgagagttggtgcaaatctgagtttcaaatggagccagcaatattcgaaaccacaacaaattttcttagaagagagaatttactacgagacacacgaggagttatcgttgagaagcagcttgggatgttcatgtacatgatctccaacaatgctagtaaccaaatgctacagaaggcttttcaacatagtggagagactatccataggaaaatatctgaagtatttgatatagttcccacactaactcaatgttttgtgaagcttcctagctctatccaaactcacaccaaaattgctacagattctaggttcatgccatttttagaactgcattggtgcaatcgacggcacacatatacccaccaccatagcagaacatagggcccctccatatagaaacatgaaaggaactctttacacaatgttatggtagcctgcgactttgacct

SEQ ID NO: 49534 - DNA, 514 bp, Zea mays
  unsure (1)..(514): unsure at all n locations
  Clone ID: MRT4577_145177C.1
ccggccgggatcantaagcattcgttaaaatgcctaccgattctccacacccgaaaacacaggggtcacgtttcggccggtcacggtcgtgtagggaaacacagaaagcatcccggtggtcgaggtcttgccggtggtcaacaccatcacagaactaacttcgataaataccatcctggttacttcggtaaagtcggtatgagacactaccacttgctcaaaaaccaatctttccgacccaccatcaacctcgacaaactcatctcccttccagaagctaaagtcgaggctccttccggtaccgtcccagtcatcgatctccaacaattaggtcacttcaaactgctcggtaaaggccgagtcgctcaaccattcatcgtcaaaactcgattcgtctcaaagttggctgagaagaagatcaaggaggcgggtggtgtcgtcaagctcgttgcttagatttgggatgcgactgtatagcctatgaaaaaagaaaaaaaaaaaaaaaaaagcggcc

SEQ ID NO: 49535 - DNA, 853 bp, Zea mays
  Clone ID: MRT4577_145178C.1
gtaaacatcctggcctcaagaggccagacaattctcccgactcgcctccgacggacgccagccgcaacgccgcgaaccccatcctcgggagcctctcctccgacggtcgatggcccggctccctgacgccatcctcgcaacgccaaccccagcctcgagaccgtcatctccgacgccatccccaagtgcctccgccgctgctccacatcctcttcccctctacaaggtgattctgatatcatcaagactacaccaggtgagcagtaaaagagtggtggcagtacatcctctctagagttgttactcaggtttgtatgttggcagcagtatgctcttagttaccttctaaagtttctcctaatttctcaatgggtttgtgataacttgccttttgttcttagtttcatgagtcatatatatatatatatataagagctatctccatgttttgcatgcttaagttccttataagagctatctccacttctctatatatgggttcttgggagcagcaagttagacaatttttgttagatgaggaagaagatgatgatgagttgttctttgctattctccctgctataattccatatctctcagaagagaaagagcccatccacacctcctcactcactggtgctaaaaaggttagagaaattcttgaaggacatgagagttggtgcaaatctgagtttcaaatggagccagcaatattcgaaaccacaacaaattttcttagaagagagaatttactacgagacacacgaggagttatcgttgagaagcagcttgggatgctcatgtacatgatctcccacatgctagtaacaaatgctacagaaggctttttcac

SEQ ID NO: 49536 - DNA, 889 bp, Zea mays
  Clone ID: MRT4577_145179C.1
cattgggtacctcgaggccggccggggacggcccgtctccctaacccatccttgcaacgccaaccccagcctcaggaccatcatctccgacgccatccccaagtgcttcagccgctgctccacatcctcttcccctctacaagggcatgtatttggattacccggtgactaatggtgcgactgatttatgcataatgtcagacaaggacttagatgatgcacgttcatgtgattctgatatcatcaagactacaccagatatgggttcttgggaggagaaagttagacaatttttgttagatgaggaagaagacgacgatgagttgttctttgttattctccctgctataattccatacctctcagaagagaaagagcccatccacacctcctcactcactggtgctaaaaaggttagagaaatccttgaaggacatgagagttggtgcaaatctgagtttcgaatggagccagcaatattcaaaaccacaacaaattttcttagaagagagaatttactacgagacacacgaggagttaccattgaggagcagcttgggatgttcatgtacatgatctcccacaatgctagtaaccaaatgctacaaaaggcttttcaacatagtggagagactatccataggaaaatatctgaagtatttgatatagttcccacactaattcaatgttttgtgaagcttcctagctctatccaaactcacaccaaaattgcaacagattctaggttcatgccatttttagaactgcattggtgcaatcgacgacacacatatacccacccacatagcagaacataggccccctcatatagaacatgaaaggactctttcacacatggtatggtagcctgcgactttgacctcaattt

SEQ ID NO: 49537 - DNA, 267 bp, Zea mays
  Clone ID: MRT4577_14517C.1
tgcgccgtccttgtccggcttcaagaagagccctctagagtcgagatggccgtctacgacaccgtcgccaacaagtgtgcgcgggatgaggaggagacctccacaagtccacagtcacgttcctcctggctcctcgaggcatcggcaccgccgccattcggagccatcccgcctcatccgcggacgccgtcgctcgatgccggcagagaggagctcaggagcccccgtgcctgcgcaacagtttcctcgtggcgctgggcctgcgcg

SEQ ID NO: 49538 - DNA, 251 bp, Zea mays
  unsure (1)..(251): unsure at all n locations
  Clone ID: MRT4577_145180C.1
accatagccaccgggctttacctcctcanctactcnatctgcatcttcttgtcggcagcttctctctacatcctncacaatcttcacaatggctaccatggaagtttagganangnaaatncctaatttntaccctattcnananananttnaccggcttntccaataatcaatactngatttttaaaactctcttcaacggtgttctcttcataaaatatataatgagaaatgtgtgatacaatttatct

SEQ ID NO: 49539 - DNA, 3293 bp, Zea mays
  Clone ID: MRT4577_145181C.1
cgaagcaaccaggcgccgaaaaggatagccgaagtgcgaaacccaacagcaaggagaaggcgaggggaaaaaagaaagaaaaggcgcatcgaaaaggcaaagagcgagctccctctacccgcgatccccgcacaccggccgccggcgttcgtcgccgccgcggatgagatgcgctccccctccggcggcggcagcgtggtggcccgcgcacgttcgtgaggggccctccgccacgcgcccaggttactgtggctccgagtccgagttcgctccccgcgcccgcgctatcgccgcggggcggagcggatcccccaacatgtggcttttctggcgcactaggaatcgcttctcccttgaggagctccggtatctaacagatcagctacaaaaggttcatgttgtcaatgaagctaataaggaatttgtgattgaagcattgcgatcaattgcggaacttatgatatacggtgaccagcatgatgctttgttttttgaatattttatggagaaacagatcatgggtgagtttgctcgtgttctaaggatctcaaagctgtcaagagtgtcactccaattgctacagacaatgagtatcatgatccaaaatctgagaaatgaacattcaatttattacatttttagcaatgagcacatcaacttcttggttacgtacccattcgattttcgaattgatgagatgttatcgtactacatatcttttctgcgggcgataagtgggaagttgaacaagaatacaatttctttgctcgtgaagacgaaaaatgatgaggtcacttcctttcctctttatgttgaggccttaaagtttgcttttcacgaggatagcatgattcgagttgctatacgtaccttgacactcaatgtctatcacgttggagatgaatctgttaacagatttgtttcccgcacgcctttatcagattatttttcagacatggttcagcattttcagaagcagtgcattgacttggataagttggttgcacgctcctcacgaaagggaaattcttctgtgccaatatcttctattgaagatgcaattgtgcaaattgaagacacactgtattatttcagtgatgttatgtcttctggtattcctgatcttgaaaggttcatcactgaaaatatcttgcgagttctggtatttcgattcttactcccgtcactgcagaggcagagcacagatttggacttaagtgtcactacatccatgtatctactttgttgtatactacacatttttaagaataaggatatggcaagtactgtagctgctgccctttttcatcaacctgatggccctgatgataggaagcaaaggacacctaatggatatacatctgagcatgatagttgcaaatctgagaatcattgcaccactgcctctggtatcgagcaatcaagtgaggagccaaattctttgtcttctgttagttggaaacacttgcccaacaattcatcgcgaagtgattgctgccaaggaaacacaccaagggaacacttgctgtcctatatcacagaaggagatgattcacaagctttgggttcattgtgcttattcgctacattattgcagacgaaagaacttgatgaatcaatgctggatgcccttggaatcctccctcaaagaaagcagcataagaaacttctattacaagctttagtaggtgaagaccttgctgaaacacaattattttcgtcaagcagcagtctaactgatgacagcatttgtagtgattttgatatttatgtaaggaagcttcaggataaatatgggctacaatgtcaccatccacggcaaatgacttccaaagctcacagatatcaggtgctcgatgctttagtcgaccttttctgcaggtcaaaggtttctgcagatgttcgtttggttggtggctggcttttccggcaactgctgccccatggagaggaagagttcactgcttttcatctaagacgactaaaggattcacacaaggattgtagctcaaagctttctgaggaatctggaggatgctggtgtgacatgcttcttcctattgttaaagaagcttggaggaactgcaagaaagcaattgaggcatcttcgccaccaaaaggatccaaatctattattgtacccatggatttgtgttcatttgaaggtgattcttctgttgccatcgcagaggcactctatgagatggttaagggttttgtgctgcagcatcaagttatactcttctgtcttggagaaactttcacagagctacctcctatttaccctctggttgatttgcctataaatactagggcaagcgctgcagattttggtggttcagttcctaaacctgggcttgaagtcaacttagtcgacgctgttccttgtcgaatagcatttgagaggggcaaagaacggcacttctgctttttagccatagctcatggaacttctggttggattcttcttctagaagaattacctctaaaacgggaacgaggaattgtccgtgtcatggcacctttggcaggatctgatccaagaatagatacaaagcatgggaagtggttacatctacgcattcgcccttcttcggtcccttttttggacactgagaagcataaagcgaagacaaagaagtatcttgttgatgggagatggacccttgcttttagggacgagcagtcctgtaaggttgcagagagtatggttattgaagagatgaaactccaacgaggtgctgttgcagagcaattgaagccattggttgaatttgacatgcctgaggatggaatgcagcacccccagacttcacatgaaaccccttctgatgatggatcatgactaaattttcatcaagtgcagtgttgagcttctcaattaaggagacatggcaacagatggccgcaaaagtgccgcattgaacatttcaagcatgctggcaggaaaacccaccatggcaagtcatcgacaattctgtacattacattgggagattagagatgtctccttgttaacacacaactgtagagtttcgggccgtcctgagttgaactagctggataggattctttgtacaatagtttgtttctctccttgcccgttgtaaccttatatatcacatcaaaacccattctttgttaagtttcagggcacagttgtgttgtgcacacgaaatgtttaaagaaatttgcagttagtcatacctgttgtcaaagcaagccttgcctatgtggtaataaaatgtcagatcgataatttttcttggaaaaaaaaaaaaaaaaaaacggcc

SEQ ID NO: 49540 - DNA, 322 bp, Zea mays
  Clone ID: MRT4577_145182C.1
ggaaaagggggcacctgcccagacagttttgacaggtccgcacaaaacaaacaaacaaaccctgcatgtgtatttgagatgagatcgatggtttattcagtacaacgagatcgatgcgcttcctcaaccgaggggagcttcacgtactgcatgcaaaacggattagccattagcgttctcctccgatcaggctttagcaaaaactacccgagcagcagtgcatgtgcatccaggaatgcgaatttgtcggcgatgcctagcagttataaatttttgcttgcaccacacatttttcccggtggccttttccctttcatttgct

SEQ ID NO: 49541 - DNA, 229 bp, Zea mays
  Clone ID: MRT4577_145183C.1
gtttttcgtttttctaaaggaacaggaatgcatgtggtggcacatgacctatacgcttctgcagatcgggcccgttcaattggagttagagctagtatgtatggaggaggccttgacatctgttgactaaatctaattgcacatgcctattacctcagctacatactagatgttaaattatttagctttagctaatattaaatttggtgtacgcattataaatgttgaa

SEQ ID NO: 49542 - DNA, 2482 bp, Zea mays
  Clone ID: MRT4577_145184C.1
ctcaatgtctatcacgttggagatgaatctgttaacagatttgtttcccgcacgcctttatcagattatttttcagacatggttcagcattttcagaagcagtgcattgacttggataagttggttgcacgctcctcacgaaagggaaattcttctgtgccaatatcttctattgaagatgcaattgtgcaaattgaagacacactgtattatttcagtgatgttatgtcttctggtattcctgatcttgaaaggttcatcactgaaaatatcttgcgagttctggtatttcgattcttactcccgtcactgcagaggcagagcacagatttggacttaagtgtcactacatccatgtatctactttgttgtatactacacatttttaagaataaggatatggcaagtactgtagctgctgccctttttcatcaacctgatggccctgatgataggaagcaaaggacacctaatggatatacatctgagcatgatagttgcaaatctgagaatcattgcaccactgcctctggtatcgagcaatcaagtgaggagccaaattctttgtcttctgttagttggaaacacttgcccaacaattcatcgcgaagtgattgctgccaaggaaacacaccaagggaacacttgctgtcctatatcacagaaggagatgattcacaagctttgggttcattgtgcttattcgctacattattgcagacgaaagaacttgatgaatcaatgctggatgcccttggaatcctccctcaaagaaagcagcataagaaacttctattagctttctcttcccattaaaaatcacataaggcagctagtataatattttatgggtagtcgtgattagggttaaatgaacaagatttgacagcaagctttagtaggtgaagaccttgctgaaacacaattattttcgtcaagcagcagtctaactgatgacagcatttgtagtgattttgatatttatgtaaggaagcttcaggataaatatgggctacaatgtcaccatccacggcaaatgacttccaaagctcacagatatcaggtgctcgatgctttagtcgaccttttctgcaggtcaaaggtttctgcagatgttcgtttggttggtggctggcttttccggcaactgctgccccatggagaggaagagttcactgcttttcatctaagacgactaaaggattcacacaaggattgtagctcaaagctttctgaggaatctggaggatgctggtgtgacatgcttcttcctattgttaaagaagcttggaggaactgcaagaaagcaattgaggcatcttcgccaccaaaaggatccaaatctattattgtacccatggatttgtgttcatttgaaggtgattcttctgttgccatcgcagaggcactctatgagatggttaagggttttgtgctgcagcatcaagttatactcttctgtcttggagaaactttcacagagctacctcctatttaccctctggttgatttgcctataaatactagggcaagcgctgcagattttggtggttcagttcctaaacctgggcttgaagtcaacttagtcgacgctgttccttgtcgaatagcatttgagaggggcaaagaacggcacttctgctttttagccatagctcatggaacttctggttggattcttcttctagaagaattacctctaaaacgggaacgaggaattgtccgtgtcatggcacctttggcaggatctgatccaagaatagatacaaagcatgggaagtggttacatctacgcattcgcccttcttcggtcccttttttggacactgagaagcataaagcgaagacaaagaagtatcttgttgatgggagatggacccttgcttttagggacgagcagtcctgtaaggttgcagagagtatggttattgaagagatgaaactccaacgaggtgctgttgcagagcaattgaagccattggttgaatttgacatgcctgaggatggaatgcagcacccccagacttcacatgaaaccccttctgatgatggatcatgactaaattttcatcaagtgcagtgttgagcttctcaattaaggagacatggcaacagatggccgcaaaagtgccgcattgaacatttcaagcatgctggcaggaaaacccaccatggcaagtcatcgacaattctgtacattacattgggagattagagatgtctccttgttaacacacaactgtagagtttcgggccgtcctgagttgaactagctggataggattctttgtacaatagtttgtttctctccttgcccgttgtaaccttatatatcacatcaaaacccattctttgttaagtttcagggcacagttgtgttgtgcacacgaaatgtttaaagaaatttgcagttagtcatacctgttgtcaaagcaagccttgcctatgtggtaataaaatgtcagatcgataatttttcttg

SEQ ID NO: 49543 - DNA, 256 bp, Zea mays
  Clone ID: MRT4577_145185C.1
agaagagggacatgctttgcgatttgtggaccttgttcgtctcatttattagtttgcccaaggtacaagaaaacttgtggttaggaataggggagagagcatgcataaagtggggtcttaatgtaggtcagtgtttttcattagagacttgtgagctaactgtggctctccaaccacggcggtacgtgcaagtgcaatgggttccagcagtgtatattttcagcagctctgtaattcaagttccaattcttctctc

SEQ ID NO: 49544 - DNA, 675 bp, Zea mays
  unsure (1)..(675): unsure at all n locations
  Clone ID: MRT4577_145186C.1
ccggccggggaacccgacatccaggcggctcatttacttcatccttatcacctccggtctccctccctcccacggccagcgccccagctacctccccttcggttctcgccagcctccacctcttccagtcttcctcctcgcctctgggtcccgacgccttccgccgtcgaccagagcagcacgcctctgcctcgccaccgtcgggtcccgctgtctccagccaccgccgctccacctccgccacctcatcaccgggtcccgtcgccatctggtcactngatgtgggttgtcctacaccgcccggacatgcccttctccattctccctccacctccgtctgttgactgtcacctccattcgcctcaaggtgcagcggcgtggcgaggaagcgcgggaggagtcggtacggcggacgtggnagggcgcggtcgcctggtccacaacaacctgcatcccgggaggccacgagagaagataaggtgaggggagaagaagtgaaatccggtcgtcatgctgttagccacgccgtcgcnatagggagtgatcgatcgcagtcggagtcgcaagggaaggngaaaggagcagcagagagaagataaacgcgatactggatagtgtattcggttattccataagccttactattgcaaaaaaaaaaaaaaaaaacccgcggcc

SEQ ID NO: 49545 - DNA, 272 bp, Zea mays
  unsure (1)..(272): unsure at all n locations
  Clone ID: MRT4577_145187C.1
cagacccgtacccctcccattcactcctttcacccaaaaactcattctccttgggcacgattttacataancaacttatcaaatccaataatgcatacaagcccactatctacaangagacacacaacacacataaatcggagcactaccagttcattagacaataacccatccagtccaaatcactcatcaaagaaaataaattcatctttaaaacaaatgctggaagaagaaaaaaaaaagcctcaaaaagaaactgaatttaagttact

SEQ ID NO: 49546 - DNA, 134 bp, Zea mays
  Clone ID: MRT4577_145188C.1
caaatattggttgtagagtattgcttttttaaatacaatgtccaattaaattcaaggatccgatcctatccaacataattggacattgttatttaaaaaagcaatactctacaaccaatattttgttttaaaaa

SEQ ID NO: 49547 - DNA, 476 bp, Zea mays
  Clone ID: MRT4577_145189C.1
ttccaaggcaagcatccttggtccattgttggcctcgctcatcaatcagctgtgtctcagcaggaggcgttgcggccatggcggcttcgaagcccatcttgtatagcgcgtggatcagctcctgctccttccgagtccggatcgccctcaacctcaaaggtaactggatcaaaccgctggcgcttgtttcctgctccatagatgacggcgaatcttgcccaaaacaggggtctcgacgtctcgttcccgggagatggggagttggggacaatgtgaccttttcttgatctattaatcagttcgacagattttaggggaatttgatggctagatactaggccaccctgattttagacaggcagtacctttggggtttgtccgaatctctgggctccagtgtcctggccacagggatggctcctgttatccagtcacttgtctattggaaaagctgatgaacatcttctggtaggact

SEQ ID NO: 49548 - DNA, 415 bp, Zea mays
  Clone ID: MRT4577_14518C.1
gacaatttgaagatctcatgagccagactcgagaagcgacaaaggagaaattcctcacacgtcacactagattggcactagaagatcataaagcaaggagagatcaaccatggtcagagaaggctgaggaatgccatgttatcgcttattctttgacctaccccttatccagacagaggtccaatgccgacgcgtggccagacgcccctagcgtaagcaccggacgatgcctgacgaaagcctctcacatagggcacgccatcattgagtgcagatgggatgcatacttgcccacgccagtaacggatagcgtatccctgtcattaaatacacgcgatgcgccaggcctgcaatgtgcggattttactgttacctgcacgttaccgaggcaaaggcattgacctaggtgttgtcg

SEQ ID NO: 49549 - DNA, 452 bp, Zea mays
  Clone ID: MRT4577_145190C.1
ggatacgtaaggagacaaatctgcaagccaagaacattcggtgcttggtgagataaaggatccttggaactcattcgctgcactcagtcacagcttcccaaatcctcaacatatggatttcaccaattttagtgttgacaatcctcacttatgggaggtccattgtgatatctactttgaagtgcatgccatcaacaatactttgacgccactatttgtggcactgaactttgaaggggctgtagctaactgattgcaatcaattgaactcaggggtcatttgtacatcttgcaacctctacatactccagcctttgtatcccatttcaataagtagttgtgctcaactacttaccacacatcaaaaaggttgtatcttcatgtcgcgtatgcctctatagtattttgctgaaggtgtttttgccttgaggaccttcgatgggaaagaagac

SEQ ID NO: 49550 - DNA, 822 bp, Zea mays
  Clone ID: MRT4577_145191C.1
atggcaagggagccactaaccctggcggccttctccaaccagcctagtccctcatcttcctcgcacccaatagtgggcatggacagtgtgactatccgccggccggatccgtatgccagttgcgaggatggatgcttcgggttgagagggcggctgggacatgtgtcgctgtgggcgacggcacaattcgttgctggaagggtgcacgcgacgcgtagcccgatgtgtgcagagaagaggaggttgaaggcggcaaatgagaagagagcacatgatgcaagagaatgggaggcggctagagccgagaaacagatgttggataatcttgctgattgtctcaagggaaagattggatgtggcgtaaactatatcacagatgaggcacatgcaagacacgttcaggaaaaaatggcgacggtggagctgatggaggaggaggacgatgacacatttaggttgagtgagtttatcgctcttgcagaggcaggattacatggggaagaggaggacgacacattaaggttgagtgagctcaacgcactagctgaggcaggattacgtgctcaagagaaggaggacgagtttatgtctcacgccgtcgaagaggtagaggcggcttattacaagcagaagtgtgatggggctgaggctgagaatgagctattctctcaagctgcagatgaagcagaagccaattattacaagagaactgctgcaaagtgtgatgcaggacaatgcagcaagtggaacgaggttgtcgttgaggattgcgcgacagatgactctgaagatgagttacttatagattgtgattctgattga

SEQ ID NO: 49551 - DNA, 612 bp, Zea mays
  Clone ID: MRT4577_145192C.1
cctcgctgagggcgacgcctacctgcagatgctcatgagccccggcaaggccaagaagccattgcctcccatttggtcagaggtcctgaggttcttcgtcaacccgcacaagcccatgatcctggcgctgtcgcggccggaccccaagaagaacgtcaccacgctgctcaaggcctatggcgagagccgccacctccgcgagcttgccaaccttacactgatactggggaaccggcatgatatcgaggagatgtccggcggcgccgccacagttctgacggcagtgctcaagctcatcgaccggtacgacctgtacggctgcgtcgcctaccctaagcaccacaagcagaccgacgtgccgcacatataccgccttgccgccaagacgaagggagtgttcattaatcctgcacttgtggagccattcggcctcaccctcatagaggccgctgcgtatggtctgcccgtggtggccaccaagaacggcggtccggtggacatcatcaaggcgctgcacaacgggctgctggtggacccgcacgacgaggcggcgataacggaggcgctgctcagcctgctagccgacaaggcgcggtggcccgagtgtcggcg

SEQ ID NO: 49552 - DNA, 977 bp, Zea mays
  Clone ID: MRT4577_145193C.1
ccggccgggaagaaaaaaaatgtctctcagtcgattcctcaaggaaatctcaacagcaccagaagaagaacaacagcgcattcagaacgagtatgcactccaacaacaaccaaaccatctagtacaaacacccatcccctcattcgacctgcctggtgtccaagaccccatagagttcttgaagacacacaccgacgaccgctcagccgatgccaagatcaagatcaaacacggcaccaccaccctcgcctttagattccaacacggcatcgtcgtcgccgtcgattctcgtgccaccgcaggcagctatatcgccagtggtaccgtaaaaaaagtcatcgaaatcaacccttttctcttgggcaccatggccggtggcgccgctgattgtcaatactgggaaacttatttggggatccaatgtcgactgcacgagttacgaaacaaatcgcggatttcagtagcggcggcgtccaaatatttatcgaacctggtgtacagttacaagggaatggggttatccatggggacgatgatctgtggctgggacggctccgggccggcgttatactatgtggactcggatgggacccggatgaagggcgacgtgttctcagtgggctcgggttccaccttcgcctatggcgtcctcgaccagggttatcactgggacctctccgtcgacgacgccctcgaactcggaagacgtagtatctacgccgccggccatcgtgacgccttctccggtaacaccctcaacctctatcatgtcaagcaagacggctggcactttatcaacaactatgacttcaacaaacttcactacgacatggcgtatggctatgaagagaggttaaagcaagaagcggccgttctggcctgacgcggagtgatttcacatcttgcatcatgttgtgtgtgtgtgtgtttggagcaacacataagtgtaataaattgaatcgatccattttcacatg

SEQ ID NO: 49553 - DNA, 473 bp, Zea mays
  Clone ID: MRT4577_145194C.1
ggagctaccagtgtgcatgcactgagaagggctacatcatgacggccaacgggaggtcctgcaagcaactggatgagtgtgcactgcgtacccacaactgttccgaggctgagacctgccacaacatccagggtagcttccgctgcctgcgcttcgagtgtcctcccaactatgtccaagtctccaaaacgtagtgagagcgcaccacgtgccatgacttcctggagtgccagaactcgccagcgcgcatcacgcactaccagctcaacttccagacgggcctcctggtgcctgcgcatatcttccgcattggccccgcgccagccttcacgggggacaccatcgccctgaacatcatcaagggcaatgaggagggctactttggcacgcgcaggctcaatgcctacacgggtgtggtctacctgcagcgggccgtgctggagccccgggactttgccctggacgtggagatg

SEQ ID NO: 49554 - DNA, 267 bp, Zea mays
  Clone ID: MRT4577_145195C.1
gggccaaagggaaaattttttacatcttttcctccttaaacaacaaaaaaaaaaatgcgacacgactagagctacatttacatgacacccatactttcatacaccacagcaaaataaatcccttctacaaaaaccgccaacaaacaacgaaaaaaaacctggtttttacatataacaactagggatcgtgcttggttttgatgccccacggacagcccaacaaaccctctttcctttaccggaacttgcactaaaaacccactccct

SEQ ID NO: 49555 - DNA, 458 bp, Zea mays
  Clone ID: MRT4577_145196C.1
cggccgggatagcagtttcgtgatgagaggtgtatgccgtgatctgcccacacaatccagagcgaggtcgtcggggtggactccaaatccctcctcttcaggactcaacaacggagttcggctccgaccacggagccctgctgcaatgacggaggggggagatcttgaccctcagatgaggatatcatcgacgacaccccacattgtccgcaagatagctcgaccgtccgagacaagcaccgcagttggttattggtgcagtgctctgcacaacagtgcggctgttgcccacggaaatgcatacggcaatgcactggcctcgcggacacagcatgccaatgaaaatactcaggcggccgacacacagatagttgggtccaagagaactgtgatcacgtggggccgcggaagaggagcagctcggcagcactgggggggccggaccctggcaagggggc

SEQ ID NO: 49556 - DNA, 659 bp, Zea mays
  Clone ID: MRT4577_145197C.1
tggtactgtctctgattatatgaagcacagttagaggagcttggcaatggattgtacaattctggcaaaccattcatttgggttgtgaggtcaaacgaagaacacaagttgtccaatgaacttcgtgacaagtgcaaggaacgtggccttattgtttcttggtgcccccagctggaagttctagcacataaagctacaggttgtttcttcacacattgcggatggaactcgacattggaagcaattgttaatggtgtgccaatggtggcaataccacactgggcagaccagccgaccatatcaaaatatatggagagcatgtggggcttgggtgtccgagtgcgcaaggatgagaaaggcttggtaacaagggacgaggtggaaaggtgcatcaaggatgtcatggatggtgatagtaaggataagtataggaagagtgccactatgtggatgcaaaaggccaaggcagctatgcagaatggagggagttcggacaagaatattacagaattcatcgctaagtattctttaagttaattttcaaagatttcgtaaaaaatataattttcaaaggtaaaaaaaaaaaaaaaaaaaaaaataaaaataaaaaaaaaataaaaaaaaaaaatatttaaactttttaaagaattccaatttta

SEQ ID NO: 49557 - DNA, 366 bp, Zea mays
  Clone ID: MRT4577_145198C.1
ttttagaaacaaatgaaagaatttcattaataagcacgcggggcatgaaccatgattttcatatgggacactccatgggtactacacccaccttgaatcgatcacatatacctctgctgtctcagtatctaagaaagaatcaccctggaccaaaacacactcacacacacacacacaaaagtaaaacacgatggtgtatacagggccgaccaccgggacgccccggggaggcgtatataacatgactggggttgcgaccgctcccgcgactgcaaccaagaaaacggcggaggcacgcgaagtagtgaatctgccaaagggcgcgaaggggggggctccggccggggcggcggggacggtctatgt

SEQ ID NO: 49558 - DNA, 220 bp, Zea mays
  Clone ID: MRT4577_145199C.1
aaaaaaaaaaaaaaaaaaaaaaaaaaaaaaaaaaaaaaaaaaaaaaaaaaaaaaaagggggggacaatatattataatccaaacttacatactcgtgcttgccaactttttatttcttctatagggcgtactaaattaaaataaatgggcgtcgttttttaacgtccaactttaaacccctgcttttcctaattaaatttttttgtgggacatcccattt

SEQ ID NO: 49559 - DNA, 819 bp, Zea mays
  Clone ID: MRT4577_14519C.1
gggaaattcctcatctcgcggatggcggcggcgtcttatctctgttgctgctgctgattcgcacgacgaacgcgagcagtgtcgaaccctaccaaatcacagatcccctcggtcggtcaccaaccatagcggctgtcaaatccccagatcaaatgcttattgggtgggtgcagagataaaattgttgcatgcttcctccctcgcaggccggtccaaggaaacctgctagctgaattgccttggtgccattgacggcacacatgtacccatcactatcgcagaagacagggcccctccatatagaaatagaaaaagaactctttcacacaatgttatggtagtctgcgactttgatctcaattttacatctgtctcatgtggatgggaagggtcggcatcagacgcaggggtgcttcgatctgctattagcaaaggatttagtgtgccagaaggaaagttttatcttgtagatggtgggtatgcaaatacaccatcatacattgcaccatacagaggtgttcgataccatctcagtcaatttaggaggagtcgttcatcacaaagtggttatgcaaactacaaagagttattcagagggatggaagtgtatcactgctaagtttaatgaaaggttctctttggctcatttcacaaaacaacaactacaagagaaggagaaagaacttaaatcaagctataaagtagtaagagattcaagaaaggaaagtggaactggtggaatgactccctatgtatgatattagctgaaccagaggtttgggcaaggttgattagtgctcacccaaaggttgcaaggtt

SEQ ID NO: 49560 - DNA, 636 bp, Zea mays
  Clone ID: MRT4577_1451C.1
cccctcttggagttttttttttttttttttttttttttttttttttttttttttttttttttttttttttttttttttttttttttttttttttttaaaaggggaggccctttgtttgggagggatgcccctcaacaaaagcaggtttgaaaaaaaatggttttccccaacaaatttttgggttaacattggcccgagggcccggaaaacatagaaggcaccctttttttttaataattaaaccccctcccggttaaaccccccccttgttgttttggggagaaagagcatttaaaaccctgggttttttttttttttctttgaaaggggcaagcaaaacccccccggaacctttgccacccttgacccggcccccagaattttttcccaaagggggccctttacaaccaaatccagaattaaaaacctcttttttttcctaaagggagtaaaaacacccgtttttgggcccaaagggagaattttttttgccttttttaaagagctgaacccaacccccctttcggttaggggatttgggttgtttggcctaaaaaccaattttttccagaaaatgccctgggaaggggataacccaacaaagggtttcttccctttattgcccaaagggttttt

SEQ ID NO: 49561 - DNA, 305 bp, Zea mays
  Clone ID: MRT4577_145200C.1
cgggctctacaaaccctagtcccctgctgcattctcagtgtgccgccgatcccttcccgtggtgcggagcgggggagtgagaaaaagagatgggcgggaagggcgatggcccggctatcgggatcgatctcgggacgacgtactcttgcgtgggggtgtggcagcacgaccgcgtcgagatcattgccaacgagcaggggaaccgcgccacgccctggtgcggggccttcaccgactccgagcgcctcatgggagatgcggccaagaaccaggtgcggatgaaccccatcaacaccggctttgat

SEQ ID NO: 49562 - DNA, 188 bp, Zea mays
  Clone ID: MRT4577_145201C.1
ggaaaaaaagggacacccgaaaggggggcttgaagttaacttttccaaaaaaacagggcacgccgtaaaaaaagttaacagtccacaattacaggaacaaccccattcaaaatttggggatggagggacaagtcacgttttgcaaaaacccattccgggttaacggccggttgcatcatttttttttg

SEQ ID NO: 49563 - DNA, 662 bp, Zea mays
  Clone ID: MRT4577_145202C.1
ccgggctctcaaaaccctagtcccctgctgcattctcagttgtcgccgatcccttcccgggggccggagggggggagtgaaaaaaagagatgggcgggaagggcgatggcccgggtatcgggatcgatctcgggacgacgtactcttgcgtgggcgtgtgggagcacgaccgcgtcgagatcacttgccaacgaccaggggaaccgcgccacgccctggggcggggccttcaccgactccgagcgcgtcatcggagatgcgggcaagaaccagggcgccatgaaccccatcaacaccggctttgatgccaagcgtgtcatcggcaggaggtgcagggatgcggctgtgcagagtgatatcaaggtgtgggccttcaaggtcatttctgggcctggggagaagccaatgagttggtggcagcacaagggggaggagaagcaggttgcagctgaagagatctcctctatgggtcttatcaagatgcgtgagattgctgaagcttaccttgggagcacgatcaagaatgcggtggtcacaggccctgcctacttcaatgactcacagaggcgggccacaaaggatgctggggtgattgctgggcttaatgtgctgcgtgtcatcaacgagccaacagctgcagctatcggctatgggcttgacaa

SEQ ID NO: 49564 - DNA, 329 bp, Zea mays
  Clone ID: MRT4577_145203C.1
gtgtgggttggtttttttttttttttttttttttttttttgcccaaaaagatgagggccagggccctgagatccccatccaacaaataagggccggaaattccggggttaaatcccagggttccatttaaaaaacccggacaaaaggggggtccatgtcccacaaaaaaaacaagggagggccacacattttattcagggcatttttccccaagaaaccaccggtcggtcccaacccatggagggaaccctccactggggcccctaaccgctattaatcccgtaagagggccaaacaattgttgtccctggcgcaaaaaacccttggcc

SEQ ID NO: 49565 - DNA, 365 bp, Zea mays
  Clone ID: MRT4577_145204C.1
ggaaaacactggcgtgaacattaaaaacccacagaaatcggcgggggaaaggcaaaaaccaaggggggggacgcgaaaggaacaaaagaggggcccgggggggaaagggaaagcaaagggggcccaaaagggcaaggggcttaaccaaccaagcccgggggccccgagcaccccaaaaagagaacccccgggtttttgaaacaaaggcaggggaagcccccgatctctgccaagggaaaaacaaatgcccagagaaggcccaaaaaaaggcaaggcgggccccaagggaccggggggggggggcgaaaggacaccaagcccttggggggaggcccaaggggcccctgggggtggggaaaggcccc

SEQ ID NO: 49566 - DNA, 744 bp, Zea mays
  unsure (1)..(744): unsure at all n locations
  Clone ID: MRT4577_145205C.1
tacctcgaggggccggccgggaaaaaatatccaaaaaaaaaaaaagaaataaaaaaaaaaataaanaaaaaaaagaaaaaaaaaaaaaaaaaaaaaaaaaaaaaaaaaaaaaaaaaaaaaaaaaaaattccgccgcctttttcgaaggcccccgaaacggaaccccgctttcgccgccgccgcttttgaaatccccgaaggggggaaaaattgtttacggggccccggggcccaaccccgggaagggccaagggtttcggccgaaaaaaaagggttggggccgccccatacccaaaacggggggggggcttgatcaaggggaagggcgccccgatggagctcatcaggcgggaaaggtcccgcctaagggccttaaagcccttctggtgggggggggcttccaggttcagggacttcaaattgagaatcccggccggaggggggggaaaaactccaaaaatttacgccattcccagggccgtcccaagggggttcttcccctataacaaaaaaaacgccaaaaaggcccccaaaaagggggtaaggaacattttcaccgggtaaaacagaacctttttcgtggccaaccccaggggttggaagccaaaaaaatttcgggggccggggcccccgccccaggttccaaaatcccaacggttgagggctcggttgcccgcgtttgccgaaccaatgcctgggttgtcccaatttgccagttcaaggccggtaccgggggtttatttt

SEQ ID NO: 49567 - DNA, 216 bp, Zea mays
  Clone ID: MRT4577_145206C.1
agctttcgcgtgcgcggacgcttgggcacacggacactgtgaaagtgagttacttggctgccagtacagggcatctatgggagctgaatatttgatatggttatagaacaaggagtcagaagaaagtaatgttgtgaagtctacatgagacagaacaagacctgttagtaagatccgattatgaatagcaagagtttagctctaatcgactggaaa

SEQ ID NO: 49568 - DNA, 566 bp, Zea mays
  Clone ID: MRT4577_145207C.1
acctatagaagtactatgacgtagcatggacgcgttcgtaagcttgggattctttaaagccggcgccccttgttttttttttttttttttgttttttttttttttttgttttatttttttttgttaaaaaacaaaaagatggtttttaaactcaaaaatgggcctttccccggcctctggattggggcccaaacccccagaattggtgggggaaccccaccctagatttcccagattggcctaataaaacctcccaacggttgggttgatttaaacgggtttttaaggcttttggttcgccttttttttaccattggttgcccttcggttcccaattttgtttgctgggccaaatttggccaattttgacatttaaaagaatggccattcttttaaaaggatttccccggttcctgtggcccaaggcgaaacaaacaagcgacccttttttttggaactttctttgggatttcatttaattgttaacctttttaaacaaattactggaaacttaaagccgttggtaaaaaaaaaaggctccggatggcctttcttaaagggatttt

SEQ ID NO: 49569 - DNA, 267 bp, Zea mays
  Clone ID: MRT4577_145208C.1
gagggtgggaaaattattttgttttgtgacaacaaagctaatccacaattcttccacaaccaaacgggtccggaattaacggctacaagccgataaaccttacagctacaactgttggcccaaggaaaagcaaaccttccgagcggcaccctccaagggggaagctgacacagtttaacatgcatgcacgggcacaaaataaactaaacggggggctgctgcccacgcagagagaactgaatgctatgtgggctgacctgccgcacc

SEQ ID NO: 49570 - DNA, 363 bp, Zea mays
  Clone ID: MRT4577_145209C.1
ggaatgctaccctacaccattttgttttccacctacacgatgtccatcggggtccggggggttcacccctccgatgttaaacctaaacccgttgcgcatacatggaccacccgttcatcatgcttcttggcgccgaacagacccaacacgtctaccgtaacctgattgcccgacagctccacttcgcctaacgccacgccttccaagacacccggcatcgtgcccctgaggcggatgcctaccagcacgaggttaaaaacagtcgccgaaggcgcgatggcgcccaatagcccgttgccgaccatgccgaggaaggcgaggtcctgcaccgcacgcaaacccacaaacaccgggatgctgcca

SEQ ID NO: 49571 - DNA, 263 bp, Zea mays
  Clone ID: MRT4577_14520C.1
ggtgagtttagccccatcccctaggtgttctccagcttgaggatcgcaggcagagaggaccagcccagcagccacaggcctgaccaaagcccaggctgggcggcgccgcaactccccattttccactgggaggtgtttcctcagcacagtcaacataggagcagcgactggacccagagccatgtggctgtgccctctggccctcaacctcatcttgatggcagcctctggtgctgtgtgcgaagtgaaggacgtttgtgttg

SEQ ID NO: 49572 - DNA, 750 bp, Zea mays
  unsure (1)..(750): unsure at all n locations
  Clone ID: MRT4577_145210C.1
gtacagcccgcaggtttcggtccggaattcccgggtcgacccacgcgtccgatgacccctagggaccggcatgaaggacgtaagcagagcagcactgctgacacccagaagaaagcagctccagttctcaaacaggcggaccggcgtcagtcaatggctttcagcatccttaacacacctaagaagctgggaaatagtcttctaaggcgaggagcttcaaagaagaccccagcaaaggtctcccccaatcctcgcagtggaacccgccgttctccacgcattgccaccaccacaactggcactgctactgttgccaccactcctcgggccaagggcaaggtgaagcattaaagagtcagcaccagtgcttacgtggccccactgcattgtcagcactgaccttgcttggtcctttccctcctgctgtccctcagtgccttctctcagctcccaggccaatggcggccagccttccccaagacaatgaggtttgcctgcaccctggcctgctacctggactttgcctggtgccttctaggcgtctttcagagatggcccaggaggcttggagcttggacagtgtgtggtcttctccctatcttgcctcctgattntttttttctccctccgttgttgttttggaaaaaagtctacttttccatctaactagattgagactggattctttagcccagtcttccttagtctctggacctagaagggaccattggagaagcaggctctgcttct

SEQ ID NO: 49573 - DNA, 269 bp, Zea mays
  Clone ID: MRT4577_145211C.1
tacctggacaaggtctcacactctgaggatgactgtctagctttcaaagttcaccaatactttaatgtagagcttatccagcctggagcagtcaaggtctacgcctattacaacctggaggaaagctgtacccggttctaccatccggatctcgaggatggaaagctgaacaagctctgccgtgatgaactgtgccgctgtgctgaggagaattgcttcatacaaaagtcggatgacaaggtcaccctggaagaacggctggacaaggc

SEQ ID NO: 49574 - DNA, 443 bp, Zea mays
  Clone ID: MRT4577_145212C.1
aaacccctacaatgtttctgaaatacactatcactcatggcttactcaccccgcaaggggactacacccagaatccccctgagcacggaagaaccttacgaggcctgcgctcaccaaaggaggcctcctccttcaaacaacggaaaagcgttacgatgatccacttctgtgacaagaaacgctaaaaaactgaattcttcaagaacgtttctagtacaacaaactaagagacaaagtcatccttatgtgcgaacaaagcaccgcctggctcctgatctgtgcacaaaagaaagccatggatgactgatggccacatcatgcatgagcccttttcctggggttaatttgcagaaggtaatacagactaatctacaaagggaaaatcactgcccagcaagggttttgccagggaggatgcttgtgctatcaaatactctaaactg

SEQ ID NO: 49575 - DNA, 382 bp, Zea mays
  Clone ID: MRT4577_145213C.1
acagttttacagctgaggaacgattctttcttctcttcacatgcacggaaatttgggtccttattggcgtacaaacaaacaaggcaaagagcaggagccacgcaagggaatttggtcctgctgctccaacaggcgagacggcgacgggtggccagaacaatgcagccaaatgatcataggaatctacagttgtcgccatcgccttcgtgttctcgacagcgctgaaccgcgggctccgcctcctcgccgccggcgccgaggcgtccaaaccagcttctcgtggattccatgccaccggcgtgaagagaatgggagggcatggccatgatgagccatactacatccatgccaagcacatgtataacttgcacaggatgaagca

SEQ ID NO: 49576 - DNA, 1308 bp, Zea mays
  Clone ID: MRT4577_145214C.1
ctctctctctcactcccaaaccaagctaccttccgcccatgggcccaccgccgcgccgccgccaactcctgctgtctctcgcgctgctcgccaccgcggccgcctgctgcgcggcgggggcggcgcccaggctgtcgcccaactactaccgccgcagctgcccgcgcgtggagcggatcgtgtcggacgccgtcgccgccaagcagcgcgccaacccgtccacggctgcgggcacgctgcggctcttcttccacgactgcttcgtcaacggctgcgacgcctcggtgctggtctcgccgctctcctcctccggcgccgcgccggagcgcgccgcggagatcaacctgtccctgcccggggacgccttcgacgccgtggcccgcgccaaggcggcgctggaggccgcgtgcccgggcgtcgtctcctgcgccgacgcgctggcgctagcggcgcgcgacctcgtggccgccctgggcgggccccggttccccgtcgcgctgggccgccgcgactcccgccgctccgacgcgcgcgacgtcgagggcaacctgccccgcaccaacatgtcggcgcgagccatggtgcgcctcttcgcccgcaagggcctcgcgccccgggagatggtggcgctggccggcgcccacaccgtcggcttctcccactgcgccgagttcgcgccccgcatctacggctaccggggcgccagccacgacccgcggctcaacccggagttcgcgcgcgcgctgcagcgctcctgcgcgggataccgcaccgaccccaccgtctccatcttcaacgacatcgtcacgccccgggacttcgacgagacctactacaagaacctgccccacggcctcggcctgctcgcctccgacgccgccatctgggagtacccgcccaccagggtcttcgcccagcgctacgccgccaaccgcaccgccttcttcgaggacttcgccgccgcgatgcagaggctcggcgccgtcggcgtcaagacggggcgccagggcgtcgtcaggcgccgctgcgacgcgctcgactgagtgtcgcgatgcttgttgtgccattgggtcggtcgatcgttgtaaggcttcgaattcgattacgggatatgagaggctcttctttctctgtacttggaaaatggggcgtgagtggtaactaaagtgatgaactgagggcaagctaattctaaattgcatgtcaattgcaatagggttacattaagactcaggctgggcaaccgtgggatgacaattgctgaaacctcacaccatgagatgatgagactaggagatggtaatgggc

SEQ ID NO: 49577 - DNA, 2184 bp, Zea mays
  Clone ID: MRT4577_145215C.1
ataaagccaaaaggacccgcagcaaggggtgactgcatgagagataggattaggagcctgaaagatcgagaagccaaacccacaggcagagaatagcacggtttcgtccatccgatccgcgacgatccacagccatggcgatggcttacaagatggcgacggaggggatggacgtgaaggaggagtgccagcgctggttcatggagatgaagtggaagaaggtgcaccgcttcgtggtgtacaggatcgacgagcggtcgcgcgccgtgctggtggacagggtgggcggccccggggaggggtacgaggagctcgtggccgcgctgcccggcgacgactgccgctacgccgtcttcgacttcgacttcgtcagcgtcgacaactgccagaagagcaagatcttcttcatcgcctggtacgtacgtacgtacgtacgaattcctgagccgctcgccttcagtttcccgtccaatggcttggctgttcaatcagtgcagcatcctaacgtcacaaaagcagggaaattgttgcttgcggcaatcatcccagctgcctttattaaggtcgccggttattttatcagatctgatctagcctgaatccacctgttgcctagatctgtcagcccaccgaaagcacgcagcgcccacgatgacagttgacagccataggcaaaactgtccaataatccgccagccatacattattattttttggacaataagttagtagcaacccgtcagcagaaacgagagcaactataatttatatacatctacctttcttgatctgtccgtgtccggcaacaagagcagcagcaaacaaatcaggattccatcgctacgagcaagcaactaccgaccgagttattctactactgctagcttgtcaactcgctccggtgtccacttgttaaagcgctatgattctgctggtgcgcacgcagttaggtgttctgacgggtgggattcgtttgctcggcggttggtgccgcgcgccgcgcctttttttttcttcttctttcgcgcaggtcacgggcggcgtcgaggatacgggccaagatcctgtacgcgacgtcaaagcagggcctgcggcggctgctggacggggtgcactacgaggtgcaggccaccgaacccctccgagatgggcttcgacgtcatcagaggccgcgcgcaatgagagcgtgatcggcggccgggtgctgattggcgttggtgtgatgaactgagcctctcccgatgatgtcggccggtctgacgaggcttcgcgtgtgtttgctttccccccgtttttttccccccggttcttccgagagatggtgcagtgccagggggcgtggtgttgctgatgctgatggtcggagtgacgggagtagtaggtctgcatgagagataggattaggagcctgaaagatcgagaagccaaacccacaggcagagaatagcacggtttcgtccatccgatccgcgacgatccacagccatggcgatggcttacaagatggcgacggaggggatggacgtgaaggaggagtgccagcgctggttcatggagatgaagtggaagaaggtgcaccgcttcgtggtgtacaggatcgacgagcggtcgcgcgccgtgctggtggacagggtgggcggccccggggaggggtacgaggagctcgtggccgcgctgcccggcgacgactgccgctacgccgtcttcgacttcgacttcgtcaccgtcgacaactgccagaagagcaagatcttcttcatcgcctggtcaccggcggcgtcgaggatacgggccaagatcctgtacgcgacgtcgaagcagggcctgcggcggctgctggacggggtgcactacgaggtgcaggccaccgacccctccgagatgggcttcgacgaaacagtgctcccaattgactactagaaaactgcagatccaatggctgttcaatcagtagtgcttgttgcttgcggcaataatcccagctgcctttaagtcggtcgggatcatgacgggggagaccaaaagctttcctgataagccctccctatcactgttgcctcgagcgctctctgcacgcatcatttttttttgtccgaaaccctgcagcgctaattaaggtcgacgccggttattttatcagatctgatctagcatgaatccacctgttgcctagatctgtcagcc

SEQ ID NO: 49578 - DNA, 728 bp, Zea mays
  Clone ID: MRT4577_145216C.1
ccggccgggatcctcttatcccattttcacatttcgctcaccatcccaaacatggctaaccttccaggtctcctcattgacatcccccgcaaccccatccttgcggtcggcatccctgtcgccgtcggcgtcgtcaacggctttgccaccaagtcgtccaactactctgccgactcggtctggtacaagtcgctcaagaagcccagcctcaaccctccctcgagctactatggcatcgtctggcccgtcctctacgcctcgatgggttgggcttcccacttgaccgtcaaggctctcgaccgcactcctcccggtctcggccgcgacacggccaagaaggcgctctcgctctactggatccagctcggtctcaacgcgctctggtcgcccctcttcttcggtgccggcaacgtcggtctggctctggtcaacattggcgctcttaccggtaccgtcggtctctgggctgctaccgttaaggatgtcgacgagaccgccggtctgctcgccatcccttacgtcggctggatggtctacgctacctacctcaacgccagcatctggtggcagaactacggctcgtccaagttcggcaagctcaagaaggaggccaaggacctctaagagttttctgactcggatgatgctaaacagcagggaaaggtgcacaagaggaatcatgtattctatataggctcttttcttgctacaaaccaaatgaagcccga

SEQ ID NO: 49579 - DNA, 879 bp, Zea mays
  Clone ID: MRT4577_145217C.1
ttgggtacctcgaggccggccgggacttccccagcagttggaaacctgccatatacatccatccttgcacatagctccgatccaggtccagctccaccaacccggccggaagcagcaagcctcttgtctcctgcacgtaactccagcctccagcgccacacgtacacctccgccggatcggaagaagatggtgtcgcctacggagccgcaggccgagacaacggtgttccgctcgacgcttccggacatcgccatcccggaccacctcccgctccacgactacgtcctggagcgcctggcggagcgccgcgaccgcgcgtgcctcatcgacggcgccacgggcgaaacgctcaccttcggcgacgtggaccgcctgtcacgacgcgtcgcggccgggatgcgcgcctgcctcggcgtccgcagcgggggcacggtgatgctgcttctcccaaactccgtggagttcgcactcgcgttcctcgcgtgctcccgcctcggcgccgccgccaccacggccaacccgctccacaccccgcccgagatcgccaagcaggcggcggcctccggcgccaccgtcgtcatcaccgagccggcgttcgtcggcaaggtgcgggggctcgccggcgtcgccgtcgtcgccaccggcgacggcgcagagggctgtgtctcgttctccgacctcgcctcctccgccgacgatggctcggcggcgctgcctgaggcggcggcggcggccacggccatcgacgtggcgaacgacgtggtcgcgctgccgtactcgtccggcacgacggggctgcccaagggggtgatgctgtcgcaccgggggctggtgacagcgtggcgcagctcgtcgaaggcgaacacccgaacctctac

SEQ ID NO: 49580 - DNA, 375 bp, Zea mays
  Clone ID: MRT4577_145218C.1
aagggtcatactagttttatatagttaatgcaaagcgatctataagggagtgaatcagttcatggtctcattacaagcagcgtcatggttgattcaggcttgtcaactgaatgctgcatgaatattgttattagaccaatatacatcactcgacacactatgcaaggggattcattacaggaataacaatgtgacaacttacaacctacactacactttaacttatcagcaatatcacaaggaccggctacattgatccacttgtttccacctgacgtatgggctctttctcaatgaggaactcctagccgtgtcttccttatgaagcttgctgcaaaacccttggttacatctgggacaacctagacatacttt

SEQ ID NO: 49581 - DNA, 825 bp, Zea mays
  unsure (1)..(825): unsure at all n locations
  Clone ID: MRT4577_145219C.1
aagcaagctaggacatccataaggactagtaggcctgtttgagcctaagcctagtagaagaaagaaacaaaaaaaagaaaaataaagaagcccacagccacagccagcccagcccaataaattttagggtttcctcacaaaatatcctcccagccgccagcagcaagagccctcagccgcaatgctctagccgccatcagctacagcccttagccatcagctccttctccctcctcccccctccccgcaactctcctctcacagcgacctgctcgccctgctgcgacctgcaggccgccccaacctgtgcactctgctgcaacctgcgcgccgcgccgccgcctcctcttcccgcgccgtcgcgctgctctccctcagccaccgctctccctcctccgcaactcatctctcctctgtctggccggctggagccgcgcgcggctgccgcagccccaaggcgtcgccccgacgaagcctagacgacgccctgaggacttcctgcgccgcaacggacgccttacgctctagagcaaggcacgttagacgccccaccttccacgttcgccttagtgcctaagcgacgcttcaaggacgccttgataatcatggagattgtacaattacatantataggggaggtgagacttgaggctaaaggaaacctcctacatctaagggaaccgccaggagacaatcctggagatatcctactgatcatgatctnctcccctgatttctctctaccatanacctcctataggctgatcgacataatgccaggcgcatgccataagtgataggtgactgtctaacccctcgcaatgg

SEQ ID NO: 49582 - DNA, 572 bp, Zea mays
  Clone ID: MRT4577_14521C.1
cggcgaacacgctgctccgctcggctctgctttgctttactctgctctgctctgcggactttggtctcgcaagacaaggggccggggcacaagccgaccgctccttgccacgcccgcgcaatcctctcaacagtcgacaccgccgatggcatcagccgcgcccgcgcccaagccaggggtcctcctcctgcgccgcacggacgcggacttcgccgccgcgctgcgggcgcgcttccgcgtccacgacctgcacgcctcgggcgcgccgctcggggccttcctcgccgccgccgcggcggaaccggagcccccgcgcgccgcgctcgtgatggccggcggcgccgtcctggtcgacgccgcgttcctggacgccgtcccctccctcggctgcgtcgtcaccacgagcgccggggtggaccacgtcgacctggcccagtgcgcgcggcgcggcgtcgccgtcgcgggcgcgggcgggaccttctccgtcgacgtcgctgaccacgccgtcgggctcctcgtcgccgtgctccgccgcgtcgccgcagacgaccgatacttccgagctggattct

SEQ ID NO: 49583 - DNA, 230 bp, Zea mays
  Clone ID: MRT4577_145220C.1
tcccacgcgtccgatgcatgcttctaccattttcacatcatacaaacaaaacaaattaaagggccttatttaaaaaatcatagggccacaaaataaacataaaaacacctattataacaaaccttatactaaacatatgcactaaaacattcttttcgcataccacatacaacattcatactttccattctcaaattatccatctaatattaaatacttactattattta

SEQ ID NO: 49584 - DNA, 482 bp, Zea mays
  Clone ID: MRT4577_145221C.1
cccacgcgtccgcgcatgtggaacctctcctctggttgggggcaattcatggcggtcacgacgagagcttacagatccgaatgggcccgtgtactacaacggcatgtaccacctgttctaccagtacaacccgcacggcgcgctctgggacgtgggcaacctctcatggggcgactccgtctccggcgacctcgtgaactgggcggcactcggcaacgcgctcgacccgacggcgccattcgacgccaacggctgcgcgtcagggtctgtcaccatccttcccgacggcacgccggcgatcctctactccggcatcgacgcggaccgccggcaggtccagaacgtcgcgttccccaagaacccgcgcgacccgctcctccgcgagtgggccaagcccgcctacaaccccgtcgtcccgctccccgccgacgtgtcggcgaacgacttccgggaccccaccacggcgtgggtcggccgggacg

SEQ ID NO: 49585 - DNA, 581 bp, Zea mays
  unsure (1)..(581): unsure at all n locations
  Clone ID: MRT4577_145222C.1
accatattaagattatatacctgctagatctaaacgtctacataataatataataatgataatagataaatactaaaacctagactacatattgataggatcacagtcataacaaaaaaaaaaatgatntaataataaaataataataataaataataataataacaattaggaattaaacctaaactgtacagtgtgggagggggcgagaaaaaaacgctatttcgcgaaactgatagaaccgagtcaactaccgagagcatggcgaatctatttggaatgtatgtctatacataacgtattctctctctccaaacataagcatgtatataatataatatacttgtatggtggataaacggtgttcttcggtacggttactcgtcactgcaggctgctgcggcgttgatgggcgacgttttattttgaattattcattttctgttcggtttattacaatattttttcgtgtgttgtttttgaaatagtataatataataaatctctatattattatattttgttttgtttaacagctaacggctctcgtatctgacgaactcgacagcttgtcttgtgcc

SEQ ID NO: 49586 - DNA, 358 bp, Zea mays
  unsure (1)..(358): unsure at all n locations
  Clone ID: MRT4577_145223C.1
gcggccccccttttttttttttttttttttatttanatttttgggggggtnnggccaaagagggaaggccctcccaaaaccgggttttttaaatatcccaaattttctgggggaaaaaaaattccaccaaatttcccaaccaataactttccaaaaaaaagaccgagggggccaccccccgaattttcctaccaaccccccctccaaggggccccataaaaaaaggcccacccccccttaggttggcaatttttttcacagagaaagaggggggcccccatttaaaccggggaggaagggccccccataaaataaataaaaccaaccttggccctcactcttcttaataaaaaggggg

SEQ ID NO: 49587 - DNA, 166 bp, Zea mays
  Clone ID: MRT4577_145224C.1
ggaacaaccttttttttgtcgggggggaccagttttatacaaacacgagacacgatgaaaactaacagggcgcggggggagattatgtacaccggtacacttccaacagggggggtctggaccaggaggttaataaaaacacagggcggaaaagaattttttacca

SEQ ID NO: 49588 - DNA, 271 bp, Zea mays
  Clone ID: MRT4577_145225C.1
ccggtacgtcatcatccgacgtcgtcccttcaaacggctggtaccacgtcgtatggtacaacaatatcccggtctggactccggtctggatcggcaaccgagacatgtccatcacggagtccgagctcaaggtagcccaattcagagtcgcatcgacagacgagcaacaagaagctgctcgtcgtcagaatcagtaatactggcagcagcgccgaaattccatcataatcgtcgccatcaccagtatgcacggtaccagcgtccatgtcgt

SEQ ID NO: 49589 - DNA, 403 bp, Zea mays
  unsure (1)..(403): unsure at all n locations
  Clone ID: MRT4577_145226C.1
aaacagaagaacaagaaaaggacaacacaacacaccacaccacaccacagacggacaggacagcgtccaaggttggtttggtcggttgttcgctcataaaattacaggggggggggctttcacagcctttttttccacccaacaacaacaaaaaaaaacctaatccacagctggctcaaagttcaaacaacacgattcgccggcggtggggtgggccaaaggctggagcggttggtggtgggtgggtgggtcaagactcaagagcaagcagaaaccactcncctgggcaccccccggcggcggcgggttctttttatggcgcaagcaaaaatctgggacccggtccatgcacttttacaccggggggtcggcgctgaggctggtcttttttcaatccctggag

SEQ ID NO: 49590 - DNA, 1210 bp, Zea mays
  Clone ID: MRT4577_145227C.1
cggccgcgtgggcggacgcgtgggtcttcctctcgcttccaaaggtgatgccttccacggagaggagatcgtgcgaccgtgatggcgacgacgcttgatttcgcccatcttcccacgctcgaacgggtaacagtctccttctgtaacttccaatcgtccatggtggagctaatgagctaaactacaatttggtttattgaatcttgatgcaattgtgcaattgtccatcacgcttatggtccccaatacaagatgtcaatagcgagatggggatagccctccaagcaggattctatgccaggcaccgaccacgcttatggtccccaagccatgatgttagcagtgagacaaggaggatagccttccaaatggtgagggaggcaagggccgaagccatgtcatcgtccaacagcagcaatcggtcaccagcttggcagtgatccagtgccagctgggcgtcctatgggttcaggctgcataacggacagagaggagacactaacaacctccatcacgcttttccctgtaagtatactgttacagtaggctagactagaagaaggcataggccataggattgagagtgtggttccttctttgatgtgatcagatagattagattggattgggtttgctgtaaattattgtttctgaatcatgcattttcttttcatcgtagatcgataagataacaaagtaaagcaagaaaactaagatttgcacctaaaactgttgccagtgttcatctgattgcctgcctaaatttctagttccccttcaaagatatctaaacatatttattccaaatacactattaactttcctttatccatacctattctcagcctacaaagcacagatttaatttaccccttgctatttttggcatgttccctggctatttacaatcattggatcattgccgcgagctacaacttcagtcgaaaacggtccaaaacaggctgatccaagtttgggtgggcataatcctttggctcatggaacatttgctgatctacgctactgggtaaaacatggatccctgcacatcaacaattgtaccagctagaagaccagtagaccaccgtgaataatagatgcaaacgcatgagaacaacacaatgtctcatcttttgttatcaagcctagcattttgtaaccagataccaaacacaatgaatgcatatgtaagtaacccttcagtcctact

SEQ ID NO: 49591 - DNA, 726 bp, Zea mays
  Clone ID: MRT4577_145228C.1
atttttcaacccctcttcccccagaatccccaatctctctccccgtcacccgccgcccgcgtcgtctctcccggcgacgacgtgccggcctctcctctcctcccaagctccccagccgaccaccccgcccgcccctgacttcctctttcccgcgcttctccctcccacagccaccgccgctcgagctgccacgccagccgcagcggctacagccctcccctctgctcccaccgccgtcgagggtgcccccgcggcgctccagtcgccgccgtgaccacgcgcagtcgaaacccatcggaatccccgcgccgccatgcttcgcctccaaagctgcatcgcgtcccatctcctctcgtctccatccgcccatctccgccgcctcctctccgcggccgcgcccgccgtttccccgagcacgggattcgctgcggaggagtacctcgtcgccacctgcggcctcacccgagcgcaggccctcaaggctttcccgaaggtctcccacctcaagtccccctccaatcccgacgccgtcctcgccttcctcggcggcctcggcctctccagagccgacgtcgccgccgccgtcgccaaggaccccaggctactctgcgcccgcgtggagagtactctggcccccaacttcgctgcgctcagcggcatcgggctgtcgcgctccgagatcgtgcgcctcctccgcttgcgctgcagatctgtcgtctccaagct

SEQ ID NO: 49592 - DNA, 234 bp, Zea mays
  Clone ID: MRT4577_145229C.1
gcgagatgggcaatcccaacatcatatttaattctgctaatgagttttctaatttagtctttagccttttaaaaccaattgcatgctctataggatttgtaatatctattttaaaacatgataggaatgtttatggttcaatatagtcagggatgtaggagggcatgcatttttttgtttctctgcttttatttcattaagataagaccacaactttttattgttgattcagcc

SEQ ID NO: 49593 - DNA, 813 bp, Zea mays
  Clone ID: MRT4577_14522C.1
cccgggcagattccctcggtcggtccccaacctagcggctgtcaaatccccagatcaaatgcttattcggtgggtgcagagataaaactgtcgcatgcttcctccctcgcaggccgggtccaaggaaacctgctagctgccatgtcaaaggaaggtgcaagggcgtcctggaactcaacatatgagaagggtttagtcgatgtactacatgacaacaaagataacccaaagttgaagggtcaaaatggatggaattcagagggatggaagtgtatcactgctaagtttaatgaaaggttctctttggctcatttcacaaaacaacaattacaagagaaggacaaagaacttaaatcaagttataaagcagtaagagattcaagaaaagaaagttggactggttggaatgactccctatgtatgatattagctgaaccagaggtttgggcaaggttgattagtgctcacccaaaggttgcaaggtttcgcaagaagccatttcctcttttctactctttagaagcactttatgaagagtgctaagtggaagcaacacttgaagctgacatggagaagaaaaatggaacaccaatccacatgaagcttgtaaaaaagaagttaaactaataatttattctagtgtcaaagttcataatgactggacttgtactctgttattatgctataataatttgttgaatattagataaaaaaaaaaaaaaaaattttttctccatttttagtgatgtttcattgtgtttttgtttttctaaatatttcctatttttctttgatttttatgattttttgaag

SEQ ID NO: 49594 - DNA, 104 bp, Zea mays
  Clone ID: MRT4577_145230C.1
cggctcgagctgagatttcgccgtcgcgcacttcgcgggatgctcaacatcggcttccagctcatgttcaccatcggcatcctctgcgctaaccacacaacata

SEQ ID NO: 49595 - DNA, 548 bp, Zea mays
  Clone ID: MRT4577_145231C.1
tttggttttttttttttttttttttttttttggtccaaacacatcattgttggccttgccatcatgactcggggaattatggaacccttagcttcaaagcaagctagccacacgatgcttttcttggcaaacaggggccagaaatcagggggagacgcatttcatgtcccttttctttttttttgccacatgttcatttccttctatgggtatgcttcctgcacaaggattgcacttctcgggtttccactatgtatataaacgtacatgtacatgctcataataataacttggatatagatgcccatgcgaatattgggcacatatttatacatgctcaaaactttgatctgtcaccgaactgacaacctccaatggcgtttgggatcaattaaaaaaaggaggaggaaaagagaagttgattctgtcaccggacagcggaggccacggggggcgcccacatccggtagtgctccttgagctcgttgccgtggccagccggggggatccggcaggtgggcaggggccttctgaccttttttttttcc

SEQ ID NO: 49596 - DNA, 243 bp, Zea mays
  Clone ID: MRT4577_145232C.1
gtaatcctggagtacttcactgacgaggttttggagctggccgggaacgctcgcacggttctgaaagtagacgcgtatcacacctcgccacctaccgatggccattcgcggagacgaggagctggacacccacatcacgggaaccatcgcaggtggaggcgtcatcccgcacatccaaacgtccctgatcaacacgtcctccaaggcgtgttgcatagggaatgcccattgttagtttacaat

SEQ ID NO: 49597 - DNA, 359 bp, Zea mays
  Clone ID: MRT4577_145233C.1
cttctgggggattttttcggcggttttttccccccccccccgaaaaggaaaattattctttttaaaaattggggccccccgggcccagggacaaagggtggggcaacaatttgataccctgaaacgaaagggttttattttttccccccaaaaagggcccctcccggttttgcccaatgggacatttttttaaaacccgaacccacattcatgctacaatccttgagtttacgggaacataaggaaattggggatgggaaaattttggtccggggctaaagacatacggggcccaaaggtccccataggggggggtttcccgggggggggggcttaaggaacggggggaaaagggggtt

SEQ ID NO: 49598 - DNA, 308 bp, Zea mays
  Clone ID: MRT4577_145234C.1
acgaagctcggaattcggctcggtctgcgaggtgtcgtacttggcgctggtgagcggctgcaggaggtgctgctgtcggggacctcaacacactaccaccgatgccttgcgccgtcgcctcgaggaggactttggcgcagacctctcccacaagaaggctttcattcgggagcaggttgacctctttctcgccgaggtcgccgctcaaggccgagccagaggagcccaaggaggaggaggagctcgaggactcgccggtgcctaaagcggaggaggctgaggagggcgagggggtggaggaggagggc

SEQ ID NO: 49599 - DNA, 361 bp, Zea mays
  Clone ID: MRT4577_145235C.1
cagatcttcaaggcatactcgtaagggattttcttttatctgtgtttgtttcttttaaataaactggctatcatcagcgagcaattgtttcttgcattgagtatacaatgtgtgtctgtttgtgtatttagggcctgtttggatccatggtgctaaagtttagcactacatttttagctgaactacatttttagctaaactttaggacttggagatccaaacaggattgctaaaagatgctaaacgtgaagtgataaactttagcacccattagtagtttagctgctccaaggtgtgcttaagtgagctaaaagtggttcaagtaacgaaaagacatctcttatctcctcgtccatctctc

SEQ ID NO: 49600 - DNA, 429 bp, Zea mays
  Clone ID: MRT4577_145236C.1
gtgaaggccaattacaatgaagcgcagaaaggttcatgacaagctatatgcgctctgtttgggtgaggcttaggggtgactaaagtttatttcgtgtcacatcgaatgtttgaatatcgaatgtttaaatatcaattatgagtattaaatataagcttattatatttaataaatctgtctcgtttttttatttaatactcataattgatatttaaacattcgatatcattacatagactaattctcttgttcgttcactcatgcgtgatggcactgagtatgttacacgttactctcgaaagtctctccgagtcctgcgaagtgttggtgagccaatcaatcctagtgcatggagatggttctacaatactgttggggattccccgtgccctatatcagacaccttgtggcaaactgaaactggccggt

SEQ ID NO: 49601 - DNA, 448 bp, Zea mays
  Clone ID: MRT4577_145237C.1
cccaaggccgggggcccccccaaaagggggcaattccaaaacaatgggggcggggaccaaaggttcccgcccccaacccaaaaggggggtaccgagggaaaaaggggtcccccgggaaaaacacgcacccccccacccggccccaaaaaaaacaaacccgggggaaaaaaaggaaagcccgggcccccaaaaaggggggccaccccacattaatgggttcagcccaaaaacccgttttcccagggggaaacctgaatcccccccccccctaaaaaaagcgcccacccccggggggggggggtcgggttattgggccctttcccccttcccccgtaaataaccctgggggcagggggtttcggttacccaaagggggtaaaacccccccacagggggtaagggggttacccccaaaataacggggtaccccaagaaaaaaaagggccca

SEQ ID NO: 49602 - DNA, 434 bp, Zea mays
  Clone ID: MRT4577_145238C.1
gcagaacaaccatgatatgggcaccggaagtaatcctgtactctctgtctgtaaccatacagacataacatgcgggcatgcatcgtagaggaaaggatccctatcgaccatttagatgtgcatgcatgacgcatgcagtatgcgctctatggtaacagtgaaggtctgagactgagagctgtatactgcgagtaatctgtagttgcttaccacggactaggctcctgtacagtcctggctggccgcgggggagagggagggctagaaccccaagatgacacctctggcctacattcatcatcttcgggatggtcacccccttcgtcatactcgtcattggctttgccaatggctggatcaaggtccttgtgcgatgaccgttacgcgatcagccagcctggatcatatatgctgactagtgaaccagcatttta

SEQ ID NO: 49603 - DNA, 546 bp, Zea mays
  Clone ID: MRT4577_145239C.1
gtggggggggtttttttttttttttttttttttttttttttttttttttttttttttttttttttttttttttttttttttttaaggcaaacccgactttgcatttttaaagccaaaactgacctgcccgtatatggaacaaatattgccgggggggggggggggagttccccaccccggcctaattaaggtccgaaggcaggcagattttattcctgaacaccagggggcccaaccatcgcccaggttccccccccgggctaaaaacaaataagccatcacttggcccactagaggccaagcaggaccacaacattttctttgacccagctttttcggctctaacttcgaaaacttaaccagctcctcgctaaagccccaaagctgtttcgccaactcctcgttcctggccagttggctcgtcttccccacgttgcagacaaaaaagaactttcctgccacccccttgaggggggggcccagccctacgaaacaagaagccccacctccctggggaacattcttccacagaatgaaaggggcaac

SEQ ID NO: 49604 - DNA, 393 bp, Zea mays
  Clone ID: MRT4577_14523C.1
tttttctctttttttccatcttactagtttaattggggttaaggtattgtttaaattgtactttgattttcataaacacacatgtcccaaaaaatcccacccgtaagaaatcatatttttcgagtaaactctgcatgcaataatagaacatcccctcaaccaattcataggactagggcgtgctgaacatggatcaaatggacatgttgtttaccatgcttcatcctgggaccttctgccaagactaacaaaaaagagcggtttttactatattagcctgaaacactaattcttcttgacgcccagggtgttaaagcactcctcaattaacccttctagctccttaatactggcaaccatctcctgaaaaatgggcttttccatgggctccaa

SEQ ID NO: 49605 - DNA, 172 bp, Zea mays
  Clone ID: MRT4577_145240C.1
aggaacccggtgttccttgggattaactcacaacaaagcgggacaggggatactattactaaagaaccccagatcaagccgtgcgccgtaaggttttgagggggccgcggaatggcactgctatagcaaatgacccaaaagggtccttgccatgaaaagcacaacatgggaa

SEQ ID NO: 49606 - DNA, 643 bp, Zea mays
  Clone ID: MRT4577_145241C.1
gcgagctcggtcgcagtgggcgatgcggaatccgttgtgagcgcgcgaaccaatcctaggcaaccataaaagggacacagccgagcccctatcctccctttactccatcaacgcgcaattagccccaaccaaactaatctccatcgccaccgtaagaaccgtgagggtcgagtgccgccgcacggggcaagcctttcccctcgccgatctgggcacgttgtcgtgtcgtggtacatcgcgggggcgtgggggggctgtttagcctctcacggcgattgaagaagcacggggccgccgggaatttctcgccgggatttttcatcgtcgctgcgccgtgggcggagggtctctacgggtgcaatctcgacgagcaagccactgtggattctgatgttcagcaagtagaagtagctgagcaggagctcattgaaggagaagagcaggtggtcgaagaggagctgcctaacactgaggcattcgacttgatctaggtggcgtctcccagtcagctttatggcaccagggaataataattagttcgttttattttatcatttatttttgtaagacttccgctatgtaataaatacatttatgatatttatgacatttatctctatgcggttaaaaaaaaaaaaaaaaa

SEQ ID NO: 49607 - DNA, 162 bp, Zea mays
  Clone ID: MRT4577_145242C.1
agtatttagtatagtcacaccttcaataaagtagttttgtttgactgcattgacatcacattgttaagaggtatgctcaactttatgtttcttatcgcatccattttgctttttatatgcctttaacgcttgtgctctttccaggattggttttctttacta

SEQ ID NO: 49608 - DNA, 566 bp, Zea mays
  Clone ID: MRT4577_145243C.1
ggggggggccaacatttttccccctcccaaaaaaggggccaaccggggggccaaccaaaaaattgaacccccggaaaggggccaaaaaaaaaaaaatcccccccaacaagaacctttagggccctttcccaaaaggggacaaccgtttttggtaaacaaaattaaaaaaacaaaccccttgggcctggaatttttaggggggaaccccccaaaaaattccccctttttttttataaaaaaaaattcgggaaacccctttttttaaaaggccccggaaaacctttggaaaaaaaaagggaccccccagaaggggggaaaaccaaaacccccccacccggtccgggggggttggaaaacaaaaaacaccctttttttttttattttttttaaaaaaccccccccccacccttttttggaaaggaggcggggaaaaactttttcccccctcccccaaaaagggaccccggggggtcacccgggggggtaaaaaaaaaaaaagggaaaagggggggttataaacctaaccgggggaaaggttaaaacccaaccctataatggaccctttc

SEQ ID NO: 49609 - DNA, 560 bp, Zea mays
  Clone ID: MRT4577_145244C.1
gtataacatagcttatatcaaatggtaaacttgtttagctgccagcaaacagttttacagaaaacgtcattacggatgagggtgttaagacgtgaccgccacgtattggattcagaacaccttattcccttttacagggcgcacttccgctaatacaaatattatacccacttggggctatcacccgtgaacctgtacatgctccaacccttcaagcaaagctggcctccaatcaggagcgaccgacggccgatgctcaaccatgtttgcatatacaataaacagcagcctgggccaagagtgaccacccacatacaacaaataacacctccttttactatggacggactgaagcatccaggcatccatcatttgtatctgaatccgcacatcatgctcgagcccctacattccactaagcacacatgcagcccaccttgtaaccatgtgcacctgctgttgcttcaatctggctgacatgtacctctgcatcaaccttttgaacgcctctggatgattgaaccttacctctggaccagaatatcccgtcatcatcaatc

SEQ ID NO: 49610 - DNA, 240 bp, Zea mays
  unsure (1)..(240): unsure at all n locations
  Clone ID: MRT4577_145245C.1
cgggnnggaaatcccggggcggcaccacacccgtccgacacccacacaagtggaagttggctagttcctaaccgagccagaaaaacgaaccccggccagttctttaacccccgcccgagggaaaaaaagnccagttagaaatattgtccaaggccatccggtccagcgccggccagccggggccggggccggccccaacaatcgttcctgacttgccggaggaggagggattctctattt

SEQ ID NO: 49611 - DNA, 380 bp, Zea mays
  Clone ID: MRT4577_145246C.1
gccaattccacatttcaatatatcaggtgacgtatgcgatatataaattgtgatccatttgtttgcttatcagagctatcatgaaaccaaaggtaatgagaacggaattcctaggggaattgcaatgcgacattcacaagaaatgaggcggctaaaatgttcatatatgaattgcaatcatttgctgtgttattaggcctatcctgaatccaaagggaatgagatcggaattagtgggggaattccaatttcacattaacaagaaatatggtagccaaaacgttaatatatgacgtagcataattgggtgcgttattagacttatgcttaatccgaaggaaatgaaatcgctattcttaagtgtttccgtgctcaaattc

SEQ ID NO: 49612 - DNA, 509 bp, Zea mays
  Clone ID: MRT4577_145247C.1
tttttttttttttttttttttttttttttttttttttttttttttttttttttggtttttttttttttttttttttttttttttttttttttttttttttttttttttttttggaaggaacaaccctgggtggaaaacaatttcaaaaaaaaaccccgttcccccattggggatgagcgttggggaagggccccacaaagccccttaaaaggggggccataccgggttaggaaaaactttttggggttttgtaaggcctaaaaaaggggcctacggggatttaaggcaccccctacgtttttccaagccaggggtgactttgggctttggcattcgaaaatccccccccattacattacaatgggggggaaaagtttcttccccagggggaaagcccacccataaagggggcctttaaaagggttaacacgttcacccccataaatccattccctttttatttaaaaaggcccagggggggcataaataggggggcggaagttttccgg

SEQ ID NO: 49613 - DNA, 587 bp, Zea mays
  Clone ID: MRT4577_145248C.1
ttttttttttttttttaatagtctcaaatagatagaaatatacaatattatatatatatgcacataaagttaggtcctaaccactaataggtctctaacacataatatatcccagtacagaactcaaaaattccaatattcattgaactataatgtgtcaaaaaaatgttataaagaaaaaggaaatggaaaaggaaagaaaaaaagaataatatggtcttctatttcatggcccatctagaagcccatttaattcagcatccaccctagtaccccaccgaggctcaaaaccctaaccttctcacagctccagcgtaccagcgaaggcagatagcagccgctgccttcatcttgctcacagcagatcttccgctccctccactcgcgctcgtcacgcaggctcaaccccggcgtcagcggctcgctggctccccatcccgaagaaccatctcctccctctcccctccccgcagctcccctccctgtgcgctgttgtgaccaacacgctgcgcgccgcgccgccgttgcgccctgccaccacttgaccgcctcttcttcccggcgcggccacgccttactcttgcacg

SEQ ID NO: 49614 - DNA, 708 bp, Zea mays
  Clone ID: MRT4577_145249C.1
atgaagcaacaacatattgaagagaaggaaatgagacatgtcaatgattacagggaggagaggaagaagaagcttgagcgtacacgtcgtgcaaaggaggcaatggaagagaaccctagatgctttccggaagggaaagtggccccgctgcattcagtagggctgcacggctttatgtcaggctcgacccgatggcttatgtcatgtgccacaagcagcgggtatccgcctgagcgggaagtgaagggcaaggcctggacacgtgtcagcaccgtacccctactcacgccagggtcctcctcgttccgggaccttgctgaggttcggaccttactcggaggctccggacttatacgtataggggtctggtgtccttctgtggaggtccggaccccacgatacatactggaatgtgttgtcttttcttgccatgtggcgccctttggcctgcccatgcggtggggtcaggcgtcgtcctccgcgtggcctggagacgttgcatgggtgcgacgtcttcatgctgtagaagagggtacccctgatttagggtactattcaggggaatccactgggctcaactccaaagaaatgaagatgatgttgaagccattaggagcgcttgcaggaaagtggaaatggtggccatacaattttttgctcattttggttggaagttctcaaacaggatttcaagctagtatttcttga

SEQ ID NO: 49615 - DNA, 207 bp, Zea mays
  unsure (1)..(207): unsure at all n locations
  Clone ID: MRT4577_14524C.1
cccacgcggncggcanagagaaccaaagaacagangaggagcacgagaaggggcgggagagggcaagcgacanccagnncagaaaggagaagaaggggcgacacgnacgcaggacgacgacaccagagcaagaaggacccaganaggcaacggaaacgaggaaggaagaagagaaagcaagggacccgcaaaaacaggagngacaaa

SEQ ID NO: 49616 - DNA, 664 bp, Zea mays
  Clone ID: MRT4577_145250C.1
ggccgcttttttttttttttttttgtttcttaacttgcactctgcagcagcttgtgatttccgttacatttcagacaggagtcataccagcatgaaaccagaagaaatcaaggagtacagaaagcagaagcgagcaaaggccgagaagagtctagatgcgtatgtgcagatggcaaaggctgttacatttcaggttgcctgtgcgaaagtaataatcgagacggatgatgtagctgaaggacttgaggagctcatctctcttaataacgtaactgagtttgtcatgggagcagctgcagaccgacacttctctaggtacggatcagactaacaaaatcgctctacttccttaaattggatgcacatcttacttccatgattctgaatgattaaccagaacgtcaccatactctctcacacttgaggacctgggatacttaaacaagttttcttacaagctggttatgtggttgcagtaacagaatactctattttctcttctaacaagaaatggataggaagctatagcatactcagaccaagcaatttcttaagagcataccttgcaatcgcgcattctaacagatgctctcaaactgtagagaaaatgacacgccaaagtcgatgacagcgctcaagcttttcaagacagcagctccatcat

SEQ ID NO: 49617 - DNA, 359 bp, Zea mays
  Clone ID: MRT4577_145251C.1
agctgtgacaccctgccggaaccgtgccgcatttacagggtcgacccatgctttcgttgaccataaccttaatctactccagagcgcagaagaacccgatcgacaccatgagggagactgatcactgccaccgatggtgtggctcgtcatatgagcactaaatcaacgcatacaaacggctgatctagctagctagccagcggctatactacagtacatagtttcttcagtgggggacaccggcggcagcagcgtaggggcatggagtcggatgctgcaggccgcacattgccgtcagttgctgcactatatgcgtcgtcaactagtctagtgaccttgtccgttttttaggttgtatt

SEQ ID NO: 49618 - DNA, 265 bp, Zea mays
  Clone ID: MRT4577_145252C.1
aagccatataatggattattagtaaaagccgtggaatgcaattattggccacgctgattatactccaaaccaaattatgtgactgaccccaagagactgatcctgcttttgagacattagaggagatgagagcggcctttgctgtgtgcgaccaaatcctgggaacaaatgaagatgatcaatttgtgaaaccctaactacttaggtaatttatttagatgcagtagctttttgaagatcataaaacatgtgtttgggatggtct

SEQ ID NO: 49619 - DNA, 156 bp, Zea mays
  Clone ID: MRT4577_145253C.1
agtaaatcatgtcgtccttcgtttcctcaacgctcttgtctccgacgcatcaccagtcgctctcgtctcgttaaccgccgagcaccgcgccttcggtttcgaacccaccgcgcttcccatgcctgagttctgtgcgttactcgtccttgctagggc

SEQ ID NO: 49620 - DNA, 515 bp, Zea mays
  Clone ID: MRT4577_145254C.1
atattgttaactgattttaatctagttctcaggggtaacaaggtctccgctgttgatcttggcggtgagggcctctggggtttggccgtcgatggtgcaaccgagagatctggctgttccgaggacttccttgacggttccagagaactctctggcttgagacttcttgcgcataactctggcaacagagtagagttgctccaaagtcaagttaccatgatgcttgatgttcttttccttctttctgtctctggctggttccttgagctccttgatcaacaaagcagcagcgcttgggacgacctcaacggtggcaactctgttcttgatggtgagcttgcaggtaaccttcaaacccttccattgggtggtggccttggcgatatcatcaccaaccttctttggggaaagaccgagtggaccaatctttggggcaagggtggcagaggaagcggtttcacctccaacagcacggacgtagatgatcttttcttcgtttgggtctagtttgggta

SEQ ID NO: 49621 - DNA, 739 bp, Zea mays
  unsure (1)..(739): unsure at all n locations
  Clone ID: MRT4577_145255C.1
aagatgggtccacctcaaaactcactgcatggttaagagttgtatctgcttgctgcaaaattagaaaaatgcatgccgtcttctcaccttcggaagcggaagatgtccttgttattgttatttcactctttttggaccgtcgacttgaagggctgctgcttattttgggagattgcctaaattcactcatctcatacttcaatacgagtgaatgggaaagtagctgtctgattgttgctgagtcaatttctaagagggtcaagatggatcttaattgtttaaggcttgttgactgcattaccggaaccaacgaccgtagcaaattcctaaggagccagctggcccttcagttgctcaaaaatagcttcggccttaaagtagcgaatgttgaaaggatcctgaagtcggtcacatcgataaatgtgaaggagaaagaatgcaatttcttcatgttgtacgtgcacatagttttgatggacaacctgctcttctcgagcgacgcgttcagaaacaagacagcgataatcgacgcttggcgcatttttttacggaactgctcgacccatataggatgcacggactggaggttctacgcttcgaaggtccgaaacaaggcgtcgtatctcctgcaaggtgcaatgctgaaaaggnctgctggcagtggtaacattcctgccaagtgatttgaaccaacctactgaaatgcctgctgctggagagcacggaacctacgccctga

SEQ ID NO: 49622 - DNA, 207 bp, Zea mays
  Clone ID: MRT4577_145256C.1
caatcatgtatatacgtgtgcctgcagttgaagttctgtgcatgtctgagcctgctttcgtattcatgagatacatcaacataatgggagaaaagttttagataagcagcattgtaagttcatgtagagtttgggatgtcaaagtattaacgaagggtactgtccaacatacttttacttgggtcatattacttgttatgatctgat

SEQ ID NO: 49623 - DNA, 213 bp, Zea mays
  Clone ID: MRT4577_145257C.1
gcatgaaccatgggatttaccttcaaagtgyaatcttccaatcgaggrcaacaagttgcatttcttttcctctcgtkacaagaagtacccbactggstckaggkcaaacagggcaacactcgcyggttactggaaaacaactgggaakgaccsarccagaaarctgaagaagcgaacyctaggaacaaagaagactttagtctttcatgargg

SEQ ID NO: 49624 - DNA, 720 bp, Zea mays
  Clone ID: MRT4577_145258C.1
tttttttttttttttttacacacaaaaaataattatattgatcaaagataacggtattgtgatgttacagtgccggcactctgctgtacatacttatcgctccctcaaaccgcaactcatctcaaaaacaaaaaaagaacacagcaggcagagttgatacacaaaaaaatcaagcctcagaatcaaacctgtgtgaccttgaatcaatgaagagcacttgacaaaaaaaggaaaaagggaatagcacacctatgaactggaagaataagagagctacttagctagcaaaacaaatccaaactaggaaaaaggagaccgatccaggacaatgtgaaaattgatgtggcattgcagatggtgattacattggaagtgttgatgatcaggctaaaaaagttgaagagcaatttttagcctgttctgcttccacttcggaagcttgctaaatgcttcctttgtcatcccaaacttctctttgaactcagttgaagataagtaggtctctcgcctcgtgacatcaatttcagtaacaggatcagcagctgtggtcttcagacgttcatacaggtaaatcggaaggccctcgtcatcttctggctcgttttcttttacatcttcatttatagtcagagattcaactcttgtggccacagtatcaacaccttctttaccatctccctcctgttttggcttctctgactcggagccaccttctcgtgc

SEQ ID NO: 49625 - DNA, 659 bp, Zea mays
  Clone ID: MRT4577_145259C.1
cccactcgtccgcggcacacgtgggtgcaggtgtattccgcttgtgctgtagactcgtcctcaggggaggatctatctcaacctcatgcgacacatgactccttgacagttgacaaacttaacaagacactgtgagctgacgacaactatgtgcatacctagccacatacagcgcagaaactagccataaaacctgcaactgcctgcatacagagctctaatctgtggcattgctttcagagactccacattgtactgccatgaaagcatacaaagcatggtgtgtctatgccgctatatgccacaattatgtgagacggaaagaacaagactaagcacggaacagattgaaacatgatgcaaagaccactgcataaacgtatggtgcccgtgacaacttttcaggctttctactgctatatcatgtgagaaagtgagagtaaaactggtctggtcataagcaccttcaaacgctcactatcataagctgtggtggttctggcgaatgaattcatggtgcattcaagctctaagaattctggagagagagagcgagagaaaaatacgcatggccaattggaatctcaagatgtcattgggactacaggttccctggatggatgcgattgacatcactgagttctcatgcaagtcatgta

SEQ ID NO: 49626 - DNA, 623 bp, Zea mays
  Clone ID: MRT4577_14525C.1
cccccctcgagttttttttttttttttttttttttttttttttttttttttttttttttttttttttttttaaaaacaaacagttttacatactgatttttttataaacccctgaactcggggggggggttacagaaacactagggttactattttactaaccctaagggatatgcctaacattttccccctactgaacctacaaccatttgacaacggaaacaaaaaaccccctgcgggggttaaccccaaatttttatcgcccacccagattaataccccttcacaagttcacgaaacacattttttagttgcaccgcacgcacaaaagcttcccatccaaataatcaccgcccatggttcgttaaaacaacctcctaaattttgggcccggggccgttgccacctccgttgccggggccaccgcggggcacattcttgtccatgcccgaagggcccgcgccgccctggaacatttgaaaaaagaaggggttgaaaatgctctccagctccttaattttggcctaaaactcctcggcctccgggagctggttgccgtcaacccacttgagggggcccccgatcgggccctcgatctttttcttggcatgggggggcagttt

SEQ ID NO: 49627 - DNA, 737 bp, Zea mays
  Clone ID: MRT4577_145260C.1
ggtaccggcgccccttctcgagtttttttttttttttttttttttttttttttttttttttttttttttttttttttttttttttgaaaaaaaaaaaaagttttttccaaggaaaagaaaaaactttttcaaggccccccaaaataaggggaaacctattactccacccccttcaaaacacaaaggcaagcttcctcgcggggggccaccaaagtttttttctccaggagggttaacccaggacccccccccaaaggaccccccttgatagggacccaacgggctacgggtttgtttatctcgaaaacaattgcccaggggcccagggagccaggggcaaccaatcgatgggccggggaccaacccagggagtttatcctagcgggggggaacaacaggttcttaagttggatctttttacgggcccgaccccacaaaaaagtttccttgggggcttcagcaaaaccaaacataaaacctttgggggaaaaaggtagggaagggaaagccccccggggcttttaaagcaaagctttttttgaaagggtatcaccacggggggaaaaaattctaagttccccattttgagcacccacaaaagtttttgtcccatcaggaaaccccgaaaaggaagggaggggaaagtaaactttgggggaaaaaaggacttttgagttgggcagcaatacaatcccaaaatcaggagggcccagggcaaattcaggtttttgaagggc

SEQ ID NO: 49628 - DNA, 3640 bp, Zea mays
  Clone ID: MRT4577_145261C.1
cttcaccctgcttttcgtcttcctttcaccccgcttgcgctctctctctctctccccccacctctctcctgcgccaactgggcgaccgccgccgccggccgccgggccgccgcacgcctccaggtgcccaggtcttcgtaggtcccttagctcggccttcgtcggggttcggggtccttcgctggcgacgatcacccaccaggtctcctttgaaagaagaattaggcagcacatctttacgaattgaggatgtcagtttctatgaaggacctggacccagctttccgtggctctggacaaaaggacggcttggaaatatggcgtattgagaatttcaagccgatccctgcccctgcatcttcgtatggaaagttcttcatgggtgattcttacattatcttgaagacaacagccttgaaaaatggttctcttcgccatgatatccattactggattggtaaagatactagtcaggacgaagctggaactgctgcgattttaacagtagagcttgatgctgctcttggcgggcgtgctgttcagtaccgagaaatacaaggcaatgaaacagaaaaattcctgtcctattttagaccatgcatcatgccacagccaggaggagtggcatctggattcaaccatgttgaggtcaatgagcaggattacaagacccacttatatgtctgccatgggaagcatgttgttcatgttaacgaggttccctttgctcgatcatcccttaatcatgatgacatatttattttggatacgaagtccaaaattttccagttcagtggctcaaactcatccattcaagagcgagcaaaagctcttgaagttgtgcagtacatcaaagatacatttcatgagggcaagtgtgaaattgcatctgttgaggatggtagaatgatggctgatgcggaagctggtgaattctgggggttttttggcggctttgcccctcttcctaggagggcacctgcagaaggcaatgagaaacatgatgaaactgctttcaaattgctatgttttgaccaaggaaagctggagcctgtcgactgccaatctttagcacatgaattacttgagacaaacaagtgttacttcttagactgtggtgctgaattgtatgtttggatgggtagaattacatccctgatggagagaaagggtgctagtgaagctgctgagaaattgctctctgattcaaaccgaacaagaacacatataatcaaagtgattgaagggtttgagactgttacgttcaagtcaaaatttaaggagtggccacagacacctgagttgaagttgtcatcggaggatggaagaggcaaagttgcagctcttctcaaacgccagggcttaaatgttaagggtttgatgaaagctgctcctacacaagaagaacctcaatcctatattgattccactggcaatctgcaggtttggcgtgtaaatgataaagacaaggttcaactctcaccctctgaccaatccaaattttacactggcgattgctacatatttcagtatacttatcctggagatgataaggaggaatgtcttattggaacctggtttgggaaaaagagtattgaggaggatagggtaatagcagtttcacttgcaagcaagatggttgaatctgctaagtttcaggctgtccaggcgcgcttttatgatgggaaagaaccgattcagttctttgtgatatttcaaagcttccaagtgtttaagggtggtcttagttctggatacaagagatttatcgctgaaaatggcatcgatgatgaaagttattctgaagatgggcttgcactctttcgtattcaaggttcaggaccagaaaacatgcaggcgattcaagttgaacctgtggcctcatcattgaattcatcatattgttacattctacataatggaaacactgtgttcacttgggctggaaatctgaccactgcattggaccaagagttaatggaaaggcagcttgatgttattaagccaaacacacagtctaggtcacaaaaggaagggtcagaaacggaccagttttggagtttactgggaggcaaatctgagtactcaggccaaaaaatggtgcgagaactcgaaagtgacccccatcttttctcatgcatcctgtcgaaaggcaatttgaaggtcaaagaaatacaccactttactcaagatgatctaatgacagaagatgttttcattctggactgtcacacgagcatatttgtttgggttggtcagcaggtggatgttaaaggcaggttacaagctatggatgctggggagaaatttattgtgcttgattttcttatggaaaaccttgcccgtgaaacaccagttttcaccgttatggaggggaatgagcctccctttttcactagattcttcacctgggactccgcaaaatcactgatgcatggcaattcataccagaggaagctcgccattgtaaaaggtggaggtgctccagcattggataaaccgaaaagacgaacaaccgtctattcaggaaggagtactacacaagataaatcccaacgctccagaagcatgtccttcagccctgaacgtgtgcgtgttaggggaagatctccagcattcactgcattggctgctaattttgaaagttcaagcaacagaaatctttccactcctccacctgtagttaagaaactttacccgaaatctgttacacctgatccgtcgaatactgcttctaagtcacctgcaattgctgctctggctggttctttggatcacccttctcaaactcctgctctagaattcatgaaaggtggctccgagtcagagaagccaaaacaggagggagatggtaaaggtgttgatactgtggcccctagagttgaatctctgactataaatgaagatgtaaaagaaaacgagccagaagatgacgagggccttccgatttacctgtatgaacgtctgaaaaccacagctgctgatcctgttactgaaattgatatcacgaggcgagagacctacttatcttcaactgagttcaaagagaagtttgggatgacaaaggaagcatttagcaagcttccgaagtggaagcagaacaggctaaaaattgctcttcaacttttttagcctgatcatcaacacttccaatgtctcatagttcatgggtcaaatggccatttgctgaaagtagttctactctacatctgattagcccatgacaacgacagctattttgcagaacgcaatcaccatatgcaatgccacatcaattttcacattgtcctggatcggtctcctttttctagtttggatttgttttgctagctaagtagctctcttattcttccagttcataggtgtgctattccctttttcctttttttgtcaagtgctcttcattgattcaaggtcacacaggtttgattctgaggcttgattttttttgtgtatcaactctgcctgctgtgttcttttttgtttttgagatgagttgcggtttgagggagcgataagtatgtacagcagagtgccggcactgtaacatcacaataccgttatctttgatcaatataattattttttgtgtgtaacttaaaaaaaaaaaaaaaaaaaaaaaaaaaaggaattaaaaact

SEQ ID NO: 49629 - DNA, 466 bp, Zea mays
  Clone ID: MRT4577_145262C.1
tttttttttgaaaaaaacatcttcatgtggaccgggtctcacaacaagcaaaggttagaatccaaaccgcatggtcagaatcatttactatccctctacagagctgtgactgtgcaggaactgtcggtgatgcaccacacgggatatactctgtggcgcatgtacgaggatagcaaaactgatgctggtctagactgccctgctcaaaggatcctgctcaggtcacttatgaaatcggaggccagagatgtcatgttttctccagccctacctgttatgtacttgagccaagaccgatcctgttaaccctgcaaagatattttggtgatgaaatcagcagcgcttaagaccaggttagagttggccgcattattgccggcacaaagatccgctcttgaaatggatgaatagccccaaatttatgtagggatagatgaccttctttctctcctctgtatggagaacc

SEQ ID NO: 49630 - DNA, 542 bp, Zea mays
  Clone ID: MRT4577_145263C.1
gtttatccagggggtgagtgattacttgttagggcagctctactctgcttttgtcttcactgcggatgagtgtagtctcgggtgcttggtacaatattgaagtaattggtgtgaattagtagatcttatccattggttgcttaaatggtttacagtgtattttgtcctgtgatggtatatcagtatatggattgctgtggtactggcaatttgctgccacattgtggtataggtctatttgacgatgtgtattgctgtagtttacaaaatagtgttattgcttaccacatactttattcagagtgacacatgattgagctgccaagtaatcttttctgctgtttgcttcagattcatcattttatgcatatttaaatttttttaggcgaaactgagtgcattaagctgataattaggagaatgtgcatgctatgtttaaaaccctgctgagttatgacttactccctcggtcccaaataaatgttgccatggcatttgggccaatcaaatattcataacttttgctatgtttgtagaaatta

SEQ ID NO: 49631 - DNA, 383 bp, Zea mays
  Clone ID: MRT4577_145264C.1
acagttgccagtcttcttttaggtgaaaaaaggtgcaatgcactgttctgaaccgtcgtattgttaatagacgcatgcagcgggagggcaactggttagtactcggtcactgcttctatatttggcgcggactacctacaaatgaactactgagcggctaatattccagaaccaataaagtgaggacaccctttaatagaacactcgacttattaattatccctaatagttcacactaacgaactggaaataactaaataaaatcgaataccggttggccaaggacatgctgattgtgcattgggatatcagactgataaaaaacaacgatttgtgggacggatagatgcataacatggacataagtgccataacttatttca

SEQ ID NO: 49632 - DNA, 360 bp, Zea mays
  Clone ID: MRT4577_145265C.1
gctggctgggactataatacatgcgtataagcatgatcagatatatctcatgcatggatagcatactaccacagaccacaataaaaggaatcaaaccacatgcgcatgaaatcgaaatatatgccaaagtcgcaagcagtacacacctttgcaatgccaaagcaggtcacacagcaaaaacaagccatctgcttttccccgcgcgcgagcatgatttgacgaattaccaaccgtgtagtgtagtgtgcacatccatcctgtagtagcggatatgctccgatctgaaacaaaagacggtccagatttttttttcccatatccaccgtaaaacctgagccaagtccttgcgggcgttggaaa

SEQ ID NO: 49633 - DNA, 224 bp, Zea mays
  Clone ID: MRT4577_145266C.1
aaaccgaaccagagttttagtggacgcaccgcgcttgctacgaagtagacgttcataaaaatatggctctagggactaaatctgggaacaggcatgcatgattatttaatggattctacattagatgggataagagtttgcataccagacatgatatgccggaaaatcaaaggctgccttagtggggctacggtgttacctatattgattggaacaaaacctta

SEQ ID NO: 49634 - DNA, 201 bp, Zea mays
  Clone ID: MRT4577_145267C.1
aaattacgactagctaaggcacgtcttccagccttccttcctggacatgtaggactctgtcattcactaacctacctgcaactccatcacgaaccgcgactgggtcatccgccaatacctgtacgccaacacagcgctgactggcggatcgcaccatgtaccctggcattgccgacaggatgcacaatgagatcactgccc

SEQ ID NO: 49635 - DNA, 468 bp, Zea mays
  unsure (1)..(468): unsure at all n locations
  Clone ID: MRT4577_145268C.1
ggccgggccgggctttcaccgcgcgcggcccggaggcaagaaagcccncccccacccgccgccgccgcgcgacgcccggagagcggccggaaccgagcaacggaccagagcgaagccacagacagccggccacccggccgcccccggccnccgccgcgnccgcgcggcggcgcacgggagacaacgggagcgaccggacccggaaccggcgagggagagcggaaagcagacgcgacccacacaaccgcccccgaccgaaccccacgcaccaccgaagacgcaggacgccaacaagcgcacccaacgagcacgggacgacgcaagaagccccccccggaaacagttttgtgtttgacccccccgccccaggcgagaagaaaaggcagacagcagcggactgcaactgcaagaagaaaaaacacaaagaaaaaacacggaaacgacaaacaagaaaaaaaagaaaacaaa

SEQ ID NO: 49636 - DNA, 119 bp, Zea mays
  Clone ID: MRT4577_145269C.1
cggacgcgtgggcggcacacccgagctgatgcagtactaccatgtcaacgtggtagtcctgctttgatagcgaccgacttgaatgagactacgagaccgttgatgaatgcagccccaga

SEQ ID NO: 49637 - DNA, 599 bp, Zea mays
  Clone ID: MRT4577_14526C.1
taggggccttttttttttttttttttccttttttttttttttttttttttttttttttttttttttttttttttttttttttttttttttttttttttttttggggggaatggattccaagggggggaaaaaacccggggggagggtcaacccaacacccccaagggggggcccaaaaaaaaaaaaaaaaaaaaacccgcaaaaccctggcttattaattgaccacgggaggggggagggaggtgaaaaaagacaaaaaccttttgggaaaggaaaaccaccctgggggggggaacaacaacaaaaaaaaaaaaccggggggaaaaggggaaccccccggggaaggggaactgggaaaaccccaccgggggaacccgaaaaaaccggacggtgaggtccccgagggggggggaaaaaccgggggccaaggcccctgaagggggcgtccgggggaaaccccaaaaaaccgggccccagggggggggggaaaaaaaagggacccccgaagggcaccaaggggaaaaactggtcgggggacccgaagaaaataaggttggcgggggccaaaaaagggaaatccaaaggccccgggttggccc

SEQ ID NO: 49638 - DNA, 1741 bp, Zea mays
  Clone ID: MRT4577_145270C.1
gcggacaccaaccaaacgaatctcgcctccaaaagcgagcactagggacagaaaaacgagcccgccaacggagcgcaaccgagccgcaataagcggacaccaaccaaacgaatttcccctccaaaaacgagctctagagccacgcgcacgaattcgccctcgcgcgctgtctcgcagcgcgcctcgtccctccctcctggtgctggccgttcggggtccgttcggcggcgggacggaccggatcccgctccatggcggagggcttcgggcggtgggagtcggatctgctgttccccgccgccgagtgcgtgcaggactccgccgatagaatggagggtgtctaccgcttacttttgcatgaaaggaaacttatgcaggatggtacttctgatgcaaagtttcatgctccaatacaatatgagagagatgtgattactgctcttggaactaccaaatggcagctggagcaatttgagagggaggtgaatgctgctgcattctctgacaagtcaaagtcaagagaaaatgcaatcttaaaattcaggcaattcattagagcaattgcagaccagatttctcaggtggaagaaagtttggagagtcttaggctaggttctagcagaactccaaaacatttatactcaagtgaacatgatggtgatgggctggcatccttcctttctggttccagcaaggatgaccatgcatatcattccactggtacagatgaaattgtggagcttaagctcgacaatgttcctttagtaaatggttatcattccacccaagaacatacaacatatgaacacaggaattcagataaagatgtggaaggagcggggaaacttaaatgttcatgtggagaaggtgcatgtgaaggggatcataacaatagcaatatgtttgttttggatgctgatgattctataagtaggagagttttttgcaaaaacaaactgagcagacaataccatagttttataagaaacctatggtttacaaaacgacgtcgtgatcgtgaaagctttaccaagaggaggaaggatggagaagatatggatagcttgagaaatggaaacatgctaccttctttcaatctacctcaatctggaagggttatgtatttctggcctgaagtcattaagaggagattatgtagatctgattattttacagatcataatcatcctcaaatccgtttagtgacagcagtactgattgcacttgctgttctctgcctgctggtatctcatgtgaaatgaccgaattccgtgaatctagttttggttcacgttgtgttatatattaccacagtccacgctgtactcatagtgatcacgcttgtgctgtgtcatggattctggaggaccatcattgtttcaaagcatttcaatgttgtgctccaatgtgccatgccctacagatggtagttctggttgcttgcttgtcagtggcatgatctgtcataaaaaatattattcactaatccctgtatttattcagcaccaacacatgatgtaaaagtttttgctcatgcatcatatataactcagaattggcaggtcaacgagagtggaatttctggggtgcggttacctagtgttaatatattgttatgaaagtgaaggtcgaattgaatagaaatgatccattgtattgaacctatagtttgtaactgcccctacctgggatattgtatcaaatacggtttcctgcaaaaaaaaaaaaaaaaaaggcccta

SEQ ID NO: 49639 - DNA, 1013 bp, Zea mays
  Clone ID: MRT4577_145271C.1
ttcggccggcacgactctcggcaacggatatctcggctctcgcatcgatgaagaacgtagcaaaatgcgatacctggtgtgaattgcagaatcccgcgaaccatcgagtttttgaacgcaagttgcgcccgaagccttctggcggagggcacgtctgcctgggcgtcacgcgagcccaaactgcggtagcgaaaacgcgagcgctgcggaacaacgatggcgacgatgtctcttgccgcggcgtcacccctcgcctccattccccgcggcatcgccgctcaggctccttgcgcggcattcctgtccatccgcttaggtggcgcgacggcgacgcggttcgctggactggcggtggcctcgcagccagcggagcgtcgcgccgcggcgatggtcacgatggcgaagagggagcaggagctggaggagatccgggccatgacgacggaacagatggaagaggaggtggtagacctcaagggggagcttttcctgctccgccttaagcgctcggcgcgccaggagttcaagaacagcgagttcagccgcatgcgcaagaggattgctcgtatgctaaccgtgaaaagagagcgggaaattgaacaaggaatcaataaaagattgtctaggaagcttgataggaaatggaagcagagcattgtggtcagaccaccaccatctctaagggggaacaaagaggagtagaaagccgcaaaaagagggcaatgtgcaaaagtcgtttcatgcgagtgttgcaggaaggtcccttcatgatttcaacccttattgcgttgttatgtattccatgtttacattttgctaagcattgctatctgaatctgaatttcagttgttagtctcttctgtaaattttgacttatttaaatttacacttctatctgtgttatcagtaattgaggatggccagtcatttgcacctgaaggtgcatgcttccttgccatgctgaatcaaatcaaattgaaaaaaaaaaaaagcggccgccaccgcggtggag

SEQ ID NO: 49640 - DNA, 201 bp, Zea mays
  Clone ID: MRT4577_145272C.1
cacagaatttcgttatagtcgtctccgacgccggcgaatccgctcatctctcctagaggtggcgggaccgaggaactcaccaagttctaagatacagaatccattttcacatcctgaggactgatgcgaaccgtgccgctacagatgtacatccatatcgcaattcacatgcaatatactcctaagaacttgctgacctat

SEQ ID NO: 49641 - DNA, 207 bp, Zea mays
  Clone ID: MRT4577_145273C.1
gggcaacaaaaatttaattttatttttgcaaaacaaaaaagtcccagaccgacaagagttaacttttctggacctcaagcacaaacaatacaggcccaatctaagagttcaaaagcccaggccttttaagaacttacaaactaaccattgaaaaaacactggggatccatacaagcttatgaaaactggcaaatgtttgtggaacct

SEQ ID NO: 49642 - DNA, 256 bp, Zea mays
  unsure (1)..(256): unsure at all n locations
  Clone ID: MRT4577_145274C.1
ctgaagctgctacagatagcgaanacattgaaatcagcgatgatgatgaccgcaaccacaagcaccgaagacgggaggctaaacaacaatctgntgacaatacagaggagcaacatccagggccacctcttaaaaaaaggagtagggttgctggtaatggagaaccttttggtggagctggctctcaaggtgaagtaccaaaggattttgtgccanttttaaaaggcggttctgagcaagaggtcacactcgagca

SEQ ID NO: 49643 - DNA, 194 bp, Zea mays
  Clone ID: MRT4577_145275C.1
tgcagaaatataaaaactcttcacctattttcagcaacacatatgcacacgacatcaatcccaccaccgagagcaaccacatttccccctacgatcaaatgattgggtgcctaagcatgatggaatacttcaaccctcgagaagtcgcgatgggcgactcagttccgaggtgacacattacgccgtggtcgatg

SEQ ID NO: 49644 - DNA, 193 bp, Zea mays
  Clone ID: MRT4577_145276C.1
gcgcggagcaagcgagggcgctgcatgtcgaacggagatacgtgaacacgcggacgtgtatgcctgtcgggcacctggacgcaccgatcgccatgccttatccgtgctcagtgcgcacatcttactgccggacgttgctgcagatggatgaactataataatacgtgctgccaccaggaactcactacaatca

SEQ ID NO: 49645 - DNA, 248 bp, Zea mays
  Clone ID: MRT4577_145277C.1
caatcggtgcttcctccggcggcgcgtgggagtgtctttggcgcgtgattcctagttccccgcttacctatgcttcgctcgacccacattgtagagttcacgccggagagacggcggaatctcaccggacgatcgtgatttcgcatcttcatggcttccgcctaccggaacgaacctaattggccacggcatagaagcggtggagctggattcatgggaaaagtacctttctctaaccctaaccctac

SEQ ID NO: 49646 - DNA, 557 bp, Zea mays
  Clone ID: MRT4577_145278C.1
tttttgagttccttcagttggctgaagaccttggggcttccccagtttgggtggtgaatgatggagcaagccttaatgaagaagtttccactaaaaccattagctcggaatttagctatggtgttaatggcatagagtttgccagtggaggacctaagacaacttggggttctgttcgtgcagcaatgggacacccagaaccctttaagcttgattatgtttcaataggaaatcaagaatgttggatgctctactatagaggaaattaccaaaagttttactcagcgattaaatctgcctacccagacatcaacattatatcaagttgtgataggccaactatttcgccatccaaccctgccgatctttatgatgttcatgtctacacctcttcgactaatatgttttcaaaagctagtatgtttgacaacacaccacgtggagcaccgaaggcaattgttagcgagtacgctgtgacccggaaatgatgctggcaaaggaacactggtagcagcactggcagaagctgcatttctcattggattggaaaggaacag

SEQ ID NO: 49647 - DNA, 1022 bp, Zea mays
  Clone ID: MRT4577_145279C.1
caggccggccgggccgaattttgcttaaaccctcttctccctccatctcccgcgccgccgccgcaaaaccctagctccgacgcccctccgccgttgccgcggccgccagaaccagccatggcttcgacgcatgtttataagaagaactaccgctgcgaccgctccctgcagcagttctacacgggcgggccctttgcggtcgggctcgcccccggcggcgatggcgagggcggcgccgaggctgaggccttcctcgcgtgcgcgtgcggtggagaggtacgcgtggtgtccgccgcggacgcctccgccataggggagcccgtcgacggagactcggaggccatcaccgcgctagcgctgtcccccgactcacggctcatattcgccgcgggccacagcaggcttattagggtctgggacctcgcgtcccgaacttgcatacgcagctggaagggacatgatggtcctatcatggccatggcatgccatgcttctggtggtttgcttgcaactgccggagcagacaagaaggtctgcgtatgggatgtggatggtggattttgcacccattttcttagaggtcatatgggcgttgtgacaaccattatgtttcacaaagatccaaagcgcccttttgttgtttcggctcgaggaagatggcactgtgcgagtgtggaaccttgaaaccaaaaaatgtgttgctgttcttaaagagcatttttcagcagtcacttcattggcattgtctgatgatggacaaacattgctcagcgctgggagggataagattgttaccgcatgggatattcgtaagtacagctcaaagaagacaataccgacatatgaaatgatagaagctgtttccttcattggatcaggaagtgagctcttggcttgtttgggcatagaactggcaaatataaaggagaaatctgctggttattttcttacagttggtgaacgtggggtcgtgcgtgtctggtgcttggagagttgtgtttgcgtgttcgagcagcaaacat

SEQ ID NO: 49648 - DNA, 296 bp, Zea mays
  Clone ID: MRT4577_14527C.1
ccacgcgtccgcccacgcgtccgaaaaatcatacaaaaattttttatacaaaacaaaactaaaaaaaaaacgaagatttaaaaaaaaaaacaggaaaaccaaaaaaaccaaaaaaaaaaaaaaaaacggccaacctctctataatacccaagtttacataccctgccatccacttgcaatagcttccaacaccgccacccaaactaaattcatggcccgcttttatccaactctattcctgaaaaaacccaaccattacccaacttataccaattgcccaaacttccactttaaca

SEQ ID NO: 49649 - DNA, 485 bp, Zea mays
  unsure (1)..(485): unsure at all n locations
  Clone ID: MRT4577_145280C.1
gttgcccgaacaagcctttaaccttttgcttcttccaaaactaaaaacgaccttttgcgaacagatggagcggaccaggggcgaggatttttccagctgcggcgcagaatgaaaggcccaaccctagcccgaccagctcaggtgagcacgggctttagggcctgatgcagctcgcaaactgagaagatggtgtgcacggggccgacgatctgggattggataatgcaaacggttgtgttgtactttagggattggaggtaaaaaaactccgtcccctgcttttatgaaaccgaggaaaactgggttcccgggtgaatgtttaaaccctgctcgaacaaacaacacgaagcgctaccagggggcctagcccatgatcagatgcaagctcttctggcacaagcgaatgtttgccctccctacgaaacaattgatataatctgtgaggcattnttgacgccaccggttgacggcttccacttgatata

SEQ ID NO: 49650 - DNA, 461 bp, Zea mays
  Clone ID: MRT4577_145281C.1
atcgctagtacctcaccccaaaaccctagtccacagaggcccccatcgcctgggcgtcagagtgtttggaaacgcgacaacctacggcggctcggatcccgatacctgctgcttctctgcagggcgacagtatgaagatagcaacagcaacaacaaggttattttcagggcgacatattgggcacgttcttggtcgctgctgcttagagacgaggacgcgaggaccgatctgaacagggcatgccgcttattggagtcggtcgttatggaggtgttcgctaagtttgggtggaagttctcaaatagaattgcggcctagtcgtctagctgtcttgggtaaacttggttttttgagtctgtttgtgagtgtgagcctaagcgcttgttggatgtatcgatacactgtgtacgctgtcttggatggtgtagaggttgggaccttatttctgttccattatctg

SEQ ID NO: 49651 - DNA, 285 bp, Zea mays
  unsure (1)..(285): unsure at all n locations
  Clone ID: MRT4577_145282C.1
gaaggaanaggccgggaccgacgcgtccgccgacgcctcctgcatcagcgcagccggacagtcacgccatagtgctagcctaagtgccaggggatgttgtaaccctgtgtgccagcaactcacacaagtggtgccacagcaccggccccaggcgcacttatggtcgcacctccagaccatactgcaacaacagccgcttagcctacacatccttgcgctgttggctgagcaaatagcgcatcttctgtcgagccaactacggactgtagaactctgcttcatacc

SEQ ID NO: 49652 - DNA, 448 bp, Zea mays
  Clone ID: MRT4577_145283C.1
attggacgggggtgagaggtaaggggggcggagaaaggagagggggcacgggaaagggaaaaaaaaaaagggggggggggaaaaaaacagagaaaaaaaaaagggggaagaaacctccggggggaaagaaggaacccggggggaaaaaaggtcaccggggggctaaaacggaataaaaaaaaaaaaaggaacggggaaccacaagagaaaaggagatcagaaggggggcgacggccagaaaacgggccaacaaaaaagggacgggcacccaagaagggacgggcccccccggggggaaaaactggcccaaagggggggccggggggaaagccggggcaaaactgcaagaccacgcaggccggtaagagaaacaaaaaccaacccaaaaacaagagccggcccccaaaggaactcccaaaaggccgggccaatagaaaggggggtgcca

SEQ ID NO: 49653 - DNA, 427 bp, Zea mays
  Clone ID: MRT4577_145284C.1
ggaagaacgggcccgacgcacgcgtacgcatgcaaatacaaaacaggatgattatatttatagaaaagcgctgcatccatgatgcagggtgtgtgtgcaggaaacttattcctcacaattctattgtctatggtaggggcttaagctatcatatcttgcttctattgttttggaggcagcctctgatcaatatccacgagttgagctttatgcaaaccgagcatttgatgatgctttagactaaatacaaaaggccctggctgaatatagcgaactccaacccattgatacactataagaagagtattctcatcttattcacgacaataattcacactatggcattgactgcaatgatgatgccactaatcatatgcaggagcaagacttttttgtttcacttatcgggtagcagcaacaaatctta

SEQ ID NO: 49654 - DNA, 529 bp, Zea mays
  Clone ID: MRT4577_145285C.1
gagagcaacaaggtatcatgacaacagggagcgttttttgggaccctgatgtattcaaccctgctattacattctgactcgaacacggggaaagggcaccatacgagtagaactaagggtaactacaaatccaatacctgcaatagacaccacaaccactagaaagaaaaaggcacaagagcagtctacgcacaggactagcaatggtagcaggttgacaaaagagacaaagaacaatcttaccgcatgaggacaagcagcaggagaactattaccaggggtactcaatatagtgacccatacagggaaagcggcatgaacatcagaactgtacctagaatctgccaagtatataatcattggcggtagcatgaaaatgtcacaccgcatgatatggatgctgtactgaaaacactggaaccaataaaatgtactaccagctgcggcaaaaataatccattagccttgcctgactgccagagttaccatgcaaggcacaaggggatgtgaatcttaatggaaccaaaac

SEQ ID NO: 49655 - DNA, 494 bp, Zea mays
  Clone ID: MRT4577_145286C.1
attactgtatgaaaaacaagggggattttactcaactgatcacaaagaacccaagcctcccggatcttacatcatggcgctttccaaagatttaaacacaaaaagaaaaccgcgtgcaaaccataaacagttcagcaggacatgaccccgctaaaacaatattgtaaaaattaacaaccagactacatggcttcataccaaaggccattttggcacaacctttcaaagggaagcataaatatatctttatacaggaccatgaacattaggtggaacaaagcaactaacttgcatgagaagaaccactcaacttcattcaaaaagacaaccttgatgaactgaacattcatgacatttcattgcttgttgtctaacaagacatacctgctatcaacatcgaaatcgaaataaacaaagaatctgcccaaatttgccgataaaacccactaggggcccctccaaaacagacaaactaactttatggaattgcactt

SEQ ID NO: 49656 - DNA, 984 bp, Zea mays
  Clone ID: MRT4577_145287C.1
atgggcagtctccagcaaccactccagcctgggacggtgctccgtttcgggagtcttgagttcatgtccttcgacgacagctacgacatgatactcctttccccgctgcgcggcagcgataatggcggtcgacagcctgcccgccggcggggaaatcgacgacgccttccccacgtggtggaaggacgacattcgggcttgtcccgtcccctcccccgccgacggaggaggaggcggggcaaccgaggccaagcaggaggcggcacctcgttggctgtcgagcgagtcgacggcgccggcgccccaacggagagcgcgtcgggcatcagcctcgcgtctgagacgaagacgagcaccatctccccgcgacacaccaacctcaagcaaacggacgacgcctgcacgctcgcgaaggacttgctgggcgtcaccctagtacctgagacgacggtgcagtcagcccctgacgcgacttcgtcaccgcccgtcggccaaaaggtaccgatcgattcccatctcacgccttttggattcggcctcgacccgccaagcaactccgctttggtggacactcccatagaggacttcatgaccgcatgcgactactgcctttccgactgttccaacggtagccgcagcctcggcgacgaggactgcggtccaagtcgcgaatgtttccacgtcgatctagagggtcccgacgaaggcaaccatctcggtataccggagaacggtgatccccctaggcccgtgcctcgcgttgacatccttcgggagctagctgtggtccccgttccggcggggggtcatgacccacatctcgaccaaatccgtgagatgcaggccaggctcgacgagggagcaggcacgcttgagccgatccgtcgggacatcaggcaggaatgggcgggccaaccttcgaccggagaagcgcatcgtctccccagggcatccagtaccgcatcggcgacgacgtcagggtaa

SEQ ID NO: 49657 - DNA, 739 bp, Zea mays
  Clone ID: MRT4577_145288C.1
gtcccaacggctcccaactatcaaaactgccgacgtctgatctctgtactctgcttgaactcacgagtttacaccgacctctccttgatagatgttcaactccacactccacaatctcacacccaaatccacctgaactgcacttatgggccccgtcctactccagcccccgactgatgttcccgtcgatatacgatgctgctcgctgctgaatacaaagtgcattctgtccagatgcgcaacgacgacaacccgaacgacgagaccgctgcttacgaggcgcataacgacaaagtcgcccataaggacccgctgtcctgcgacatccacactgagtccatcgacctcgagaacgagaacgagtccacagctaacgctgacatccaccattcaaaggccatggaaacaaagctcaaggtcgacgagaccgcaaagagatccacgatgctgctgccccggtcgaggctgcctgacaacgcaaatagccaactaaatcgacgacgacgtcgcctgcgcatgctaacgacgacgacgccacaggcatcgtctgtccattgataccactactgaggttgcagatatcaaggaggaactaccggctactactccttatggctctagtctctgctatcgataattatgtgcatagagtcatatgctacatataaactgatctagatcctctgatgcagctgacatcatgtgggagcgcatctgagatatctgcaactcattatat

SEQ ID NO: 49658 - DNA, 848 bp, Zea mays
  Clone ID: MRT4577_145289C.1
actccccaacggaccccgcttcttcctccggaaaacgtcgtctccggagcaccagagtcgcgaccgccggtagccctcctcactcccgcttaaccatcctcgccgtcggatgcgaccgcggcggccccaatggcgtcctcctccgccgccgagccaggcgcccgcctctccgatcggacgaggaggtcgcccctgggcctgagggccatggttctcctgatgcacgtggtcttcgtcggcgccgtcttcctgctcgattcgaccctcgataggcggatccacgaggagctgtggtatattggagtgtatggtgtgcttgttctgatcaccttagcgcaatacttctacactgctggttcatctccaggctatgttattgatgcaatgcaagccagtggtgggatgcatgcaaccttcatcaatactgccactctttcaaaacaatccagttcaaaacatggaagcttaaagtcctccacaaaccggcctgatctagagaaacttagaccaatgtcttcttcatcgtcatggttgcatcaaattgtggatccttatcctcctgggtcaagcaacagggattggacttgccaatattgcaaaattatccagccacctcgtaccaggcactgccatgattgtgataaatgcgtccttcagttgaccatcactgtgtttggcttggaacgtgcattggcaaaaagaaccattgtcgtttttggtggtacatatttgaagaatcaatcctgtctacctggactgttgctctgtacattgagtcactgcatttagatattgagaaagtctggtggaaaggattttattgggtgtaaccctattggcaatattga

SEQ ID NO: 49659 - DNA, 319 bp, Zea mays
  unsure (1)..(319): unsure at all n locations
  Clone ID: MRT4577_14528C.1
gggtcttcataccattaacttttttttctccagagcgcanaataacccgagcgactccattaaggtgcgggtcgttgccctctctctcctgactctcgctggcagctcctcctcctcgcatactagctgcagctgctgctgccatccacccccgcctgttcatctaccgtcgtcagtgcatctgccatcttcgattcatccaccacctacaatgcatttgccaactgcggtgcacctgccgtcaacaggccacctgccaccgactgtccatgtgccggcgtctgttcatgtggcgtcttcaacatgccacttccctact

SEQ ID NO: 49660 - DNA, 1098 bp, Zea mays
  Clone ID: MRT4577_145290C.1
atggtgctccgttttgggagtcttgagttcatgtccctcgacggcagctacgacatgatactccttcccccgccgcgcgacagcgacaatggcggtcgacaacccgcccgccggcggggaaatcgacgacaccttccccacgtggtggaaggacgacattcgggcttgtcccgtcccctcccccgccgacggaggaggaggcggggcaaccaaggccaagcaggaggcggcacctcgtcggctgtcgagcgagtcgacggcgtcggcgccccaacggagagcgcgtcgggcatcggcctcacgtctgagatgaatacgagcgtcgtctccccgcaacacaccaacctcaagcaaacggacgacgccagcacgctcgcgaaggacttgctgggcgtcaccctcgtacctgagacgacggtgcagtcagtccccgacgcgacttcgtcaccgctcgtcgaccaaaaggtaccgaccgattcccatctcgcgccttttggattcggcctcgacccaccaagcgactccgcttcggtggacactctcatagaggcgagtccaaaccctctagggtattgtgtgcggtcaccctgggaccggctgacggccgtctcgacctacgggccctcggggtccaaggaagatggcgagcccgacctctattgggatttctccggacttggtaaccccagtgccgtgcgggacttcatgaccgcatgcgactactgcctttccgactgttccgacggtagccgcagcctcggcgacgaggactgcggcccaagtcgcgaatgtttccacgtcgatctagggggtcccagcgaaggcaaccatcttggtatgccggagaacggtgatccccctaggcccgtgcctcgcgtcgacatccttcgggagctagctgtggtccccgtcctggcggggggtcctgacccacagctcgagcaaatccgcgagatgcaggccaggctcgacgagggagcaggaacgcttgtgccgatccgctgggacatcgggcaggaatgggcgggccaacctccggccggagaagcgcgtcatctcccccagggcatccagcaccgcatcgccgacgacgtcagg

SEQ ID NO: 49661 - DNA, 422 bp, Zea mays
  Clone ID: MRT4577_145291C.1
aggccctaggcaatcccacaacggaatcgggctgaaatgtgaaaaaaaggcccctcgactgtccttggggggttaaaaacaaagtaccaagacccccataataaaaaaaaaaaaatgtccccccttttaaaaaagatcgttttttaccgattggtgacataaaaaaaaccagctccaaaagggtttaaaaaccttgaaaacacggttttaaccttgggaggggggtaaaaggggtacttggaaacaaccttggaaaaatcaaccttttttgggggaaccttttcctccaaaaactgtttaaaaaaaaaaagggctttggtctccccctcctaaaaggccaactcctttttgaactgctcccgcaaaaaactataaatttcttaaaaaccaaaaccaaatgcctttcgggttgcattgccaaa

SEQ ID NO: 49662 - DNA, 271 bp, Zea mays
  unsure (1)..(271): unsure at all n locations
  Clone ID: MRT4577_145292C.1
cggccgcgtgggcggacgcgtgggcggacgcgtgggcggacgcgtgggcggacgcgtgggtggcactccatacctccgtgtgtgtggtttttcttcatcgtcgccacgggaatccagtgatcccggccgcaccgtctcgtnnccccagncgnnaanntcttgcgnaagtgggttaacaacgagttcttcaggcatgaacaatgccttccctattatcaaaggaactacacgaattcctgcggttggtcctggccctgcaaatccgccagga

SEQ ID NO: 49663 - DNA, 382 bp, Zea mays
  unsure (1)..(382): unsure at all n locations
  Clone ID: MRT4577_145293C.1
agaaacnnggagagaattgaaagcaagaaagcctttttatttcccgaaaccgaggaggagctgagagcactgcatgacaagaagggacagaagaacctgagaaaacaacaaatgtacccaggtcctagggacaaattaaatgcacgccaaaaggcactggactcgagatggaagaangcccagagaaatgcgggccacctgaagcgtcagcctacgtggccgaccaacgagcacctgggaaagaaaggcatcagcgggcacatcaacgtagatcataagaacgaagccccgcctggcgagctgacaatgccacaagatgcgtcccgtgacaccattagagacaccagaggacctacaggcggagaacgaccctacacaaccc

SEQ ID NO: 49664 - DNA, 358 bp, Zea mays
  Clone ID: MRT4577_145294C.1
ggcacttgtggccgacgttggggaagagaagccccttggtgacggcgatgttggcggcgtcctcgtcggaggaggactcggtggagctctcgtcggagtcccacgcgcggcacacgtgggcatcgccgcccttcttcttgtgagtggactttagaagaatttgaagaattgattcacaaggcattcaaagatgttgtttcagttgaccttgcaatggcttcaaatcttgattcttcaaacaagaagaatatcaatcgaggctttggatttgtgagattttcttctcatgcagtatttgccaaatattattgcctcttcctacgcccccgcccgtcccggccttgcctgccgcttccgt

SEQ ID NO: 49665 - DNA, 240 bp, Zea mays
  Clone ID: MRT4577_145295C.1
agtgctaggccatcgattctacttgcactcgtctccatacattgacagatgtacaggactgggacagtaaggtcaggtgaaatcaacatagaagccgaagtgattgcattgaaggctgaactcgcccgatgtagacccataattgaaagcaacttgattgagattgcagtaccttaccatgcatgtcttaagtagcataccataatctataacgaatatgatttatgtgacaacaattta

SEQ ID NO: 49666 - DNA, 418 bp, Zea mays
  Clone ID: MRT4577_145296C.1
gtgacccgggccccccctgtaggcgggcgctatattttttttttggtttcttttttgtacagagaaggctttttcttacctgatcggcctttttttcagaggagatgtacgaacagagaaaatgttctcccgtaacttgaccatctcgctgactatactgatggacacgggcgagtctaaatttctactgctatcaaaggcaagcctactggttttaagcttcaccaacgacaagcacatttcgcctgttcttcaagaaggaatggtcctgaccttttaacacctccaaaaggcatatgctgggtttactaattctaaaaaggtgtttttcattacgctattaattaaaaagtagaaactttactcccttttagcttttttatacatacaacagtttttaaccaaacatgtaaggggt

SEQ ID NO: 49667 - DNA, 409 bp, Zea mays
  Clone ID: MRT4577_145297C.1
ccggccggggctattcgtgtcctggcatccgcagagagcctgttccgtccaggcaaccaaaaagcaagttgccccgccgcgcagaggaagaagagagcagaggaggatggctcgtacgaagcagaccgcccgcaagtccacgggaggcaaggccccccgcaagcagctcgccaccaaggcggcgcggtagacggcgtcgacatccggctggcgataatatcatcacactgcctgtttcctgagataccgtgctgatcctatccccatttcactgcaactacaaggtcggatcatcatgtgttgagcctgtggtgcctaatgcgtgccttcgctctcattacttgcgaagcactcagtgccatgttttgcgacgttgatcccgtcctgtcagttccattactgagtcctc

SEQ ID NO: 49668 - DNA, 292 bp, Zea mays
  Clone ID: MRT4577_145298C.1
acgcgtgctcgtacgctagagcaggaacttgcttactggtggcacagctgccgcgatgtcctgcaaggtgacgagcaaggtcaggacataggggaggttcttgcacgcattcggactcactatctcatgggggagcgtacttgtagttgtcgtcgaatctatctaagccctgctccatgacgtacagatggagcgtttcggagtcgcaagtaacagcattttactcgggttcatggagacgcttatgacgagtacacgagactgtgggccctgtccatccactcggctgcta

SEQ ID NO: 49669 - DNA, 276 bp, Zea mays
  unsure (1)..(276): unsure at all n locations
  Clone ID: MRT4577_145299C.1
agaacaaaccaangtgggacgcgcaccccaccagcacgcaatttcattacgacccccagaaccaggaaggccggccncgtggaaacacaaggcacccgaccgcacccacccagcaacaaagaaaagaaaaaacaggaaacccggaagcctcacgaaaagcaggcacagacctgaaagcaggaaaccagcaacaaacgggctcgaaaagagctaggactgggagaaaacaacaaacccgcgatggaacctgaaacggacagaccaagccaacaagga

SEQ ID NO: 49670 - DNA, 1632 bp, Zea mays
  Clone ID: MRT4577_14529C.1
ggcctggaccattggtctgatttatgtgcttgttgatgtgcctgtttatgtgcctgtggccgtgcggggcgtccgcgatccgtcgcgagcctaagcaccggcctgaggagaagacgagagaatgtcatagtaacgtcttaaatggactcgtctaatacgttcggctgattgtttcagcccgcgcggctcatttcagatagaaccactcgtcgcgccggtccgcgcatcccgaccgcattttaagcaccccgaagcctcgattgggccctccttttgggctgatcgaagtgcttgaaaaaaaaaaaaaaaaaaaaaaaaaaaaaaaaaaaaaaaaaaaaaaaaaaaaaaaaaataaataaaaaaaaaaaaaaaaaaaaaaaaaaaaaaaaaaaaagggtggttgccccaaaggacttaaggccattcatgtgcgtccgtaatgttacagtcccctcactgggcttttcaaacctaacctatcggttgctgccccataatgctggggtcggaaaaatttcggtgccatttaagaacaaatatccgtcgaaaacttttcgcccttttggcggtgctacttggaaaacatattaatttaaaaaaaaaaaaaaaaaaaaaaaaaaaaaaaaaaaaaaaaaaaaaaaaaaaaaaaagggtggttgtctcagaggacttaagtccatgcatgtgcgtacgtgatgctacagtctcctcacagcgctattcaaacctaacctatcggttgctgccccataatgctgcgatcgggaaatttgggctgatttttatgctaattgagacgtagtgtaagtattcccgcgccgacccatcacccgtttggcggccgtcaacgacacgggacgaaatggccgttggcccggtcgtcaccaaggccgcgcaactcgacgggtaaccctagtacctcaacgtttcaacgacgaactcccggttacccgtcgcctcgttcaataaaaacaaacgtcgattgactcacaaaggcacaacgtaaaacaaagggtggttgactcataggacttaagtccatgcatgtacgtacgtgatgctacagtctcctcacagcgctattcaaacctaacctatcggttgctgccccataatactgagatcgggaaaatttcggtgccatttaaaacctttggtccgttttatacgcttgtccgccttctcgccccgttagggttaaggtttgtaatgggctgagccgaattaatgcgtgcatgagagaagaggggccggggaggcagatgagcggtgcagggaatctggctgcggggtggcagagcgagtgagcgagagagaggtagggtcgctatgagtgcgggtaggtgactgtgggagtgacgatgatggtggttggtacgttggggccgttggcgggtctggttgttgtggtcggggcctttgtggtgtttgaggcggtggctagggatgtggcgactggtcggccttgtggtgagcctgtagttgtctcagaggacttaagtccatgcatgtgcgtacgtgatgctacagtctcctcacagcgctattcaaacctaacctatcggttgctgccccataatgctgcgatcgggaaaatttcggtgccatttaatccaactgttccgtagtata

SEQ ID NO: 49671 - DNA, 693 bp, Zea mays
  Clone ID: MRT4577_1452C.1
aactcgatcgaacaactcattccttcctaccacccccggcaccaccagcccaagcagagccatggcgcccaacggagacaacaccgtggccaacgtccacagcggcatcgacagcaccaacaagacgctgctcaagagcgacgccctctacacctacatcctcgacaccaccgtcttcccccgtgagcacgagtgcatgcgcgacctgcgcctcatcaccgacaagcacccatggggctacatgcagtcgtcctcggacgaggcgcagctgctggggatgctgatcaagatggcgggcgccaagaagacgatcgaggtgggcgtgttcacgggctactcgctgctggccaccgcgctggcgctcccggaggacggcaaggtggtggccatcgacaccgaccgcgagtgctacgaggtgggccgccccttcatcgagaaggccggcatggcgcacaaggtggacttccgcgagggcaccggcctggcgcgcctggacgagctgctcgtcgaggacgacggcggcgagctacgacttcgcgttcgtggacgcggacaagcccaactacgtgcgctaccacgagcagctgctgaagctggtccgcgtcggcggcaccatcatctacgacaacacgctgtggggcggcacggtggcgctgccggcgggcacgcccatgtccgacctcgacacccgct

SEQ ID NO: 49672 - DNA, 1612 bp, Zea mays
  Clone ID: MRT4577_145300C.1
gcccccgcgtccgctacgcatttgacatcaagctctgcagaacgaacaactcatctaaatccgtaatgcgtgctcctggagatacacaaggctctctaatcgcagatgctgtaatcgagcatgtggcgtctgtcctgtcactggatgccaacagcgtgagggaaaagaatttccacacctacggtactcttcggtcgttctaccctgacagcgcgggcgaagcttctacgtacacgttgcattctatttttgataggctggtctcaacttcaagctacctggatcgagccgaatccataaaggagttcaacagcaacagcaagtggcggaaacggggcatctcttgtgtgcccctcattttcaaagtggagccaagggcggccccaggaagggtttccgtgctcaaggacggctccgtagtggtggaggttggaggaatcgaaatcgggcaaggtctgtggaccaaagtgcagcagatgaccgccttcgctctgggaagactgtggcccgatgctgatggcggcggcgaatgtcttcttgggagagtgcgcgttctacaggctgacaccttgaacttggtacaaggtggactcactgctggcagcaccgcttctgaatctagctgcgcagcgaccctccaggcatgcaatacgctgtacgataggttaaagctagtcttggacaggctgcagcagcgatcagaaaacgtctcgtgggataccttggtttcgcaggcctatgaagacgatgtcgatttgtccgcgagtgcgtactgggtacctggtcaagcttctaacaagtaccttaactacggagctggtataagcgaggtggagattgatcttcttacgggagcaatcactataataaggggcgatcttgtgtacgactgtgggaagagcttgaaccctgcagtggacttaggacagatcgaaggctcgtttgtacagggaatcggtttcttcgtatacgaagagtacaccacgaacagcgacggcctgatgatcagcaacagcacgtgggactacaagatcccaagcgtggacatcatcccgaagcagttcaacgccgaggtgctgaacaccggataccacaagaaccgtgtgctctcttcaaaagcttccggtgaacctgccttggtccttgcctcgtccgtccactgcgcgctgcgggaagccatccgagcggcgagggtggagtttgcggacagcaccgtgtcatctggacactcgccgctggagttccagatgggtgtccctgcaccgatgacactggtgaaagaactctgcggtctagatattgtggacaggtacttggaaggtctgtctacctgtgaacgtgcggctggtggggcgtagtcttcttctaatctaaactcatgttatctcatacaagggagtggtatcagcctattgtttgcttgtttgtacgtgtatatacaataaaacgtgctcgcggcgtggtggtgtgtgtgtcattgtgtgtgtgagtgtgagcacaatatctatctgaatgctgtcaaccatgtgtccttattaaaactgctggagtggtcatgtttcagtaatctattgttactacttattggcctcgtgcgtctctacgcacatct

SEQ ID NO: 49673 - DNA, 512 bp, Zea mays
  Clone ID: MRT4577_145301C.1
cattgatatacgcactggtacgagaaagcacgaaaaggtaatgacgagcgtagaagcgaaagaacaacctggtttgaaacggaaatcttttagcaggggggcaagacgaccaagaataagaaagggctttttcctttacgcgggggtgattttgaaagacttctatcctctttatttcgatcacctcttggggcgcattccaatcttcttccagcgatagactggattttttcatctttttctcgtcttgtagttgtagcagttgcagttatagtaaaaaaataacaagattgcacaaccatcttgtcattggaaattgttcgttcataagaacaaccctcctctaacgaataagaaagaacccttttctatcgagttcaccacctgataacttaaaagttacacttacttgttcgacactggatttctatcccggaacatcagctctcacaatcccgtatccgtctaacaaaacaaaaccaaaagtttgagggtaggcacatgcattccct

SEQ ID NO: 49674 - DNA, 602 bp, Zea mays
  Clone ID: MRT4577_145302C.1
gccggccgggtcgggaaatccaaatagacttctccatccactactgatccgatccatgcgaaagttctgtctctggtcaccagcgaagaggcctccgcacgccggctgctgccgtgccgtgcctcgccgagctcatcctcaccattcctcttcgtcttctcctgccgtggttccgccatgccaacagggaagctgaccagccgcgccggtcacacaatgctgggccagacttcaagggcgctgtcgtacacggtgacgttgaccgcatggagcagcgcgctgcacggtccacgcccaatcaagccatccgggacgctgggactcgcacgccacgggacgcatcacgctgtgccgctccgagctcttacgaggacgcccagctgttcttctcaacgatcgcctggctcctccgctctttactcatagctgtcgacagcgacgtgcccgcgcacgcactgaacgtcggcgtgcactcgatccggatggcgctcatggacgtcgtgttcacctactcgctgatcttcgagatgtacgtcaacgacttttacctcaagctgacagacagagtcctgcgtccgctgcatgagctgctcgctgcactg

SEQ ID NO: 49675 - DNA, 1962 bp, Zea mays
  Clone ID: MRT4577_145303C.1
ttttttttttttttttttttttttttttttttttttcagagtaaaatgccttgcacatttcaacaattttctcactgtacacatattacaatactgcttttttgcatctctatcgctcatggtggataatctgtatctagttacccttccacatctcagatttatcactctacatacatacacgatagcatacatacactgtcaactgacaactcagaactaatttaattgattgatatacatatacagaactcttgcttcacctattggctaatttgatctgtttgacactctggacgagtaacagcgccaccacccacatggatggagctcatcattatcttgccgggcttctgcggtgcgagaaccgaggcgggttcttcgtgcctgccctggcattcttggccgctttccttggcccggggcagtagaaaaatgatctggggcacctctcacacgtttcacttggagctcttctttccccaccatcttttccgcgatttatcatcatgggtgccggtgccaaccttattaaggtttaccttcgtctccttcagccgagatttgtagtcttttttccatgtttcaaagcggtccttgagcttccggagttcctcgtctgggttcgtatttgaaccaacctggccggacctgactgcgacaaggaagcccgcgtcgtcttcgaacacctgccgtctgtcttcaaactccttcgctaggtggttcacagcgtttactcgcctatccgagtttcctgctgaaactttagcttcagggttgtggttgtcgtgtttcgactcgatcacttcaggtgtacgagtcccggtggataatgtatcttcagagtcatactgggcatgtgtaggagtacaatcagtccgagctgctctagtggccgcatcatcagcagctaggctcttcttagcgacaacaaggctcagctgcagagaagagagctgcctcttccatgcctcttccatagatttcattttggcctcatattctgaccatttcctctcatactgttccaattgctgtttgagcattacattttcctcctccttatcccgcaatgcagcctcagctttcgtaatccgaccctgaagctcagtgatgactggttcatgaggataatgcccattcattccatggcatattcttgactcagcattattcttccttgtgtccccttgaactatgctgtgactggcctttgactccttttcattctgcagacacttgtatttccttctggccaggcacccacgcatcacagactgaagaagaatgatatgattcagttgatcattaaacatgttagctgcaagtcgacgcctagtgtacttctgtattagaacagctgccctccatctcttgacaagattatcaaagtgtattcttgctctttcaccacgtataaatgattgcaaattcattgccactttcttgagtcgttgatatccctgacgagaatgcataccccggaagtgtgtttgaatacggagggttccaagaagcatctgtattttagtattttccagtgcagcaacctgtcctgtacggaaaaacaattttgtgtagccaacttgatacatttcagggggaatgttcaactgttgcaaaacagcaactgaaacactaagtgggtcttgagatgcaatggaacgcaagagaagaaacctgtatctttcagcaaactgttggtgagtgatcctagttggatagcatgttcttgatatccggacaacttcaagcaccccacagcatttaagctggtgcaagataagatcatgctcgaataacctgggaagttgtttgctatttggttgaatgcatcgaataaaatgtggggttgtactctccaactgctgcatcagcttgaacagttgagccttaaatttcgtgacaacactttgtttctgtgtatccattactgaatgccatgacagacttgatttattc

SEQ ID NO: 49676 - DNA, 462 bp, Zea mays
  Clone ID: MRT4577_145304C.1
ccttctcccccattccgctgtgtccgccctctcgcgtcgcgtgcctgcaggtccctcctgtgcagaactgggggggcggcgatccggcgccaccggcctgaggaaggggatgcggagacatagcgagcaactgcccccggactaggcaggagatacatagtcgcctggtgagcaatgaggctggtggtgaccgagataaccgtgccagcgttcaagatgtgcgtgagttcatgcacagatgtgagcatccattgtagctgagagcgaaggcgcatgggtccaaagattggtgttggaaacatagacttaagtaggccatgtatcaggggttctagctatatccagagttttgtgctaagacaagataggatgtcgatttgcgaacctattatgatggagctttatttgctgctaatatcgacctacctattaagaaaaaaaaaaaaaaaaaaagcggccctt

SEQ ID NO: 49677 - DNA, 241 bp, Zea mays
  Clone ID: MRT4577_145305C.1
actcggtgagcccggtgggcgccggcgagccccgccgcgcgcgcgcgcgtgcgcggtgcaggatgccgaacggctgtgagaggaataaaggattttccagtccattatgaacattcgcgcacacatacacaaaagatcatatctaacacacactaatacatttgtaattataatgcatataactacagcattttatttggttgttggtgtcccacatggccaaatttccacgatgattgac

SEQ ID NO: 49678 - DNA, 470 bp, Zea mays
  Clone ID: MRT4577_145306C.1
ggaggacaaatccggggcaaaaactaatttgggggcaagcaaaaaaaatttcccctttttattaaaaaaaaaagggggggatttaaaccccttaaacccaccaaggtttgggggccccaaaactaccccaaaaggattaaaagttaaaaacaaaagggataaacaaaaacaaaaaccaggcttgggataaacaaaaaaacattttaaccaaatcctagaaacgagaaacgacaaaaaaatctatacaaaaacccatgggaacactaccaaaaaacaaccgaaaacgggccaaacaccaaaaatgggaggcggggaacactgaaactgggtttgcagggcctggggacatttttaacgggaaacctggggcagggggtttcggaacctgatttttctggtaagccgcaactggggcaaaaaagtttctcgggtaagcccccatggacttttttataaaagaaagccccccc

SEQ ID NO: 49679 - DNA, 345 bp, Zea mays
  unsure (1)..(345): unsure at all n locations
  Clone ID: MRT4577_145307C.1
gcaagcgatggtcataagtgactgtatcccgctacatgtggcatttttgacaaggacaactactctaataggatatgggacatcaggcaaaggacgatagctattggtacaccacaaggcttgactatccacaccgatgcttgcaacggattgactaatgcagtctttatgaccttccatggaccatttgancgtaaaaagtgtctgagacgccgccttacaaatttgatagaaaagtaccaaggtgatgtataaataaacatgcggccttgggctataacatgcacaactctgatgctctaggtcttatcgtacaaaattagcgaacgtagtcctgtaactatt

SEQ ID NO: 49680 - DNA, 435 bp, Zea mays
  Clone ID: MRT4577_145308C.1
atccaacaacgtccaatgctaagttatataaatgaggccaattgattgactcctgaataagcatggatggatccatgtacttaaatgccctcgcccacccattaaattgctaacgggcaagcttaacatgagaggaatgcgcttacattgcatctatctaagcatactaaaaatcaagagttgaactgtatgtgcccaatcatacaagcggctgttataaaaacatgaccataataatggattcatcaagtcttgagaacggatacaaactctcaaccgtaatacactggacaccttacctagacagtgaaccaacctcaggcaaaccactaacagaactggcggaaagcaagttcatgcacacttggtctacattctgtatgtacatccccaacactaccagacacagttcgctgatctcagcagtgggacact

SEQ ID NO: 49681 - DNA, 427 bp, Zea mays
  Clone ID: MRT4577_145309C.1
cattgtgacctctaggaggcgcgcgcggcgcattatcactctgcagaaaatgcaccctcacaaggcagtacctatgcattacgagtagtttatcgcaaaaggctagagacgatatggacaacatgcatcacactgaagctgctgcattcgtttccgagcaggtctatgtgctgctgctggaagcggatacgacgaactgcgaggtcgccatatcctgactcactgtgaggtcaaccttcaagttcagtctctcctaccatggcgagacgtttacagcctcatccgagtaaatgatgtagcacaagctggaacttgtagatcttcgtgaggacattcctggtgatcagtgtcgacctgttagtggctcaatatatccgtacagtttccgttccacctggtctcttactggctagcacacgtgcgcaca

SEQ ID NO: 49682 - DNA, 379 bp, Zea mays
  Clone ID: MRT4577_14530C.1
tacctcgagccggccgggagagtatcctataatgagtccgtgtgctcgtttcctctgcacaacaaccaaccagtgatgccctccgcagatcatctgttttatcgcgagagtcagtggataccggcatggatttgtgcgccacatctgtgctgcccctcggtgccatcggcgcaacggctccgaggaatgcgaggtaggcgaaccgaatcgacaggctgcctggacaaccgccggtaaacttctctatgtactccggcatacgtcaccgtggatgcggaggcggggcgggccctcttctactgattcatcgaggcggtaggagtgcccgcggatctccgcgccgatcaaactgtgtcttaacggagggcccgggtgctcc

SEQ ID NO: 49683 - DNA, 1582 bp, Zea mays
  Clone ID: MRT4577_145310C.1
aatccgactacaaaaggcgccagggccagggtccttcgcttgcttactactcctgcttaccacactctaccttgtctcttcacgtgcacacgacgcctcccccaatggctgcggtggcggaggaggaggtgatcgtcgtcggcgcggggcagtcggggctagcggtggcggcgtgcctgtccctgcgcggcgtgcgggcgctggtcctggagcgcgacgactgcgtgttgttgctgtggcggaagcgcgcctacgaccgcctccacctccacctcaccaagaagtactgcgcgctggcggacgcgccgcacccggacgaggcccccgcgtacctgcaccgcgacgacttcgcgcggtacccacactctaccttgtctcttcacgtgcacacgacgcctcccccaatggctgcggtggcggaggaggaggtgatcgtcgtcggcgcggggcagtcggggctagcggtggcggcgtgcctgtccctgcgcggcgtgcgggcgctggtcctggagcgcgacgactgcgtggggtcgctgtggcggaagcgcgcctacgaccgcctccacctccacctcaccaagaagtactgcgcgctgccgcacgcgccgcacccggccgaggcccccgcgtacctgcaccgcgacgacttcgcgcggtacctggacgggtacgccgcgcggttcgccgtccgcccgcgcctccgccgcgaggtccggtcggcgcggtacgaccccgcgagcgcgcggtgggaggtggaggccgtggacctgggcacgtgcctgcccgagcggttcgtggcgaagctggtgctgctcatgtgcgccgtggtgttcggcgacacgtcccggcagggcctccgccgccccgccttcgggcccttcaccatgaagctcaccaccccgggctaccccgtcgtggacgtcggcacctacgccaagatcaggagcggcgagatccgggtgctccccgccgccgtcaagagcgtccgcgggaacgtcgtcgagttcggggacggcagccgccaccctttcgacgccatcgtcttcgccaccggctaccggagcactgtcaggcggtggctcaagagcgaggacgggctggtcggtgacgacgggatggcggcgcggagctacccggagcactggaagggggaccacgggctgtactgcgcggggatggtgcggaggggcatctacggcagctgcgaggacgcggagctcatcgccgccgacatcagcaagctgctgcaccccaagcaggagcagggcaacggcgtctagctgcagctagcatttcgctttgttggttgcgatggaaacaagctctattgttgttgggttggttgataataatggttgcgtgaataattaaacgtgcttaattgagatggcctggccagcctattcgttcattaccctgtctgtgccagtgtactgatgtgcaccgacgaggctacgacctaccgccgctagaaaccggaatttccccgcatgccgctttctattgttgacaacagttcaagaaatgcacctgtcaaaatcatctatcaatcgacgtctacgtctcctatcttctcagaatt

SEQ ID NO: 49684 - DNA, 265 bp, Zea mays
  Clone ID: MRT4577_145311C.1
aaacctaaaggggggctagccctaaagatattttcactttcactccaatctattgggattggggaaatttcaatttctagaacatcaaatcccctccaatctatatcaacctttcccaatacatttaaattgaaaataaccgcccaagccctaaaatattttggccctctcagccccttcctttactctaaaacaagctgtttaaaatacaaaatgggaccccaacttttatgacagttttaatattaatactcaatcccaattt

SEQ ID NO: 49685 - DNA, 531 bp, Zea mays
  Clone ID: MRT4577_145312C.1
aattcggcacgaggcgtctatccgcttccgagttccgaccaacccctccctcccttctcctgcttgttctcgtctatagcgctcgcaatcctgtcactatcactagtccccgccccacctcctctcctgtaaagatttcgttcgttcctcttccggattcctgatctcggtctcggtccccgattccacctgtggagtctttgctgcaatctgtagcagtagcacgttgcacgggaggagtttgtgcgttcctccagaggagccgagtccgtcagtggttgcttgccactagcgcgaatcacgtccgggttgcgtcctccactccgtgccaatctaattccgggcgccggggaaggattcgggacggaaggcactagtttctgtgcttccttggattccacggtgaaaccagcctgcgaggtccgcgccggctcccaccgcattccggcgagtcccgagtaacctcgctgtggggacggtgtcgcaggctcccatggcaggggcgggcgcgggcgcgggcgcccaacctca

SEQ ID NO: 49686 - DNA, 224 bp, Zea mays
  Clone ID: MRT4577_145313C.1
cgcgcgtcatccgaagggagtcgggtcaagatttcccgagccgggacgtggcgggagacagcgacgttaggaagtccggagacgccggcgggggcactcgggacatgattatcttttctgcttaacggggcgccaaccctggcaatggggtgagccggtggttgggtccatcggccggaagagcaccgagcatcgcgcggggtccggtgcgcccctggcggtcc

SEQ ID NO: 49687 - DNA, 284 bp, Zea mays
  Clone ID: MRT4577_145314C.1
cccacgcgttcgcggacgcgtttacggacgcttgggcaacgctaacaaatcagcgtcactatgggttcatattcagcgcctgagtgatgcgagtgttgtcagcagatagccatgaatttttgctcctcctgaaccttgatgtgctatatgcccactctctgcgtcacagcgtagtcattaccttcaaagggtgatgccaccatgatctagaactgcatcaccgtttgcaagagctaggtctatacctgcagtttctgcaagctctgcacttgcatgttcaccaa

SEQ ID NO: 49688 - DNA, 303 bp, Zea mays
  Clone ID: MRT4577_145315C.1
gttgttttgaccgaacaattgttctgactgaagttgcctataaatatcgtggacgagggctatttcactggtttacatgtgttcggatgacgttgttgttctcgatctatgtgttgtgaagcttattgagaagttttttcttcttgtttggttggtttgttgattgtgttcataatgcctggatgataacttgtctttgccacttttgtaggttctgatgtagatcttgttgatgttgaggttttagaatctagactggttgataatgatataaggtctctcaaatcttgtgtatacctaatg

SEQ ID NO: 49689 - DNA, 282 bp, Zea mays
  Clone ID: MRT4577_145316C.1
tgatttgtatgtgacattgaggctaggagggtgatggcgggtctgtcatggaagatgatctaaacaaagaggtgatcagtaggctaaccaggtaactgtggagagaccttgcgatggcaggaatggtccacaagcaccatgatgggcgttaggagacacagtaaaaactggctgtcaaaaggttgaattgacctatgcatcgcatacgtttaaacacctcggatgatatggagaaagtcttagatcacctcttagacaatgtgttgagccatgctatgaaag

SEQ ID NO: 49690 - DNA, 463 bp, Zea mays
  Clone ID: MRT4577_145317C.1
gacctttgggctgctttatgtgcttgtttatgtgcttgtttatgtgcttgagatagcctaaaccttacatccctacgttacgggatcaggacttgacgaatcccataagaacgtcagggagaatcgcggcggaaagcacagcgtcttatcgaacgtcgcacgcgtagaggtcgcttaagtcactaataaccgtatatgggacactaacaagtaacatactccggacttcgtccgtttggacgacgactcgccgagttttaagatcgcagtagagatagacggaatgagtaggccgacgtcagagctcgtagacccctcatccggccttaaacgcgtagaagtccacatacctcacttcatgtccgggggaacgacgacatagcctaggagagttctggcacttgtaaggggataaccggagtacggaaatgacatagttacgtaccgttccataaccacgaca

SEQ ID NO: 49691 - DNA, 700 bp, Zea mays
  Clone ID: MRT4577_145318C.1
aagtgggagacccgcgagaggctgccgtgtagggactagggaccgtagagtaagcgacagcgaaggagggagagggggatggccgggatcgggccgatcaggcaggactgggagccggtggttgtgcggaagaaggcacccaccgccgctgccaagaaggatgagaaggccgtcaacgccgcgcgccgctccggcgcggagatcgagaccatgaagaagttcaacgctggtatgaacaaggcggcgtccagcggcacatccctcaacaccaagcgcctcgacgacgacacagagaacctcgcccatgagcgagttccaagtgacctgaagaaaaatctcatgcaagcaaggctcgataagaagttgacccaggcacagcttgctcagttccattgatagctgggaagtagcttgatccttggttggcctctttatgagatgaggatatggtgttcattgcagatgatcaatgagaagccacaggtgatccaggagtatgagtcaggcaaggcaattcccaaccagcagatcattggcaagctcgagagggccctgggaacgaagctgcgtggcaagaaataaccaggagcatcatagcgaagacaaggcaaactgtctgcttattatttgctatgtttggtatctcaagtcatgcggactgtttgtgttggtacaagagtgaattaactgtgttctcctg

SEQ ID NO: 49692 - DNA, 1058 bp, Zea mays
  Clone ID: MRT4577_145319C.1
gggtacctcgaggccggccgggctgtctcacctgtcatacgcggttccgtccccttcgcaccccctgtttgggctccagaagcttccccttccgtctccatatcttcttcttggttcgccgcctccactccgcgttccctggctccctgcgttgcgtcttgggggagagagagaagtgggagacccgcgagaggctgccgtgtagggactagggaccgtagagtaagcgacagcgaaggagggagagggggatggccgggatcgggccgatcaggcaggactgggagccggtggttgtgcggaagaaggcacccaccgccgctgccaagaaggatgagaaggccgtcaacgccgcgcgccgctccggcgcggagatcgagaccatgaagaagttcaacgctggtatgaacaaggcggcgtccagcggcacatccctcaacaccaagcgcctcgacgacgacacagagaacctcgcccatgagcgagttccaagtgacctgaagaaaaatctcatgcaagcaaggctcgataagaagttgacccaggcacagcttgctcaggtatttctgtggattcattagatttcagaacttcagcagttccattcatagtgtctgaaccttgatttgtcgtttgagtctaccccgacttgcttgggactaaaagtctatgctgttgttgtagtagttccattgatagctgggaagtagcttgatccttggttggcctctttatgagatgaggatatggtgttcattgcagatgatcaatgagaagccacaggtgatccaggagtatgagtcaggcaaggcaattcccaaccagcagatcattggcaagctcgagagggccctgggaacgaagctgcgtggcaagaaataaccaggagcatcatagcgaagacaaggcaaactgtctgcttattatttgctatgtttggtatctcaagtcatgcggactgtttgtgttggtacaagagtgaattaactgtgttctcctgaagtgcttgctgcttgtcatatgagtatatgatctagctctaaaaaaaaaaaaaaaaa

SEQ ID NO: 49693 - DNA, 424 bp, Zea mays
  Clone ID: MRT4577_14531C.1
tggctctggaacctttgggctgatttatgtgcttgtttatgtgcttgtttatgtgcttgcttatctgcttgtggatgtgcgggtggagtaatgttgttgttgttactcctagttcacttgtgtcggatggtaataaggtgaggactggtgagtctggtgtgacgaggttgtcggcggagtcttctgagtatggtagtatggtagtgaggaaagatgtggttctggttactcctaattcgcgtatgtcgtatgagaataagctgtgggttattaagagtggggttgctgatgcgatgtcgagggttgctgttcgtgttggggatggtctcggtcttggtctgtcggcggatgagctctcggttgcttctgtgtcgtcgctgggtgattatgaggtggcggaggaggctggtgagatgggtggtgc

SEQ ID NO: 49694 - DNA, 309 bp, Zea mays
  Clone ID: MRT4577_145320C.1
gcgacgcctgcgttgactcgttagccggatgctacctgtggcacctagcacgagcctgcagagacatcatacacactaccatgagcaagcgactacatagtacgcatgtcaacctgcatggcgagtacgaacatccgaggacacgcgttgaatgtagacgcccagtcacttgcgcttgtaaatatggctaggctcgtacatacgtagctagcggaaccagggtactcagaagatgacacgcactgaacctagcccagctatgtgaactggcacacgcacatcgcgactcgagcttgaacacgacaacga

SEQ ID NO: 49695 - DNA, 118 bp, Zea mays
  Clone ID: MRT4577_145321C.1
gtctaatagatgtcagttatcctgcaggaaagcacactctggattatattcataggatcacgagccagagagctagtataagcttcttctgattgtcggcgtaattacccagctcgtt

SEQ ID NO: 49696 - DNA, 411 bp, Zea mays
  Clone ID: MRT4577_145322C.1
aaccgcaacatttatttgggattcatttttagctccggggtacaaaaattgttgtttttaaaaaaacatttgcccgtgggggggggaaaaaactaatttgtcagccaagctgcccaataaaaatttgggggaagggtacaacaaaaaaataaaccccacgggtaagcattttaattggcaaaaaaactttgccggggggggaaaaattggcgtgccccacgtggtattgccccaatgttttatcaggatgcaacacctgtgtgctgcaccatggcatgctgatatattggatctggtatcccaaaagggggccagtattggaacacaaatttcccgagggtgtttttaactggaaggggcccccaattttgtgaataaaaacttgtgttttttttattccccaatacaaaa

SEQ ID NO: 49697 - DNA, 240 bp, Zea mays
  Clone ID: MRT4577_145323C.1
tcggtttggagaaactcccgcgttcgaggttatcgtgacattgataagactatggcagggcgcgcgcttcttctgcaactgggcttggcgcttagtcttttagatccacgccttcgacccggtggtgtacgaaccgttcaattaagacttctaagggacaagggtcagttccaagaaagatgaataccaaggtgagttgaagcatgcccagaatgaatctcatgaggactatggccttct

SEQ ID NO: 49698 - DNA, 605 bp, Zea mays
  unsure (1)..(605): unsure at all n locations
  Clone ID: MRT4577_145324C.1
ganactctagctccttgatggagcaaagactcgcatgcgtgcaagagggaacagaaaaattgcatgttgtcgcttaaaaaataaaatatatacctaaatgaaaagaaacacaaaaagaataggataaccaacaaataggagccaactagaacaaagacataacgggcggccaatatagaggacccaagactgagcagcgcgtgcatgcagaccttttctctccatctcttgtgggaccataagaccaatccaccggcctaaacccaacaacatactcgattgataaaacccagcgtttaccaaactaaaagccgttgcatcacatacccctttctccgaaagttgctacaggggaagagagcccccaccgtgcacccttacccaacagcgagccattcttgagggtcaaccgggacccgccctattagcaactccataacctccatgatcgggctgattacccccatcattaccgatccagtaacgagatgcccaacgaccccggacgtgcggtttctaccctaccttagtcgccacctcaacgggctttccaccggatgcttaaaatcgaggggctcctcaaggggaccctttaaatgattgac

SEQ ID NO: 49699 - DNA, 359 bp, Zea mays
  Clone ID: MRT4577_145325C.1
caactaccaacatacaaagcacaatagtgtaccaacaatgccacccaaaatatgcgggctccttatgctgcttgggctctatacaagaacatataccgccaccatacttccaaaatgctcgcaagctcctatagcttgccttgttcacccgtaactattaccatcaagagtcttctgtatgtgaaaacccaattcttcaaccctacagaatacaacagaccatcacacctggcatcttacctgtatcacccttgttactccaacaatcatcaaccctattacatcagctacctatggcgcatacattggcgcaaaacatcagggcacaacaactacaacaacttgtgctaacaaacctt

SEQ ID NO: 49700 - DNA, 497 bp, Zea mays
  Clone ID: MRT4577_145326C.1
acaggctgacatcttacaacattacgagctttggacttctacttacacatgataatcgaggaaattacggacaaccgatattcgacatcaagttaagggtagatatctgagtacaaagtgcacagcctacaattggtggggaactatactatccaaggacttacgaacgggctctaaccagggccataacattacgcatgctatacagcatacagagacaatacctaatccataccaactctcaagtgtggcttattcatatacacaaactcatctaacaccaccaaagaactgatacgctactgggtgcgagtgagcttaataaaaattacggaatgagaatagcacaggtgcgatgagggttcaaatgtactagaccaaggagacccattatgcgcaaatgcaaacccacacagtcggtcatccaaaatgaattaactccctgctgtctaaatcatggcttgagcagacggtcaagaccatagctgaatacatgc

SEQ ID NO: 49701 - DNA, 460 bp, Zea mays
  Clone ID: MRT4577_145327C.1
gcggagcttgagaggcttgcagcgagagggggcaggtcagggtgtaccaggagaagatcgccatgtggcaggcgcaggtcgaggagcggctcagagtgcttggtcagagaagtgctgaaggtgccactgctgcagtagtgcctaagaaggttgtcatggtgcaatggtctacttgttaggctatgttgaggtgggggtgaggcgtcctcttgtgctcctggggtacaagttttttcagttttcaaatagttacaagtattttggatttgattcagttctgctattttggatttgatatccagtatttggcagctacttcaatttcaatgtaatgattcttaagttcaactcctattatttggcttcaattacttaagtaaccttgggtaggatatgtaggaattttgcttcgtttttttgcttcttggggtgtcagttctgtggtctgtcatttttgaaa

SEQ ID NO: 49702 - DNA, 777 bp, Zea mays
  unsure (1)..(777): unsure at all n locations
  Clone ID: MRT4577_145328C.1
actcctatgggcgattgggaccctcgaggccggccgggatgtttcccctcctacccctcctcctccttctcacttcacctacatcttcttcctctgtcagcgctaaacctgaccttgcttctgacaataacatcctccccgacaatatcccaacttattcagccatgtctgttggaacctactctcttccggcgctgccgtacgcctacgatgcccttgagcctagcatctctgctcaaatcatggaacttcaccactcaaagcatcatcaagcctacgtaacaaacctcaacgtcgccctcaagaactacgccaccgctacttcatccagcgacatcgccggccagatcgcccttcagtccgccatcaagttcaacggcggcggccacatcaaccattctctcttctgggagaatctctgtccctccagctctccagactccaagcccgacagcgcccccacgctcggtgctgaaatctcaaagacgtggggcagcatcgaggctttccaggagaccttcaagaagactctgctgggtctgcagggcagcggctggggatggctggtcaaggacacgcagggcttgcgtatcgttaccaccaaggaccaggaccctgtcgtggggaggggaggtgcccatttttggcgtcgatatgtgngagcatgcctactacctgcagtacctgaacggaaaggctgcctatgttgacnacatctgggatgtcatcaactggaagaccgccgaggctcgcttcactggctcccgtgaggacgca

SEQ ID NO: 49703 - DNA, 858 bp, Zea mays
  Clone ID: MRT4577_145329C.1
aaaacccccacctataatagctacttctcactcagcccctgcttcctccaagcctccagctgacaaaagctaagcaatcgagctgacaagagctaagcaatcgagctgacaagagctaagcaatcgggggagttcactgatgtcttgcttcagcgccatgaccacgacgacgggcggcagaggcacctactactactcgtcctcgccggggcgaccccgcggcggcggcggcggcaagaggccgtggaggcggtggcgcgccaagtgcgccggcatcgccgcggccgtcgggtccaggctccggagatctgtcgtccgggccgtcgacggtggccgccggcgcacgccgccgccttcgtcctcatccgttcaccgcgggtggtgccaccaccaccaccacggccgccagagcttcgcgccggtctacgtcgacgacctctacagccacagcctacagccggcagccaaggcccaccgcggcgtcgtcgtgcagcaggtgcaggtgcatgagccgccgagcaccagcgcccgcgacaagctgccggcgatggatgcggctgcggctgcggctgcgcccgcgcacggcgccagtgccagcgccagcggcaacaggcagcaggcgcgcgccatggctgcgggcgtcgccgcgatgaggaacgtgctgctgcggagccccggcagaggcggcggcggcgtgctcggggtggtgagggaatatggggggaaggtggaaccctcagggccgagctcttcatcccgcagttcaagggagacatgcggctgcagagccagcgctcggcgggagagttgcaggccatgctcgcaagaggcctatgacacacgtaccataccatacat

SEQ ID NO: 49704 - DNA, 201 bp, Zea mays
  Clone ID: MRT4577_14532C.1
cctccgccgccgccgctgccgtctgcggcctgccgtactccggacctcctaagggtcatacacttgtggccgcccccaccggctgatgcgcgaacaccgccctactgcgccctgtccgcatgctgcgaaagcagagagcgacagccacaacgtagacagggccaagaccagcctagcggccataaccagaagcaggcacag

SEQ ID NO: 49705 - DNA, 224 bp, Zea mays
  Clone ID: MRT4577_145330C.1
aagcccaactcctttgacaggagggggggggcaattttattagaatggtttgctacatacccggccccttttgggggaatttggggcactggcctacaataagtcctcaaagggaaaccgccacaccaaaaaaaaaagctttattacagttgacaacaaaagcatgttatgacgggggggcctagcccaaggcaaattttttccccacaagggacttttttggg

SEQ ID NO: 49706 - DNA, 525 bp, Zea mays
  Clone ID: MRT4577_145331C.1
gggggtggatagaggttgactggggagaagttcaacaatgcagagtgtttatcaaacgtgcagactggtccatggtgatttgagtgaatacaatataatatattttgtagggacacttgtttattattgatgaaaaacaattatgttgatttgaatcaccctattaatttgggttgtatgaaataataattgcttgaatgtataatgagtttattaaaatacttgctgaaatgttgtgaaaactgtagaaactaataaataagatattgataataaaatgaggatataaaaggagacagattaatataaatacgatgaagatgagataccagagagcgtggaggacgcttcaaaagaagattaatttatatctttaatgattgggtatatagcaaactagattaagaagtaggatgaagatgttagtcaatatgtgaatatgacttcgtaaattgcctggaattgaatcaatacttatatgagcttaaagaccagaacttgatatttataaacaaaggctaaaaa

SEQ ID NO: 49707 - DNA, 352 bp, Zea mays
  unsure (1)..(352): unsure at all n locations
  Clone ID: MRT4577_145332C.1
ttatantttctttttaatttatttttttaggtttatatttttttttatgttttaccaatgtccaatctgccacaaaatcagaaactgtacattttgagcagctactggccttaacacggaggggacgacagatgcaaaaccaatccagcatccgaaaactttgtttgctcaaaagggccttctttcacataaaaacttttcagctatcgtatctttcgacaccaacatttgtacaaaccattttatttgaacagtcacctgttctaataatttcaggtacttagaacgccattatcagaaataggaaggctaggagatcaacaagccaagtgatcatgactgaaataacaaa

SEQ ID NO: 49708 - DNA, 591 bp, Zea mays
  unsure (1)..(591): unsure at all n locations
  Clone ID: MRT4577_145333C.1
gggcccggggccgggggggggggggggccggttttcagctcccctgggttttggggggtgatggaggttaaactcaagacccaagcagcaggcagcagggaacacgcacccaacacaccccccacccgccccccgcccccccccgcccgcccccccccaccccccccacccaaccaccaaacagcgggccacccccccagccccaaagttcggggttcttggttgccggggccctcccccccccccccccggccccccggcccactcagccggggcgcggggccccccccgccccctccctaaccccgaggggggggtgggggcttaccggcccctgacccggggaccacccggggcccccccttagtcgccggggcacgcggggcaggggccttctagttactagcgcccggccgccgggagaatgttccaagggccccctngaagggccctggggggccgaggggggcgcggcttgccccncgcccccctcctaccacggacctgacccgtaaggcccccctnccccgcgccccggcgcccccgggggagggnccccttccccccccgaaccggggggggggggggcgg

SEQ ID NO: 49709 - DNA, 558 bp, Zea mays
  Clone ID: MRT4577_145334C.1
tcgccggagtctgaccgacggacgaactatcgtgccgatcgtcgacatgcatgacgccagacgctacgatgctgctgacgaccgcgtgctatttgggatccagcacactaccgtgcactggagaccatagagaaagatctatcccaaccgggacttagcccgactctagaagcgagctcggcgagggcgagaatgcgccagcctcatggcgtgcacaggacagaaggaacggccgggcagaatctcctatatgccagagactaggatctgagtctacttgctccactatgtatcaatgcacaccgctgtacttatcaaaaccctaacctgatgctgaagaacgggttggatgtaagcatactgacactcatattttaggctatgatcacgacgccagtcggaatgcagcgctgaatctctaattgtgtgcaatataaaaaccaaaaaccttattgaaatggtgttgtccatgctacagattggcttgacatagaacagaggagaaaaacacacaacactaatgggtcacaaccatatgactcgtataaagatacatat

SEQ ID NO: 49710 - DNA, 236 bp, Zea mays
  Clone ID: MRT4577_145335C.1
tcgctcggtaataacaccctgatcagctcaaacggccgacaggactgccgactgcacctacctcgtaatccgtagaaaaaccgtagaaatctctagatcctgagccacatccgtgagctaggtcttgttccatgtctcgcaggatgcatggctactaccggactcctgagaccggcgatgctcagcggctgcgagagtgtcccatcctgctgttagtggtaccgcgatgccgtgca

SEQ ID NO: 49711 - DNA, 270 bp, Zea mays
  Clone ID: MRT4577_145336C.1
gaggagcgaactttacaaaactttccatttccagttttcaaatgacaattttttcactgaagtgcggcaaatcccgatgaccgatgaattttaacattaagcttggacgatcaaacttatcccccatttttcattttccaagtttttaccaagcccttaaagttcttttaaaggtcttggatttccccaacattttgggttgcccccaaaatgtaaaatcccacaatcccagggttttgtttttttttttcccaaaaaaaactttttttt

SEQ ID NO: 49712 - DNA, 368 bp, Zea mays
  Clone ID: MRT4577_145337C.1
ggggggagcccaaaaatatttgcattccttcatgggcccaatcccgacggagacgggggggggacaacaaaatgtcctggccccccccggccccggagctaactaaaaaccccggggccaacttgggggggtaaacccaagcctttttggcgacgggggccccaaggggggcaaaccagttctcaaggggcccctttcccgggaccaaggccccgaccaaaaaacccaacatggaaaacatggggagggggcccttcttgatccccttgaccctaaaccccgcaaaagggacggggtcctccgcaaggcccaaccggtcaaaaaacccgccccccgggtaaagggtgttgccctcccccaccccccca

SEQ ID NO: 49713 - DNA, 441 bp, Zea mays
  Clone ID: MRT4577_145338C.1
taaatatacgcccgccccaaactctcctccgcgccagaggagcttagaggacgattcctgtcgaccggaggacgttctcgcgaggccgctgtccttgtctaggctaccacgcgcgaaaggaagacaggagagaaggaggactaggaagtaaatgccctagcgaaacaagattacaaggacggaggcaaaaatgtatctgatcatgggaaattaactgtgtcagacattgaatacaggcatgtgaccgctgccataaaggtacaaaaggggcatgaaagtattatttctatacgagagcattatatcgacctgatctgctaatgatgtacctggccagactactcattatcaaccatgcagtgtatacgtacgatacctcaaaggcacaaagtgtaagcctttttgcaaaggtagccaacatttggggatgatgggagctct

SEQ ID NO: 49714 - DNA, 1435 bp, Zea mays
  unsure (1)..(1435): unsure at all n locations
  Clone ID: MRT4577_145339C.1
cattgggtacctcgcggcgctcgcgggggccgtgtttctgttaattcgtctcgttttctcccttcccctgcgggctggagagcggcggcgaacgagacaaggtcaccggtgacgctcctcacctactccctgccgcctttcgctttccggcccggcctgccgcaagctcgcgcgccgcctacatcgacccctccccgcgccgcaggccgcctcccacagacgcggggcagccacgtcgcccggctcggagggattcggttcggcccgtcgtgctcccctccgcactcttctattggcctggagagcagcggagatccaccagcaatttggattgcttctcctttttcttggatatacttggtctcctcggtgttggctaggcaatccagctttccaaagtgtgatcggacaggtttattttggttctgagatggctgatgaggactcatccgacttcaccttctgcagggttagttctgcagaaaatgacggtcaaccagaatctcctaaagccattcctatggcaagtatgacgctcgaggatgttcgtgttaaaagtgcagatacttcaaagaataatggcatgaaaactgttgactcagaaaaagataggtctggtaacaatgtcagtgtttcaacaaaagacgataacatgaaagcaccagttacacatacaggtagtggagcagaatcaaatgtcccattacaggcaaaacgttcatccaagaaacccgcagcacgggcaaaggttccttttgagaaaggctatagtcaaatggattggctaaaactgacacaaacacatcctgatctagctgggcttaaggggcagtcaaaccgaaggttaatttctttggaagaggttaagcagcacaaagcaggagattgtatttggacagttctcaaaggccgcgtgtacaacattgctccatacatgaaatttcatcctggaggtgttgatatgcttatgaaagccgctgggaaagactgcactgctttgttcaataaataccatgcttgggtaaatgcagagttcctcctggagaagtgccttgtcggattccttgatcccaccgcgtagatatccaggtctcatggcattttatcacacccggactgtttgtagggcaggcacctcagtcgacgaattaaagaatctaaatgtttgtatcacaacgggagtacaacaattaaattctgtttcaaaaagaaaacggaattgttatgacgatgagaaaaaatcagtctaatactggtatgccattacagtgcgaggtgaattacaacacctgatgaaattactgcattgtcaatatgaaaacatgtggttgtttatatatacctggggtataatcctttccaagcgctgtaatatgcatgtatattgtttttaaaaaaaaaaaaaaaaaaaaaaaaaaaaaaaancaatatacgt

SEQ ID NO: 49715 - DNA, 813 bp, Zea mays
  Clone ID: MRT4577_14533C.1
ctggccggggcgtaattcccccgtccaggcgtccagcacgctccagcgtaccacaagccgcgcatccaagctagtcctagatatagcacactagttgctgggcagcagcaggaagtcgcagcgttgcgtgatgaagaacaacccgagcttcgagaacacgtgcagcgccgccgccggcgggtccggctctggctccttcaacgtccggaacctgtccaaggtcatcctcccgccgctcggcgggccgtccggccagagccagtcccatggcgggtcggacaagtgggtcatctcgccgctcgactccagatacaggtggtgggacacgttgatggtagtcctggtggcgtactcggcgtgggtgtacccgttcgaggcggccttcatgaacgcgtccccgaagggcgggctggaggtggcggacatggtcgtggacctcttcctcgccgtcgacatcgtgctcaccttcttcgtcgcctacatcgaccccaggacccagctgctcgtccgcgacaggaagaagataaccctcaggtacctgtcgacgttcttcatcatggacgtggcatcgacgatcccgttccagagccttgcctacctcatcaccggcgaggtcagggagaacgctgcgtacagcatgctggacgtcctacgcctctggcggctccgcagggtcaagcagttgttcaccaggctcgagaaagacatccgcctcagctacttctggatccggagcgcgcgtctaatcgcggtgaccttgttcctggtccactgcgccgggtgcctgtactacctgatcgccgaccggtaccc

SEQ ID NO: 49716 - DNA, 437 bp, Zea mays
  unsure (1)..(437): unsure at all n locations
  Clone ID: MRT4577_145340C.1
aggcgttaaagtggggtgggtttagggtgttatgggaggacggattcaaaaccctatccgggataccatgtgggagaccctaaccctaatgagggggtgagtgatgtattaatagactgtgttaggtgggcctggcccattaccggcgtgagatagtaaatacacggcgtagaaccctaaaccggtacattaacatcacccactgtgtaatctctttgacgaatagcaacacggtaagtagagcgatcaatacgataatggcgatcacgaagagaagtccacatctgatgagactaataaaagtgaacaatcttggtagcacattgatccttcacactagcagcaagaacaaaacttgcacgagcatnctcatcgaaccacaacttgtaagcatcgaattgagactcatgatgccatgggatgatcaaaatcagcaa

SEQ ID NO: 49717 - DNA, 338 bp, Zea mays
  unsure (1)..(338): unsure at all n locations
  Clone ID: MRT4577_145341C.1
tggttacgcgtcggtggccgcgcgggaaagggttcggtcaaggtctacaattcgacgttaaccaccgggttacaaagatgatactacgatctaacaaggaccttgaccgtgtgcaagatggcgcgagtttcctcccagacgctactatactaaccgtgcctgtcgaggtactcaaggaaaacataatncactctcgagcctgatgtaccgaaagagaagctctatgtaatcgggaaactaggtctgcgtacccaacacatgatatacatcatgttctactatgggttttggtcatgcgactacctgatagacatggtgtgccggagatgcaacacact

SEQ ID NO: 49718 - DNA, 308 bp, Zea mays
  unsure (1)..(308): unsure at all n locations
  Clone ID: MRT4577_145342C.1
aaagnaaaaggggatccatcggtttgaaaccaaaaaatttgatctccttccatttttaaaaagctggggtttgtttaacacttcttttgcaagcgggtttgataatttaattaccttcacgagcaaaattgccccttttttttcaagcttttacacaggtttttaaagccacacaatttgttttttgaccaggtgttttttcccaagggttttctaaagttttttcaccaaattttaattcggaatttttttcaaaaattttgggcaaaggttgctttttccaaaaattaattcccccaaaagccccc

SEQ ID NO: 49719 - DNA, 426 bp, Zea mays
  unsure (1)..(426): unsure at all n locations
  Clone ID: MRT4577_145343C.1
gaggctcactaagnttcggcgggccggcccctttttttttntttttggggggtatttattttacatttttgagttgtggtggtcaaccaataggttattccacagttatctagggtttttacattgcttgagaagagaagcaggcggcagagaacatagcgaaagaaacatggccagtcggactgtctctgaggcgaagcagggaaagggaaggcagccagataaacaggtaacacatcataaactaccaacgcaagaaagaaagaaggggagacattactatggggtagcagtacagataataaagggtcggactggcaaccaccagtcttccagagatctagactccgtcgtcgcacctccaggtaacctcgccttgccctgcggcggtgccttactcggcaccggggcccttgggcaccgtga

SEQ ID NO: 49720 - DNA, 346 bp, Zea mays
  Clone ID: MRT4577_145344C.1
cccacaaaatttaactgaactcaaaaatgggcataataactgtccattattggggaaaaggctgttcccaaaacctactttccacatagaatataactaacttttttggaagcggttcaattttgacattgaccccccttgtgtccacaaaaccagaaaacttcaagcctcaaattttttcaagtggccaaattctaaggtgctgccaaaaaaatcgttccttcacggaatccaagcccatcgttttccttcttcccatcgagttctgttttgcaaaacctttcttaatccaacactgactacttttaaaatgggaaatcaggcctcttcttttttacggaaaatg

SEQ ID NO: 49721 - DNA, 131 bp, Zea mays
  Clone ID: MRT4577_145345C.1
ccgcttcaaagtgctctgtctgtcgcatgcatttcacttgtattacagctgatctaataactggacgtcctgctcagctcatatgatcaagcagctgctacagactgatgcagcagctgctgataggcaac

SEQ ID NO: 49722 - DNA, 683 bp, Zea mays
  Clone ID: MRT4577_145346C.1
attcaaccataagaaaagctgctcgccaaggtggtaagaaaaggttagcaggtttatcttatcatgaaggttctaattttccaagacgatctcggcaacttttctggagagcatgtgttggactaagccagacttcgtctcaacttgctctgcaggttagatatcttgatgctcacatcagatggaaggagttcatctctccagatcaaattccttcagatggaaaaagttctgacgctgacttttctgcactcagaaatgctgtactctgtgataaaaaaataatcgacaataagataagatacgcactgaagtttcccaaccaaaagcatcttcctgtccgtctgacaaaaaatatcttggaagcagaaagtgatcaggatgaaattagaaaaatgtggttttctgaaaaccacgtgccattgtacatgttacgagaatttgagcagcatgctgaggctagctccttgcctactccaggaattccggaatgttttaccaatttatacccaaggcgagtgaaagcacctgacagagatgttttttcatatctctttcacaagggagaagtctatccctgcgcgtcatgcaagaagggtgttctctacagggatattgttaaatgcagctcttgtcaaggtaattggcataaagagtgtacatcaagatctgcttgtagcaaa

SEQ ID NO: 49723 - DNA, 379 bp, Zea mays
  unsure (1)..(379): unsure at all n locations
  Clone ID: MRT4577_145347C.1
acaaaacgcaccgnagaggagaccggggagacaacgggagggaacacacaaaacagagaccccagagacacacagagaggcccgagaagaaggcggaaggaaaacacacngacgggagaagnaacacggngacaancaancagaacaccggagcaaggggaaacggaagccaacgggcggccncncaccnncaaaccaaacnangagaaacgcacggaaaagagcggcngaaggagaacagcgcgcccgccaggagaaaaagaaacaacaccacggccccgggccacacgaacaccaaacacgccnggcgacagcacagggaagaaaaaggaaaaaaaagggagagcgaacncgccacggagaaacccaaggcaagcaa

SEQ ID NO: 49724 - DNA, 817 bp, Zea mays
  Clone ID: MRT4577_145348C.1
ctgcgaactccggttcattctttaaaacgatctcaagttactcattttcatattttacttagctgctgtctcttacaccatcacgcctcacttcatcatccaaagaagattacccaccacgatgtttatgagactcttgattgccttgtcgctggtttctctattagcacaagaggttatttctgaaggcgtctccccgtcatcgtctactctgggttcccatcttgcgactcgcagtgccagcacggtactgaagtctgaattcagcgacattcatgacgaaatcatcaaggctcgcgagccgctcgcgcgtgcctgccaggaaaacgacgagccttctgtcgtgtcaacattcgaagagtttcaaaaatccttccaaaccctagccaacagctgctctaagacgtacaatcagaacaggaaatctccgtcgcaatttgcacgcggcttcatcatgatattggtcgagttccaacctttgctggagagtttgcagcctcacccagcgttattgcgagcctgttttcactctttccgaagctcgtcccacagtatcaacacgatgatttctttcctcaaggcgggaaaggttgacctggagtcagaagtccacaacgccggggccggcctcgatttgcaactctttgcgcagtgcggcttcaagatcaacctatcttcctgagcatttccctcgcattcacgccggacattttttgcttctcctgatacttttcaagaaggtctctctcaccccagtcatcatttgcagcacatattccccttccctcagtgacttttgaggtcccactcttactac

SEQ ID NO: 49725 - DNA, 278 bp, Zea mays
  Clone ID: MRT4577_145349C.1
tttttcacgcgtgcgcgcacgcttactgtgagggactattaggcacctggctactctatgtatagcaccacaccacagcttgtctggactcaccttaggagctaccgcaggctgttgcacgatatcagatagcatgatcaattcatggaagtactgtggcgaactgtctgtggactgctggctggcatccttcttgaactattttagaactcctgactgaacagattaaattcttaatgatgtcgcattgtgaactagagttcatcctcaagatcaca

SEQ ID NO: 49726 - DNA, 3089 bp, Zea mays
  Clone ID: MRT4577_14534C.1
ccggccggatatcattgcctttctcgaggccggccgggactgttttcgatgccggcctcccggatctgatttggttctcgctttcccttcgcctttctcggccggtcccagctgctgctttttcttcgtcgtaatccccgtccagcgagctgcagcgcaccacagtccacaaactgctgatcgatcctagctgctaggctggctggagcaggaattgaagcaggcagctagctagctagcattgcgtgatgaagaagaacaactccagcattgagagcacgggcggcggcggcggcacggtgtcgggatccggctccggctccggctccttcaacctccggaacctgtccaaggtcatcctcccgccgctcggcgggccgtccggcggccaaagccagtcgcatggcgggtcggacaagtgggtcgtctcgccgctcgactccagatacaggtggtgggatacgttcatggtggtcctggtggcgtactcggcgtgggtgtacccgttcgaggtggccttcatgaacgcgtcccccaagggcgggctggaggtggcggacatcgtcgtggacctcttcttcgccgtcgacatagtgctcaccttcttcgttgcctacatcgacggcaggacccagctcctcgtccgtgacaggaagaagataacactcaggtacctatcgacgttcttcatcatggacgtggcatcgacgatcccgttccagggccttgcctacctcatcaccggcgaggtcagggaaaacgccgtgtacagtatgctgggcgtcctacgcctttggcgtctgcgaagggtcaagcagttcttcaccaggctcgagaaggacatccgcttcagctacttctggatccgcagcgcgggtctcgtcgcggtgaccttgttcctggtccactgcgccgggtgcctgtactacctgatcgccgaccggtacccggaccggcagaagacgtggatcggcgcggtgatccccaacttccggcaggccagcctgcggatccgctacatctcttccatctactggtccatcaccaccatgaccaccgtcggctacggcgacctgcacgcccagaacaacgtcgagatgatcttcaacattttctacatgctcttcaacctcgggctcaccgcctacctcatcggcaacatgaccaacctcgtcgtcgagggcacccgccgcaccatggagtttaggaacagcatcagggcggcgtcgagcttcgtgggccggaaccacctgcctccgcggctgaagcagcagatcctggcctacatgtgcctcaagttcagggcggagagcctgaaccagcagcagctcatggaccagctgcccaagtccatctgcaagagcatctgcgagcacctcttcgtgccggtcgtcaaggacgtctacctcttcaggggggtctcaagagaaatgctcctgtccctggtcaccaagatgaaaccggagtacatcccgcccaaggaggacgtgatagtgcagaacgaggccccggacgacgtgtacgtcgtcgtctccggcgaggtggaggtcatactgttcgacggcatctacgagcaggtgcaggccacgctgggggcgcgggacatcttcggcgaggtgagcgcgctgagcgaccgggcgcaggccttcacgttccggacgaggactctcagccagctgctgcggctgaagcaggctacgctcaaggaggccatgcagagcaggcccgaagacagcgtcgtcgtcatcaagaacttcctcaagcatcaggtcgagatgcatggcatgaaggtcgaggacttgctgggagacaacaccggcgagcacgacgacgacgcgaatgtgctgacggtcgccgcgatgggaaacagcggcttactcgaggacctcctcagggcaggcaaggccgccgacgtcggtgacgccaagggcagaacagcattgcacatcgcggcgtccaaggggtacgaggactgcgtgctggtgctactcaagcacgcgtgcaatgtgaacatcagggacgcgcagggcaacacggcgatgtggaacgccatcgcggcggggcaccacaagatcttcaacctcctgtaccaattcgggcgcgcgtcgaacccgcgcgccggcggagacgtgatgtgcctcgcggcgcgccgcggccacctcggcgcgctccaggagctcctcaagctcggcctggacgtggactcggaggaccacgacggcgccaccgcgctgcgcgtcgcgatggccgagggccacgcggatgcggccaggttcctgatcttgaacggggccagcgtggacaaggcgagcctcgacgacgacgacggctcaggttcaggctccggctctggcgccgcgcggctagcaatgtcgcccaccgagctgcgcgagctgctgcagaagcgggagctcggccactcgataacgatccacgactcgccagcggtggtcccgaacggcggctcgtcggggcacagccgtccaggcagattacagagcacaagttcggacagccagcgctggcctcgggtgagcgtatacaagggccaccctttcctcagaaaccgcacctctgaagctggcaagctgatcaacctaccaggcaccatggaagaattcaaagtcatcgtcggtgagaaactgaaagttgacgcggagaaggcgttgatcgtgagcgacgaaggagcggagatcgactcgatcgacgtgatccgggacaacgacaagctgttcatggtcaccgaagaagatctgaggcggctggcatcaatggactggctgtcgtgcgagtgatttggttcctcccaagataattggaggctaaatatagaatacagtacaagagtattgtgcttctactatgtctaggattgatagattgatgacaactactgagtggcatgagctctatccagcgactaatttgcatgcaatgtgtaccatgagatcggaccactgtccgttattaatgcagggtcattcttcttgtaaattcaaaaaaaaaaatcataggccctcatattgggtacacacagacggttcaaagatgtagttcaacaagctaaaaaaaaaaaaaaaaaagcggcc

SEQ ID NO: 49727 - DNA, 641 bp, Zea mays
  Clone ID: MRT4577_145350C.1
ccctcttcgagtttttttttttttttttttttttttttttttttttttttttttttttttttttttttttttttttttttttttttttttttttttttttttttggggaaaaaaaaaatttttgggggaaccccttttggtcccttgggtcccgaaaaaatggaaaaaccaaaaaaccggggaaacccctttttttttttttttccctaaaataagaaaggggttaaggggccccaaaaaaaaaaaggggggggggggttttccaccccaaaaaaaaaaatgcccccggggggaaaaaaaaacagggggcggggtttaaggataaacccccgtttcttgccctttaccttttacccttaacccatttggaaaaaagaaattgcccccgggggaaattggggggggggcccccggcctaaattggccctttttttaaacccgggggggcccgggtttttgggggaaacccccccaagggctttaaaaagttcccggggggggaacccaaaaaggggcccgggtttaaaacccttttaacccttaagggggggcccttggtttaaccgggaaaaaaagggttctttctaaaaaaaaagagcccaaaaaatttttggcttttaaacccaacccctcggggaaaa

SEQ ID NO: 49728 - DNA, 192 bp, Zea mays
  Clone ID: MRT4577_145351C.1
aagacacatccagggacagaccgagcaacacatgaagctcttgctgtgacattggatgtgagattctataccccttgcgattactcacgcatttacgtagactttcacattagtactcaccggtattgcaacggttatgacacagtttgagccactgtgtctcgtactgttaactcgaaacctatcttctag

SEQ ID NO: 49729 - DNA, 797 bp, Zea mays
  unsure (1)..(797): unsure at all n locations
  Clone ID: MRT4577_145352C.1
ntagggccttttttttaggggccttttttaagaagcgacagacgtacatgtctccttagtccattatgatgtcacccatgtctccatgattcatgattggcagtatatacagcaggaccaagcaatttactttagggtaccggctgctgaaatacaactatgtaacacgacacgacaactttctatgcctacaccttcactatgcaccattgaatgttcacaagtccttgtctccttgaacatagaaggctatatccctatgaaaaaatgccaatcttaaagcatcttcactttgacttctttcgaaatcgttgccgcttcttgcctccggagttgttacttccatcccaagcacttccccagaaaaacaatgacatccagaacagaacggcaaagaagatccttgctctatcctgcaaacttgacagcctctcttgccaaccgtgcggggatggaggagggggctctgaggagggcggcgagggcccggcggcggctcgacagcgtatgccgggcaagggacgacagcctgggcccagagcaatcgagaaaggcacagcggcggcggccgccactggtgctggccagaagcgaaggcgcggaacgaaagggcgcagtggccggagacgcgagacggaggtggtggcggtggacgcgggggcagctggaggggaggtcggcgtcgccatcgggaaggttcgtccggagagtggggaaagacgtggctgtccggaggttaggcgagtcgtgttcgctgtcctgtttaggatctcgctgttcaccgccaggagtcgcga

SEQ ID NO: 49730 - DNA, 823 bp, Zea mays
  Clone ID: MRT4577_145353C.1
ggcggcctcgaggccggaaggaaaaaaacgggaagacagccttatcctcagccacgaaccgcccctcagtccctcacccttgagtccacacgctctggcgcacgcgcacggcgcacaccatggccgctgccttagcttcgcttctccacctcgcgaccccgacccagactcgctccactcacctcgccgtccgcctccccagcgcccagctgccgcgctggccgtcggggtcacgcatcgccgccgcgcagccgccgcgggcgtacaaggtgacgatcgagcacggcggcgagtcgcgggtggtggaggtggaggaggacgagacgatcctgtcccgcgcgctggacgagggcctggacgtgccgcacgactgcaagctcggcgtgtgcatgacgtgcccggcgcggctggtctccgggacggtggaccagagcgacggcatgctcagcgacgacgtcgtcgcgcgggggtacgcgctgctctgcgccgcgtacccgcgctccgactgcaccatccgcgtcatccccgaggacgagctgctcaaggtccagctcgccaccgccgacgactgactgacgctccgccgatgaccagcggaccggccagcaggcatcaacctccggcggtgtaatgatgctggccctgggacttgtacaccattgttgactagtagcactagtgacagagcttttctcgagaatagatgctgtgtgatatgcctctctgccaaatttctggtatccaaatcgagcatttcccgacgtgtggtagcatactgctgattgtctccactttctcagtggttaatgatgcttcagttctg

SEQ ID NO: 49731 - DNA, 588 bp, Zea mays
  Clone ID: MRT4577_145354C.1
gtggaccgaacaaacctttccgcaaatttccccttccccgcacaccgaacgaactctcgatctgatccctatccttgcagggcccgcctcggctcaccgatccggccccggatccgctcgtcgctcgacgggatctctcgattgtagtttagacaagcatgctgcatcaggagaacagtgagccgttcctgaggcaccactctgagcagcttgcatgtggcaacatgaggggagcagataatggtcgtccgaatttccttcctgagaagtgccagattgcagtttgtcctgaagtttgccagaggggtgaaaaagttagcctatttgatgaagagctggtacatggtgttgatctaaccaatcatactgctcagtcaccattggtgccaagtggtgtcaaggaaacaccgatagtggatcataacaagagacctgcatccagtgacatgctggacatagttgaatgcaaacgggtgaagcaggaaggtcaaatcgtaactaaggaagacaaccatacattctgccgagggatttcatgaagtgccccacattacacgactttgcagaagaagctttgacttaccactt

SEQ ID NO: 49732 - DNA, 1752 bp, Zea mays
  unsure (1)..(1752): unsure at all n locations
  Clone ID: MRT4577_145355C.1
ggccgcttttttttttttttttttaggggtagcaaactgatacagcattgngattcattcgagggtctgatttggtgacaaggggatcccgggaggattgaaggggattgagggggaaatcaactaatttccttctaaccccctacccatcacctaggattttagcctctccattccccttctcccaaatatgctattatcaggtcagtcacacgtttttggggtagcaaactgatacagcattggaattcattggaaggggatatacaagtacagagtgtatgcaagggaaatagagcagatactgcaacctctcaagtacgacaatactttattaatacaacttatcatatattttatcgctcagggcattgttgatacatgtttttctacagctttgcacccagatactgattaagagctcccaagcagcttcttgatatccttctcaatgctcaggggtgaagtggttggagcatagcgatccacaacacgtccctccttgtcaaccaagaacttggaaaagttccacttgatgctgtcgccgaaaaggccacctttgctagatttcaagaacttgtagatgggcgcagcattgctaccgttgacatcaaccttgtcgaagatggggtactcagccttgaagcgtgtgcaggcaaactggacaatctcctcattggtaccaggctcctgcccaccaaactggttgcatgggaaagccaggatttcaaagccttggtccttgtacttctcatagagctgggccagctcagtgtagttggagttggttaagccacactgggatgcgacgttaacaatgagaagaaccttccccttgtaggtgctgaggtcaacgtctttgccgctcgcatccttgacgatgaagtcgtggacggaggtggcggtcgacgaggcggccatgatgaggcgaacggcgggcgggcgggcggcggtggcgaactagcgggatccgggaggggcgtttacggctgtgagacggttttttttttttttttttttttttttttttttttttttttttttttttcgaggcagatcctgcaccctttaaggtccggaattacttattaatacacgtttatcatattttttatcgctcagggctttgttgatacatgtttttctacagttttgcccccaaattttgtttaaaagctcccaagcagcttcttgatatccttctaaatgctcaaaggggaaggggttggagcatagcgatccacaacacgtccctccttgtaaaccaagaatttggaaaagttccacttgttgctggcgccgaaaaggccacctttgctagatttcaggaacttgtagatgggcgcagcattgttaccgttgacgtcaacctacaagttcttgaaatctagcaaaggtggccttttcggcgacagcatcaagtggaacttttccaagttcttggttgacaaggagggacgtgttgtggatcgctatgctccaaccacttcacccctgagcattgagaaggatatcaagaagctgcttgggagctcttaaacggtatctgggtgcaaaactgtagaaaaacatgtatcaacaatgccctgagcgataaaatatatgataagctgtattaataaagtattgtcgtacttgagaggttgcagtatctgctctatttcccttgcatacactctgtacttgtatatccccttcgaatgaattccaatgctgtatcagtttgctaaaaaaaaaaaaaaaaaagcggcc

SEQ ID NO: 49733 - DNA, 407 bp, Zea mays
  Clone ID: MRT4577_145356C.1
gattttcttaggaattgtagcttctaaacgttgcacgaatgaaactgttaatgcaaaacaagacaaaccggctatagttatattgagttgggccatggaattatggatccattttgagtctgaagtagctcacttggtacaaataggtcaataaaagaatttattgccttcagataaaaagatggaaaaagtggagaaatgttaatccataatgaattaatgatgctgttttgagaatgtctattgattgtgaggatgacacgtaggtccaacatgttaatgatacagaaacaagcaatgtcacttttgaaattgcaaattttcactagtctgctcggaagttgtttccttgaactactaacaaaggataaaattcatccgaaatgttgctctttgttgtgcataac

SEQ ID NO: 49734 - DNA, 311 bp, Zea mays
  Clone ID: MRT4577_145357C.1
cccacgcgtacgaagaaactcagacacagctacttcgccccaatcattaaacacaaccacaccctcaacgttgggtttcttctagctaccgcagccctaaatacaatcttacagctccctgactaacaaaccacactcgcactacccctagaaactgaaccagctcaacccaactccaaacagcatcatcagccctcactactagcgcagtcaacttgcaacttcaccaactaataccacctctgcatcgaacctctcgccgactaccacgccagatacaccgacgacctacatgacctcagtgccatcca

SEQ ID NO: 49735 - DNA, 591 bp, Zea mays
  Clone ID: MRT4577_145358C.1
gggaccctacgagccggccgggccgagatttcacgcagccgcagcacaatcgcctcgtcttcccttccccccagcccccgtctctctctctctctctctgtctctctctcgtagccgcgtccatctcgcagcagcaagcaagcgcgaccaaatggcgcctctaggagacggcggagctgctgccgcggcggcgtccaacaacctggtggtgtcgaatactgagatggtcaacgatctacctccttaagatcgtgaatgggactacatcaaagctgtatctgttgccaggaatatctacctaagacaactgatcggattctgtggatttcagaagatctatagcgaccgtcatatatatgtatcccacccaccacccttctgtaatagtagagcctctgctgcaagaaacatcctgcatcagatgcagataatgtgcatcttcgaagaaaatcccaatgatgtacgcctcatcactaaccagaaaaagagggatctagagcaattgatttgcaggttttatgatctatagtgagacgtagtttctttgttttcaatggcatcatgctagatgattcataagagaattattta

SEQ ID NO: 49736 - DNA, 147 bp, Zea mays
  Clone ID: MRT4577_145359C.1
gcggtctccttccacaaccagattttccgtaaccttgcagctcggtaagggccttatggcgtcggaccaggtgctgtacgcggaccctaggttcagtcccaccgttgacgctcttgcccaaagcacgatgtcgttctagcggacctt

SEQ ID NO: 49737 - DNA, 192 bp, Zea mays
  Clone ID: MRT4577_14535C.1
tcttcctaaactatctctatttcacattactactcccatctctaccctctctactttcggcaacgattcacacttaactttgatggctacagactcatcctgtcgattactctaacgctctaacctccatgcatactggtacttgcatcaacgtatctacccacttcaatcgaatataaagcttcaaacatc

SEQ ID NO: 49738 - DNA, 237 bp, Zea mays
  Clone ID: MRT4577_145360C.1
gggggggggcgaatctatcccaccgatatttggactggattaatatttctaaaactgctctcacaattgccccaaagaggccttcccaaaaaaacccacgttttcttacccgaactttgactaaattttcaactggggctccatttataatgggccggttccaacgtccacaaagttttgcccaaaaaaatgaaaagggtcccgcttgggggagggacctcctttgtaatttccgaa

SEQ ID NO: 49739 - DNA, 608 bp, Zea mays
  Clone ID: MRT4577_145361C.1
aattcggcacgaggttggaaggaggcaggggcgggacagtaggaatacataaattttctaggttttcagccgccctatgcctgacgcatccacgcacccacgcctgtctccgcacacacacacgcacaggcaccgctcgtccgctccagctcttgcgtcgcacggacagacacagctccaccctccatagctcttcttgccgctgcttgtgcgccggatcgccgcccccggcctgagtcttcggacagtgcgtccgcggcagagcatctgcggcctgccccctgcgggcggcggcgccagtgcggctcgccccctctggccgtcttggcctgattggaccgaggtttgtgattttgtgaagcgcgagcatctggtgggcacgtggtgacaacctgagattagagaaaccacattccaaatttttaattcaaacagaaccaggaggagggacatggagggggtcgccaagtcgtccacgagctcggggtctgggttcacggttagggcctccgtcgccgcggcctccatagaggagaggttcgccgatctgtgcaaggccaagctgggactggacgagagcacgacgaggcagtcaatgcaagctcttg

SEQ ID NO: 49740 - DNA, 375 bp, Zea mays
  Clone ID: MRT4577_145362C.1
ggcaaggaccgggccgtcacgtacaattacggggagcacgacgagcgacatacgagaccgagcaagcgtcgccgacgccctaccgcttctatgcgatgggagccccgtacgacccatacgtggacgccaccaggctcattccgaggaccatgatgacctggaggtcggtctggttctggtcccagctggagtcgtacaatcacgatatcgcctgccacatgcacgtcagccacctcgagctcggcaacaggctgtacagcacgctgtccatgcactgtgacaagctcagtggccaggaacgacgcgatcggaaacaccctagcgaggaacagaccggaagcgcgcacgtgcacgagaaagccagctgactgcaac

SEQ ID NO: 49741 - DNA, 557 bp, Zea mays
  Clone ID: MRT4577_145363C.1
cccacgcgttccgctttcgctccatcccttacatagcgctcggcacaccggctctcaggacggtggcgctcaggctcgggctctcaagcgacggcgtcaacggcttcccctcctgcctacggtcctccgcacaccggccggagaccctgatgaacagtattatggcggagagcgcgggtgagagcacaagggtggaaagtactcctatactatgctgaagatcttatggctggcctttgctgcagcaccgactgacacgacaatgcacaagtccgtgccggagtgcataggctgctgtctgcctgtcgataccagtctgaccatctcaaaatgcatctcaaagagtatcacgaaaaaatacactactgcgaagaaaagattgacaaagcaaaggctgaaaacattactgacgatgaactcaatgcgctacaaagcaagatggaagaaaaaatgcaggaagagaaacagcttcgacaagagctaaaagagttacatgatgagcttggtgacctacaaagcctaagactttctatgaaagaaagaaaggacgctgtgaa

SEQ ID NO: 49742 - DNA, 466 bp, Zea mays
  Clone ID: MRT4577_145364C.1
cccacgcgtgcggtcatgatcttttgaagcaggagtatgatcgatcaaaaggtaatttgtagttcacacttcgatcggatatttgctgcagttcgagcttttctctatctgatttgcgtcctttttcactggaaacattaagttatgaagcaactaaacgggtattttgtccatccattcttccaggcgcctccagcacacctgattctggtgttcaaccaggggctacaacaaacgaggaaagtgccgtggaagtagcagttccagtggtgagttccttacatgatgaatgtgctgccagaagcctcattcctcctactcaagatcaccagcagaggacaggaagagatcctttcatcacggccacttcacaagaattggggggttctctatcgtcatacatgatgtcaaggcaacttggggcaagtctaggaatgtcactggtagctctcattatcctaatgca

SEQ ID NO: 49743 - DNA, 220 bp, Zea mays
  Clone ID: MRT4577_145365C.1
ctcacgcgtccgccaacacatccgagaacagggaaatttattaactgtactactgccaacgggacttctttcaagcatactatctttttgatcaaaaactgccaaaccatcctatcaatactagttttctcatagtagacattcaaagactcaaaaatgttgtcataaatcacatcgaccaatgctaaggaaaaatataaacccttcattctctggaacc

SEQ ID NO: 49744 - DNA, 610 bp, Zea mays
  Clone ID: MRT4577_145366C.1
ggccggggcaacaatacacataagagaagggaagcaccatgaactcttctcttccccagactcgaaggacgcaacgggcatggctccgctgccccgccgcatagggggcaaatgtctcctcgccgcagacggcgcgcccacggccaacgccaagatccctcaagcgggaggggtaacgacctgatgaccaagaacggcctccccaatggggtcagcccggacgccgtcacctcctacagactcgaggaggccacgggcgccttcgagatccacctcgacagcacctgctaagtccacttcagatctcacctcgtatactacgagaggaccataacaggcaagctctccagggccgacatctcggacctctccgacgtccaggccgagaagctcttcctctggtgctacttcacgaggatggtcgcggaccccgaccaggtcaccatcgattcccaggacgaattcgtctctgagtcgctatcagcctccatgtttgacgaggagcgcaactgcggacccagagctggagaggaactgcgcgaggcgcctggggacatcgtaaaacttgagaatgctccccgttgcgcagggaagaaaccccgagattgac

SEQ ID NO: 49745 - DNA, 225 bp, Zea mays
  Clone ID: MRT4577_145367C.1
ttgcccctcaagccgttctacaggtttcatctctcgtttacgtggcctgagcgtttcagctcgtgcgccgccatggagctaaatcatctccatcagattggagacgccggacagggcaccaccaccaccaccacgctgggcacagtcgtccccgttccatcgagcaggcttgaggcgcagggcataactgatgcttcagttacctgaataatggggcaacctatt

SEQ ID NO: 49746 - DNA, 571 bp, Zea mays
  unsure (1)..(571): unsure at all n locations
  Clone ID: MRT4577_145368C.1
ggattctcgctttgttttaaatttggagactacctgcataatatgccgctgaaccatattttgtcttgactttaatttctattttttctgcattatttattgtcgcatatgcatctgactgaatctaatttttagtaatttcacataactgtcatttggttgatggtattggaggttatgggtaatcatgttggtgttacagttggtggtgcgaatgggcattattgtttcctttgttagcagatgtagagttcctctgattttaattgctagattttacatttatttttagaattttagaaatttgtatggctaactaacacctatgtagcaagtgttacagggatgttagtaacccattttttgttgccgctagcttgtagtattttttatactccaaaagttctttntacctctaccctgttagttgctggtattttatctgtcaaagcttagctcgagtttcaatcgtatgtagtcctgaatttgcaaccaattacaaacccatgcanaaaagatgttcaccggacactacttatttatttcataatctgtctttctagtgcatact

SEQ ID NO: 49747 - DNA, 733 bp, Zea mays
  Clone ID: MRT4577_145369C.1
gggggcagcggcacgcagccggaaagtgaggcaggcgtggtgaagggcagggggaggcttgcaccgcagagaagccaattcagcgttagtagtagaagagcagagagggagagggaggaagagccacgcgacgagagccgaggagccatccaccgcccgcctaatccttgttcgctgctagattcgccagaccaccgaggcgctgctccccggatctacggggcggcgtcggtgctcatcggaatccagagaggtggcggttgtttgccggggatcggcgccgcatgtctcagatctgagatggacaggatccgggacggcaggaggggcgggtgtcggtcggaggcgttccgccgccgccgcctccgaggaggcgcctcaggagcaacggcggagggggccccagggactcgcctcgctccgagcgccgacggggcgagcgcctcatgctcaacggcgggggtggctgcgccagtcgggacgacggcgacgacatctccgacgagagcctcggcgacgacgacgacgacgccgagcaggagctcgtgccgcggtaccaccagcagcggcggtcaccgagcacggcgccacctccttcctcgccacctccgcccggcgggggccaccacagcagtagtagcagcggtggcgggggggttatacaaccaccatcacggccagcaccaccagatgcagtgggaagggcggctccaatcccatcgtgtccaaggct

SEQ ID NO: 49748 - DNA, 810 bp, Zea mays
  Clone ID: MRT4577_14536C.1
ctcgaggccggccgggccgggcctaggccttccgcgatgaggagtcgcctcctccttcctccgtcgtggcgttctcgggcgccgcctccgcgagcaagatgcctctcccgtccctgccatcctcgccccgctccccgcgagatgagcgactcctactgccccgactgcaagaagcagacggaggtggcgttcgaccactcggcgggggacacggtgtgcaccgagtctggcctcgtcctcgaggcgcactccgtcgacgagacctccgagtggtgtaccttcgccaacgagtccaacgacaacgaccctgtccgcgtcggcggcccctccagcccgctcctcactgacggcggcctctccaccgtcatcgccaagcccaacggcgcccagggcgacttcctctcctcctccctcggcaggtggcagaaccgcggctccaaccccgaccgatccctcattctcgccttccgcaccatcgccaacatggctgacagctgaagtactgtggcactgggtctgacagtttgtgttgtccaaaggatggtcagtggaacatgataaaaaagcaagtagtagatggtgcaagggtgggcaactgggcctgcgttaacttttgtcaagagttgcgtgcagatagtgttggtaaattttgctctgatctggttaagtggtctcgcactactggagtggacatggataacttgagacttccaatatacaccgctcgtcctggacaagctgaaactgatcttcgtaggctctattaagatgctcggaacaagctaagagggcaaaaggttgatcttttgc

SEQ ID NO: 49749 - DNA, 259 bp, Zea mays
  Clone ID: MRT4577_145370C.1
gcgggtggcctagtggaggagaaggtgggatcccatccagaacttctacccagcatagccccgtcgcagaatttagtctcaaaggaaacttcaaccacagcactgcaggcctctgttgccagaccagagctggaggtaaatgctgccatagtctctggacaaagcagtgagcccaaagagatagttgaaaagtccaaaatcccaggccgaagaaactcccgaactgaagagccaactgtggcctctgaaagtgtggaaa

SEQ ID NO: 49750 - DNA, 478 bp, Zea mays
  Clone ID: MRT4577_145371C.1
attaaacattttaaacgaggtattattttaattttgaggactcaaatatatgactgcagacgactccgatagtcccagtagacgactgagcacagccacgtgatcacgccatggacgccgctgtcgcgccgctcctcgcagtcgccgtccttctcttcctgggcctccggcggcgcgggggccaccgcaaccactgcccctacccgaaccccgtgctcggcaacgtggtgcccctggtccgcaacctgcaccgcttcctcgactgggccaccgaccagctcacggccgccccgtcctccaccatagaggtgcgcggcgcgctcggcctcggccgcggcgtcgccacggcggacccgggcgtcgtcaaccacatgctgcgggcgaggtttcccaactacgttaagggcgcgcgcttcgcggggcccttcggcgacctcctcggcagcggcatcttcctcgcggacggccgcctgtggag

SEQ ID NO: 49751 - DNA, 513 bp, Zea mays
  Clone ID: MRT4577_145372C.1
ggacaggggacgaatgtgtttggaattttagctggatgaactcaaccaaatgtttctgtacaggttggggctgctgcatcgcatgcagttattttgtcacaatttcccccatcatctcccgaactaaaagaccgctcaaccctggacatcacgcaatacagcgtcgagggggatcgagaggcgagagccggccggcgtggcggcgcctcgtcctcggtcgatcgcggtattcgcatcggcagatgagaaagaaaaccaaaagaatataaataagtaagcggagcccaaagaggagagatggaggtattaattggagcggtggatctagtcctaggcctcctccacgatgctgtcgagctgcggcctccacacgccgacgcgggcgccgctccggcgccgccggtggccgccgccgctcgacgcggccttctcggagagcagccgctccccgaggtaggcgtcctgctccgcagtgtcgccgtcggcgctcttcttgccgcgcaggtggcggcg

SEQ ID NO: 49752 - DNA, 326 bp, Zea mays
  Clone ID: MRT4577_145373C.1
ggttctccctcgctccagatctccctgggcagccgggcagggaccccttcacagcgcgggatatggcttatcaggatgccccactagcagttgaggctccaaccccagttctcggagagccaatggacttgatgactgcgctccagctggtagatgaagaagtcaagtgctcatgatggacttgtgaaagacctacgcgaggctgacaaagccattgacaagcatgctgctcatctttgcgtacttgctgatgacttagaccagccatattatgttaagctcgtgacggcgctctttgctgaacacaatgttcaccttggcactgt

SEQ ID NO: 49753 - DNA, 486 bp, Zea mays
  Clone ID: MRT4577_145374C.1
tggcttggaacctttgggctgatttatgtgcttgtttatgtgcttgtgtcttcctatccttctgtcggtttacaaacacacactcacggactgttactgagtaaccacaactctatagaacaacaaatactacggggtaagttctatggtctgcttcttctgttgctgcggtgtcgtcgcttgttggttcttctttgtaggtgtcgggcaagggcaggggaggtaggggatatggcggtgttgctaatttgtaggctgttggtactcgtctctgtattttgcctttggaggcgcgtatgcttattgttgggtggtatgtgcttaagcatttggctactgataattcggttgcgtcgaatacgtatgcggatgtgcctgttaagtgtattgtgtaggtgtgtaagtatgctgtgaggctggtttgtattactttgttgtagtagatgtaggtgtctatgcctcgtgatattacgcatacgaatatgt

SEQ ID NO: 49754 - DNA, 340 bp, Zea mays
  Clone ID: MRT4577_145375C.1
cgtctgtgttcttgttcgtacgcgtacttagcccctatcctaattgtcctcctttcagtcctttccgatccctcactcgccttccctcgcttcaagatgcatatctttgtgaagaccctcaccggcaagactatcaccctcgaggtggagtcttctgacaccattgacaatgtcaaggctaagatccaggacaaggagggcatccttcctgaccagcatcgccttatcttctccttctagcatcttgaggacagtcgtacacttgctttactactacatcctgatcgattcatcccttcattttttgcttttccttatagtttgcattcatatctttttt

SEQ ID NO: 49755 - DNA, 215 bp, Zea mays
  unsure (1)..(215): unsure at all n locations
  Clone ID: MRT4577_145376C.1
cccacgcgtacacccacacattctaaccctacaccattctctttattttctttcaccccaccaccacncctgcgttgtgtcttttaaacccgtgtgtcgcggcacataccaatccatctcctccctnctctacccctcttactccccctaccatcttatcatcattatcaaatacattattctctctcttcactcacttcacatatcctcttcca

SEQ ID NO: 49756 - DNA, 525 bp, Zea mays
  unsure (1)..(525): unsure at all n locations
  Clone ID: MRT4577_145377C.1
ccaaacatggttaaaaaaccaaaaaataataatatagtaaaatataacataggggggcctaaaactttgggggaaacgtaaacaacgagaggggggggggaaatcagagtggcatacattttttggggcctggtcccaggatcatacccaagcccatgcatacccacacgtttacatacgatagattacgtacccacccttattggggcataaaacgagggcatacatacgtacgcgcgcacaaaagggggggcgctcgatataactctaacacccacgcgtagcacacggggggggacgacaatccggggggatcaatcagccgaagaaggggggttttttttggccgccggcctcctgggcctcctggggggccttttttttctcggggggctcggggaagggaaagccgccggagccgacggccgccgccgccgaaacctcttttttgattttgggggggggcgcgggctccgggtcctttttcgcctcgggcttttngaaaagggcaaaggccccggcggc

SEQ ID NO: 49757 - DNA, 343 bp, Zea mays
  unsure (1)..(343): unsure at all n locations
  Clone ID: MRT4577_145378C.1
cgtccgcgnaggnacacaggtcaatattcctgtactaccccttgttggtacggagggacggaggagactaggttagccgaaagaggtactgaggacagctgcggaagaggcggcattttttgtacaggcgctgagatgatttcatttttccccctcccttttttttctggtagagggaggaggatgtgatggtgaagatgaactgatctggtgttgttgatcgagagtgaggcatatgagatgagatgttattttttaaaaaaaaaaaaaaaaaaaaaaaaaaaaaaaaaaaaaaaaaaaaaaaaaaaaaaaaaggcgcggccgccaccggggtgggagctcc

SEQ ID NO: 49758 - DNA, 628 bp, Zea mays
  Clone ID: MRT4577_145379C.1
cccacgcttccgcggacgcgtgggtgcgtcggcgcatcagacgaggctacgtgccactgaaagacgaaagtgacctgacgaacgggtatctggacacggcaatcgactggatccccggcatgccggacatccgtctgaaggacatccccagcttcatcaggacgacagaccgagacggggggatgctcaacttcgacggcggcgaggcgcaaaacgcgcgcagggcccgcggggtcatcctcaacacgtacgacgcgctggagcaggacgtggtggacgcgctgcgccgcgagttcccgcgcgtgtacactgtcggcccgctcgcagcgttcgcgaacgccgcggcaggaggcgagctggacgcgatcggcgggaacctctggaaggaggacacgagctgcctccggtggctggacacgcagcggccgggctcggtggtgtacgtcaacttcggcagcatcacggtgatgaccgccgcgcagcttgccgagttcgcctggggcctggcgggctgcggccggccgttcctgtggatcgtcaggccggacctcgtgttcggcgagaccgccatgctcccggaggggttcgttccggacaccaaaggaagggggatcctggcgagctggtg

SEQ ID NO: 49759 - DNA, 768 bp, Zea mays
  Clone ID: MRT4577_14537C.1
aattcggcacgaggcactagaaccctccccactctacgaagcacgaagttaacgcgcgacggcggtcacaccgccgccgccgcccaccaccgctcacggccggcggcgacgcgctgcatctccgcaccgcctcctgtccgccaaccccgccctcccatccccgtacgcgtccggcctgccgcagcttccccttcacccgccaggctataagctgctagtgcttgtggaatggaagagccacagaaggacagtgggcaaccatcaaaaagttctgattctgagctagaagctatggtattggatgataatggagcgggaaaatcccatagtatggaggaaaacagggattctcctatagatgtcgatggtgggcagtcatctatggatgtggatatcaagggaaaatcatccctcagtgatgatgttaatggaaagtcttcttccgagccatattccaatgctccaattgacatgagtgtcgaaagcctagagaagttttgcaaagaagcgtcaaggtccttctttgatgaagttggtctgattagccatcagataaattcctacaatgagtttgtctcgcatgggctccaggagctttttgattcgcttggggaagtgattgttgaacctggctatgatccttcgaagaaaggatcaggtggctggaagcatgccatcatcaagtttgggagagtgaagcttgaaagcctgtgttttggactggcaaggagaaggttctgttgattttaaccctggcatgctcgtctc

SEQ ID NO: 49760 - DNA, 2255 bp, Zea mays
  unsure (1)..(2255): unsure at all n locations
  Clone ID: MRT4577_145380C.1
gctcgtgggggggcctcctcacaaaaagactgcaccaaagaagctgtctcccaaaaagaagcagaagatacaaaagaaacaatcacgcaagattgagaccaggaggaatcagatagttctgaaatgcaaatagaaatttggcaaaaggggtaagcgtggccggcccaggaagaacccaacggatctgtcaaagaatgaaccatcaaagatccatgaaagtgaaccatcaaatgtttccaaaaatgaaccagtgaaacgtatatcaaaacgattacatgataaatacatgaaaagtaactcaaatgtatccgagaatgcagctagctctagcaagaggaagaggactgtttcacagtattcatactggttgaatggcctccgatggtcacaaaatccacatgatgaacgagcaagaagtttcaggaaagaaagagtagtttttccatcagaagatgctgaaatttctgaagtcagcccagtatgctgcttgtgtgaaaaatgctataatgaagaggatatctatattgcctgtgaaaaatgtgaagactggttccatggggatatatattctgttaacattgagaatgtgaacaatctcattggtttcaagtgccatagatgccgccggataagtctacctgtctgcccgtatgcagagactgtaacagttgtcaaaggccagtcagatgaggatcattgcatcaagtttgtagatcaatgtgttggcaagtttgtggaggatgaggatcccaattgtcccaaagatcttggtgctccgggtagtctgcaagagcttcatgatcatgaaattgagcaggggctcaatgttcatattactgagatagaattcagttacgataactgtctagaggagctgaatgatcatggctgttcgaaagagtttgatgctcatagcactgagaaagatctagaggatgataaaagtttgaaaaaggtagacatccataatgagttgagggcgcttgacgatcttggctctgagaaagaacctggtgatcattgtaatccgaaaagatctcacagtcacatcanatctgaacctcgaggccggccgggccgggtgatcaagagatgaaggacaataattgtctaaatgaactagatggagacaacaattggaaagcactcgacagctataacagttggaaactgctcgacagccataacagtcaagaggagcttgactgtactacaaatagcaagttttctcctaaagaaataccatgtcctatggaacttgacggttttagtagcctgaagcttgtcagtcataacatcttggaagaacttgataatcataactgtctaaaagagaacggtaatgaaaatagttctaaagagctggacaacaatggaagtccaaaagattcaggtgactgtctagcagaacacttcaacagcagtaggatatctggcaatgaggcactggtccttacacctgaaactgattcggtaaatgaatctcttggtttgcaatccaaggatgatcctgggaagtctgttcctactgagcatgagattgatcttcaggtggtggtgactttatagtgtactttggacagtcagaaaccttccagcctcagcatgagtcccattagttccactggtcatttcttgatgctgttctggttgataattttgttgaccttgcctcattgccgtaatctacaataaggaaaaaaagctattctttatttcctttgggaaatattctgatctgactagccaagcgatagaataattaactcttgaggttaagttatattattcttaatagggctgacatagggaatagttagggtttcatttcatttcctttccaagcttcacattgcctgtcagaatatggagtcatgtcgcccacgattatgcattgatttggatccctctaagtacaagtgactggtatttggctgccctgcagtaatatatgatgttcaagggagatagcagccacagccgccgccaagcatgaggaggcattatattccattccccatggtttctttttgtgggccccttagatgttgcacaagatggatgtgccaaaacctgatgattcattctttcaagtttgctcctaacagtcagtcgcaatctttatctgtaaaaaatgctccaagggaactcgtctggacagggttaattggattttgtataggtttgggttatcagtcttcctagttacagagttcactctagcatggaattggtttgaacaatgcaaaaataat

SEQ ID NO: 49761 - DNA, 454 bp, Zea mays
  Clone ID: MRT4577_145381C.1
tctgatcctcactcgttcggtggcccgcccgaataccacgccgacgaagtccagcggcgtcagcgcgccgaggaaccagctggggactaaggaacccctctactctgcccctgtgaccggcggagtgaagaaggcacaccgtttccgccccggtaccgtcgtgttcagatatatccgcacgtaccacaccactcaggagctgctgattaacaacatgtccttcagcgcctggtgttccagatcccagaggactccaggacctgacctgcggcttagatgagctctgctgtatctcttctgacggacgcttatggagggctacctcgatcccgcacttcatcgagggtaccctctgatgccatccactacacgcgcaacaccgtcatgtccaaggacttgcagctagccccactaatacgaggacaaaaggcctaagctgcatactttctgccat

SEQ ID NO: 49762 - DNA, 467 bp, Zea mays
  Clone ID: MRT4577_145382C.1
ggtggtgggtgttttccaataaaattatgcgacaggacttactcgctgctccatatcctctgctcactgcaaaaaaggggcgtaaacagaagagccttttggactctcaactctctttaaatgaaggaaggcacgaatcaaaaagatacccgcgagagggggcacgttgggttgctcataccactttatatcacatgcatccatggaaagccttatacggcacaccaccgttcaatgctaccaaggcttgacgaccacctgttcggtccaacaccatcaggtaacaaacccttctctccctctggctctagaaatactgagtccccgtgcaactagcttacacgccactccctgctgtatatgatgtaacgcctgtcccggctactgcgaacttagcgcaacacaatagctctgcttcattgaccgattattctatggacttgctatcttacgcaaaacgacgacct

SEQ ID NO: 49763 - DNA, 599 bp, Zea mays
  Clone ID: MRT4577_145383C.1
aaatctcacgcagtgtgagatgacggcaccgcactgcaacagacctcgccaagccgcggaaaaccacgtgccctccgacaggctccgccacctctaccacaataacgagctgacgtctcctaccgaaggacaacatgtcaaggaccgcctgccattcggcctcactacggcatgggtcgcgcgcacactccacagctaccccaagccacagccgtcgaggacggtggtgtgatcataaagcactcagacgatcctcgcactcctggaccactggctctccgcccgggacagactactgacatgactcatccaatggagagacctagtaccgtgacatcgcagaggacagaacgggcacgtggggcgcattacgtataaagagaaagcgggatgatgttgacgaatagggactacgacgaggcatcgactccacgctgaagctgcatgcggtcgtagaggtccggtaactacccgaatcaacatcaatatcaacaacaagcaatgtccggatgtgctgacataccctacaaacatcgccacctcgttaggttgctcgtaagccagggacatcggtatgtacatgtggaacagcgtgatcc

SEQ ID NO: 49764 - DNA, 364 bp, Zea mays
  Clone ID: MRT4577_145384C.1
gccgacgctacggcggtccacctattacaagcgccgggaccgtctgtgccataagggtagggagctctacggtctgtgcgacgcggacctggtgctgcatcctattctccagctcctggaaggtctaccactaccgtcttggcaccgtactctgcgtaacggacctgtgcgagagggacgactgcacgacgcacaccacggtctggaccgacatgctgcaggagcggagcgcggagctacagaaagctgagccgatgtgccagctggtgtagaatgagctgcaggacatgacagtggacgaccgctagcagtacacagggcctgctgtctagctgctggaacacagtctgcaggccgtcgtgca

SEQ ID NO: 49765 - DNA, 623 bp, Zea mays
  unsure (1)..(623): unsure at all n locations
  Clone ID: MRT4577_145385C.1
tacgcttcctcgtacccaggagcctgtgggtggcggtccgctgggtacctcgccgcgggtggggctcggaagtctccggcccaccgcccattcccgaaattcccaagcacgcatcgagatctcttgaggcccctgctcctcgcctttgacgtgcacaacccccagtctcagatcacaccaccaccatggggagcataccggcggcggcggcggggccgggcacggagctggaggacctgccggaggacgcgctgctgtgcatcctcgtcctcctcgcgcggggtgatgccgccgccgtcgcgcgctacggccgaaggctggccgccatggcgggtctgcccttgctccgggtcgtcctcacgatgcggctcgggcaatcggcgccagcgttggatccaggcttattggccccgcgggctgtccggatgccgcgggggggcttagggaggggcgctctcttgctaccatcatgcgcgtcatctgggcccggggggtcgctggcttccccatgggttcctggtcgtcgtgatcgagcacggtgagagagcgatagaggggcccgagaggtgctggcggttgttcgtcctccctcccctccggctacgtcaggttgngtggcttgc

SEQ ID NO: 49766 - DNA, 790 bp, Zea mays
  Clone ID: MRT4577_145386C.1
aatccaaatcgccgccgcgtgcggccatctctgcccctcgccgcgcccccctcaattcacacccccacccgctgcatcgactccctccggcgccccgcctcctggcccagatccgtgcacccctcgccctctccggactcgatgattcacagatccgcccagctgcccatgcaccgactaccggcgtccggatctcctgccccaatagcctagttccggatccccccaccgccgatgccccacaggtcaagcaccgaccaccgatgtctgacgaacgagcgaactccccgcggatgcaggaggaggaggaggtgcaggagtgaccgccgaccgtccgtgtttcaccatccccttcttcgatctcaaggtaaccttctccggtgttgaaaccattaggggccgcggccacctggcgagctggtgcccgcaagaggtggtgctgactgctgaggcacgaggcggtgggcgtgttcctgacgcactgcgggtggaactcgaccatggagagcctatgcgcgggggtgccgatgctgtgctggcccttcttcgcggagcagcagaccaactgccggtacacgtgcgtggagtggggcgtggtgttagcaacactaatatctcaattcaaccaacagcaacaaagtactacaatataagagaatccggatacatgtgagggggaaggggaaaagagaagtagagatttctagatagagaagatgaacactagaacacagggaaatgagaatagagatggatatgtggtttcctctcaatattggataccccccgc

SEQ ID NO: 49767 - DNA, 315 bp, Zea mays
  Clone ID: MRT4577_145387C.1
gtgacagccgcatcttcttgtgcagtgccagcctcgtctcatagacaagatggtgatggtcggtgtgaacggatttggccgtatcggacgcctggttaccagggctgccttctcttgtgacaaagtggacattgttgccatcaacgaccccttcattgacctcaactacatggtctacatgttccagtatgactctacccacggcacacctcaacggcacagtcaaggctgagtatgggaagctggtcatcaacgggaaacccatcaccatcttccaggagcgagatcccgctaacatcaaatggggtgatgctg

SEQ ID NO: 49768 - DNA, 938 bp, Zea mays
  unsure (1)..(938): unsure at all n locations
  Clone ID: MRT4577_145388C.1
gggtacctcgacattggccgggtcgcgacgatgatcccctcgattcgcggcgccctcgcctccaccactccccaaccacccgacgccgacccccctcaattcacgcccccacctgctgcatcggctccctccggcgccccgcctcctggcccagatccgtgcaccccttgccctctccggactcgatgattcacagatccgcccagctgcccaggcacagactaccggcatccggatctcctgctccactgctcgccgcctcggggctctccggcgttggctcagcgcgacgggccccccaatagcctagttccggatcccccaaccgcccacgccccacaggtcaagcaccggccaccgatgtctgacgaacgagcgaactccccgcggatgcaggaggaggaggtgcaggagcgaccgccgaccgtccgcgtttcaccatccccttctccgatctcaaggtaaccttctccggtgttgaaaccatccgtggccacctggcgagctggtgcccgcaagaggtggtgctgaggcatgaggcggtgggcgtgttcctgacacactgcgggtggaactcaaccatggagagcttgtgcgtcggggtgccgatgctgtgctggcccttcttcgcggagcagcagaccaactgccggtacacgtgcatgaagtggggcgtggccatggagatcggccaggacgttcggcaggaggcggtggaggagaagatccgagaggcgatgggcggggagaagggaatggagatgcagcgccgcgcgggagagtggcagcagactggtctccgcgcgacgcggcccgggagggcgctcatacgccaacctcgacaaagctggtncgttggtttggtaagggaagnaangtacatagactgctngttttggattcttgaggtttgtatagggggggggtttatgattaat

SEQ ID NO: 49769 - DNA, 954 bp, Zea mays
  Clone ID: MRT4577_145389C.1
cactcctatgggcgattgggatcctcgaggccggccggggctcaattctcaatcaccactcgcccatcgtgggcgccgcccttctccccaatcctcatcctcgtactaccgccgccaagaacgctaccgccgccaagagcagcacaagcacccgtcgcatcaccgtcttcaatgaattcctctgtctactcgcctaccccgacttcacttgatagcccgccagacgcatctcgatgcttctgctccctggttcttagggcctgtggatgagaccgtgtccctgccgtccaaaaatcagcaggccctcatgctcatagcgttcatggatccaggaaaaggagacgccggtgatacttcaaccaccagagagcgtcggatggggaccaccatcgtacgggtccgctgggaccgctgctagcctactagggcagcaacgaattgacaggaatcataaaagcatatggaggaactatgtataggctacaaagaagcataagaagcatttttatagcagaagccaagtgttctgatgattttgttttttcaattgtgttttctgttattggttcagcatgcacatatattgacatgatttatggcatggcatctgccatctttgttatatttatgacatcgttcttgattgatgtgtgcgacatgaatgatggatctttttaacatcctgaccatcattgtgtcgctcattatcgtattttgtatatcatttattggttcacggatatgaaataacaagttttttatttttgattatttatggcaaggcacccggcatctttgttaaatttaagacaccattcttgattaaagtgggcgacatgaaaaaaggatctttttaacaccccccccaccattggggcgcccacaaccgggttttggaaaacatttaaggggtcccggaaaagaaaagacaggtttcttattttttagatctgg

SEQ ID NO: 49770 - DNA, 272 bp, Zea mays
  Clone ID: MRT4577_14538C.1
gacccacgcgttcgcgctgacttacttcctatctctctatatacttttttaccacacaataataacgtagtaggaggcattatcattgctggcattgccaacaatcaccacaattaaccattcaaatggaaagtaataatacataccccacaaatactatcataaaccgccacaaaataatataccacaataaatataacccttcacatataatccaatttcaacaactaaatacatctacaaaaaaaaaataaaaaatcacatcctccctc

SEQ ID NO: 49771 - DNA, 2012 bp, Zea mays
  Clone ID: MRT4577_145390C.1
catctcaaaaaagacataggcagacatccagtgcaaagatttctctcttgacatgcaggtgaacgagaactccgagaatccatactggaaagcgataggatacagcgtggacgagccacgggaggatcgggctcggacggcgacaccgtcgccgtcccggcccctcgacgtcggcgtcgtggagaccaggctgctggacgacaacaagctgctcagatcgctcgtggggaggggcctcacggtgaagccggcgtcgtcggacgcgaaccaccacacagtgcaatgcgacgccgtcatcgtggggtccggctgcggcggtggcgtggccgcggccgtgctcgcgtccgcggggtacaaggtggtggtcgtcgagaaaggcgactacttcaccgccgaggactacagctcgatcgagggcccgtccatggagcgcctcttcgagcgaggcggcatcttctgcacgtccaacgtgaccaccatgatcttcacgggcgccacggtcggcggcggctcggcggtgaactggtcggcgagtatccggacgccggaggaggtgacgcaggagtgggcgcgcgagcacgggctcccggtgttcgcgagccccgggtatgcgcaggccatggacgcggtgtgcgcccggctcggcgtcaccgacgggtgccaggaggaggggttccagaacaaggtggtccgccgcgggtgcgaggctctcgggctgtgcgccgacgctgtgccgcgcaactcgtcggatgctcacttctgcgggagctgcaacttcggttgcccgaccggggacaagcgcggcaccgacacgacgtggctcgtggacgccgtcgcgcgcggcgcggtcatcctgaccggctgcaaggctgagtacttcgtcctcgagaagaaccacagcagcggcagcggaagcgggcggggcaagaagtgcgtgggcctggtggcgacctgcgcgagcaacggcgtcaccaagaaactgcgcatcgaggccaaggtttcgatcgcggcttgtggggcgctgatgacgccgccgctgctgcggcgtagcgggctcaagaaccggcacatcggcagcaacctccacctccacccggtgtccatggcgtggggttacttcccggagaacaagcaggaccccccgctctctggcaagtgctacgagggcggcatcatcaccagcatgcaccgcgtcacggaccgcaccatcatcgagacgccggcgctggggcccggcgccttcgccgcgatggtgccgtgggagtccggccgcgacatgaaggagcgcatgcgccggtactcccgcacggcgcacgcctttgcgctggtccgcgaccgcggcgtcgggttcgtggacggcgaaggacgcgtgcgcttcaccccgagccgcgaggacgtcgacgagctccgcaacggcctacgccgcgtgctgcgcatcttggtggcggcgggggccgcggaggtcgggacccaccgcagtgacggtctccggctgcggtgcaagggcctccgcgacgaggacctcgaggcgttcctggacgaggtgaccatcgagaaggggcccatgcactcgagggttgacaagtgggctctccactgctcagcgcaccagatgggcagctgtcgtatggggtccagccctaaggacggcgccgtggatggccgcggcgagagctgggaggcagagggcctgtacgtgtgcgacggcagcctgctgcccacggcggtgggcgtcaaccccatgatcaccatccagtctatcgccttctgcctctccaagggcatcgccgagaccatggcccaggggcagggcaagggacagtagcctatgattgagacgcgcctggcgatggtttaattcatgcgtgcaacactgcaacatgtgtgcgttcttgttaatcgagtgtggtgaaagcgtcgaaaaatgtgtttgtgcattgtgtttgtgcaaatggtacgcgaatcacaatacatcctgtttcctgccccggtcaaaaaaaaaaaaaaaaaaa

SEQ ID NO: 49772 - DNA, 620 bp, Zea mays
  Clone ID: MRT4577_145391C.1
agataatagagagataacatggctacgaaaagatagagaagtaggttttaaaacacacacgattaaagactcccaagagttttgagcccattctcacaagacgagattatagagaaacccacacaaatccaaagtttttagaaacattcttcttagtattcctctccttcatcatcttcatcgtcaccaccttcagcaccgacctcttcataatccttctccaatgctgcaagatcctcacgtgcctctgagaattctccttcttccataccctcacccacataccagtgaacgaaagcacgtttggcgtacataagatcaaacttgtgatcaatacgggagaacacctcagcaacactggtcgagtttgagatcatgcaaacagctctctggactttagcaagatcacctcctggaacaactgttggtggctggtagttgataccacacttgaatccagtaggacaccagtcaacaaactgaatagtgcgcttggtcttgatggtgccaacagctgcgtttacatcctttgggacaacatcaccacgggacatcaaacagcaagccatgtactttcccgggacgttgggtcacacttagccatcatggaaagctggctc

SEQ ID NO: 49773 - DNA, 219 bp, Zea mays
  Clone ID: MRT4577_145392C.1
ataacgcgttgcagtacgtgtctgtctgttcgttctcctcagactattacatccaagagggacttcgccatgtggtactcgttccagaaccacaatgactgcaccgcctacactaaatcgttcgagaacaaccctaaggagcctaggaccattgcgcaacaacaactcacctgtgatgaacaaaccagtatgcacagaagctatggtaatgtccaacca

SEQ ID NO: 49774 - DNA, 294 bp, Zea mays
  Clone ID: MRT4577_145393C.1
agatctagatcgcgcgcgacctacatagaggagcgatgctaaagctcgctggctagtaacagcatatctcttctatagcagttactaaatagaattattgaacctgtgctttcatctgcaacaacagcaaataccatgcagtcacctaacttatgcctatcgcaagaaattccttttattcaagctactggaataattaaaatgtcctgattatttacagttccaaccagtagtacaatttaaatggctaatgggacgcggccttgataccttctttaaacaaccacagttggt

SEQ ID NO: 49775 - DNA, 280 bp, Zea mays
  Clone ID: MRT4577_145394C.1
catctcaaaaggtgaacaggaccacactccttcaaggggggtgcaaaacaaataaccatgtatgctttacattctatgttgcttccaaaaaaataaaatattaatataatcacggcttcaacgaaaggaataatattttttttctaggcaaacatagccttcatatattatttgttttcgccccacctccacggatgggatcccgacgagatatgttttttttaccttgtggtggggaacaaacaaggcacaggaccagccatctatattattttttttt

SEQ ID NO: 49776 - DNA, 108 bp, Zea mays
  Clone ID: MRT4577_145395C.1
cgataaaattgcatatctcgtcaccgctaagagagccttcttccttttagcgacattacatgtcattcatcgtgacatggcacagtctaatgacaccattgcataatc

SEQ ID NO: 49777 - DNA, 1428 bp, Zea mays
  Clone ID: MRT4577_145396C.1
atgcacactgccccatcgccttgctacaccgaccccatccagacgtaccagcgccgtggtcgacttggtgccccagctcgctctcgcgccgagcccccggcctatcaccctatcgtcgtccaccgggatcctcgacgcatccacccgatggtcacccggcgcgcggcaagtgtcctccgggcacctgatcacctgattcaatccacgacctcttctccggctcttccgccggcgcccatgactgtctgtggtgcgcttgctgacccacagtggcgatgtgccatggaagcggagtacgcggctctccaggctaaccacacctgggacctggtgccccctccccccggcaccaacatggtcaccaagaagtggatcttcaagctgaagctgaacgacaacgggtccctggagagggactggtcagtccaccaactcgacgtgacgaacaccttcctccacggcaccctgacggagacggtctactgcactcagcccattgggtttgtcgaccctgctcaccccaacatgggtttcgtcgcggccaagtcggacatgtccctgttcatccttcatcacggtccggacactacgtacctcctcctctacgtcgatgataccgtgctcaccgcctcctcccctgggctcctgcatcacattgtctcctgcctccagcaggagtttgcgatgaaggacctcggggccctccaccagttcctaggtgtcaccgtcgagcacagaccccagggcatgttccttcaccaacggcagtacaccatcgacctcctcgagcgtgctggcatggccgagtgcaagccctacgtgaccccagtggacacgcagggcaagtacctcatcttcaccaagcccgacatcgcttacgccgtccagcaagtgtgccttcagatgcacgaccctcgggagccgcacctcaccacgatgaagcgtgtcctggggtacttgtgtggcaccatcgacttcgggctccttctccgctgctcctcgaccatggagcttcgcgtctacaccgatgccgactgggcgggctgtccagacatgtgccggtccacctcgggctatgtcgtcttcctaggggacagcctcgtctcctggtcatcaaagcgccagccggtcgtctcccactccagcatcgaggccgagtatcgtgccgtggaaaatagcgtggctgaggcgacctggctccgtcaggtgctccatgagctccagagtccgctagcacggagcaccctcgtcttctgcgacaatgtcagcgccgtctacctctccaccaaccccatccaacaccagtgcacgaagcatgtcgagatcgatctttactttgtccgcgagagggtcgcatgtggagatgttcgtgtaacaccccaggtgtttatcgtctactcgaccacgagtgcggactttaacacgtga

SEQ ID NO: 49778 - DNA, 436 bp, Zea mays
  Clone ID: MRT4577_145397C.1
tggaacctttgggctgatttatgtgcttgagaaggtagagtactccttattctggggacgagggcggtgttgttgttgcgtattattgggctagtgctgctggtgtggtgctgctgcttacggttacgggtggtggtggtggtggttggtgcgtctgtgagtgcgagtgttctgctgcggggtcttagacttcggcgtattattattattatggttggtatgggtatgggtatgtgtatgtggtgaatgcagcttcgaagtagacggcgaggttgtgtgttgttgtcggtctgtgttatggttatggtcgttatgttcctctgcgtagcccttctaaggttcgtcattctcgtaagtgggagtccagtttcgataaggatgctcacacgcacagaggcgattaggggcctcgtagtgaggagcgttggcggtagta

SEQ ID NO: 49779 - DNA, 361 bp, Zea mays
  Clone ID: MRT4577_145398C.1
ggggggggaaaagctttccaaaggcctcgaatttccaaaaaacatgttcccctaggaccaaggcccctcctggggcccccaggccaagccttgggcccccagagcaacccccggggggaccggtttttcccacttccgggatccgggggccccattcaccccgaaacctggatcaaggccccccggtctgatcaaaaagaccctttttcccaatcccacccttgggggggggaaccgcccacccacccggggggtgggggccccaaaattgggcaggggcaattccgggcccccctccggggggggttcataagggccccccccgggcccccttggtggccgcccggggccccctccgggc

SEQ ID NO: 49780 - DNA, 294 bp, Zea mays
  unsure (1)..(294): unsure at all n locations
  Clone ID: MRT4577_145399C.1
acaacccnaccaaancacgggnaacnagcnaggaaannacnnaaggagacangngagnncgnannagcggagggggagnnacannacanggggggcacaggcaccagccgcgnnncggcnnngncacgcagccnaggacgagcacagcgaggccnnnngnnncgccagcagcnggnncagcnggccgaccagcngccggnggcngcacangnacngccggaaagacgcncgcaggcncnggagcgcggccacgacgcaggcgaacgagggcgggnccagcagcggcgagaagag

SEQ ID NO: 49781 - DNA, 512 bp, Zea mays
  Clone ID: MRT4577_14539C.1
ctatgaccgggggaagaggcaaaatactggacaagggacagccagttaaatatccctgttcacaacatgccccgaaaaggttagttggggaacctcattttaccaagggattttcattttccaaaaaaaaattattttatttttccttgggaaaattaaaatcccttaaaaaaacggggttcccaaactagccctaacatggaaaaaagtatcttcttttctggcttcagtctaattagctacaaacgctgttctgggatttgcactctgcacacataacatgagcgggcttatgtatggaacatgtacaagctggtgtgggctgcacaaacgatgaagttttctgccgggggccatgctaaatgcttaaccttggacgccatgttgcacaaaactttttccttgccgtctgacctgggatgaccatcctgaccttttttatgaactccgaaagagagattgctaaccagcgctgggatcttcgtaaaagcatgtaattgtatcctgaaagg

SEQ ID NO: 49782 - DNA, 223 bp, Zea mays
  Clone ID: MRT4577_1453C.1
ggaattcccgggtcgacccacgcgttcgaaaaaaaaaaaaaaaaaaaaaaaaaatttaaaaaaattaaaaaaaaagaaaaaaagatatggaaaatagggatttacaaaatcaataatgctaaattattaacaataaaaaagtggtatctaaattcatataaattggacgatatttaacaactgtaactaatgataaaacgttgtaagttagcgatcttattaa

SEQ ID NO: 49783 - DNA, 273 bp, Zea mays
  Clone ID: MRT4577_145400C.1
atgttcgtcgatgcagtcatcgcgtcggttgctcatacttacgttcgatgttcagatcgcgatgagcgccaattgcaataagaagcccatgatgaggttgaagacgctacgctgaaagatgagacacttttccaaatagtgcgtgaatccaagtacgtgacttcgggtgctcttataatctatgcgggcaaatttggcacccagttgtgagaggcactcggttctcctttttgatgggttgatacatatttgtttggatcaattcggctgatg

SEQ ID NO: 49784 - DNA, 635 bp, Zea mays
  Clone ID: MRT4577_145401C.1
ggatctttgttcttttagccgacagcgttgcttaacaatttagttacttgtaacagatctgcgtgatgataagcagttttttgttgatcaccctggtgctgttccaatttccactgcccaggtatgctatctgctttgacttgtcggtttgtgttcatagtggcatataaggtgagcgtcgtttcactgatctgtgcagggcgaagagctgaggaagctaattggtgctgccgcctacatcgaatgcagttcaaaaacccagcagaacataaaagcagtgtttgacgcagcaattaaggtggttctccagccaccaaagcaaaagaagaggaagaagaaggtgcagaagggatgcaccattttgtaactacaaacggtagagggcaacagtctggctgcggcgctgctgccaatgataaccatcgcctccttgctgtataatatatcgcctgatcatgccaccagcatgcacaagggagatggtggttttaggatccttgtcctactgtgttgtgtagaccaccgggtgtagttgactgtatctggttgtttgtatgtatgtacaagacaaaactagcactgcagatggtatggtaaggcgtaagcaaatacaatatgacactggtccagttccg

SEQ ID NO: 49785 - DNA, 460 bp, Zea mays
  Clone ID: MRT4577_145402C.1
gatttatgtgcttgtttgggatctgctacggaggtgaataggtccgagattcctgatgattcaattgcgactgggggtcgtcccgattttgattctgatggtggtctggacatgtttctggagtaggcgttggtcggaaggactaggcgttgtaagagtccgatgttagaggtatctcgtaagtcgaagagacggtctgagctcgattagtagatgtcgtcactcgcagaggttagtgttagttcgtgctctcgcgtagtggtcgcgcatacaccggtgtcgacggcgcattgctcagcatggacgcgtccatatgggtagtaaccacgttgtcgagagagaggcttttctaatgttatcgatgaccccgtcctatattgcaccgcatccacgctgaacggatacattaccattactgacgtctgacctggtctagcccggtagatagaactatcatctc

SEQ ID NO: 49786 - DNA, 379 bp, Zea mays
  Clone ID: MRT4577_145403C.1
tcgcccacgcgtccgttcccctgttctctcgcccgaacacggcgaccgtcgctgcaaagcacgaccttcacgtgctcgccttcgtcctcctcgtcaccgccgtcaaggacgcgtacgaggactggcgacgccaccgctccgaccgcgccgagaacggccgcctctgcgcggtcctttttcccggcgcccccgggggcgcccagttcgtcccgacagagtggaagcacgtccgagtcggcgacgtcgtgcgcgtcgtgtccgacgagtcgctcccggcggacatggtcctcctcgccaccagcgagcccactggcgtcgcctacgtgcagacgctgaaccttgacggcgagtccaacctcaagacccgctacgccaagca

SEQ ID NO: 49787 - DNA, 121 bp, Zea mays
  Clone ID: MRT4577_145404C.1
gtgctctgtatgccgcgacgtagctctgattcgctcagcttctagcgctgatggtatgacggtgtgctcgtgttgaacttgtacattagtggcatctcagaacatatttatgtagcttggc

SEQ ID NO: 49788 - DNA, 404 bp, Zea mays
  Clone ID: MRT4577_145405C.1
ggtgaatgtggggtgatccggtgattattattattattatcataaacaggcgatcttagtccaacgccctgaatcttaaatgttggctgagacataaagactaaacatgctaatacattgctgcggagttattctcgactaactgtccaagggatgtgttaactatatttgtagtagatgccctcttcaaagcaagcatgcaagtctttgaaaggtcagagaggctttttgataatccaagacagctacggtatgctttcaaggttgcctaagttcttctgagctgcatcaaccttgctacatatttgcataatcactagggcacatttagcccggttggtttcttgccagcatagttggaatcttgcgaatatgacccatgcatgcttatgttaaccaacact

SEQ ID NO: 49789 - DNA, 408 bp, Zea mays
  Clone ID: MRT4577_145406C.1
agcatttccgttgcccgcgcgcgcacacactgcaggcctcacttcttggtggcactggcagtggcactggcggcaatgccggactcggatgtccccagcccagcatcgtcgccgcttggcagcgtgcagaagattgccaggggtcggaaaagcaggcgcggcggcgggcggagcccggcgtaccgcggcgtgcggatgcgggcgtgggggaagtgggtgtccgagatccgcgagccgcgcaagaagtcccgcatctggctcggcaccttcccgacggccgagatggcggcgcgcgcccacgacgccgccgcgctagtggtcaagggccgcggcgcggtgctcaacttccctgagatggcggcgtccctgccgcgcccggcttccgccgcgccgcgcgacgtgcaggcc

SEQ ID NO: 49790 - DNA, 497 bp, Zea mays
  Clone ID: MRT4577_145407C.1
cccacgcgtccggggcgagctgctcagggacatcgtcggcagcgcctactacatcgcgcccgaggtgctcaagaggaagtacggcccggaggccgacatctggagcgtcggcgtcatgctctacatcttcctcgccggcgtgcctaccttctgggcagagaacgagaacggcatcttcaccgccatcctgcgagggcagcttgacctctccagcgagccatggccacacatctcgccgggagccaaggatctcgtcaagaagatgctcaacatcaaccccaaggagcggctcacggcgttccaggtcctcaatcacccatggatcaaagaagacggagacgcgcctgacacgccccttgacaacgttgttctcgacaggctcaagcagttcagggccatgaaccagttcaagaaagcagcattgaggatcatagctgggtgcctatccgaagaggagatcacagggctgaaggagatgttcaagaacattgacaagg

SEQ ID NO: 49791 - DNA, 160 bp, Zea mays
  Clone ID: MRT4577_145408C.1
aaaacacctttcacaattaggtgaacacaccgtttttttgtttttcccaacacaaatttgttacaaaagatgggggtggttttttacacataacgggtgcggatggaaacagcaacttttgggcccccaatggcgggggggagagatccgagtttaaaaa

SEQ ID NO: 49792 - DNA, 392 bp, Zea mays
  Clone ID: MRT4577_145409C.1
gccacgcgtccgcccacgcgtccgcccacgcgttcgctccagcgagttgtatccattgcacccctcgccgcgccccggcaccgagccggacggcggacgccctggacctcatgtgcttctcctgctcacgtaattggagcaacggccattatctgcttcgtcgcgcacgcatgttctcatattccacgcgcccccgccggtcgtaaccaccgggcaaccaccggccggctcactcagtacgccgccgcccaccaccagctcagcttcagccgtgcgacgcttgtaccccgccccgctttcagccgagcccctttccccttatatcaaccaaccccaccactctctactctctgtacccaatcgccactacgcgactgctagctactcgatcg

SEQ ID NO: 49793 - DNA, 291 bp, Zea mays
  Clone ID: MRT4577_14540C.1
caggccggttccgcggccacgactctgggcacttcccctgaagctcctctccggagctcgacttcttggaccttctctcgcgcgccatttccaagctccagaaactcccaactcgtctgccgtccagatagctagctgcagtgttcacgacgtccggcagagaagcaagcatgtgggggacagaacagtagtcctggactcgaaagggtaggtgctgacctgtggggccttagcaatttgaagggctgcgaaggaggaacgatatctgcaaaggggctggctattagcata

SEQ ID NO: 49794 - DNA, 1505 bp, Zea mays
  Clone ID: MRT4577_145410C.1
gcattggcctcgcgtccgccaaaagcagagcacgcagcccagctccacgagattccgtgactgcgacggcgaggatgggcggcgaggcaaagaagctcccaaggatcgacttctccgaggtggacccgtctgcgccgggcggccaggcatggggcacggcgcgcggcgaggtgatggacgcgctggccaccttcggctgcttcgaggcgcactacccggctctgacccctaggctccgcgccgagctcttcgacggagccgtgaggccgctcttcgcgctgcccgccgacgccaagcgccgcaactgttacggcgccgataggccgttccacggctaccttggcgacgtcccggggttccctggctacgagagcctcgccatcgtggacggcaccaaggacgagtccgtccgcggcttcgcccgcctcatgtggcccgacggcggcgacaacagcgacagtttctgcggtactgtcgttgaggcggcgcagcggatcttccagctggaggaggccgtgcggcggatggtgatggaagggctcggggtggccaagcaccacgacgcgctgagcgcgtccatgtggcacctgttccggatggcggagtacaaggcgcccaacgccgcggagaaggtggtcaggtacggggcgcatcaggacaccaactggctcagcgtcgtctgccagcacgaggtggccgggctggagatgcagagcagggacggcgagtggatcgtcgtccaaccgtcgcccacgtcgctggttttcatggtcggcaacgagctccgggcatggacgaacgaccgtctatatgctccatttcaccggatcaccgtcgctggggacgtccccagatactccgcgatgctgttctcggtccccagcttccaggttcaggtggcagacgagctcgtggacgacgaacaccctccccgtttcaagccccatgacaacaacgacttcgtctgcttctgcgtttccgaagaaggcgctctccatcaagataaactcaaggccttctgtggagtgtaacgagcagcagaacatatcagccgtccggcatctgtgttattatacttttacctcagccttgcatgcagcagaggccaggccacccctgtagactagtacgtacaatttttagaacacgcgtgagatgataactcgtctgcatttcttatattctgaacatgaacaacaaagcattctggtagccatgaaaagaacacgcgtgagaagatctgaatgttcggtcacacgaactgaatgtttgagcgaatacctagccggacattcagtttgagcagccattcagaacttagtttgcaccctattcattttgaaaccacaggtcttgcctgaactgttcgacatcagataacatctcgatcctatgattaaagccaaaaatttctacactgatcctgtcttctgaccttcctgcgctgtgcttctcaccttactccaggcatggacgaacgaccgtctatatgctccattccaccg

SEQ ID NO: 49795 - DNA, 1227 bp, Zea mays
  Clone ID: MRT4577_145411C.1
aaagcggatagaagaaaagcgtgctgttttttcctcctctcgtgtctcgtgtgtgcgcgcgagcgtgcgcctccctccctctcgcgatcccagttcgatccgctcgcccgctctcccgatccgacccgccctccgcggccgggcaattcggccgccgccgctcggattcgcgtgggctcgccctcagattcgctctccccggcgccccaaaccctagatccgccgctggtcgtcccaccgccgccgccatgttctggcgcatgaccggcctctccgcggcctcgcccgtggatacaattctggacaaagaaaattttacattggaagaacttcttgacgaggatgaaattattcaggagtgcaaagcactgaactcaagactcataaacttcttacgtgacaagtcccaggtggaacagttgcttcattatattttggaagaagttccagaggatgctgaaaggaagcgctccttcaagttcccttttattgcttgtgaaatatttacttgtgaaatcgatgtcattttgaggaccttagtagaggatgaagagctaatggacttgcttttctcatttgtgaaacctgatcatccacatagtacattattgtctggttacttcagtaaggtggtaatatgtttgatgctgaggaagactgctccacttatgagttatgttcaggggcatccaaagatagttgtccagcttgttgacctgattggcatcacatcgataatggaggtgctgatacgactgattggtgctgatgagaccatatattcaaactatggtgatacattgcagtggttagaaaatacagatgtccttgaaatgattgcagacaagtttggctcatcggcttctcctgaagtgcatgccaatgctgcggaagttctatgtgcagttactcgttgtgcacctccgtctcttgctgcgaaaatttgcagtccaagttttgttggaaggttgttccatcatgctcttgaagaatcaagacccaaatctgttctggttcattcactatcagtgtgcatatctttgctggatccgaaaagactagcatcagcttcgtatcaagcattcagaagcaacttaagtcatggggcattggtcacagccagtccagagacagttgatggcatgcttgacagtttaggcaacttgctgaagttactggacacttcggctactgaaagcgggttgccaacaacttatggacttgcgc

SEQ ID NO: 49796 - DNA, 434 bp, Zea mays
  Clone ID: MRT4577_145412C.1
acagattgaggcaatcgcaactgcctcctgatgaacgcgatgagactggtgtcattaaccctcagatggacgatactttagaacctactgcgcttactactgaagctaaccgcgtagcaattcaccatcgataatctacacgacacccttcccggagacagtggtgcctacacagccaagaatgttgctgtgaagcatccgacctgtagagatggcgcctccaactactgagatgaccctgtcgaggctgctactaacttcacctaccagatcagtctcatgaaccaccctgcccagagcgtcaatggctaagccccaggtctgaactgacacacctcacacattgctgtcaagatagctgagctcgataccggattgttaagcgatccgacatggagctgaatacagagcccagatttctcaagaacggctac

SEQ ID NO: 49797 - DNA, 153 bp, Zea mays
  Clone ID: MRT4577_145413C.1
aaattccaatagtaacgattcctggttatttaacttatacggccacagtgggaccataaatatcaactgacgctagtatagactgtattatctatatatcttatcttaaagtaaaattaccgactaattttacaattgtttgttatacattat

SEQ ID NO: 49798 - DNA, 317 bp, Zea mays
  Clone ID: MRT4577_145414C.1
tcttttattccctagccgcctcctgcaagtttgggagggtatgaatatgcgccagggcgagtgagacggacacctttgtatttcaggctgtgatcaaccagctgctctcactcatcatcaacaccttttactccaacaaggagatctttctccgctagcttatctccaactcttctcgatgcgctgtacaagatcaggtttgagagtttcactgacatgagcaatgctcgatgcgcaaactgttcttttaattcaccttgtcccacacatggccacgatcacgctctttaccattgatagcggctttggaatgatca

SEQ ID NO: 49799 - DNA, 645 bp, Zea mays
  Clone ID: MRT4577_145415C.1
ttttttttttttttttttaaaccacccaacatgtgttcttgttatcacacaatattaatagagtactaacacagtttttgagtactgcaataggaaggataaaataaattgcttcctggcatgacaataaaaaggacggacccaaagtgccaaaggagtgcgcctccaaataaactaccaaaaactagaataagtgctgagttttctgcaactttatgaagcaagaatactggatgccatgcaaaatgttgttgtaagtggcactcggtgggtgcttccaccaggcagatttcacagctccatttcaatgaagaagtcgttgtcgtcttcttgggccacatagtctgaataacactaggttagtgtttgttaggcgacgtccacttgacgatcatcattgtcctggcacttgatcaggcaggttcgtccattagcatcgccatgcggagtagcccgcgcttggggtcgacttgggtcatcttccgcatcacgtgattaattatcgtacctcatgagatgcatgatgcacatgtagcatgagtataacgagtataatatagataatctatagtaaaaaggatgaaacacttaaaatcaagcattaagcaccatgaatatcacagcagggcatcgactacatccatt

SEQ ID NO: 49800 - DNA, 317 bp, Zea mays
  Clone ID: MRT4577_145416C.1
gcacgcattacgttgtgccagcacattcggagacgttccgcatcgagatgcattcattgattcagcttcctcgaccatatcaccagttcgtaggttggggcttcattaccagttcgctgcctttatgacactccttacatggatgtgtttaatatgacgggcatcttcactctttccaatagaagctcacacttcttgcgcaatatgggactacctgacatagagatccgtgatcatgggggtccactaccctgcagtatgcctggatgaacttatcaactgcatggcagagatgcacaaaaggttccatatgcaca

SEQ ID NO: 49801 - DNA, 1376 bp, Zea mays
  Clone ID: MRT4577_145417C.1
ccggccggggcttcaacgacctgccactgctccccggtgtagctgcaattgggtcccaccaacaactctctactcgctcaatatgctggctgctcgctcttttgcctcgcccgcgcgccaatgcctgcgccaggccaaccgctcaagatgggcgcccgcactgtcccaggtctccgcccgcacatacgcctctgaggtcgccaagttccacggcacaaagggtagcgatggcaagtactgcgtcactctgattgagggtgatggtatcggccccgaaatcgcgcagtcggtcaaggacatttactcggccgccaacgtgcccatcaagtgggagtcggtcgacgtcaccccgcgcctgaacgaggagggcaagacggtcatctccgacgagtcaattgccagcgtcaagaagaacctcgtcgctctcaagggcccgctggccactcccattggcaagggccacgtctcgctcaaccttaccctccgccgtaccttcaacctcttcgccaacgtccgtccttgcaggtccattgccggctacaagaccccctacgacgacgtggacactgtcctgatccgtgagaacaccgagggcgagtactctggtattgagcacattgtggtagatggcgtcgtacagagcatcaagctcatcacccgcgaggcctctgagcgcgtcctgcgatacgccttccagcacgcccgcgacattggcaggaagaaggtccgcgccgtccacaaggccaccatcatgaagatgtccgacggtcttttcctcagcactgcccgcgagattgccaaggacttccccgacattgagtttgacgccgagctccttgacaacacttgcttgaagatggtcaccgaccctgtcccctataacgacaaggtcctcgtcatgcccaacttgtacggagacattctctccgacatgtgcgctggtctcattggtggtctcggtctgactccttccggaaacatcggtgacaactgctccatcttcgaggctgtccacggatccgcgcccgacattgctggcaagcagctcgccaaccccaccgcgcttcttctcagctccatcatgatgctgcgacacatgggcctcaacagcgaggccgctaacattgagcaggccattttcaaggttcttgctgagggcaagaccatcactggtgacctcggcggcaaggccaagaccttcgagtacgccgacgccgtcatcaaggcgctcaagtagattggaatatggaattgatgagcattgacacgaccgaatggtagccattgcatatctggatatgtactagtccctgtactatagctgccatttagctagatacacgcctataccacttgaaatttgcatattgataaag

SEQ ID NO: 49802 - DNA, 425 bp, Zea mays
  Clone ID: MRT4577_145418C.1
taggggccttttttttttttttttttctttttttttttttttttttttttttttttttttaaaaatttacttaaaaaaaaaaggtatggggatataacaggggaccctcgggaacagaaatcccaccgaatggggaataccgaggccgcccaaacactggtcccaagggaacggacccgggaaggacccccggtggaaaaactggagggccaaaaacaacgcaatggcccccatggggagggaaggaaccccccccgcggggcccaagaaccccgaagggccaaccgggaaggcccaacccagggcccacctggggggggcccacccccccacccaaacccccccccccaggcgaccggaccccccccccggcgccccgcggcccccccccccccccccccccccctcccccccccccccccccc

SEQ ID NO: 49803 - DNA, 435 bp, Zea mays
  Clone ID: MRT4577_145419C.1
tggggtacctcgaggccggccggggcttcctatcatatcgcatcgtcgaccgatgcgaggaacttaatcgggaatccggcttcgcctcatccgcagaacaagccgcactcagcgacggcctaccgccactaacatgcccgggataagtgtcgaaccaacactaccatacctatccgcacgcgactgtcgaagacggttgattcttgtggcgatatatcggtacgcacattcagaccatggagatctccctgcagttgctcagcgggggctacctcctcatgcacatcaaggacaacctgaacctccgccacatctcgctgctgtacgtacatgctacagctcgacctccacagaagcaccgacggacgtcctacctgaactccacctcgctctcaatatcaggaacttctactagcagctatgatgcaattgtct

SEQ ID NO: 49804 - DNA, 365 bp, Zea mays
  Clone ID: MRT4577_14541C.1
gacaccactatactgacgcccgacgggcagtgtaacattttacttgagacatgggtaaggagaatactcacattaacattgcggtcattgggcatgtctactgtgacaagtcgaccaccactggccacctgatctacaagcttggaggtatcgacaagcgagtgattgataggtgcgagaaagaggctaacgagatgaacaagcggctattcgcgtatgcgtggatgcttgacaagctaaaggctgagcgtaagagaggtataacaattgatattgctatgtggaaggtagagaccaccacgtactactacgctgctattgatgcaccgacacaccctgactgcatcaaaaatatgatcactggc

SEQ ID NO: 49805 - DNA, 422 bp, Zea mays
  Clone ID: MRT4577_145420C.1
ggcagacgaattggcttgtagttgtctcaccgtaagaacttaagtaagatggtgttggtgctctttatcgtggttttaacatgctgctgtgcgtggtaatcatatgtattatgcgagggcactcggacattctgggacctttgatgtttcctatcaatctcaggtagaccttacatggagagctccaggaaatttgctttgccagcttccctatgagttggatgagactaatgggcctgtcttgaatcataccccattgatatactgcggagaaggaatataatacatctggtgaggctgtacaaacaagatcttcttggatgcgttccagcatattcttaagaaggaagggcccaagagcctgttcaatggagctggtgctgacattcttcacgccattgctggtgctggtgtgctttctg

SEQ ID NO: 49806 - DNA, 323 bp, Zea mays
  Clone ID: MRT4577_145421C.1
gcagattcaacagccttgcaacgagtgcattgggactggggagagcatcaacgaggagggcctctttccatggtgcaagggtcacaacctcgttcaagagaagaaggttcttgaggttcatgttgagaagggaatgcaacacaaccagaagatcaccttccctggtgaagctgatgaagcgcctgataccgtcactggaaacattgtattcgtcctccaacaaaaagaccactccaagttcaaaaaaaaaggtgaagatctcttttattagcacaccctttctctgacctaaactttatgtgggttccaaattgttcttacac

SEQ ID NO: 49807 - DNA, 938 bp, Zea mays
  unsure (1)..(938): unsure at all n locations
  Clone ID: MRT4577_145422C.1
gtggcggccgcttcgaggnccggcccgggtcgcggaaaaaaaaaaaaaaaaaaaaaatccagatgttgatgaaattccattttttgtgttactccattttttgtgttactttagtagattttactctgtttatcctttagtttaattctgtttgaatttcgctgtattctgtaatgtaaatagaacgaaatttattgtgtaaaatgaaatttcaataaaataaaaaaggagtcttcatgtcccgttatcgagggcctcgtttaaaaaaaatacgccgtctgggagctttaccaggactcactagaaaaacgcctaaatccggaagtaatcagaaaaagaaattccattctgggaaaaaagagcaatatcgtattcgtcttcaagaaaaacagaaattgcgttttcattatggtctgacagaacgacaattacttagatatgtacatatcgctggaaaagcaaaaagatccacaggtcaggttttactacaattacttgaaatgcgtttggataatatcctttttcgattgggtatggcttcaaccattcctggggcccgacaattagttaaccatagacatattttagttaatggtcgtatagttgatataccaagctttcgttgcaaaccccgagatattattactacgaaggataaccaacgatcaaaacgtttggttcaaaattatattgcttcatccgatccgggcaaattaccaaagcatttgacggttgacacattgcaatataaaggactagtcaaaaaaaatctagataggaagtggggtccgtctcaaaataaatgagttgtttagttgtagaatattatttctcgccagacttgaacttaacgaaaaaaggaaacggtcatagaattttttttcccctttccctttccccgaactaaatcgacctaaggctattaattccgatttttc

SEQ ID NO: 49808 - DNA, 1665 bp, Zea mays
  Clone ID: MRT4577_145423C.1
cctcgagccggccaggacgggtcgacccggcgcctccgcttcgcgttctctcctcatctcctcacgctcaggatccggcggcgaaggtaaggcaagatgtacacagcgaggaagaagatccagaaggataagggccttgagccctccgagttcgaggactccgtcgcccaggctttcttcgacctggagaacggtaaccaggagctcaagagcgacctcaaggacctttacatcaacggtgctatccaagctggatggtcacgtaattccattttttgtgttactccattttttgtgttactttagtagattttactctgtttatcctttagtttaattctgtttgaatttcgctgtattctgtaatgtaaatagaacgaaatttattgtgtaaaatgaaatttcaataaaataaaaaaggagtcccggggggagacagaaagtcagatccgtgttccgtgtccgcgtccagtgtgtccgctactccgctccccctcagtcctcagttcctcacctagcggtagcgtgcgcgcgggagacgtagatggcggcttcggaggcggcagcggcggcggcaacaccggtgacgccgacagaggggacggtgatcgcgatccacagcctggaggagtggagcatccagatcgaggaggccaacagcgccaagaagctggtggtgattgacttcactgcaacatggtgtcctccgtgccgcgccatggctccaatttttgctgatatggccaagaagtccccaaatgttgttttcctgaaagttgatgtcgatgaaatgaagaccattgctgagcaattcagcgtagaggccatgccaacattcctgttcatgagggagggcgacgtcaaggacagggtcgttggcgcagcaaaggaagagctagcaaggaagcttgaactacacatggcctcgtagatcagtgatgccgtaatgtagtattcgcctaaataagaggacgcctcgcctcaactctgagaaaactagtgcttctgtgatggtaattcgtatgagagagtgccccctttggtggtacttcttcgtatgtagtattaactcctgtcttaatatgttgccctgcttgtgcttttcataccaaaaaaaaaaaaaaaaaatgcggagtcttcatgtcccgttatcgagggcctcgtttaaaaaaaatacgccgtctgggagctttaccaggactcactagaaaaacgcctaaatccggaagtaatcagaaaaagaaattccattctgggaaaaaagagcaatatcgtattcgtcttcaagaaaaacagaaattgcgttttcattatggtctgacagaacgacaattacttagatatgtacatatcgctggaaaagcaaaaagatccacaggtcaggttttactacaattacttgaaatgcgtttggataatatcctttttcgattgggtatggcttcaacgcattcctggggcccgacaattagttaaccatagacatattttagttaatggtcgtatagttgatataccaagctttcgttgcaaaccccgagatattattactacgaaggataaccaacgatcaaaacgtttggttcaaaattatattgcttcatccgatccgggcaaattaccaaagcatttgacggttgacacattgcaatataaaggactagt

SEQ ID NO: 49809 - DNA, 1090 bp, Zea mays
  Clone ID: MRT4577_145424C.1
ggccattgggtacctctccgcccgggcaccggggcgcgtctcgggggcggggagagaaagtcagatccgtgttccgtgtccgcgtccagtgtgtccgctactccgctccccctcagtcctcagttcctcacctagcggtagcgtgcgcgcgggagacgtagatggcggcttcggaggcggcagcggcggcggcaacaccggtgacgccgacagaggggacggtgatcgcgatccacagcctggaggagtggagcatccagatcgaggaggccaacagcgccaagaagctggtggtgattgacttcactgcaacatggtgtcctccgtgccgcgccatggctccaatttttgctgatatggccaagaagtccccaaatgttgttttcctgaaagttgatgtggatgaaatgaagaccattgctgagcaattcagcgtagaggccatgccaacattcctgttcaaatgagggagggcgacgtcaaggacagggtcgttggcgcagcaaaggaagagctagcaaggaagcttgaactacacatggcctcgtagatcagtgatgccgtaatgtagtattcgcctaaataagaggacgcctcgcctcaactctgagaaaactagtgcttctgtgatggtaattcgtatgagagagtgccccctttggtggtacttcttcgtatgtagtattaactcctgtcttaatatgttgccctgcttgtgcttttcatattttcataccaaaaaaaaaaaaaaaaagccccctattccagctccagctatctgccgctccagctaggtaaccacggcggcgcgcgcgccatctgacctacggggcggatacagcggaggcaaccgtggaggaggctacgtgaactccaacggtaactggaggaactgagcgggggggtccgcgcggccaagttatcctgttcgctaccgtgatgtttaccctagtccagaggggttatcttcattcgtgtcgtgtttgctgctgcccatctgtggttttgattgcaaggtcgctctgcgtcagctgaataggctgtgatcatcctcgggttctgtagacgcatgcatcagacagaatggact

SEQ ID NO: 49810 - DNA, 2302 bp, Zea mays
  Clone ID: MRT4577_145425C.1
cggccgggccgggattggccattccgcccgcatgaaaccccaaaccctcgccggcatcgccgtcgccgcagcagcgcccgcgtagcccgcccctctcgccctcgcccccctccccgcgccccgatcccgcccgctccgcagccgatcctgccgggagcacgaccgatgacgatgaacggcgccgctgcaccggagcgctcgcccccaccctcgcccccgcctctggtccaggcccaggcgcctccgtcgccatctccggctcagccgctcgagtggaggttctcgcaggtgttcggtgagcgcagcgccggggaggaagtccaggatgttgacatcatctcagcaatagagttcaataaatcgggacatcatcttgccactggagacagaggtggacgagttgttttatttgaaaggactgatgtcaaagatcttgcttctagaaaagatgctgagaaagctgattattctatcagcaggcatcctgagtttcgctacaaaactgagtttcaaagccatgagccagagtttgattaccttaagagcttggaaattgaagagaagattaatcaaataaagtggtgtcaagcaacaaattgtgcattcgttttcttctatccacaaatgacaaaacgataaagttttggaaggtccaagaaaagaaagtaaaaaaggtatctgagatgaatttggaccgttcaactgctcctacaaatggtagtcctggtggtacgggatatccgcgcccatctctctcaaatggcaatgttctaaaacctggcggacttcctttgctacgccttcctgtggttacaacccaagaaacaagccttgctgcgagttgccgaagagtatatgctcatgcacatgactatcatataaattcaatatcaaataacagtgatggtgagacatttatatcagctgatgatttgcggataaatctttggaatttggaaatcagcaatcaaagtttcaatattattgatgttaagcctacaaacatggaagatctcactgaggtgataacatctgctgaattccatcctactcattgcaatacattggcgtatagtagctctaagggctccattcgacttgttgatctgcggcaatcagccctttgcgacactcattcccaaatctttgagcagcatgaggccccaggttcaagatcatttttcactgagattatagcttcaatttcggacataaaattttcgaaggatgggaggcatattctcagtcgtgactacatgactctgaagctttgggatgttaagatgaattctggtcctgttgcaacattccaggttcatgagtatctaaggcctaagttatgtgatttatatgaaaatgactcaattttcgacaaatttgagtgttgtcaaagtggtgatggattaagagtagcaactggttcctacagcaacatttttcgcgtgtttggttgccgttctggtagcagtgaagcaacaacacttgaagcaacccgaaaccctacaaggcggcaggtccagactacctctagagctaccagatccctaagtactctgacaagggccgttagacgaggtggagagagcactggaatagatgccaatggaaattcctatgatctgagcacaaagttgctccatttggcctggcacccatctgaaaatctaattgcttgtgctgcagccaatagcttgtacatgtactacgcataaacaagcgaaacgaacagagcgacagttttttttgttggttgctcccggtgagaaagacacgtttagccaatggtggattgaagccaggagttggtggagatggtgtattttgtgccagtcggaagcagttcttttcggtgccatatagagctgtccagagtccaagaggaagtgactcgatcattcccgggaagcagctttgattctgattattattattttttgtgtggggaaaggcttgtctttcccccataggttcatttagatttaaagataaggtcctagcttgacaacatctgggcatctgtagtagacgatgttaaggggatggcgacgatccaccgttgtattcatgttgccatgggtttgtaacttcagggtggccgttggagcttttcatagttttatcttacatacagatcgaccttattttttttcccttgcgtggggaaccttgttttcgaagaatgccaggaccttcgtcatgtttgatgcgaaccctagaataggaaacatactgtcattttattgtatgtacatttttaataggttggagtggttcttctgttgtttagctatattcttttacc

SEQ ID NO: 49811 - DNA, 795 bp, Zea mays
  unsure (1)..(795): unsure at all n locations
  Clone ID: MRT4577_145426C.1
attgggtacctcgaggccggccgggagcccattcacagaaggcgtcttcccagcagcgccttcatcagccaccgccgtcgcgtcttcttcagctacaccttccgcaccgcggctgaaaatgcgccgctgccccagatcgtcgtcgtgggctccgccgacatctacgtcgaggtccaccgatccccgctcatcggcgagacggccgcgcgggcggcaagggcgccaacctggccgcctgcggtgcgccctacctacctcgtggcgcgcgtcggggatgacgccaatggccgactactcgaggacgccctagccgacgccggcggcgttgcaccgaccgcgtcgcgcgcgcggccgatgcgccatcgggacacgccatagtcatgctcatgccccacgaccacaactccgtcatcatcgtgggcggggcgaacatggagagctgggcggcggggattggctcggaggacctggattgatccgaaaggaaaatgcagagggagatacccgattgagtcaatccgcaggctgcccaggcgcttgctttttatcaatctcagcttggtttgggcacacatttttctttttttttatgttactgtttgattattttgatctcaattagactgaatagggcaatgtagctttgagcgccatgccacagtttttaggtgtttcctgccacaactatgatgcaccacacttccctagcatcatgtcttacacgtagaagactcattttcatgctanacttncgatttgctgaccatacattctgtggcaaccgcagcttgccaa

SEQ ID NO: 49812 - DNA, 427 bp, Zea mays
  Clone ID: MRT4577_145427C.1
gcgaatccaaaaccgcggcccccaattctggttttttaacccaagccccccaccccccacaaaaaagagaaaccccccccccaaacttaaaacccgggcccctaaccccctcccccaccaaccccaaaggggctaacccaaccccctggaaccgggggaaggcccccaatttttccaaacaaaaaacccccctggcttttgggttcaacaaaccacgggtccaccaaaactgacccatttccccccccccaaccgggggccgataaacctgggggcggaaacccttttggtcaaggcaagcttcaccccccggtacctgccggtcttgaaaccccaaccagggttcaccccaaggaagttggggtccaacccggcaaacatcttgttaaccccggccccaaacccctcgggggaggggacccccggc

SEQ ID NO: 49813 - DNA, 796 bp, Zea mays
  Clone ID: MRT4577_145428C.1
agctaccagatccctaagttctctgacaaggacagttagacgaggtggagaaagcactggaatagatgtcaatggaaattcttatgatctgagcacaaagttgctccatttggcctggcacccatctgaaaatctaattgcatgtgctgcagccaatagcttgtacatgtactatgcataaacaagtgaaatgaacagagcgacagtatttttggtggttgctcccggtgagaaagacacttttagctcctggtggatttgaagccaggagttgctggggagatggtgtatcttgtgccagtcagatgcagttcttttcggtgccatatagagctgtccagagtccaagaggaagtgactcgatcattcccgggaagcagctttgattctgatttatttttttgtggggaaaggcttgtctttcccccataggtccatttagatttaaagataaggccctagtttggcaatttgtagtagatgttaagaggatgacgatgatccaccgttgtattcatgttgggcatgggtttgtaacttcagggtggccgttgaagctttcgataattttatcttacatacggatcaacctttttttttccagttatgtgaggaaccttattttcgaggaataccaggaccttcgccatgtttaatgcgaaccctagaataggtaatatgctgtgtcattttattgtacgtacattttaaaatagctgcaagtggttctactgtttagttattataagtaaaaaagagagaaagagaaaaaactcgaggggggggcccgggtacc

SEQ ID NO: 49814 - DNA, 320 bp, Zea mays
  unsure (1)..(320): unsure at all n locations
  Clone ID: MRT4577_145429C.1
ataccngaggggataaacttcccccagcgaaggtaaaaactgcctgaaaaaaaaatatcctaaacatccaattcaaaccggaaaaaaaaaaataccatatcgcccaacaaaaacccgaaaaaaaaaaaacttcaaacgcaaaacattctctaggtttcaactataaagctaactaaaagcctaaacaaatcctttacaaaacccaccccttttaaaaaatccctcggggggaaaagaaaaaaagaaaaaagaaaaccaacccccaccaacaatttttacatcccacaatcccaccacggaaactatttaacagcaacccc

SEQ ID NO: 49815 - DNA, 239 bp, Zea mays
  Clone ID: MRT4577_14542C.1
aaccactcagtgaccatgttggagaaggagagctgcttgcagcaaatcaagattcagcagcttgaagaggtgctgagccccacaggccgccagggagagaaggaggagcacaagtggggcatggagcagggccggcaggagctgtatggggccgcgacccaaggccttcatgggctggagaagaccctgcgtgacagtgaggagatgcagcgggcccgcaccactcgctgcctgtagct

SEQ ID NO: 49816 - DNA, 1017 bp, Zea mays
  Clone ID: MRT4577_145430C.1
atgctgctgggccgcggggtgacgcttcgcgtgctcctcttcagctctctgtggcgcctgcgggcgcgcgcgtacgccgccatctcgtgcatgcgcagcgcggcgctgccggtggcggcgtcctggctgcgcctcaggaatacccatgtcctcctcctcatggtcgtcctcttcgccctcttcttacggaagctctccggcgcgcggctctcactcgatctcctcagagaagagccacgccgccgtgccccggccgccgccgcaggaggcgggcttccgcccctacatgccatgctgagctcgagatcttgtaacccgtcggccaagtgctactctgccgagaggaccgtaaacgcaccagagcttgttgatgactactacctcaacctgcttgactgggggagcaacaacgtgatgtccattgctttgggaaacaccgggtgcctgcgggatgcatcgagcggatccacatctgagcttgtgaccatcgatgaggacagcggtcctattaccagcccgagaacactgagaggtgtgcatgaggcaaggacatacgagaggcacatttgggatcagggcagcagctggccaggaggtgtgcggactcaagtggtctggagcagggcagcagctggccagtggaggcaacgacaaccttctgcacatttggggatgatgccagtattttctacttgctgtattgaaatgattactagatgggataattcaatgccttctgagggatcttctgagatagatgtctggcctgagttccagaatcttactggagatgttatctcaagaactgcgtttgggagcaactatcaagaagggaggagaattttcgagctgcaaggagaactagctgaacgcctcatccaatctgttcagacaatatttatcccaggctattggaagctccagacagagaaggcaccgacggcactaggacctaattctcaggccatcaaagcaaacactgtccagttaactggtcataacatttttttacaataa

SEQ ID NO: 49817 - DNA, 404 bp, Zea mays
  Clone ID: MRT4577_145431C.1
agagaacgagcatttctgtttacattgtttaacttgaccccaagaaacacaaggagaccctgttgttttttcactaaaatcggacatcaaagagggggttgacactgacaccaacacccatggagacaccaaaaacatgataccctaaaaacctccggtaaatgaatcacaactcgctgtagccatagggaaatctaacacacatggctgcctcaaccgggggaaccctccagcattaaatccgggccaaaccaccccgcgggtagaccaactaattcctgcccagcacctgctggacgcccagttttacatacagtaactggaaataaacccaggcctaaataaccacacaacagtcgccaccctgaaaaagtgatccggccacacttctcacccccttcaaa

SEQ ID NO: 49818 - DNA, 323 bp, Zea mays
  Clone ID: MRT4577_145432C.1
gggggggggcgggtttttttctttcttttttttttttcttttcttcttgttttctttcttttttataggttctttgttgggccaccgcgtgtgctttggcctgcgcggcggggaaacaaccaaaaaaaaaaattaggtaagtttacccgcgcgctctttggggggggggttttgttctctccctgtccgctgctgctctggcccgggggggggggtggttcccccccgtgggggcccgggtgggcctggcctttgtgcctcctcccaaccttggccctgggcgggcgctctctctctgggtgtgtggaggtttgggcccgggc

SEQ ID NO: 49819 - DNA, 884 bp, Zea mays
  Clone ID: MRT4577_145433C.1
tcgcacaccccccgcacctctctctcgccacccaggcacccagcctccacgccacagatctctctccctttcccccctctctctctctccgaactctaccccgcagtctcggccgcggccatggcggaggacgcccccaacgccgtcgccgagggcagccagcccgcggcctccgagggatccgccgacgccgccctgccggctgccgcgggcgccaaggccgcggaggcgctgctcccgtcgctcagtatctggccgccgtcgcagcgcacgcgcgacgccgtggtgcgccgcctcgtgcagacgctcgcggcgcccagcgtcctctcccagcgctacggtgccgtcccggagcccgaggccgagcgcgccgccgtggccgtcgaggccgaggccttcgccgccgcctccaagtccgccgccgccgccgccgagtgcccggcctccgtcgaggaggggatagaggtgctccaggcctactccaaggaggtcagccgccgcctcctcgagctcgccaagacccggtccgccgctgctgcggcggcgcccgcgcccgccgaggggagcgcgcaggcgcaggagtccgcggaggcctcgtcggcgactgctccacccaccgaggaggctgccgtaaacgaggagtaaggcgtcggaccgcgctttgatccaccgacaattgctgttattttggcatttcgtcggaatgttatttatcgttccccctgcctatgttttaagtacatctattatctatctattagagatgagatgcttgtgacaagagggactgatgtttgtttcatggatatgatattctcgaatatttatcgctagtttatttttaactaaaccgcggcaaataaaaaaaggagggagtaatattg

SEQ ID NO: 49820 - DNA, 224 bp, Zea mays
  Clone ID: MRT4577_145434C.1
ggccgcgtcggggtgcgccatcccggccacgcccagcgccgccgccgcgccgcgccgcagctgtcgggcgtgatggcgccccgctcccggtccggcagcagcgctgaaccccgcgcgcagctgcgccagcagccccgccacgcccagccactcacccatgaggggggggggggggctcgtactgctcgccagcgccgcgttcgccgcgacggacccagctcccg

SEQ ID NO: 49821 - DNA, 1378 bp, Zea mays
  Clone ID: MRT4577_145435C.1
taagctcggaattcggctcgagcttggatgtgtggtggagaacaaggtgctttgcaactcactgctcttacgtttacaggaagaattggatgatattgaaaatgtgatatatcctaccagattggtgtctcttactttcccgttgaagaccagacaagcaggaatgaaaccaacatcaagagaaccattatctgttggtcatactacagaagagttccatcgcagtcatttagttaaacttgatctcagtgatggacggagtttatattccaaattggtgataggagctgatggttcgaagtccaatgttagacagattgcaggcataaaaacaactagttggaattatccgcagagtgcaattatctgtacagtagagcatgttgtggaaaatgattgtgcgtggcagaggtttctcccttctggtccaattgcgctacttccgataggcaataacttcagcaacattgtatggacaatgagtccagaggagtcactgcgccataagtcaatgagcccagaagagtttgtgaattctgtgaaccacgcattggattttggttatggtccgcatccacgctctaccgctcttgaccattacatggaacagttcttttctggcattgggagcagtgcagcatctacaaaggaatgcttcgaagtgccaccgaaagcaacccgtgtagtttctgagagaatggcgtttccattgtcgttgatgcattcccatgattatgtttccaaaaggttagcattagttggagatgctgctcatactgtccaccccttagccggccaaggtgtaaacttgggctttggtgatgctgctgctttagcaaaagttattgctgagggagtttcagtgggctcggatgttggggatctgactttgctacagcggtatgagaaggagaggaaggctgccaatgtggcgatggcagcagtgctagatggttttcagaagatgtactctgttgatttggggccccttaatgtagtgagagctgctgcgttccacggtgcccagtacatatcaccactaaaaaagaacatcatctcttatgcaacgggtgacacgaaatggtcactatttcagtgaacagcactgctttgaaactcttgtcctcacctcgttctttgtttcggcatgtactggaaacaaagaacgcaatcagtaatttcgttcgcaagacatcctcattgtgttgctttcgatcttagtgttaatttgagcgcccgacctagtttgggaggttagtctctttccgtgctcactttgtatttgtactagctagagatataatactcagcgcgttgctacgtgagttgagttgctgatgatttaaataaaattagactatatccaattatcagtaac

SEQ ID NO: 49822 - DNA, 576 bp, Zea mays
  Clone ID: MRT4577_145436C.1
gtgacacgcaaaggtcactatttcagtgaacagcactgctttgaaactcttgtcctcacctcgttctttgtttcggcatgtactgggaaacaaagaacgcaatcagtaatttcgttcgaaagacatcctcatttgggctgtttggttactgggacacgtcaagcgcccgtctcgcgctagcctggatcgctgggaacgtagctcttctgcgtttctgctcgtacaggccagcgaccaaaaaaagctctatactgcatgcgcgggtgcaagcagtcgtcatgcactacagtcatccaaacacgagctcagcatggtcaacgtgacgccgtgggcctagacgccaccagccaatcaaccaatcatgcgaattgtgttgctttcgatcttagtgttaatttgagcgcccgaggcccgacctagtttgtgaggttagtctctttccgtgctcactttgtatttgtactagctagagatataatactcagcgcgttgctacgtgagttgagttgctgacgatttaaataaaagtagactatatacaattatcagtacgaaggagtaaactattccctgtgc

SEQ ID NO: 49823 - DNA, 296 bp, Zea mays
  Clone ID: MRT4577_145437C.1
cccactcgtccggtcacccctattcgctcctgaaacaaatatgtcagggacatcgtggtctcatactaccgttggcacaaattaagataggcaaatcttaagacgagtcccaatgcttcctcataagctttccatgtaacaccgacgtccactcacccctcaagaccttcagctcgtacaactacgtcctcgattgcaatactatcctctatcgacaaacgaagacatgatgcagattcgcctgcaccatcttgctcactgaggacgcgcatcggatcgctctctagggcatgaac

SEQ ID NO: 49824 - DNA, 232 bp, Zea mays
  unsure (1)..(232): unsure at all n locations
  Clone ID: MRT4577_145438C.1
atcgcaaacgactagctcaccaaacacctcacttcatctcgccatcgcggcacggnggcgccagtccacctcgactcgctgccttcaccacaaatatcgcctcttcgagtctcgccatcacataatcacccccagccactcccctcatctcccatcccctcccttccacttaccctgaatcggcgcgtaaaggatggcgttccggcggtgcaacaacaccttgttcgctctg

SEQ ID NO: 49825 - DNA, 439 bp, Zea mays
  unsure (1)..(439): unsure at all n locations
  Clone ID: MRT4577_145439C.1
ggaggaggtgctccgcgtctccggcggcgcctcctgcagagtgccggactacgacggcctcagccgactgaaaatcgagaccatggtgctgaacgaggtgctgcggctctacacgccgctgccggcgttgcaccggcggacatacaagcccatggagcttgggggcgtcaggtacccggcgggcgagatgctgatgctgccgctgctctgcatccaccacgacaaggacgcgtgggggccggacgccgacgagttcaggccggagaggttcgcggagggatgtcgcagggccgtcgtccgccggggacgcgccgcncgtagttcttcccgaccggctgtggacctcggacctgcggaggccagaccttcacgctgctggaggccaagatagggctcgccatgactctggggagcttcacgttcgagctctgcacatcct

SEQ ID NO: 49826 - DNA, 349 bp, Zea mays
  Clone ID: MRT4577_14543C.1
gttactcaagggccaatccttaaggactcagcgctaaattggggcatttggatttttacaccggaagaatgtttatacagaccaattgttattaaaagaatccgaaaaaactgtaccaaacatgtggcacgtgacctatgtgcaaagggtagggatacacaccatgcagctatgactcgaatgctggaggactcagagctaaattggggatcttggatttggaggccgccgcatttggtattgggctggcgagctggctcactcctcactgggccaggaacatgccaagtagtagcctccatgagttcatgacatgagaagtagaagaccagaccatcggagtctggag

SEQ ID NO: 49827 - DNA, 390 bp, Zea mays
  unsure (1)..(390): unsure at all n locations
  Clone ID: MRT4577_145440C.1
aaaaccacaaaccgcacagcgaaggggaacgcagccgacacgggaggaggaagaagggcggcccaggcgcagccggcgcaggcgaggagcagcaacgcacgcacgcaagccgaagccgcggaggccagccaccggcggcggcacagcaaccgccgccggggcaccagccaaccacgggggggggggcacccccagaagcagaagcaccgccggaccaccagccggcgacgggacaccagccaccggcggaccangcgccgacgacggaacaacagccggcgacaccaggccacgacccaacaaaaccggccgggacggaggcgaaagaccagggacacccaggcccgagccaaccaggcggaaacaagagccgggccagccgcaggaaac

SEQ ID NO: 49828 - DNA, 509 bp, Zea mays
  unsure (1)..(509): unsure at all n locations
  Clone ID: MRT4577_145441C.1
ccggccaggtgtccgtccgtccatgcaaccaagaaatttcatggagaatctgtacaaaagagtggctagctactacacgagagtctggtctcagagaagcaacacgaggtcagtcagtggatgaacttagagagagacattcacacgctgagagggttgataatttgtgatattttcctcctttttttcttcttcctgattttgtatattgtatatcctgctggattaacaaatactagcaaccacttatagtcagtcaacataggccatctactgccagtacctcttttcttctcatgagttgtagcagtttctgtttaattcatatgattgtaattacaatcatattttaagttactactatagtttctgtttaattacaatcatagtttctgtttaattaaaattcatatgattgtaanaaaaaaaaaaaaaaaaaaaaaaaaaaaaaaaaaaaaaaaaaaaaaaaaaaaaaaaaaggccaaaaaaaaaaaaaaaaacccggggcc

SEQ ID NO: 49829 - DNA, 1126 bp, Zea mays
  Clone ID: MRT4577_145442C.1
ccgttactccgctggcgcaccggacagtccggtgctacactggacagtccggtgctacactggacagtccggtgctacactggacagtccggtgaattatagcggagcggctcccagaattctcgaaggtggcaagtttaaagtcgggttccctggtgcatcagacactgtccggtggcacaccggacagtccgtttgttgtgatcctttggcacctattcaatcggtcattaatgaaggacgattaaaatttcaggaaatgcaggtggacacggagccctttccgatgaacatgatcgattttgagggtaagaggatcctggttcggccaaacacaaccgataagggcaaagacaaagagataatcatcggcaacacaagagaggccgatggcaatcacaaaatttcttgcaggaaagtggtggccaagaagactcccgatggaggggagactcttaaggtgaccatcacgacctccagcgctcgggggcaagcgcagaccaaggagcaggagcccgtgctgcgcatctcggatggtccgacgcacaagcgcagacggtccgggaccacaccggacggtccagagaattccagcggatggttcgatcatactcaagacctgcaacgaccgcgtaccttcaaaccacaacgaccagagataggtacgtggaaaacaaatacatttaaagcatgtggtcaaatctggcccgactttcgatcaattattgtcaaatatgtgaaaaagaaggccggccccagtgaccggccagcaaagcgacctcgcttgcccattcgtgagcaatgtcaggtaagaccgattggaccaccccaccaatcggaagaaatggaaggtcatactgtccaattgagatctaacatacctatatggacacctccacccccttatccacctatgtcatatccatacacatatttacctacaccatatgtcccaaatcaaatgtggggcatgccaccatatccatttgggatgccacagtaccctgcttcgggggcaccccaaacatttgtattcaacaggttggcacctccagtacaagaccgattgagcgtcgctcaatccggtcaccagacacaggcccaacaagattgccagagtgcttga

SEQ ID NO: 49830 - DNA, 305 bp, Zea mays
  Clone ID: MRT4577_145443C.1
cgcttactgaaggtcccctcatgaaactgctctggctgcctgcaggcgactctggaggacgcccggcatccgctctcgaacacctgctatagggaggcgggtcacaacatagtgggcgtgccgttacagacgggtgcactggtagcaccctctggcgaccgagatgaatgcgcttgtgcacgatacgactttggcgagctgcgatgctaccacagaggcgtgcaccgatcgcacttgcgaaacgttgcccgcgctggccggggagtggacgcgccctgtcgccgcccgatggcgccacgcgcacg

SEQ ID NO: 49831 - DNA, 435 bp, Zea mays
  unsure (1)..(435): unsure at all n locations
  Clone ID: MRT4577_145444C.1
gcaccaagaaacgcagcagcagatcgactttattgatattcataattcgtacataaaagtttggcaaaccatacactagtgcttttgctagctacttgtgcgagaagagagagcgcacggcgatagatatggcgcatagcaagcgcgaaatcaagcccgggagggcgcataccaaggtggccggcgacgacgagatgctgcggaccgggttcttcgacggacgccgctgagggcggaagatcgcgactccagcnncacctttcgcgtgcccgcggtcgcgaccccgtctatcgagaggaggacaacgaggggggccacatgacccgtatcgggagtggacccgtaacctgccggagcgccgggcgtgcggagtaaccgtctgggcggagagcaacggccgggtcggagggcatggcgagcccaccggcggtgacg

SEQ ID NO: 49832 - DNA, 333 bp, Zea mays
  Clone ID: MRT4577_145445C.1
accacgcgtccggaaatagccttttgtaggagctatggccatcttggaggaggtgcacatgatcaattttataccaccaactgtcctagactgaatgttggtcacacaccgaaaattatgcaagaggagacatttgaacctatgataccaatcatgaaatgcacacctaatgaataggctatcaaactcgcaaacgactcaaaatatgatcttgcatgaactggatttatggcaaccagaatcttgccatcagaatatcattccatttacactgtggggtagcagaaataaatgcatgtgctccaagatacatgtgtcagtctataccattca

SEQ ID NO: 49833 - DNA, 202 bp, Zea mays
  unsure (1)..(202): unsure at all n locations
  Clone ID: MRT4577_145446C.1
aacccaccgagcttggctattatctttcagctcgcatttgcaccnatgatgaagcggaccacttaccttgctagggttnaacacaatgaaaccaaactttccaaagttcttgatttgtataaccaaccgcttggggaaaaccaagattttgcttgttataatttctccctaacccacctttttcactttcccaattcaaatt

SEQ ID NO: 49834 - DNA, 446 bp, Zea mays
  Clone ID: MRT4577_145447C.1
agcagtggtaacaacgcagagtacttttttttttttttttttttttttttttttggggtcagcttctgcgtgccttcactacacaacagcttacactctacaggctacagcagcacagctaaaccaagacgatagaatacagcagtacagcaccatatcgtggagagagagagatagagagagagaggatcaggcacacgcacactggctggcacacaccctaggacactggaggttacagatcaacaaacagatgcagtagtggtggtggtggttacttattattggactttgtaaaaacgcttagcccgggaagtaagtaaaactcttgcgttgcgtcaaaggatgaggatgaggagggggagtcctcgtggaccggtcaggcgagcagccagaagttcttctgccacccccgcgtactctgcgttgttaccactgcttaagaa

SEQ ID NO: 49835 - DNA, 126 bp, Zea mays
  Clone ID: MRT4577_145448C.1
cgaagcgctaccgccggtcttgacggtccctgacgctctctctttcaactcgcctgcatcctgctcagcgcgccaagcgacgtgcttcgccttgtcaccgtcctggtcaccgtagtatctcgacct

SEQ ID NO: 49836 - DNA, 287 bp, Zea mays
  Clone ID: MRT4577_145449C.1
cggaaaccaagagcacacaagggggacacacgacgaacaaggcgaagggaggagaaacagatcgaaacgcaggcgaaggaacaacggactgggccggacacgaaaacaaccaggccccggacaaaccgaaggacagcggaacccggctagccaggcaacggcactccagggcgaagaacatcacgaagtagcggggggacgcgcgccagtccagggagctcacgaaccgccagaacccgtacaacgccgggcagggccatgagccaatcggaggagagcgcccaggg

SEQ ID NO: 49837 - DNA, 1715 bp, Zea mays
  Clone ID: MRT4577_14544C.1
ccggctgcgcaccgaacaattcggcaccccacttcaccgcgcggaaaaaacaaagagattcccctttgctctacaggaagcgccgacgccgttgatggaattcggaaggaccaaagctgctgccgtagccctgatccccgaagcgaccttccgccggtccagtctgtccttctcggcctccgcgacgccgtggtcccgggaggtgtgggtcaacgcatccaaataacggctcttccagaggaaaacactgctgaatttctcagctggtgcctagtggtgggaaataaagctagggacccagcatccttgtgatagcaatcacatcattggtgttgttttttcagcttacgctgaaactagactgatcaagaaggcgaccagctgtcaaaatgcatagacagaagaacccaaactctgggtgggctgcgtttgatcgcaagcagcgcagtgcagatggcagtgggtatgaaggtgatgctgatccatttccgtctctctcaaattctggagcctctaatattgctagtagctccattacagaaaagaatgggctaaaacgaaagccctttgcttcagtggttcgcccttctgttgattctggagctgttagtactggatgcggaaataagaattctgctaatcacgtggacagcgggaatcacggtgcaatctctgcacctcttaataaagttaagatcttgaaagatgcacacagttgggccgacattcacttaattgaggatgtactagctgctgtgaataatgatgtcggacaagcatctgatttgttgaaagttatggactctcctgccttgcagactggagagggcagaacatctggccaactggctgatgtgatgaataaaacacacggatcaccatcagaaagtgctgcagcaggcaaagcaaatccagatagctcacagttgttgctgcccctgatgaactttccctctatacccttgcagcctgaattcgaagatattgatgatgaatacttcagctaccggaaagatgcattgaaaatgatgagggctgccacaaagcattcccagtctgccagtaatgcatttttgagagatgaccatgctgctgccaaggaactttctctcagagctcaggaagagcgggcagctgctgaaaagctaaataacaaggcagcggaagaaatttttcgccttaggaatagcaataatgacatctggaagatagacatgcatggtcttcatgcatcagaggctgtggcagtattggagaggcatctccacatgatagagttccagcaacctgggaataagtcagcctcatctgaggacttagctaagttggaatctgcatattctgaatcaaccactggttcaaacattgagcttgctgctgagaaggtggtcttacgccggcctaagcagtctatcttacatgtgatcacagggatgggtaaccatagcaaagggcaggcttcactacctgttgccgttaggggtttccttattgagaacgggtatcgatttgatgagctgaggcctggtgtttttgcggttcgtccaaaattccgccgcaggtgaacctgtggaagtttgtacaattgtaacatggtggtggcttggggtgattatgtgctctaaattttacactaaaatttaaggatcaaatcggattaggatcagactcatttttattatgaagtagatccttcggtaaaaccccaaacacac

SEQ ID NO: 49838 - DNA, 282 bp, Zea mays
  Clone ID: MRT4577_145450C.1
gaacaatctgcacagtcgtgatgtatcaactttatagagaggagctacctggagggactgcctaacatgggcacaccatcagtcaatgtcaaacatgatatcaagcggcatgacataacacccttgcatctcttatgctggaccgaaccatagactcaacaaggacaacacacttggtctttgctaaacactctactgtacaggcaatcactatgtgatcatctttgatacaacaagccaggcatggtaatatgcattgggcacagaggctgggttggtaca

SEQ ID NO: 49839 - DNA, 813 bp, Zea mays
  unsure (1)..(813): unsure at all n locations
  Clone ID: MRT4577_145451C.1
cattggtacctcgagccggcgggtcttggttattcgtcccacgatggcgtccaagaaccaagttgatctcgagtcccagaagcccatgccgcaggcgttccggagcaccgccgagctggccaagcacctccccaccggcgcggtgctcgcgttcgaggtgctgtcgccggtgttcaccaacggtggcaaatgcgacgacgtgaaccgcgtcatgacgtcctggcttgtggggctctgcgccgcggcgtgcttcttcctctgcttcaccgacagcttccatgacgccaaggggaccgtgcggtacgcggtggccactcgccgcgggctgtgggtcatcgacggcacgccggcgccgccgccagtggaggccgccgagaaacggatcaagttcatcgacttcttccacgcgttcttgtcggtcatcgtgttcatgtccgtggccatgttcgacgggaatgtcggggcgtgcttcaaccctgtcatgtcctacgacactcggcaggtgctgactgccgtgccgcttgccggagggctcgtcggcacgctgctcttcgccaccttcccgtccacacggcacgggatcggattcccgatccatgcttcctgagatacgcctgttgttgttgctacgaactagcagctgatttctttgggttgcgtgtctccatgttcttagagctaggtttgttgtgccggggtcgtattgngagggttgacaaacacagacagtaccattggttgngaacttcggatattcctggacatgcattattgtttatatttttagcttgcgaccctcagtaattaataccg

SEQ ID NO: 49840 - DNA, 1106 bp, Zea mays
  Clone ID: MRT4577_145452C.1
cggacgcgtgggtgcaagtcttctcttgcttgcgcgtaaacacaacacagcatacatgcgttccacaaacctactctctccgtaacacatcatccaccaaagaacttatatatccacaaagatccagtccatcttggttattcgtccccacgatggcgtccaagaaccaagttgatctcgagtcccagaagcccatgccgacgcacgccgtcgttgcatcggctcccgcagcttccgtgccggcttcttctggtacaggctccgtcgttgctggcatctccgacgctgcgccggagacccagccactcctggctgagccgaacggccacagccaggaggaggggctgggagacggtgggggtaccgacgacgagacaacgcagctggagcgagcaatggcgcaggcgttccggagcaccgccgagctggccaagcacctccccaccggcgcggtgctcgcgttcgaggtgctgtcgccggtgttcaccaacggtggcaaatgcgacgacgtgaaccgcgtcatgacgtcctggctcgtggggctctgcgccgcggcgtgcttcttcctctgcttcaccgacagcttccatgacgccaaggggaccgtgcggtacgcggtggccactcgccgcgggctgtgggtcatcgacggcacgccaccgccgccgccagcggaggccgccgagaaacggatcaagttcatcgacttcttccacgcgttcctgtcggtcatcgtgttcatgtccgtggccatgttcgacgggaatgtcggggcgtgcttcaaccctgtcatatcctacgacattcggcaggtgctgactgccgtgccgcttgccggagggctcgtcggcacgctgctcttcgccaccttcccgtccacacggcacgggatcggattcccgatccacgcttcctgagatacgcatattgttgttgctacgaactagcagctgatttctttgggttgcgtgtcttcatgttcttagagctaggtttgttgtgccggtgtcgtattgggagggttgacaaacatagacagtaccattggttgggaacttcggatattcctggacatgcattattgtttatattttaagcttgcgacc

SEQ ID NO: 49841 - DNA, 249 bp, Zea mays
  Clone ID: MRT4577_145453C.1
cgcgaccacgcccccgctcctctcgtctctttcttcgcctcttccatcgcaggattcggcggccatgggcggcggcaacggccagaagtccaagatggcgcgcgagaggaacgccgagaagaacaagggcggcaaaggcagccagctggaggccaacaagaaggccatgaacatcagtgcagatctgcatgcaaccttattgcaccactcgagccaaggcaagacatgcgagcgagatccagacgactt

SEQ ID NO: 49842 - DNA, 267 bp, Zea mays
  unsure (1)..(267): unsure at all n locations
  Clone ID: MRT4577_145454C.1
nagcactcaagtcggcggccgcccttaacccgcccttggatggttcaacacccatgatgacagtcatgggtggggacacctgctctgccatgtccggacacatatggcaccctccgtagacgctgccgcacttgcagacacagccgcacccgcatttgcctccgcatcacgacatgcttattcctcgcgatcacactcacataagacactgggatacaacattcaggaactaagatgcaaatgcaacctgtctcgagccgaattacg

SEQ ID NO: 49843 - DNA, 465 bp, Zea mays
  Clone ID: MRT4577_145455C.1
cctcgaggccggccgggagaagacttcacaagaatctactcgtcgagtcaccaaagataaggctctatcggactcggagtctcggacagcacagcaaagcaagagccgctactcaagtatagtctgacaccggccgaccctgccccaacccaagccatggcggacaacaacaaccggcggaaccacgggcagaccttgctcgccggcgcgggcctgggcctgctcgccgtgaactcgggcctcgccatctaccgcgcgaggggcgacacggccgccgtcctcttcgtcgcggggtcctgcgccaccctgctcctcctcttcgcctgcctccgcgcctacgagcgggcggcgcccgggtcgccggcccgggaccgggcgcggcgcgccgtgtggccgctcgccacgctgctcacgctctcgttcgcctggaaggtggcggcggccatgccttccgccgccgcggcc

SEQ ID NO: 49844 - DNA, 358 bp, Zea mays
  Clone ID: MRT4577_145456C.1
aaaaggaaaacccggttttaaataaaatgggccccccaaaaaagaaaacctggggggcctcccccgggcccgggggaggttaaaaattgggggggggaaacccaatttgggcccccgggaaacattggaccgcgggggggggcaattttaaacccccgggtttttggggggaccaacttggtactttgggggcgcgcgcttctgtcacaaaatttaaggagtttatcggccaaaagaccggaggctaaatgccattagctgggctggggggacgttccccccgcttagtgaaaacgccccaaaaaatccggggactggaacaaaaagaacagtttactgaggggggaaacaaaggggg

SEQ ID NO: 49845 - DNA, 803 bp, Zea mays
  Clone ID: MRT4577_145457C.1
acttctcgttttctccgctcgacaaatgctttttcccctttcctttctctctcctctcctctcgcccatccattccacacatccatccaccagattcaggagagagagagagggagagagattgcggagacgggagagagagagagggagagagattgcggagaggagagagagattgtgccggttctcggtgcccggcggttcggcggttgggattgggttgcttgcgtctattgcagaaagagagttgaatccatccagcaaacctatgggagctggctcctgagccgcggcggcgggcgggcgtatctgctgggagatgaaactggaagataatcaaggttttgcattatctgccgttccaaattttcctgctagtagtagacatcatggggtctggatcagtgactctgaagcaaaagaaacgagtgaaacatacaaagaacaagtacttgaagcctggtgccctggctcagattcgttatagtaggagcacaagcagggatatagggaagaaacggattctgttgaatgtggagaaggatgatgagctggagatatcaccacatgccgaggttgtgtttgaaagcagtacaccaattatgtctccagcaagactcagttttgagacatttagtggcatcaaggggacagttgttgccaactactccaaagactcctcaagcagctgaatgtgatggccattcaaggcttgagtcacttcctcttgatctgctgatcaagatcgtctgttacttgcatcatgaccagctgaaggctgttttccacgtttcatcaaggat

SEQ ID NO: 49846 - DNA, 294 bp, Zea mays
  unsure (1)..(294): unsure at all n locations
  Clone ID: MRT4577_145458C.1
gcttagggtaacccagttgngcattgcgcgctgtcgtcagtgctcgcgtacggctgctggagatgcgcctctagctgtgttatacaaagctctgcgtagcatctaaatacacatttctggagctttctcaaatataatgtcagcctaagatatctcaatttcttaaaatccatcggttgtatctaaatctgcaaatgtgtaaatgagatgagtgaacaattggtagtactcccttaatttgtcgagtgacctgtaatttctagattgctgcttcatcaagttgtaaattttgat

SEQ ID NO: 49847 - DNA, 104 bp, Zea mays
  Clone ID: MRT4577_145459C.1
cgaggagacaggcgcaacgtcgaagtacccgacggcatgcctaaacatgttaacgacgagtggtaggtcttctgtcgtttgctgatcgtgagaacttttaatac

SEQ ID NO: 49848 - DNA, 346 bp, Zea mays
  unsure (1)..(346): unsure at all n locations
  Clone ID: MRT4577_14545C.1
cccacttcaccgcgcggaaaaaacaaagagaggcccctttggtctacaggaggcgccgacgccnttnatggaattcggaaggaccaaagctgctgccgtagccctgatccccgaagcgaccttccgccggtccagtctgtccttctcggcctccgcgacgccgtggtcccgggaggtgtgggtcaacgcatccaaataacggctcttccagagcttacgctgaaactagactgatcaagaaggcgaccagctgtcaaaatgcatagacagaagaacccaaactctgggtaggctgcgtttgatcgcaagcagcgcagtgcagatggcagtgggtatgaagtggttc

SEQ ID NO: 49849 - DNA, 182 bp, Zea mays
  Clone ID: MRT4577_145460C.1
gaactacgcgcgcaactacctggccgagctcctggagccctgcgtgcgccgcgccatctacctcgactccgacctcgtcgtcgtggacgacgtcgccaagctgtggcgcaccgacctcggcgggcgcaccgtgggcgcgcccgagtactgccacgccaacttcaccaagttactttacgggg

SEQ ID NO: 49850 - DNA, 217 bp, Zea mays
  Clone ID: MRT4577_145461C.1
gccacaatgtgccaaagttaaatccaaattgctcacggtgcaaaggggccggagcccgcccgcacacacaaaagcatgcaaaggggcaccggggcaacacaaaggaaaacggggcctcgccaatgcgcaaatgaaagggggggccaactcctaacccgagcacctaacggggggcgcaccgaaaaactcttactaacccgcggagaccaaggggagg

SEQ ID NO: 49851 - DNA, 593 bp, Zea mays
  Clone ID: MRT4577_145462C.1
cctgggatcatcacaagcaatcgatcctaagaactttcaaccctacaaccaactcatcaatacctcaatcaacctaatcctaccaaaaccaacttaagcaatcatgcctctcgcccgccgccacgctccccgcactgccgtgcgcacctcaccacgcactatacgtgcagcgcgcccttcccttaagacccgccttcttggtggaaaccgtcgcacacacactaagcgcacaggcggcaccaccgttaccactactacaaccaccaggacgactcgcactggtggtcatcacggtcacgctactactgccgctcccgtccatcaccataagcgccatgccactatgggtgacaaggtcagtggagcgttgatgaagctacggggttctttgacgcgcagacccggtctcaaggctgctggcactcgccgcatgcatggcactgacggccggaacgcccgccgtgtgtactaagcatattggactggagtaatgaaaccgtttcctttgttattggcgctacgataagtgtacgataggcctggagatacccgatgttgtgagcgtttagtatttaatgaatcacatgaagttc

SEQ ID NO: 49852 - DNA, 579 bp, Zea mays
  Clone ID: MRT4577_145463C.1
atgccgtcgccggttgtagtggccgcgacgctgctggtggtagcactggcggcattctgcggcacggacccgctccggacggacagcatggtggacttcccggggtttgagtcccacctcgtcgacctccccaatcccgccgagatgccgacgcacgcggatgaatgggagcggctctgtggagccgatgtgcggttctgcggcgaggtgcaggggcccgagagcatcaccttcgaccagcagggccatacacgggcgtcgccgacggccgggtcgtcttctgggacggcgagcggagctccacggagggccgaaggcctcgccgctggagtatctcccagcgagcatatctgcaaccgcccgctcgggctctgtttcgataagactggggacctgtacatcgccgacgcctacttcggcttgctcaaagtccgccgcgaggccgggctggccacgctgctcgcaacggaggccgagggcgtgcgcttcaacttcaccaacgacctcgacctcgacctcgacgacgagggcaacatctacttcactgactctagcattcactaccaaagacgtctgtga

SEQ ID NO: 49853 - DNA, 680 bp, Zea mays
  Clone ID: MRT4577_145464C.1
cgtgatgggctgatggcgggtcaaggttgaagcaacgtacgcctaggagtggagacgacgagagtggagggctgctgatgggcagagacgacgaccggagagcggcggcgctccagcgatcctcgtcgccatggagtgtgggctcgcggctgtcgctgaacgagcggtggcgggcgcacgccgggatggtcctcgtcatgctcgcctacagcggttaccacgtcctcgccaagtccgtcctcaacgtgggcatgaaccaggtcgtcttctgcgtctaccgcgacctcctcgcgctcctcgtcgtcgcccccgtcgccttcctccgcgagagtgttgaagcgatcagcgtcttcaccaaggacggcatcctcaaagtcaccggcacggccgtgtgcgtctccggcgccattctgatggccctgtaccgaggcccatccttgatcgcccttcttagaagcatgcccaccgcatggacgagcgctccctaccaccctgctgctaccccagccgtgctcgagcagggtgtagaagcatggcagcttggcgtgctgtgcctcataggaaactgcctcttggcggctgtctatctactatctagtcgtgcaggtgtgtgtgtgtgcgcgctcttgccagcgagaagatgagaggacttcactgtctatgttaatcgatctctcatg

SEQ ID NO: 49854 - DNA, 172 bp, Zea mays
  unsure (1)..(172): unsure at all n locations
  Clone ID: MRT4577_145465C.1
acgcgtacttaaacattngatcctctatataccacccacttcttttctctctcataaaccctatataccatgcgactctttttctaaaaaaccccccccatctctacaccagctttatataatcactcccaccctacccttttttacccttacattcatcacaaacacattt

SEQ ID NO: 49855 - DNA, 656 bp, Zea mays
  Clone ID: MRT4577_145466C.1
ccggccgggaacgtacgcctaggagtggagacgacgagagtggaggagggctgctgatgggcggaggagacgaccggagagcggcggcgctccagcgatcctcgtcgccatggagcgtgggcgagcggtggcgggcgcacgccgggatggtcctcgtcatgctcgcctacagcggttaccacgtcctcgccaagtccgtcctcaacgtgggcatgaaccaggtcgtcttctgcgtctaccgcgacctcctcgcgctcctcgtcgtcgcccccgtcgccttcctccgcgagagaagggttaggcctcccgtgacgcctcagctcctcgcttccttcgctctgcttggcttcactgggctgtatgggaacccgctcctctgcctcgtcggcctccgctacacaaacgcctcctacgccgcggctttccagccctccataccagtgctcacgtttctcttggctgccattgtcgggtgactatactacataccatccatatatataaccctcacaatgtatataccatcatgacaaattcaaggcgtcttttagtctgcatcactaggtgaaattaacagtcctgaactgccatcaattcgggagctaataatacagcaataataccgacccaaaaaaaaaaaaaaaaaacccgcggcc

SEQ ID NO: 49856 - DNA, 269 bp, Zea mays
  Clone ID: MRT4577_145467C.1
caagaggttgcaggaggatcctccagccggagtcagcggggctccgaccgagaacaacatactggtgtggaacgcggtcattttcgggcctgaagggaccccgtttgaggatggcacatttaaacttacgatagaattcactgcagaatatccaaataaaccacctacagtgagatatgactctcgagatgttccatccaaatgtctatgcagctggtagtatctgactggacatacttcagaaccgatggagtccgacctctgatgtg

SEQ ID NO: 49857 - DNA, 2205 bp, Zea mays
  Clone ID: MRT4577_145468C.1
ggggccggtaaatgtcatgacccaagtgtggcccagaagaagcccagcctacctgcccatttgccaaggccgaagcccactctatccaacccaattgctgaagccaaagaccacgaggacaaagaggagctgaggcatcgatgcagaggacaggaaattattcagaaagaagaaagaccgaggaacacaggaagctcgtcttcctcctctggctccacgggtattacaaggcggcggcggtgtcacacctgtgcgccttcacccaggacgcccacatgaggattgacgcggcgcggttgtgcgggctcaggcgggaggcgcgtcgcggacgggaacggcactgctactactactttgcttcgctcgccttcagctttgtgtcttctcgcgcggcgaggactggggagtgggttttatgagatgggagtatgggacgagctttcgtccaaccaagccccagcgggccagcccactgaaacagttgttatccattggactcatttattcgcggtcgctcaaagcatcattttttttttttttgaaacgaagcagcattatccctgttacgcttgtattatcgttccaggacgcgctggaatttcgttttagttgtttcctgatggctggctgatggcggggcaaggttgaagccatcaaggcaacgtacgcctaggagtggagacgagacgacgagagtggaggagggctgctgatgggcggaggagacgacgaccggagagcggcggcgctccagcgatcctcgtcgccatggagcgtgggcgagcggtggcgggcgcacgccgggatggtcctcgtcatgctcgcctacagcggttaccacgtcctcgccaagtccgtcctcaacgtgggcatgaaccaggtcgtcttctgcgtctaccgcgacctcctcgcgctcctcgtcgtcgcccccgtcgccttcctccgcgagagaagggtgaggcctcccgtgacgcctcagctcctcgcttccttcgctctgcttggcttcactgggctgtatgggaacccgctcctcttcctcgtcggcctccgctacacaaacgcctcctacgccgcggctttccagccctccataccagtgctcacgtttctcttggctgccattgtcggtgttgaagcgatcagcgtcttcaccaaggacggcatcctcaaagtcaccggcacggccgtgtgcgtctccggcgccattctgatggccctgtaccgaggcccatccttgatcgcccttcttagaagcatgcccaccgcatggacgagcgctccctaccaccctgctgctaccccagccgtgctcgagcagggtgtagaagcatggcagcttggcgtgctgtgcctcataggaaactgcctcttggtggctgtctatctagtcgtgcaggctccagtgatgataaagtatcctgcgagcttatccgtgacagcttactcctattttttcgccacaacctttatggtgctaactggagtatgtgcgactagtggtttacacgagtgggcgctgacaaaagccgaggtcatagctgttctgtatgctggaattgtcgcatcttgtctgagctactcgatcatgacatgggcgaacaaagttcttggaccttctttggtcgccctctacaatccactgcaaccagccttttccaccgccctctcaactgttttccttggcgacccagtttacctcggaagcgttattgggggagtctccataattgctggtctctatctggtcatctgggctcgctacaatcaagggcagcgggcgcctacggatgcttgtttggaccctcttattattgtggataatccaagaatccccaagacacaagaaagtcccttcgtgtagatcctcaaaaaatgtgtcgattatccacacatttgtataggtggtctacagtatacttctatttgttaaacttcacatatgcattctaataaacaagtggtcaaagattcccatgggagaatttgtcatttccatcatctgtaaggaaaatgcccgaatttgaaatgatttggtatgaacaacgtataggctctaattagaattgtatgttttgtagaacatttttataggctattccctatctctagccaagatcctatcagtcctgtaaaaatccatatagtccttcaatcgttggaaactaaggatcttttaaaaaaaaaaaaaaaaaaaaacacacc

SEQ ID NO: 49858 - DNA, 2417 bp, Zea mays
  Clone ID: MRT4577_145469C.1
gttgaatggaagcgataactaaatcaaggatgttctatttatatcggtctcaggtaattgtgagcagcagtagagactaagcagttctgtaattgcatttgttctaagatcattttctgtagttgcatggaagcaataactgaatcaagaatgctctatttatttcgatctcagccattttggaggacgaacgagcaccggggagagtccaggaggaggcagatactgctgggacatgtccaagccagtggagatgcagtggagatggagatcaacattggcatggagaagctgtgaaacccaccgcagcagaaccccacccagaggaagtggcctcgcgtctcgtaagagtggcagacagtgatcggcgggttctttgcgacacgggctgctcttcgaccatgagcttcttgttactattcccccgcgacatttgtttggcatttctgttaacgattttctttgtttatattacactaaagtcaaagcctgaagccacgtcggcaactggatctaccattatgacataagcagaaatctaaataacacaaaaaaatcaggattactatatatttgtgcacaaagccacgaagaattgcatgaattcggctcgcccccggccgcacaaacgtccaacggccgtatcgttggcgcttgtcgtctccctatcgccccggctcctcgcctctccgtggccggccggtgctgatgacttctctgctgaccgctcgaatctgggctgtcgccgagccattctgatccccgctgctgatcacttctctgctcaacggaaaggagacagattcgtggttcgtcagcggacgcggcggcgacttcatagggtgttctcggccgcttccggcgcgcaaagcggacgcacggcgtgcgcccgcccccagggatgaactgctccagattctacaaaggttagatctactgctgcatcttccgaatccgcgtgcgaatgcaccgccgagctcgataaggccctgtggccgcgccggcgctgtgcctcgtacgcctggccgcagggtcgttggtaggcgcgtacaaccccgccgctattgctcgcggatggcccggtgcgtggctcgctgaggcagtgtgaggctgccgagggggccggtggggaaatcttggatcctggtcgttcggcgacgtggcggtatctatagagctcggattcatgggctcgtcatcccagcacgattccatttccgcatcaggaagttcggagcgtgctgatggcagcagaagcagcattagcatgtggaccaaaattacgagcacagactcgtggagatggtgcctagggttgatttacatcgttgctgttgccagtatatggattgctgctagctacatcgtgcagtctgttgtggatgccggtgtctctccgttcttgatcacctatatatgcagtggtctgtttgttgtctacattcccatagtcggggctgcccggtactttgaggattctattggtgacttgtggacaaagctgaaattcaaggatgctgaaagcctgcagcaggcttctgacatggagagtgtgaatcttctccaaagtggggggcatgagatcaatgttgcctcggatcaatcacaaacaaggctgtctggagacacttcagttccagatacaagcttccctgcccaggcagagctaactgttgtagattgcagcaaaggattggatgcaaaagggcgctggacacgtgctcgtgtggcccaagtgagcatgctaatcagccccttttggttccttgcacagcttacgttcaatctgtctctaagatacaccactgtcacgtcaaacacgatcttgagtagcacgtctagcctcttcactttcttggttgcattagtttttcttggagagacattcacatggttgaagctaattagtgtgcttctctgcatgggaggtacaataattgtcagcctggctgattcaagtagttcagttaatgccattgctacaaatcctcgtctcggagatttcctatccattgtttctgccggtttatatgctgtgtatatcaccttgattcgaaaaaagttgcccgatgagaaagaaggtcaaggacaagtgagcatggctcagtttctgggattcctgggactctttaatatgttgtttttccttcctgttgcattggtattgaatttcgccaagctggagcaattccacagtctcacgtgggaacaagttggtcttgttgttggaaaaggtacatttgctccctatcatgaaagttccccattgtcagagaagactcgacgctcggcggtggcagggcggctcgaacggtggctcggctgcttggcggcgccctgtgctcggcggcggctcggctgctcggcggcaccctgtgctcggcggcttgctgctcgctgcagcccgccgagagccc

SEQ ID NO: 49859 - DNA, 865 bp, Zea mays
  unsure (1)..(865): unsure at all n locations
  Clone ID: MRT4577_14546C.1
cattgggtacctcgaggccggccgggacgcaacgcaactatccccacttcaccgcgcggaaaaaacaaagagattcccctttgctctacaggaagcgccgacgccgttgatggaattcggaaggaccaaagctgctgccgtagccctgatccccgaagcgaccttccgccggtccagtctgtccttctcggcctccgcgacgccgtggtcccgggaggtgtgggtcaacgcatccaaataacggctcttccagaggtgcgctcaccaactcgatttggttgtacacgtgcaattggaattctggggtggatgcatgctcttttatgttaactgtaagcccaaccaatagattgttcattcgaactactacttcagtaatcccaacactcagaataatgttggattcagacatatattagatagaagaagtggagcatgcttgtgaaaacaagcagcgccagtaattagtcattttcagcctgtattgggtgaactgatctgagtatctgaccttcttgcccttgtgttataggaaaacactgctgaatttctcagctggtgcctagtggtgggaaataaagctagggacccagcatccttgtgatagcaatcacatcattggtgttgttttttcagcttacgctgaaactagactgatcaagaaggcgaccagctgtcaaaatgcatagacagaagaacccaaactctgggtgggctgcgtttgatcgcaagcagcgcagtgcagatggcagtgggtatngaggtgatgctgatccatttccgtctctctcaaatctggagcctctaatattgctagtagctccatacagaaaagaatgggctaaaacgaaagccctttgcttca

SEQ ID NO: 49860 - DNA, 1273 bp, Zea mays
  unsure (1)..(1273): unsure at all n locations
  Clone ID: MRT4577_145470C.1
cgtagcaccgccacaccgcacgcgtccgtggcggtgtatgtgtcctgtttgagcttcgcgagcttgtagaaggcacatttctgtccctacnnnnnnnnnnnnnnnnnnnnnnnnnnnnnncgaacatgcattttggagagaccaacttgaatgtgcggagcagtcgatcacacaatattttcataatggtaattgtgagcagcagtagagactaagcagttctgtaattgcatttgttctaagatcattttctgtagttgcatggaagcaataactgaatcaagaatgctctatttatttcgatctcagccattttggaggacgaacgagcaccggggagagtccaggaggaggcagatactgctgggacatgtccaagccagtggagatgcagtggagatggagatcaacattggcatggagaagctgtgnnnnnnnnnnnnnnnnnnnnnnnnnnngaggaagtggcctcgcgtctcgtaagagtggcagacagtgatcggcggcttctttgcgacacgggctgctcttcgactatgagcttcttgtactattccccgcgactttgttggcatttctgttaacgattttatttgtttatattacactaaagtcaaagcctgaagccacgtcggcaactggatctaccattatgacataagcagaaatctaaataactcaaaaaaatcaggattactatatatttgtgcgcaaagccacgaagaattgcatgaattgtggacaaagctgaaattcaaggatgctgaaagcctgcagcagacttctgacatggagagtgtgaatcttctccaaagtggggggccatgagatcaatgttgcctcggatcaatcacaaacaaggttgtctggatacacttcagttccatatacaagcttcgctgcccaggcagagctaactgttgtaggttgcagcaaaggttggatgcaaaagggcgctggacacgtgctcgtgtggcccaagtgagcatgctaatcagccccttttggttccttgcacagcttacgttcaatctgtctctaagatacaccactgtcacggtaagtgttactaagaagaactgaatgatacttccatattttactgagatctacttttcttttgtcctatcactgtctggtctaaaaaatatatatgcttctgtttctgtgaatttgcagtcaaacacgatattgagtagcacgtctagcctcttcactttcttggttgcattagtttttcttggagagacattcacatggttgaagctaatta

SEQ ID NO: 49861 - DNA, 179 bp, Zea mays
  Clone ID: MRT4577_145471C.1
atcgatgcacgcagtaggaatctcggctcgagatttaaataagatagcactgatgtgaatcttatataggctattctagcgactgccattctctgctgcatcaagcgtcattaagtcattttggtaagcgcctatgcatttctgatggttaggtgccctaggtagtgttaagtatgtcc

SEQ ID NO: 49862 - DNA, 788 bp, Zea mays
  Clone ID: MRT4577_145472C.1
ctggccggtgcgggtgaggagacgcccgaatctgggctgtcgccgagccattctgatccccgctgctgatcacttctctgctcaacggaaaggagacagattcgtggttcgtcagcggacgcggcggcgacttcatagggtgttctcggccgcttccggcgcgcaaagcggacgcacggcgtgcgcccgcccccagggatgaactgctccagattctacaaaggttagatctactgctgcatcttccgaatccgcgtgcgaatgcaccgccgagctcgataaggccctgtggccgcgccagcgctgtgcctcgtacgcctggccgcagggtcgttggtaggcgcgtacaaccccgccgctattgctcgcagatggcccggtgcgtggctctctgaggcagtgtgaggctgccgaggggaaatcttggatcctggtcggtcggcgacgtggcggtatctatagagctcggattcatgggctcgtcatcccagcacgattccatttccgcatcaggtaactcggctcttgtcaataaattaaatttcctagcaagtggtttcgtcatacttggatgatagaatcattttgcgtgcttttctcatcttctcattcgctatcactactagtctactacagtgtctgtcatagcaatgggcgccaatcttgctgtgggggttgggttttcagtaggacttaggagttcttccttgcaatgaattaatcgggcacagcatttgaacaaaagaagcgatttgttactgttaatgggccataggcggggatatgca

SEQ ID NO: 49863 - DNA, 857 bp, Zea mays
  unsure (1)..(857): unsure at all n locations
  Clone ID: MRT4577_145473C.1
cccacgcgtccgggtggatgacatacactcaactgctgcagatttcataattgagtgccacggacaaaacagcttgccttgtgacttctctcattcacttgtttcaactcaatggatacgatcaggtttggaggagaactgcttacaagatgttgggagtcatcctatcttctctcctttgcgctgtcgcatcccattcccaggatttgaaagcttccgtttctgtatttcactttcacaatatggagagaaagaaagacatctgctgaagaacttgtgctttctactgggagctaagtttacagacaaagcatataagggagtaacccatctcatctgcaaatttgcaagtggtcttaaatatgaggtttactccaaaagaggaactcccaccattacttctgagtggctctatgagtgtgtaaaacaggataaacttctctctgttgatcactttcagccaaaaccacttacatcacaggataaagatgcttatccgtgcactgccagccaatattccacacaggctacccgatttgattcctctgagctgcttagtggttgtcaagtaacaaaaaacaatgcaacacacaattctgtcaatgaagaaacaactatgcctgctgttagtagaaagagaagaatatctgttcctggtaaggttaacggtatttgtggaaacattgaaaaaactgagaaacaactcgacaatagctctgtccctgatgtcgcagatgccatagaggttctatcatccaagattcaggatgtgcaatctccgaggagtgtatcctattntactggtgataaatgctttccagttcttactccatactgtactgtaaaagtgtactagt

SEQ ID NO: 49864 - DNA, 939 bp, Zea mays
  Clone ID: MRT4577_145474C.1
cggctcgacccacgcgttcgcgcggtattagtatttgagttgatttgtggaactcacgaagctgtgtttgcttagtatcgtggaaatacgagaagcgctggggctttggtactatatactcacccaaattttcatgtgtgcttgacgcgtgataagttcggagataacacgctcatagtttaagacctgtctgactactggcagaacatgacatcatttgattttctgttcatagttgggaaatcttgttttgtttcggactaatgcttgttccatggatttttaacgaatacatttagggtctgttcttctaatgttaattcatgtggattggaagagattgaggccttccgattctccagcattagatccagaattgttccagctgatcaaatcttatatattttagataagcaatccggctggtaatcgttttccgggcggtcccgactgtgtttaattcccaagcaactcctaatttcctccaatgcacatggaatgagaataactgaacaaacccttagtattctattgtatgccatcgaaaaaacactactggtagaacatggcatcaattgatttgctgttacagtcggataatcttgtttttgttcagactaatgcttgtagaccttgtacagttagctgccaagatggggttagtagttgtgtttcatggatttttaatgaatacatttagtattctattatatgccatgaaaaaacacagtagaactaatctgactatgctatgcatattctcattctgcgtgcttatgtaattactcttgtatataaatgtgaaaataatgttctgtctttcatctagtcaattgtttgtacttgtatgcagtgcacatttttactactgtggtgcattggtattatgttaattgatactcaagcttttatgtttctgaaacattgggtagggcctgc

SEQ ID NO: 49865 - DNA, 756 bp, Zea mays
  unsure (1)..(756): unsure at all n locations
  Clone ID: MRT4577_145475C.1
nattcaacagctcttggccgcttcttcttcttcttctgcctcttcctttcctttggggttccccatgctttttctttgccaactctgaggctcttgcccgctggtgccgacgtccgtgggggcagtgcccacatcggtgtgcatagataacccatccattgggtttttttgagtccttggagctctgtgttcctcggtctctgcgaaagctgtttccttcttcctcatccttttgtttaggagtatttttcattttgcgaaacgagcacattttaaccttccacaaccccactgcaaattttcaagacgataatcgatttatcgttggttagtcgctctggagtctggtgtgttcaaaggcgagacgggcgacgaatcttggttcccgaatcccaatggcgctctgtgctcaataaaagtgtgatggtcacatcgatcctctcgccagctcttgctcccctcctcctcctctgcttcttattccttcttctaaagctgcaacgattccaacctttacctcttttgctttcgcgatgtttctctttcccttttgatcggtttgatgtgacagtcttgtcaccataggcatcactccttcttgaccgcatccgcatcagtgaccgaccggtgacactgagcactgacggcactcgcattgctccctgctccttcctggttggtggtgttggtgagcaggacgagcaggaggaggaagcaagaagatcctgggagctcgcgatgcccaagtggggggga

SEQ ID NO: 49866 - DNA, 251 bp, Zea mays
  Clone ID: MRT4577_145476C.1
ggcgcccccctcgagagagtttttttttttttttttttttttttttttttttttttttttttttttttttttttttttttttttttttttttttttgggccagcgctaacacaccacttgcccagcttggtttaaagggtccccaccttctcaatagatctaaaaagcctatttttagcaaagctccattggccccaaaaaccccccctagttccaatgttggaattatgccccgctgacacctaaaaata

SEQ ID NO: 49867 - DNA, 215 bp, Zea mays
  Clone ID: MRT4577_145477C.1
tcaccaactattcgaccaaatgggatatcacttgcaaagggaactagtcgcacaatttgacatgaagtgctagagcttggttgataacctggctgtaacttgagcctggtctaacccacttgacgatttacatttgacgtccttgaggatgaccatgaaaaccactttgtgctgggaccaccatcaaccttgcccatttgattgagggaaccacc

SEQ ID NO: 49868 - DNA, 286 bp, Zea mays
  Clone ID: MRT4577_145478C.1
gggctgtgtgcgaaaccttttctgttggggctattgtccatcaaacaacttgagctattataagtggacacctttctgccaacaataataagcagagcagaggtggcgggatgatttttcccagctgtgctgcgaacaataacatcagttgagccacaagaaataatgccaagcctaaaccagtcatttggggaggaaactgggttatcctgatgaccatatacttggttcttcattagaatctgctaacccgcgtactctgcgttgttaccactgcttgccgcgt

SEQ ID NO: 49869 - DNA, 284 bp, Zea mays
  Clone ID: MRT4577_145479C.1
ttttttttttttttttttttttttttttttttttttttttttttttataaaaaaatttggaaaaccggggggtttccaaaaggatccaagaggcgttccaaggaaatataaggtgaatagaataaaagatggtcaaaaacatggggttgggttgggattgggttaaatgggaaaacgaaggaaataccccaaaaaataccaacgtaatgcattatgggtaaaaaaagtggttgcaaaggggggtgaaaaggaaaaggaaaacctccttatttatggccagcttt

SEQ ID NO: 49870 - DNA, 1147 bp, Zea mays
  Clone ID: MRT4577_14547C.1
gtggacttccctaagaagtctgatcgctgtgactaagagtaatcaattgtgctctaatcagctatgccctgttcagaatacggtgtgtgtcttgatttggaaattgtcgtaggtcggctagctaaatcaacagccaaaatttagtttattcagtagctatattggggacctcctcatgtttctgaaaaaagatatactgttatgttgcactatgaatgagaaactgtcgaattattttctgcttgttcatcagagtttggtaatcttcttcttcttccgagttatgcccggcgctctaatccctaactttcccgtctccagctcccacctcccgcattcgtgaagaacgactgaacgagccgccactcgcccgtccgactccggctccggccagctgcctccgtccctccgtcgagctgcccgtccaccttcgtccctccggcccaggcgagcagaattccgcccccacccgccccgagccgagcagcagccagcagagccgcatcgccgccggggaaccctgagttgccggtccgccgccctgagaagatttccgtcccagcagcatagccgcagctccgccgcccgtcgcctcaagattaggttgatgtctttcctgagactgttgcctcaaaggctaccccaacttatcaggcaggtggagcaagatgttgagactgtaatccacgttctccagccgggtccaataggaattgtggagcacaaattcacagacgcggagatcttagaggccagggctacagtgaaaagagcagtggataattggcgaagaaattggacccttgagagaaatgttggcagataaatggaaaaaatataccccttgtgtcttctatcaacagtaattgaaataaatagggtgccatggctggatgcagttgttgccattagttagatttgagcacgatctgcttatcgggagttatgttaactgttctaaatgatcagtctgtttctctttgtttcatggtttgaaacgttcatatttagagaatgcagtaattcgactccgattcattccttgtttggaaatgatctttttttcatcatactactatatgggacattttttttttgttcattgcattgtcggtagccgactggcatattggatgtgatcctttca

SEQ ID NO: 49871 - DNA, 484 bp, Zea mays
  Clone ID: MRT4577_145480C.1
gaaaggtggggaacaattgtaccccggatgcgtgtatacagagcttccagtgaacagaccacatcgctcacccataagttagcatgtgtatggcccgaaactctctctatatgtagaatctagccgcagacacgcacctgcggcgggaggacgcgcaacctataccatttgaacatgagttgggaattgggggctgagaatacggtccattcaacaacccattggacgacctttgggcacccatattatggggatgcggatgccgtcccagatacttactaactaacaggttgaacgacacggctggcgccctggtacggcaacttattatctaggctgaaactgtaggtgccttgtcttcatgtgccgcatcaggcctgcaagggccggcctaaaaccaatttttccagggctgacgatgatatgcagagcagccttgaaggaactatcatacatgatcttggctttggggcccttattttga

SEQ ID NO: 49872 - DNA, 454 bp, Zea mays
  Clone ID: MRT4577_145481C.1
gccgtacgctgctgtacatgctgctacgagcctacgatcgatagcagtctatgcctttgctcgatgccgatgtttatctgcatgtgatcgtattcgtatgcacggccctctcaagctgagtgctttttggtgggtccatcgtcctatatatacgctcatcagttcactgacgacgatataacgattgttggggttcagaaactacatatggtggtgctcgcccgatctctttcttgtatattcttcttattattagtctacttctctctctctctctctctttctgaaagaacaaggaactagatgtcttgtcttgtgcctcctactatacctttacgtgtttttcttccttttgtcgtcaaaaaaaaaaaaaaaaaaggcccctagaagtgaagtaatttacacgcatgtcttacgcacgcgctacttcagttgtccgcatatctgatcataa

SEQ ID NO: 49873 - DNA, 416 bp, Zea mays
  Clone ID: MRT4577_145482C.1
taaaaacacagaatgagattgcaagcaacatttgtttttttttgttaaaaaaaaacaaaaacaaagtcaggacactgaagaacaacaggggatttccacgaggaggagatggccgtacgtatgcatggagaaggcaaaatcaagggccaaaaaaaaaatagccttcccattgatgatctccatctccacgaatgaatgcatgcttgttgttgcttcttcttcttcttcttctaacaaacaagaggtttcgagctcgatcgaccgccacgccagcaatggggccgtccatatatgtttgttaattctaccagaggaagaagcttctccttgaagagccgccgccgcctcccttgccggggcctcgccttgacgagttgccctcgcctcctcctgctgctgctgctgctgctttgtcc

SEQ ID NO: 49874 - DNA, 710 bp, Zea mays
  Clone ID: MRT4577_145483C.1
tgggaccctcgaggccggccgggccgggctaccgcctccgtccccctgcctactatcggtcgaccgctgcccccgccttacagacctgccatcccttatgaagccctcctgatttagcaccacccaaattgaactataactctgctgacataaaaagctcgctaaggacgccaatgaaaagctcaaccatggtagattccatggtagacaagcttctagccggactgtcacctcaatctactgagtgtctgcgaccagaatctatcgcacacacgtcgtatatcgcacaattctacaataccatctcataatcgacccatgtcccccgtctgccactcattggatcacagaatgctttctgccaaggttatgacaaactatctagggacctgcacatatccgatatgacacttgctagtgacagtatagatatctccatgccacctgtgcaactatctcctaccacataatgacgaaactcctatgacttgtgagatccttctctacatgtatgtactctactcaccgtactgacactacagtagcacagatgccaactttcctgatcatggacgaagctcactctgccgtagaacttttccttgcccaggtacacgtcgaatcctagctgcattacgttggacactgcgagctctgcatcccgcggatggactactactaaatactgaccgctcacgcgggtgcgaaac

SEQ ID NO: 49875 - DNA, 944 bp, Zea mays
  Clone ID: MRT4577_145484C.1
cccaataatacccatcaatttcaccagcatcaaccggacagcagacaaaagagccagtttcgcataagctgaccttaatactactttctaattttgtcaagctcaagtttacaggaagacacgcccacaagactgttactaattttgtcaatgcatattttatggggatacagaatagggaccaggtttataacaagataactgatgcattagaaataaatatccaactaacgcagatcatgccttcgtggtctcatcgtccatgatattgcagttacttccgtgcttccgacttcctctgctccttggcagctttctcctcatcgcgtttctttgcagcatcagccctttgctgtcttattaaagcaagacgttccaaatctttccgtgcttgttctgtttttccttgctcctgaagtttcatataacgttcatgagctttttgtttctcaagctcctccctttcacgccttgagagttcagttgtctttccaagatcaacttccttggcctttatattcttcacttttactaagttcggattttcaatctgaataataccctcagtacctttatgtttaggtttgtcatcagactcgtcttcagattcttcctcctctgactcttctctttcttcttcctcctcttcctcttcctccttcttcttaaaggtgcgagggcgacctgaagtaccagcagcgatctcctccggtgtggagaagttgcggcggccggtgggctttcccttgaactttcccctccccatggcggcggcgagcgaagggcgggcgaggctggtgcaggtagagagcgagctggaaggagcggaggggttctacgtaggcggtgattgaaccgcggaagcaatcggaaaccctacctcatttggtgggctgaggtggggaatatcctggttctacaatacgttgacagtacccggccgg

SEQ ID NO: 49876 - DNA, 886 bp, Zea mays
  unsure (1)..(886): unsure at all n locations
  Clone ID: MRT4577_145485C.1
cattgggtacctcgaggccggccgggccccgtctcccactcccatggcctccctcgccatcccggccttgcgcccggcgggagccaagctcaccggcaatatcacacccacgaatccctggaggcccgctcgccaatgcgcttgcgcgtccggtggccatgtcggggagttgtcagctctggccccggaggctgaggcagagcaggcggtggtgagcgaggtcaagccaaggtttaggtgggacgcgttcgggtccgacctgactgggccgcagcagcgggcggtccgggtcctgtctccgaagctgcccaaccgctgcaaggccctggtggcgcgcgtggtgtgcctgagccccggggacgagaggcttggcgcgctgctcgcgtactgggtgaaggcgatgaagcctaagagagcggattggttgctggttctcaaggaactgaaggccatggagagcccgctgcttgctgaggtactggagcatgcattgctggaaaattctttcgaggcaaacgttcgtgactacaccaagttgatccacatctacggcaagcagaagcgactgcagaaagccgaggacgcatttgccgccatgaaaggcagaggtttcccttgcgatcaggtcatgctgaccgcactgatggacatgcacangcaaggctggagatcttgcccgtgcaaaggaaatattcggngaaatcgtgctgctcggtctcccactggataagcgcgcgtacggctcgatggtctgggcctatgtcagggccgacatgctgccggnaagcagaggatctgatcaaagaaacggagggagcagcaggtgttcgcccgggaaaggaggtttacaaggcgttgctgagagcctattcatacagaggcgatc

SEQ ID NO: 49877 - DNA, 814 bp, Zea mays
  Clone ID: MRT4577_145486C.1
ctttggttctgccctcgcacgctatgcccgcgattcccctccccgcgcccgcagcccccgccgccatcccgattcctccgcccgcttcccctccccgcacacgcagccccgccgccatcccgattcctccgtccgcttcccctccccggtccccgcgcccgcagcccccgccgccatcccgattcctccgcccgcttcccctccccgcgcccgcggccccgccgccatcccgattcctccgccagcggcggtgcccaaggggaagaagcgggaggcggaggacgagatcgagatggccgtgagcgcgaagaagcagaaggcggcgccaccggcgaaggccgtgccgacgtccaagaaggacgccaaggaggacgccaagtccaagaagcagccgccccccaagaaggctgagaacagcagcagtgactctgaagaggaccccgagtccgaagaggagaatttttataatttgattgagtcggggagggtagacggagatgaggagtttgacgaggacgaggaggacgggttcgagttcggtgacgctgacgaggcgatgcaatgcgtggtgatggcggaaagcagcaccaccgccgcggcgctgcgtgctcacacgcaggactacgaggcgctagctgcgcacaagcgcaaggcccttgccgaggagcaaccccagagggaggagggtcccaaaaggccaagaccggaccaactttcagaagcagaagcagcaaccatgttcgaccaactgatggaaggctttggtcttaggcgtaaaagaaggtcaaaagatggcaagagaaggggaagaaag

SEQ ID NO: 49878 - DNA, 1891 bp, Zea mays
  unsure (1)..(1891): unsure at all n locations
  Clone ID: MRT4577_145487C.1
cccagcgtccggcccgcccgtccccgcatcatcctgaagtcccagcatggagttggaggggccgtgggcgcgggtgctgcacctgcagcacgatgcgtgcgagtggggccgggcggtgcgggcgcgcgcggtggcgccggcgctggaggccgcggcgtgggcgtgcctcgccatgtcggtcatgctcgtgctcgaggtgtgctacatgagcgtctccagcttcgtcgccgtcaacctgctgcgccggaccccacagcggcggtacagctgggagcccatgccctccgggaccgggaccgggaccgcgcggggggacgacgaggaggcagcggtgggcgatggaggcggcgaggcgtacccgatggtactcgtgcagatccccatgtacaacgagagggaggtctacaagatctctatcggagcggcatgtgccctcacatggccgcccgaccgtattataatccaagtcttggatgattccaccgatccattcattaaggaacttgtggagtttgaatgcaaggattgggccagcaagaaaatcaacataaaatatgaaattcgggaaagtaggcaaggatacaaagcaggagccctgaagaagggcatggaacatagttacgcccaagaatgtgattttgttgccatctttgatgcagattttcaacctgatcctgacttccttttaagaactataccgtttcttgtgcataacccgaagattgctctagtacagacacgttgggagtttgtgaactacaatatttgcctactgacaaggatacagaagatgtcgctagattatcattttaaggtagagcaggaatcagggtcatctatgcatgccttctttggtttcaacggtacggctggcgtgtggcgggtatcagctatcggtgaagcaggaggatggaaggatcgcaccactgtggaagacatggacttggctgtgcgggcaagcctcaagggatggcaattcctgtatgttggtgatataagggttaagagtgaactcccaagtactttcaaggcataccgtcatcaacagcacaggtggacttgtggtgctgccaacctcttcaggaaaatggccggggacattgttataagcaagggggcgactgtatggaagaagcttcaccttctgtacagcttcttcttcgtccgaagggtcatcgctcccatcctaacgttcctgttctactgcgtcgtgatcccactgtctgtcatggtccccgaagtcagcatccctgcctggggaatgttctacattcccactgccatcaccatcatgacagccatcaggagtccttggtctatccatctggtgccaatatggatcctgttcgagaacgtcatgtccatgcaccgaatgcgcgcggcgctgacggggctgctggagaccacgtacgtggacgagtgggtggtcaccgagaaggtgggcgatcatgtgaaggacaagctcgaggtccctctccttacaccggtgaagccaaccgagtgcgtcgagaggatctacttgcctgagctcctggtcgcgttctacctgttgctatgcgcgtcgtacgatgtcgtgctcggagccgggcactactacccgtacatcttcctccaggccttcgctttcctcgtgctggggtttggcttcgccggcaccgtgacgccctgctcttgttcataggccatcgcgcgcatagcgccccatggctattttgctgcattcttccctgattcgcctcctctaaagtctgtaactagaaaagagaaagcgattctttctgtaaatcgaacagaataaacgctgcacgcgtgtgcagcatttgagcagtaacttggtttttttgagctgnnnnnnnnnnnnnnnnnnnnnnnnnnnnnnnnnnaaaaaaaa

SEQ ID NO: 49879 - DNA, 263 bp, Zea mays
  Clone ID: MRT4577_145488C.1
actgagacccatgtcataaaaagagattgaaaagccttgacgagggaggttacacacaaccgggacaccgggtcaaaaaaaaaaaaaagacccccggcctttaaatttataaaaaccacgggatgttcaccaccaaaaccggggtgcaaaaaagcgcggcggaaggactcattcttggaaaaccgctcatacacgcaaagcttttatcaaaccaggttagaacgggttaaaagatgaaacccctcaacggtccaaacgaaggc

SEQ ID NO: 49880 - DNA, 652 bp, Zea mays
  unsure (1)..(652): unsure at all n locations
  Clone ID: MRT4577_145489C.1
gtattggaaaaacttcaccttctgtacagcttcttcttcgtccgaaggtcatcgctcccatcctaacgttcctgttctactgcgtcgtgatcccactgtctgtcatggtccccgaagtcagcatccctgcctggggaatgttctacattcccactgccatcaccatcatgacagccatcaggagtccttggtaaagtggcccgtctttcccctgactgatcggctccagatggagcggatttccctagctagctatgcgctcgttaatctcgcgtgtctactgatgatgccactagtcatatttcgtgcacgccaggtctatccatctggtcccaatatggatcctgttcgagaacgtcatgtccatgcaccgaatgcgcgcggcgctgacggggctgctggagaccacgtacgtggacgagtgggtggtcaccgagaaggtgggcgatcatgtgaaggacaagctcgaggtccctctccttacaccggtgaagccaaccgagtgcgtcgagaggatctacttgcctgagctcctgntcgcgttctacctgttgctatgcgcgtcgtacgatgtcgtgctcggagccgggcactactacccgtacatcttcctccaggccttcgctttcctcgtgcctggggtttggcttcg

SEQ ID NO: 49881 - DNA, 482 bp, Zea mays
  Clone ID: MRT4577_14548C.1
tgtggacttccctaagaagtctgatcgctgggacgaagtgtaatcaattgttctctaatcagctatgcccttttcagaatacggtgtgtgtcttgatttggaaattgtcgtaggtcggctagctaaatcaacagccaaaatttagtttattcagtagctatattggggacctcctcatgtttctgaaaaaagatatactgttatgttgcactatgaatgagaaactgtcgaattattttctgcttgttcatcagagtttggtaatcttcttcttcttccgagttatgcagattagggttgatgtctttcatgagactattgcctcaaaggctaccccaacttatcaggcaggtggagcaagatgttgagactgtaatccacgttctccagccaggtccaataggaattgtggagcacaaattcacagacacggagatcttagaggccagcgctacagtgataagagcagtggataattggcg

SEQ ID NO: 49882 - DNA, 480 bp, Zea mays
  Clone ID: MRT4577_145490C.1
ccggccggggaggccagatgctgccggcctcgtttcctctccctatcctccacaagttataacgaaaggtcccgcccttttcctcctgaatccacaaagggggaggggaaatctcctgcattcacccaggctctataatgtgctcagcttctgctcaagataacacaacagacctacctgtactatggctatgatgcgatctcttctgtggccatgctgactacactaacctcctccactacgtccttgattggcgcgggaactgacacacctgcccctgcaattgcgagaccagagtgatctaccacatcgcaactagcctatgcgacgttggatggaaagcacttcagactatgaagctccagctgctcgtcgactgtactgccgacgaaaccggcaactacactatcgaattctatgactgccacgatgaggacatctgacatgcggtgctgttggacatcccactcgaggactgcg

SEQ ID NO: 49883 - DNA, 461 bp, Zea mays
  Clone ID: MRT4577_145491C.1
acaaccggaatggtacactccactagacttagatcccatgcaccagcataaggaacacacaagcgggctcagccaggcctggcctagccaagccctttaaccaaggaggcgcctcccattccattaaaaaaataaaatcccattaatatgcgacgctaaaggaggaaggagccttatccactcccttcctggcccccttgaaccacctcttgatgaccgtcttccccatccagatgtaaagctttaccaccacaaacatgtgccatggataagctggtgcttgtcgcccttgaagacctacacaacactggtaagcacggacacccacctagtacatgattaccaacaatcacaggggggaagctctcacaaacgatgggaacggccacgggaccgcgatgtaacacgccctttgagtggcacttggcagcttagccccgcctaccgagcatgcagtcgaa

SEQ ID NO: 49884 - DNA, 250 bp, Zea mays
  Clone ID: MRT4577_145493C.1
cgcctggtgggctccctgaatcttggccaaagctgctccaggttctaaacctcgatgaccaatatgacttgacgttagctacagcgtaccgcgtacgtctctctgcaaccgacctacctactgcgaaaaagatcaaccacatttattatgcctgatatagaagaggagaattaatccatagtttaatgtactctgcagaatcaatgttttcttgtaaaaatcgattcgttgatttccaccggcgttttga

SEQ ID NO: 49885 - DNA, 424 bp, Zea mays
  unsure (1)..(424): unsure at all n locations
  Clone ID: MRT4577_145494C.1
gcgggggggggggggggttttttttttttttttgggttttttttttttttttttttttttttttttttgctgaaaccaaggaaagccctcgactattaaaactggctcaaggtacaggaggttttcaaaagctgaatttgggtttcaacgggggttcgcaagggggttttttttttttggaccgagcaccgggacccagcaaaggccacagaggaacccaggggcggggggcacggcccaaggaagaaccaacccgaaaaaccgggccacgggaaaancccggggccggaagggcaggcaanngaaccacaacccggaaggcagagcgaacaannccaccgccaagcagggncaanccaggaacccagccaggcaaaacccccccgggaannccnggccaagaacccccaaacccagcaagccc

SEQ ID NO: 49886 - DNA, 565 bp, Zea mays
  unsure (1)..(565): unsure at all n locations
  Clone ID: MRT4577_145495C.1
ccgcgagcgaggatacggcgtccacggcggcgaggacgcgcgcggggggcgtgagctgcccgcggggctgctcgaacgggagccaagggagcggcggaggggccggggggtcgcggtccgcgagcgccgcgcgcgcgcgcgtccgcccggacggcgaggtggaggagaggaggaggtggagcgcgaggctggcgaggagacggcgcctgcggaggccgtcgagccgcgcggcgatggcgttgcaggcgtcgaggagcgcgacgccggcgtcgaggtgggcggcgacggcggcgccctcgccggagcaggcgagcgcgggccccgcctcggcgagcgtgagcgcgaggaggtcggccacccgcacgagcgccgcgagcggggaggccggcagcggcagcaggccccggaggcgcgcggccagcgccgtgccgaaccggggcgcctcccccttctgctgctggcgtcggctgggctggaatggtggtggtggaagggcagcancgagctgtacttgttcgcgaagaacatctgggctgggatgctgggggctccgacgcgtgggtcg

SEQ ID NO: 49887 - DNA, 381 bp, Zea mays
  Clone ID: MRT4577_145496C.1
tttttttttttttttttttttttttttgcactcaaaggatttccaagcaacttatataaacctaatgcacctttcgctagacttaaagtgtgtaaaaatcatttaaaacacaaggaaggggttgcatgcactggggcttgcctagaataaacactacgttagtgtttgttaggcgactttcacttggcggccatcctttgtcttggcacttgttcaaattatccatcttccggttggtccgactgacgacgtcatcttatggagatgcttgcactttacatcatcttgtggtcgactcagctctggtccttcgcatcacgtgatcacttaatgtaccagcatcaaacgtgactcaatactcgtaagaatgctgataaatcc

SEQ ID NO: 49888 - DNA, 326 bp, Zea mays
  Clone ID: MRT4577_145497C.1
aacagcgtcagtgcatcgagaggatcttcagaggaaacaccatgaaaacagccataggacgggcagcgtgcttggctctggcaggtgtcagcgactttgcaatgcatatgcaatgcacatgccctgcgcttgagcggttgtacagggcttgcaccgggctgacgacgatcataggaccatgatgggtgcacccctactctaagtatatgaggcatacctaatgcagcccgattgcagccgggtcgtagtacgcccgtagtacgcagactatcggcatataacagccatttacgaaacagtgctgccacaatgctatcaggatgata

SEQ ID NO: 49889 - DNA, 313 bp, Zea mays
  Clone ID: MRT4577_145498C.1
cgcatctatatttctagagatgttgtttttgatgagaatatctttcccttctctaaattacataaaaatgcaggagctaaattaagatctgaaatattacttttaccgccagtcttgctttctagccatttcgggggtaccaatatggattacgtgactaatctttctaagaatcaagatactgcgacaagctgttctgtgcagattccagcagaaaaaaggagcatgcaaggtgcccctacaagcaacgtgggcaactctgcagcatgggagcattatccaccactaccaatacgtgtaccagcatgcaatg

SEQ ID NO: 49890 - DNA, 284 bp, Zea mays
  Clone ID: MRT4577_145499C.1
gcacatacagtgccccttgtgatcataagtattaacgtttcttgacagtcaactgtggtacataagctgcaaactataccggtttgatgctagagtgcgacattgccattcagaaatcaataagggttttgggaccgattggaaggcagaacgaggattcaggccagctgtagttaattacccagggtgatcttgggggcagggtccgaacccgtcgacgcggcgcgctcctcggcgttccgcagcacctgctgcgtcagagccagccgagccgacaccttctt

SEQ ID NO: 49891 - DNA, 1088 bp, Zea mays
  Clone ID: MRT4577_14549C.1
gtggaactgtggaagcgttgagcttttttcttctttgtcttgctgcgcaagaagaagggaaacgagaggcgggcggcgatggcgaagaggctgctcccgtcgctgaaccgggtgctggtggagaagctggtgcagcccaagaagaccgccggcggcatctccgtaacgctttccgtctctaaccttcccgtctcctgctgccacctcccgcatccgtgaagaacgactgaaccagccgccacccgcccgtccgactccggctccggccacctgcctccgtccctccgccgagctgcccgtctgccttcgtccctccggcctaggcgagcagatctccacccccacccgccccgagccgagcagcagccagcagagccgcatcgccgccggggaacgctgagttgccggcccgtcgccctgagaagatctccatcccagcagcatagccgcagcgccgcctccccaaggcaaggcccgagcgccctacgccctgccacaggccccagattaggttgatgtctttcatgagactattgcctcaaaggctaccccaacttatcaggcaggtggagcaagatgttgagactgtaatccacgttctccagccaggtccaataggaattgtggagcacaaattcacagacacggagatcttagaggccagggctacagtgaaaagagcagtggataattggcgaagaaattggacccttgagaaaaatgttggcagataaatggaaataatataccccttgtgtcttctatcaacagtacttgaaataaataggatgctatggctggatgcagctgttgccattagttagatttgagcacgatctgcttatcgggagttatgttaactgttctaaatgatcagtctgcctctctttgtttcatggtttgaaacgttcatatttagagaatttctttttgttcaaaaaaaaaaaaaaaaccggctgtcatattgaatgtgatctttcttttgatgcttcaatactttaactgtagtatctgaagagatacttgaagatcactgacttcatgatggatacaacaaaaaaaaaaaaaaaaaaaaaactcgagcccgg

SEQ ID NO: 49892 - DNA, 204 bp, Zea mays
  unsure (1)..(204): unsure at all n locations
  Clone ID: MRT4577_1454C.1
ccaaaattcccttttttccttttttttttatttaccatttaacccctaaaagaaagcttttttcttaattttagtcagaattncctccannttttntccacctttaaattacctaatttcccctttaaaaatttcctatcctaattgcccaaaaactatttttttcctcccaaaaaaaccatttatcctcaaatttaaaatttc

SEQ ID NO: 49893 - DNA, 669 bp, Zea mays
  Clone ID: MRT4577_145500C.1
ctaccccgcgacttccctccggttgcttccgccgagcgacttccaatccagtctccctcgattccgccggcccgatcgcctcgatcaatctcgtcccccgctgcgcccttccgtcggttggagatggccaagacttgcttcaagaccgagcaccccctggaaaggaggcaagctgaatctgctaggatccgtgagaagtacgctgacagaattccggtgatcgttgagaaggctgataagtctgatgtcccggaaattgataagaagaagtaccttgtccctgccgacctcactgttggccagtttgtctacgtggtgcggaagaggatcaagctgagcccagaaaaggccatcttcgtctttgtgaatagcaccttgccaccgactgcttcgttgatgtcagcgatctatgaagaaaacaaggacgaggacggcttcctgtacatgacttacagtggcgagaacactttcggctctgcctaatccatgtgcgctgccactgtaaataaatgaaggatgttcaggttgcgacgtctgtgtacatactatcactagtatgctggtggattgctctcatggtttaatgctttaagtgtggtattttatcatctgaatgttagaacggcctgtaaaactctatctattactataaagggtcgaagatttatc

SEQ ID NO: 49894 - DNA, 564 bp, Zea mays
  unsure (1)..(564): unsure at all n locations
  Clone ID: MRT4577_145501C.1
gatttaggtgacactatagaaggccagctcgaccccgtcgctgacgccgccgcggctgccgccgctgccgtcgcgatcgccaatgtcctagcgcgccggctcaagctccgctgcttctggcgccgcaagaattgaaggttgcatgtacacgagatagttcacgggcaacatactgatgaagtggttcctaaagagcttcgggctatatgacagtaacatattgatgaagtggttcctgatgcaagaacatactgatgaagtggttcctaattcaagagccgaagttactcaaggactggtaccgacatcaatgacaaggattgaagaagtggtgactggaggngctggggttgtctcataacagattgctacgacagaagatggtagtactatttcagcaggagcaacgtcgtctccacgcattgttagatgtttagttaaaaatcaccctgaagaagaagaaagtgtaatctggccactgaaattgtaatatgtgaagtgcagtgtgtaccgatacgtgaacttgtttgaaactgtaatttgtgaaatgaactactgttctct

SEQ ID NO: 49895 - DNA, 849 bp, Zea mays
  unsure (1)..(849): unsure at all n locations
  Clone ID: MRT4577_145502C.1
agccctccagtcaccatttctttcaatccttgtcattgatgtcggtcccagtcccttgagtaacttggggctcttgaattaggnacccactttcatcagtatgttcttgcatcaggacccactttcatcaatatgttactgtcatatagcccgaagctctttaggaacccacttcatcagtatgttgcccgtgaactatctcgtgtacatgtagcaaatccttccttaatattcatggacagcgcaacgctgacctgcaacaaccgaagccgaccacaggcatccgcaagacagcaagtgaagctcagatcggcgaactgcggccttctgcgcttcgcctaggagcctacggagtactgagaacagagcagcggaggatcatggcacaccttcaattcttgcggcgccagaagcagcggagcttgagccggcgcgctaggacattggcgatcgcgacggcagcggcggcagccgcggcggcgtcagcgacggggtcgagctggcctcccgtgacgacgcggctgccgatgaggcaggcgacgaggagaaggggcaggcaccagagcacgaagtcgagcaccgagtcgaggtcgacgtcccagtcccactcccacaccctcagcatggccattgggagtccgaagccggaggaggcaagcacggacggagctggactggacgagcgagcgaggacgctgagaagggagggaaaaaaagaggaaaggtgtggaacgagcgagcagctagagcggcggcagctggatcaaggtggagaatcgctgcggctggactgcggcggatatggatcggcgcaggccggcggaaaaaaaaaggggctttttttttttt

SEQ ID NO: 49896 - DNA, 914 bp, Zea mays
  unsure (1)..(914): unsure at all n locations
  Clone ID: MRT4577_145503C.1
attgtgtacctcgatgccggccggggcaagtgcattagtgcccactgcagtagctactactactagctagcacagttcatcgacctcgctcgtggccggcaagcaatcgctcaagctaagccatggcgcctcgcagccgcctcctcgacctggagaggcacgacgtgctcttcttctacggcgatggtgcctaccaccagagcgagagcgtcgtcgtcctcgttgtcgtcgtcgccgccctgctcctcctcctcctcatcgcgccattcccgcacgccgctgccgtctgcggggcgctctacgtcgcctattgcttcctcctcgaccgcgcagcgaaggcgagcagctccagctcgtcgtggccttccactgccactgccactgccactgccactgccgcgccgccgccggcagacgcctctcgccccactactcggggcacggtggcgggctatacgatcgtgcagaagcagaattgacgtcgcaatggtcagcatgctcgtgccgtctttctcgttgaaggagaagaaacgaaagagatcaaggttgttcgttggatgcttaccagttaccatgcttaattgcatatttgcactgtaggaagatggctctgtgtggaatagagtagtagcttaagcacatttcgtattacaggaaaagagttgtggtcagaggtcttcccacgtatatagctgtctcttgagactctgcatggactctgcaatctggatatgcatgcactataatcacttcgaaatagggccacagttgacaaatcagccaggaaacatatgtaatctggattcttttcaaaaaaaaattgtaatacggctactcttctcaggaaatatatatgatggactggcacgttttctttcnaaaaaaaaaaaaaaagcggcctcgagcttcagctt

SEQ ID NO: 49897 - DNA, 250 bp, Zea mays
  Clone ID: MRT4577_145504C.1
gtggtggcaatacagtgacatggatgctacgacagacttattttggtaacagaccacaggccctttccagcaccaaaatccaaggaaaaccctaactcaaaccgaggttttgtaacaaagaaaacgggacgcaagcctacattcaaaattaacgaaatagaggggggaaatccaaagggccacatatttaggcatttccggccataggggcctcaaagaccacattttttccaaaaagcctggggtaaac

SEQ ID NO: 49898 - DNA, 314 bp, Zea mays
  Clone ID: MRT4577_145505C.1
agggtatatataggatcaaatcatatcatcgggggccaattaatatatgggtacagcagatgcaatcgggtcaaccaacatgcagggggacacacgtacgtacatgagcacaaagactgacgcccaacatgccgagagagatagcaaactgaaaaactctgttttttttttttttacacacaccacacaatacctatttatgggagccagctcgggccctctttttattgtttaaccacccccccacgcgcgatagataataatcatattcctgggccccgatcgatgtgatcaacagttgcagggggggcact

SEQ ID NO: 49899 - DNA, 227 bp, Zea mays
  Clone ID: MRT4577_145506C.1
ccgggcgagaagctcctcgccggctccggcgacccgtcctaccccggcgggaccctcttcaacccgctcgtattcgtatataccgttgattcactagcaagtagtcatgattaacttaatgcgcggcatcagataactatgctggtctgaacgcctacacttaactgtttaagtccgtaccgcttcggactcgaggttttattaaagactactcacccccaattatc

SEQ ID NO: 49900 - DNA, 217 bp, Zea mays
  Clone ID: MRT4577_145507C.1
acaaaaccatgggatgggatacaggtttaacgacaactcggtactcgttacagaggggtttacattttgccatatgtttggtgccaagaactggcgtcatggaactcatctcaaaaaccttgtttcaaagcggcaaaaaaaaacactggtactggtagccaccgtaaaacctaaccgaaactgaaggagcggaaaccataacactacacgttcacaa

SEQ ID NO: 49901 - DNA, 397 bp, Zea mays
  Clone ID: MRT4577_145508C.1
gcctccgccgccgacagcagcgtactgttttgtatctcccgagaagggttgtgagaaggagtagtatcctcaatgtccacgggaggaagctgttgatgctgaggtcctcattgaccgacgtgccagcagaggtcccggcggtccaggtggccgatgcgcccaaagcgaaaaatgcgcccacagagaagaaggcgcctaaggagaagaagctttccgcggcgaaaaagccggcggcgcaccctacctacgctgagatgattgtagaggcgatcgctgccctcaaggagaggaaggtgtcgagctcggtggccatcatcaagtacgtctagggtgagcatggcggcaaagctcacaccaacttgcgcaagcagctcactgtgcagctgaagaagctcgc

SEQ ID NO: 49902 - DNA, 530 bp, Zea mays
  Clone ID: MRT4577_145509C.1
actaaggcaaatgcatttttcttaccaaatcaaactggtccggattatacgcttacgagccttgcatcctgacgagggataactgttggacctatgaagcaaacagcctcaactggcgccgaatcagttgtgtactgagacattctaccatgcactaacgagcacgtaagaatttaaactgccacaagcggtgagagagcgttccatgatccttccacttcgctgctcacccttgtttatatcggcttcggcttttagcaccaccaagcaggtgatctgctatggggggggggagatccaaagaaaatcgcagatgacgccagagaggccgccgcatatgaggggacctacccagcacgcccactgaccaatcccactcccaatgtgacgagggcagcggccgaacgacacggatgcatttcattggacgctctgtcgaaggcgccctccaccagcatggttggcccccgcgatgaatcctattgcaatgggggcaaaatgagcccaggcagcccttcttcgggtccacc

SEQ ID NO: 49903 - DNA, 560 bp, Zea mays
  Clone ID: MRT4577_14550C.1
tttcacactcccatactcccgttcatttctcctcactggagcgaagatgacgagacgcttggtggccgctcccgacacgtcgtgcctcgcactcgggaaaggaagaggtggctgatctcgtggccaagcgctgccttccacgacatctgtatgcaacctgacaaccgtgctctcgtggatttccaacttcacggactttgcccgaatgctgagcatctacccccgtggccagtcagctgagctccagatcctccctgacgctcctggtcgaggcgaatgcacaacctgccccactctcctcctctttacgacctagcgccgtagtccacattgccgacatgactgaagtgacatctgaagagagagaatacgatagagccctgcatcaataggatgaggcgatatatcaccatgatatgtatttacatcatgtgcattgaatcactgtagaacctactaccaatcatattattacaatagatgtgagtagcacatacactagggacaaaatatcagaaatgagaaaaacttgccgaatgccattggctacatgtgacaac

SEQ ID NO: 49904 - DNA, 329 bp, Zea mays
  Clone ID: MRT4577_145510C.1
ttggcaaataacaaggaattacatgatagatccaaaccttcatggtcttcttggcaaataacaaggaattacatgatagatccaaaccttcatggtcttcagcagtctttcgcaccaccaagtctataatggcgtacaattccacagtagtaggcaagtccatgatgcgtgatcatgaaactcgcaatggcggtgcgcctagcgtgcccaatccttgatctcatcaaggctaatttcactcgcatctgtggcctgaagttcaacctgaatgccattaaggccactcttgaatttctggtttaagcttgcataaagcatcttgctcttcc

SEQ ID NO: 49905 - DNA, 390 bp, Zea mays
  Clone ID: MRT4577_145511C.1
gaaattggcagggaattccaacacagagggagactcgaccgacttttgtagtgtgtcgacgcttgaagaaggacctaatgtgagcttttacacacttgatgaacagcttgagctcttgagcaaggtgggggcatttttgtacccactggtcgtagttttgttggctattactaatcgtgtgcagatggccccattcacctctaccaacaggtgttgaatgcaggggatgacatgattggtgttgagttcttagaagaagattatggtggcaaggttctatttgtttgaagttgcttcaccattccccaaagcgcaatgcagctaagcctttttgtcttttgcagattcgatgtcgcagtcacccagatgtcattgcttgttcttgattca

SEQ ID NO: 49906 - DNA, 224 bp, Zea mays
  Clone ID: MRT4577_145512C.1
tcgaaaaaaaaaaacttacaataaaaaaaaaaaaaatataataaaaaatctatatttccacaaattaggggggtctctctaaaatatgcaggctatctaatctcattcattctattctttatcttttttaatatttactcctacatttcaattcactcactttctctctacaactacttttctgctaaaactctaactatacccaacttactctcctttcttca

SEQ ID NO: 49907 - DNA, 501 bp, Zea mays
  Clone ID: MRT4577_145513C.1
gattgatgaggatttttagcaatagatggtgtgttcagtctcattcatagaccacacattgaaacatgcactccaaacttccatcttgatcacatatccaacagattcaagaagtatgaatatgttggattcagaaaagtggtcgatgagaaatgatataaatgtccttattttctctcatcaatttataagtaatgtgagtgctagaatctttgactctcattgtgagtttaagattgtcgaggagatacctctgcagcttgttaccagtacttctgctcacagacctttgttccatgccaaatggaatgctgaaaattacagaagttcatccgccactcgctactggttgcaggtgtttgttcttgattctcatggtgtaaaaatttcaagtgagcagagaccattttcagttgagggtaagatggcaattcccacaagtccatggaccaactatctgctctttgaagtccagtgggaaggcatgtatcaagttcttct

SEQ ID NO: 49908 - DNA, 821 bp, Zea mays
  Clone ID: MRT4577_145514C.1
gtctcgcgttctatacttctgctgcacaactatcgccatagccgccgcatctaacgcactaacctcctccgcagctcgaggtgagatctatatccattgaatcctagatctattcaacccaagccagacgactacgagccagctcaaccaaatcaaaaagagacctggaatacaagccaactctaaacttcttaccattcaagaacaaaaggaaactccgatgcgcttgcttttcaaccttccactccactctaagacagattctgacaagaagaatttacaaccaccacaaaattcgttgctagctatccgccgaacaagcattgaagccctccacaagtttgaacaattaaacataaactctgatggttctccaactcaacttgcaactaaatcacaacctactgcacaaacttccaagcttcccgagaagagattcagtcttttaataccaaaacaatacccaagcactcctactcatgttaattcacagcggatgtcaaacccaagttttggacagcttgagaatctagacattcagactgacagagccttcaaaagtgacgcaatacccatgaaaagaatgagcattcaaccaccgactttttttgaaaaagttcatgaggcttttcaggaaaagaaacccctcaagaaaaatttggagtttatgccaagccttttagttcctttgaatcctcatcaaaagaacgataatcccaggctttgagccgataactaacgactatctttataatggtttttcaaataaaaagggagctactccaaagaatagtcaactcctctcaatgaacgatcagttt

SEQ ID NO: 49909 - DNA, 273 bp, Zea mays
  Clone ID: MRT4577_145515C.1
gttatttatatgagggtggcgcggcgtaatcatatgtacgcttgctgtacaacagggtacacggttccggtccaaaaaaacccgcgtgaaactcctttcgagaggggcaccatataattttgaaagacttaccaattataaaaacgggggggggataagaaactccttaaaaaggcgggtccccaacctacccattatatgggaggatctggggggttagagctttacaggtaggaaaatttttatctggaatcagaaggcttcccgtcgggc

SEQ ID NO: 49910 - DNA, 463 bp, Zea mays
  Clone ID: MRT4577_145516C.1
ttgttttttttttttttttttttttttttttttttttttttttaattttttctttatttttacctttttgtaaagggcccaccctatacatcaaaaaaaaaaagttgattgggaaaagacccatagtggaccaaattgaaggggcccaaaacctgaagcccttaaccaacatgcgggaccccccaaaaccgactgatgtactgacctggaaaccccgtataccaacaaactcatcaagccttgatcgggggccccatttgctcaaaccgaccacccctgtaacgtactaaacaccgcagaaggtttattccaaacagcccccgaggggggttgttcaccgggctaacattcggagaaaaaataagaccgaagaacttgtttgcaaaaacggctctggaatggaccccggatactcccgaagaaaagctttatcccaaggaaaacccgcaccttgcacaggaaa

SEQ ID NO: 49911 - DNA, 308 bp, Zea mays
  Clone ID: MRT4577_145517C.1
ttttgctgtgcacaacaatctcagctgacagcggcggtacaccgtctcacagtacattccgggtgatcaccatacataatgaggcaacaaggatgtacacattatttgcggctaacagatatgaccatcgggcgcagctctagaggcttgcaggtgttctcgtggtgcaacataatcagagtgcttgccaactatcttataaattccattcacaagacgtctatggtcaggatagtcattgtacaggctatgccattgcttcaagtgcacctctagcacgagatcctgctttctaaatatggcgaaat

SEQ ID NO: 49912 - DNA, 700 bp, Zea mays
  Clone ID: MRT4577_145518C.1
gggacgtcggcgtgatgcacccagacgggtacatggagatccgggatcggtccaaggacgtgatcatcagcggcggggagaacatcagcagcgtggaggtggagtccgtgctctacaaccacccggcggtgaacgaggcggcggtggtggctcggcccgacgagttctggggcgagacgccgtgcgcgttcgtgagcctcaaggaggagaggtcggggtcgccgggcgcggtcaccgcggcggatgtgatcgcgtggtgccgggaccgcatgccgcactacatggtgcccaagacggtggtgctccgcgccgagctgcccaagacctccaccgggaagatccagaagtacgtgctccggaaccttgccaaggatatgggacccacccgcaagggcgccagtagcagcagcaggatgtagtgccagtgctgtgccgtcgtcttgcttggcttggccagcatggaaatggacatggacatgtgctctgctgcagcttgccgttatagcatggggttcgcaggcaaggctcttcatttttttgagatcagcaagccctctcaccgataaaggatttatgatattgccgggccaatagtatgatactaaaaatgaccaatagattcaggacttctgttgtgtctttatggagacgaatgaaaacccagattggacaattgaagttctcattttgttttggattg

SEQ ID NO: 49913 - DNA, 1171 bp, Zea mays
  Clone ID: MRT4577_145519C.1
tcccggggaaggtgcgcatcctaactgccggcgcgccaccgccggctgccgtgctgcaccgcacggagtccatcgggttcgaggtcatccacgggtacgggctgaccgagacggcggggctggtggtctgctgcgcgtggaagggggagtggaacaagctccccgcgtcggagcgcgcgcggctcaaggcgaggcaaggcgtgcgcacgcctggcatggccgaggtggacatcgtcgacggcgagaccgggcgcagcgtcccccgcgacgggtccacgatgggcgagatcgtgctccgcggcggctgcgtcatgctcggctacctcaacgacgacaaggccacgagggcggcgatacgggacaacgggtggttctacacgggggacgtcggcgtgatgcatccggacgggtacatggagatccgggaccggtccaaggacgtgatcatcagcggcggggagaacatcagcagcgtggaggtggagtccgtgctctacaaccacccggcggtgaacgaggcggcggtggtggcgcggccggacgagttctggggcgagacgccgtgcgcgttcgtgagcctcaaggaggggtcgggcgcggtgaccgcggcggatgtcatcgcctggtgccgggaccgcatgccgcactacatggtgcccaagacggtggttctccgcgctgagctgcccaagacctccactgggaagatccagaagtacgtgctgcggaaccttgccaaggagatgggacccacccgaaagggcgccagtagcagcagcaggatgtagggcactaacgctagtactagtgctgtgccgtcgtcttgcttggcatggtcgcatggacatgtcacatgtgtcctctctgcagcttgccgtcgcagcatggcgttggctggcatccattttcttgagatcagcgagccctcttaccgattcttggaaaggatttatgatagggatactaccgttacagcagatatgtctccgtttcatcttgtagggagtcgttaacgcatggcgttggctggattgatagtttgatagatcagcgtgtctctataccgtttcttacaaatgatttatatgagggatacccccgtttacttcgaaatgtccccgttttatcttgtatggaatgaaaaacaaggtgaatgggtgtcattggtccc

SEQ ID NO: 49914 - DNA, 372 bp, Zea mays
  Clone ID: MRT4577_14551C.1
caagacctataatgatctggtgaattcatcgaatcacactctggggacattgagggatcttctggaggctatgctcgaaagtaatcagccttcaaacggtgccaaagaaatttcttattcctcaaatggagacaacgacaagtggtcacaagtacacagatcgtagacatagataacaacacacataaatactgacatagataaatggcataggaaaatacaggtgacaacacttgctgatgcacttaaacgaaagctacatgcatttaatcatatacattagtgaccaaaatgcttgatacatgaaagatccaagccgtatgattaacaggatgtacttgaccaactctgatgttagagtatttggaaagg

SEQ ID NO: 49915 - DNA, 416 bp, Zea mays
  Clone ID: MRT4577_145520C.1
atgtggagaactcggccttagcttatttctgggcagcgcccaacctcatccaaaacacttcattacttgaactatagctcatatagcgatctaccaagagggcaccaccaatgatgggttcgtaggtatgaacactgctgggtttgtcaaagcaagcaggtggaatggctgcacttgttgcagttgtaagagggtgccagcgctaggcatagcgtgtaggtatgaacggccacaactgttgttgtgttaagaaggcagtagggctcacataatctagctggctgaatcggcgtagtcgtcgctgctgataataagcagctagagttcagtgactgctgctggctgattggcacaacatcatgtggggacgcagtacctacctgacttgatggacgctggtgccgtataacagctgc

SEQ ID NO: 49916 - DNA, 696 bp, Zea mays
  Clone ID: MRT4577_145521C.1
cattgggacctcgagccggcgggagaattttgataactgtacgaagacgctactaccatggtgaaaggacgcacgggacagagcgatatgttctacgtccggcttatcatccttggacacaatatgaacatgccctgcgaacacgaaagcacgtccgtcagcctcatctaggacgcggacacatgggaggacacggcgtgcaaccctgccgagcgcatggtgccacatctacaaggctaagaccaacatcagcgagatcccctacagcgagaatctggatgaatgccaccccccgtacagacactctttcgtggtccgcacaaaactcaattcaatctctctactgaagccatggaggccctaaggaagagcgagcctgtacccaagctacatctataggtaagggtctgctggagcaaaagtggcctctagaaggacatgcttaaatcttctctctgaacttaaaatgtcctgtgttcacaccttagattgttcgtggcctgaacctgttagagatactaccaatatatggtgctgatcctgtgaacaattgtcctaatgatatcctataacacaaagcttatttccccccgtgccatagctgcatgatcgcaggaactactactcgtcgccgactgctatagacatatcatactcttgttaacccatgttcgtctatcacatttgacattgtta

SEQ ID NO: 49917 - DNA, 403 bp, Zea mays
  unsure (1)..(403): unsure at all n locations
  Clone ID: MRT4577_145522C.1
ggccgccgcgcgagcnnggngggnnagngncncnncnncgcggagacccgngagaggagccancancanggccgccgnngagacngnngnccncaaggnngcnangncangcgagggnngcgcgggggcggncagaagagggcgcgggcgganggaaggagtagttatttttcgacanagaccncaaggagcagaaggggacaggcaaaggcaagggcaccggcgaggccgncnnccagacggnnnccaagncggggaagaggaccnccnacaggaaaaaaaaagccacggccccggacgcngcggcggcnncnggagccgaagcagcncccggcaccgcggcagaagcgccnccngcngcngcnccngcggcgccagagancaccccagccaaagcngacgc

SEQ ID NO: 49918 - DNA, 1624 bp, Zea mays
  Clone ID: MRT4577_145523C.1
gaccgcccatagaattttcatttcgccgcattattttttttcccttctcactccctccttcggtccttcgccttcctcatgtccccgactctccgatactagtcgagtagtccggtacatcacaccgcctcgcaccgcggccatgttgacaccgcgcgtcctcaaggcttcgctgctccgctgcttgcgcgctaccgccgagctgcctccgttgcggcgaccccggatcctacctgtgcgggtttaccattccagaggctattctagtgggggaagctccaagtatgataggccaatgagacagttttctgaacagaatgagtcaacctctcagccattaatatattacattgctccatctgctctgcttgcttttgctgggatagccacatttgttcattacaatgatgagaggcgtgcagttcccttcgctaaagtaccaggacagaccaatgttcccaaaagatgtactaccaatagacctgcaataggagggccatttaagctgtatgatacagaaaacaatgaggtgactgaatcaaagcttcggggaaagtggaatctgatgtactttggctatacatcatgcccagatgtgggtccagctgaagttcagaagatagctgatgttgttaaactgttagagtcaaagtacgatatcaatattacaccactctttgtcacaattgatccacaacgtgattcacctgctcagcttaaggcataccttactgagtttgacccaagaatagtaggactaacaggtcccatcagtgcagtaagacagatagctcaggagtaccgtgttttctttaaaagagtagaggaagttggtcaggactatcttatagaaagctctcacaatatgtacttgctagatccatgcttggagacagtaaggtgctttggaagtgagtacgaggcatcagaccttgctgaggctataacaacagaggttcagaaagcatctgcctcatcaacaaattagtctagcggtatggcagcatgagcagttttccaatcttaccgtgaagcacctcctcgcctgttgcatagccctcacagaagggcgtgactcacagtgggctggccattcagctctgcctgcaaccaaccgattcaagttctcctattctcgctcttgttgtgtcagatctgagcttaactgtacagaatggtcttcttgcgacgaagtctcctggcagttccagatcacttacaattctgcgacatgagaatgatcttacaatttccagcaaacattaacctgctgcattggatgtgccatatgacctacagacttaccaggttgttagcacagattcatgaacctgctttgctctcccctctggatgctgaacaggtaaactattgtgaggcgtgacagcgctgtccatgttaaaaaatttacaaacctttttcctacctgaaataaaacatagctgcattgttaatatttggccttatgttccaaccttttatcttattagaaactttttgaagtggaaatggtatttcctctgatagcgagttattaatatggggggggcatgattgtaccgttctagtaacaaattcttcgtgtgatgtgcctaccatatatatatatttcaatccacagttc

SEQ ID NO: 49919 - DNA, 403 bp, Zea mays
  Clone ID: MRT4577_145524C.1
acacaaagaggaacggggccaaggtttttttgataatgggtggcaaaagcacaaatgttgcctgcgggtttgggtccaaaaacccctttcgcaactggggggtttctggtcattggttcaagggtaacccaacaaaaaaaaaacggaaacacaaaactctcccccttgaaatttttgaaaaaacaaattgcccgcttccccaagaaaccggggggaaaaaacaaaaaaatccatgggcaatttgtcagggagctttggacacttgcaaatttgcaatggcactaatgccctgctcagggccggggggttttttggttttttaacggggctggggaaccggttccccagtgggctttccgggtggacggggcgaaatgacaggccttttgccctggctgcgggc

SEQ ID NO: 49920 - DNA, 554 bp, Zea mays
  Clone ID: MRT4577_145525C.1
cctctcttccccccacccctccgtactccagaagtccagatcgatcccaatggcgtcgtccacgcttcgctgccttccaggcgacatcccgccgacgacgctgctcaccctaccagaggagatgctcgaggaaatcctcctctgcctctccgacgccgccgacctcgtccgcgcctccatggcccgcgtctccatccgccgcctcgtcaccaatcaccgattcctccgccgcttccgcactcgccacccgccgcctctactgggcatcgtttctccctatcccctgcaccggtgggaccggccgctgctgaatctggcccagccgccgcacccctccgccgccgccgcgagcgctttttctgggcttgacgccgccgacttctcgtgcaccttcctccccaacgccgcgcgctggcggcgcgacttgcgggacggccgcgacctcctttccggcctcccaaagggaaccaaattcaaccagccacgcctttgtcagggacctgggtgtctctgacccccctgtcccggcggcacatactgctacctcccatccc

SEQ ID NO: 49921 - DNA, 398 bp, Zea mays
  Clone ID: MRT4577_145526C.1
atgacgggagcgaccccaagggacagggtttattttgtaatccaacaaacagaacctacgggcgcataagcccatgataaacccagctgctctgacgcatacataaggacggcaagaaccggcaacgaaaaaactcacggaataatgacaagctcacgcccaccaccaccgatggataccaaggacacataccaaccgaactacgtggccaaaaattccagccatgcaggcgaaagcatccaaggcccaagaaacaagaccatccaaaatcctgccgcaaggtgcgctccgtacaacaaccctatctggtcacaagaccgggcacacatccgttcggtaacccaaaaagacgctagcccaaggtgcataccgtgtgggcaaaggcctcacgcaggggg

SEQ ID NO: 49922 - DNA, 278 bp, Zea mays
  Clone ID: MRT4577_145527C.1
cgtgggagctgccctgctacgtgacctacttcatcacagtcgtcatcctcggcgtcggcgtcaacgcgcagccgaccttacaatcgagcacgtgggcgcacagcaggcgctcgagcgctccagcagcaggagctcgccgctgcagaaacccaggccgagtgatccgcgcgtctagaggtctctcgaactctcggctgcctctgatttggttccactaagatggccacaatgtgcggtcctgaatgttctggacttctggtattgatggaacacgagct

SEQ ID NO: 49923 - DNA, 197 bp, Zea mays
  Clone ID: MRT4577_145528C.1
tcgttagatgttactgcacgagtcctaatgagtgtatggctcatacaagagagttctgtccatccactatcttctggaactcactcatgttgcatgtcctgctggacgattaggcacgtacatgacataggtcggcgatctcctgacattgtgtgactaaccctcaccaatctgaataggtttttgtcccaagtgat

SEQ ID NO: 49924 - DNA, 361 bp, Zea mays
  Clone ID: MRT4577_145529C.1
cccacgcgtccgcccacgcgtccggagatccttagcagccgcagtcccacctacccgcggcggctgtctccctccatctgtctcgcctattcctattgtttctctcttcaataatcaagatgagccgtggtggtagtgcctgttgtggtcaaagttctctgggttatctttctggaagcgctgagccttcataaccagcattggcaccagctgcaagcgcttcacttgctgataaaccatctcatgcatatactgattctgccaatcatattgctgcttatgttaccattcatacctataactactacaggggttattttatataacactgcctacttctttacagactgttctttatcct

SEQ ID NO: 49925 - DNA, 275 bp, Zea mays
  unsure (1)..(275): unsure at all n locations
  Clone ID: MRT4577_14552C.1
tggcgaggcaanagcgcaaacgcgaccacagacagagcgcgcttcaaggccttttttttttgagataacaaggaggagacgacgagatggcggtcacgatcacctgggtgaaggcgancagatcttcgacaccaccgaacccaccgtcgaggtgacgtgggctcagcgacggagctacgcgaggggggcgtaccagcgggcatcactgaatatatagccttgagtgaggatgagatctatatctgcaggctgtctagcttacacgaacacatatg

SEQ ID NO: 49926 - DNA, 336 bp, Zea mays
  Clone ID: MRT4577_145530C.1
cggacgcgtgggcggacgcgtgggcggactcgtgggggcgcgtgctacaagatcgtcctgagtgtgaccatctcggtgatcacgtcgtgctgcaccttcggcttgccgtggctgacggcgtgcaccccctgcccgccggagctcgccagtaagtgcccgaccatcgggcgctccggcaatttcaagaacttccagtgcccgccggggcagtacaacgcgctggcgtccctcttcttcaacaccaacgacgacgccatccgcaacctcttcagcgccgggtacgacagggagttcggcgtgttcacgctcctcaccttcttcaccacggtgtacacc

SEQ ID NO: 49927 - DNA, 379 bp, Zea mays
  Clone ID: MRT4577_145531C.1
atcagctttgaccgactctttatcactttacagactcccgactaataatctaggacgagttgattttgacacatctaatgcaccaatatttatactccaaataacctacctatgttcataagacttatacagcattcataaacttgcatactttattgaacgtttctattaacacagataattcactatcaagaagaatcaaaactctaatgaatgactatctacatactcagcttatggaactatttcaaagcctatcattctattttcgcaccataactcaatactacaaatctaaaatactcaacatataagatgcttaactacttttacttcatcaacatctcttggtcgacaccgatatctcccttaatcctct

SEQ ID NO: 49928 - DNA, 251 bp, Zea mays
  Clone ID: MRT4577_145532C.1
gtcactccacctgctgcgcgtatcttgcttaggctttcgggaacacactttacacgctcatgccacttaccctgatggggataactgatggtgccaggaaccttacaatccccgcgtcaccagaactactggagacttcaacataatacctttcatgcccttgcactacaaaaacttaacggtgggtatcctggagagagctctcaattctaactaaactcctctgcagacccccaagtcgggcgacttct

SEQ ID NO: 49929 - DNA, 2656 bp, Zea mays
  Clone ID: MRT4577_145533C.1
tgggtacctcgaggccggccgggccccgcatctcctagccccagctagatctttggacacatatcgaaacagctctagctagcgcgctcgtcgtctaacctggcttccggcatggcttccaagcagatcggagtcttgacctgcttcattgccatcaccgctctcgccttccgtccctgcgcatccgccgtgcccatggacggaggctggcagaagcccaagagccctcccgctccgcgatccccagtcgtcctggcgccggcgccagcgcccgcaccggcggcgccgcaccacgtggacctcgcggacctcctcagcgtggccgggccgttccacacgttcctggactacccgcagaagaccggcgtcatcgagaccttccagagccaggcgaacgacacgaagcggggcggcatcaccgtcttcgtgcccaaggactctgcgttcgcggcgctgaagcagaccacgttcgccgccccctgcttgtcctgttgcgccccgccgccgctgggttccgagggagggccagccgtagaaaggagataagaagcgagaagagagcacaggcagagggagtgagggaaaaggcgagagcgtagaaagtccggtcggagaagcggaagttcgcgttgctttgctgatccaatgggggagaccaacgagctaccgccgccacccgtggccgcgccgccgcccatgatgccgatgcagtccatgatggtcggcgcaggcgccatccacccgccccacgagcagttccaccatctcaactactgcgtccactcaaatccatcctgggttcaggtggcagcacttgcattccttcactatcttgtgatgttgggttctaccgtcatgcttgcaacagctattgttcctgcgatgggtggtaacgctggtgacaaggctcgagttattcaatcgttcctctttatgagtggcataaacacactgctgcaaacacttattggaacgagacttccaacagttatgaatgcctcttttgcatttgttgtcccagtgctgtcaatagcaaaagagattgaatcaaataacttcctgaatgatcatgagagatttaaacacacaatgagaacagcacaaggagctctgattgtggcatccatcctcaacatgattcttgggttcagcacgatatggggggcatatgccaaaaagttcagtccggtgataatgacccctgttgtttgtgttgttggtcttggactattccaacttggctttccccaggttgggaaatgtgtggagattgggcttccaatgctaattcttgcggtggttgtgcaacagtatgtgccaaattacttcagttatatccatcaacgggtcaccttcttgtttgagaggtattcgttgcttctttgtatcggcatcgtgtgggcctttgcagctatccttactgctgcgggtgcatatgaccatgcttcacctaagacacaacagcactgccgcactgataagtctttcctcatgtcatcggcaccatggattaaaattccattaccattcgaatggggtcctccaatcttcactgctggtcattcatttggaatgatgggtgctgtacttgttgcagccttcgagtcaactggagcacactttgctactgctcgtctagcgggtgctacaccacctccagcttatgtccttagtcggagcgttggcttgcagggtattggaatgttcttggaggggatctttagtgttccagcaggttcatctgtatcagttgaaaacattggcctccttgggctgacaaaagttggaagtaggagggtgatccagatatcaactgggtttatgatattcttctccatatttgggaaatttggggccttctttgcatcgatcccactgccgatctttgcagcaatttactgcatcttgttcggcattgtagctgctgtgggagtctcgttcatgcagtttgccaacaagaactcgatgaggaacatctatatcatcggactctcgttgttccttggcatctcggtccctcaatacttcaacggatacacttcttcagctggcggccacggacctgcccggacaaatgctggatggttcaacgacattataaacaccgtgtttgcttccgggccgacggtggcgctaattgtcgcttctgtcctggacaacacgctggagttcaggggctacgaggccgaccgggggctctcgtggttccagccgttcctgcgccgccataagggatactcggaccccagaaacgaggagttctacagcttcccaatcagcgtctatgacgtcatcccagaccgatttcggcgctgactccaaatgaccgctgttaccccgcagctgtgcatgtaaatccccgtgagtcttgttagtcttactcctgtgacttgtagcggctggttctagggggatatgggtaaaagaatgcttagggcaattgcttggtttgactcttttcgggataagaaacgggttacatgataatgtagagctctgtgccggatacattggttttgggaagggttacagaagaatactagcaccttacatgttgatgggcatttagttgaaggcattggctatttgtttttttgcccaatatatggctgttggagcttgaaaaaaaaggccccaaaagcgggcagtactttgg

SEQ ID NO: 49930 - DNA, 910 bp, Zea mays
  Clone ID: MRT4577_145534C.1
ccgggcgggggaaatcttctttgctccttatctcctcgcgcatcaaaagatttggccgcggtgctcatctcttcagcttggccttatctcatcgcgtgcgggcagtgtccacggcttgctttctctccgttgctggctgctggctgcacaggctccagccgttcccagcgtcatccacagtaggccattgggaagaaggtgctagcgttggcgctggggcagcgggacccaaccgccgtggacaaggtgctgtccgcgcagcacccgcagttcctggccggaacgggctccatgctgcaggccattgcccctgctccagctccgttccaactctcccttgtgctcgctggtccgaccatggaactcgtatctgctcctccgttcaggctcctcaggtccggtcgtcgccctgctccctggtgctccctgctagttgacctccgccaccatgccagtctggccatgtgttggccgtcggctccctggaaccagcgccccagccaccaacctccgctcacttcgacgacggaccgtgccgctggtccatccatggccgtgagtccacctccgccgagctgctagtctctagctcctccgaccattctgctcgcccgacaacttgtcacaactgggtctgctccatcggctcctcgtccggctttaacatcaccgtggccagcagccacttcaaattcgtgagcgcccaacgccgccccctggttcactccctccgtacgcacatcgcccttgtccccggtccatgtagcgtgtctctacgctctgcgtcctcgccgtcattatttttggagagctcgtcgtaacgcgctgccgatgctgcgtatagcgcgggagatcttcgcaagtttacgcagctttgtgggaattaattttgatggcgatctacgttact

SEQ ID NO: 49931 - DNA, 524 bp, Zea mays
  Clone ID: MRT4577_145535C.1
ccgaagatcattgctggcaaggagagctacgtaaccggttcatcaggctcacccaagatcagcaatgaagattcttgtgtgtgctattctcatgcttgtcctcatcggcaattgcactgcagagatgcccccgataatggctgcagaaaagagccgtgaccagctggtcgcaggacgagcaaagccatgtgtaacgttgaaggaggaacatggtactaataacaaaaacagtccaggaccaggagagcatgagcctcgccctacttaaaccatgtgtatattgacctaatttcccagaaaacttaaaccgtctacgtactacccgtcttagagacgatgacggtatatatgcgtgtgtaatctatctatctatctacatacatatataaataaaaatggatgcggctgtcaaaaaggggtggcacaatatgtacctcatctcgcctccaaacttccaggtcacaactcaccaagaatatgaattacatagaaaaaaattattatcaaaaaaaaaaaaaaaaaaa

SEQ ID NO: 49932 - DNA, 140 bp, Zea mays
  Clone ID: MRT4577_145536C.1
tcgcgatctagccttttattttactgaaatatgtgttgtgtgttctaattggttcatacataattttctgcagaaaattatgtatgaaccaattagatcacacaacacatattttagtaatattaaaggcttgatcgcga

SEQ ID NO: 49933 - DNA, 290 bp, Zea mays
  Clone ID: MRT4577_145537C.1
gacccactcttcctctcacgcttctgctcatgtttgtccacgatttttacatctccagttacacggatattattagcgtgctttaagacataccatgggcctcatatatccttcattccttccttcgttaaccaaatgatcatttacaaacatcttctatcatttctactcatccatttatatcactattttaattaatacacctcttacaaaacacaacacaaccccaacttatttatccatgttcacgcttacatgcttacatccaaattttataccattccccattt

SEQ ID NO: 49934 - DNA, 457 bp, Zea mays
  Clone ID: MRT4577_145538C.1
atgcacacgacaaacactatatgtaatatcgtctcctgcttccaaatcattctggtacaattctggcaacagcacggtaacaaaccaaggctttacagcgtaggccatatccgacaagatggcgtctttctctgcaccaagcgaccttagcccttgacctaactcaatatctcctaatagaactgctgcgaggtcgaagacacacctgacccaaaccccaactatggggcagctgaacttgagctagatctgctctgcgccaccctggtagtgaccttcaacgacaacttgtggacattcaccaccctcttgtactgacccacacagcctcccttgcacatcatgtacataccctccacgatccaatactggatgaacccccccttggtagacatgtacttctcgacactgtaaaactctaccagatcatagtaggctctctcgttcaatgctgaac

SEQ ID NO: 49935 - DNA, 559 bp, Zea mays
  unsure (1)..(559): unsure at all n locations
  Clone ID: MRT4577_145539C.1
ctttgtcgatgattattattctgttgaaaagtttagaaaagcttacttgcgaaggattccacccattggtgaccgttctttttggccgaaagtggatattgcaaatgaagtatttgctccaatggcgaaaagaggggttgggcgacaaaggaaaaacagaataaagagttgtctagagggtggtactgctaaaaaacggaagggcgtggaaaatgctcaatgcacaactaagataaaaagacagtacacttgcccaaactgtggtcaactaggtcatcggaaaaccagttataagtgccctttaactggaaccatgataaggaagaggaagccaagaaagactactacgaagaattggatcccganngagttgcggacttctacatctcatactagtgctcctatcgatgaatcctctattgtgccctctgctgctctttctgtgggtgcgggttctgttgttttcgaccatggttgccttgattttgtctgtgccgatgccgctctggtctgtgtgccttctcctcctacttctccggcncggtgtgtctngtggctt

SEQ ID NO: 49936 - DNA, 694 bp, Zea mays
  Clone ID: MRT4577_14553C.1
ctgcgatactgcctgatacaaccactccgttctagctgaggacggcacagacgatagcacgagcgactacgaccacatcaggcgccacacatggcatctcagctctccggcgccgtgtcccggttccacgcgcctccggggttacgccgcgcccagatccgcgtatggcggcactgccgtccgtgagaggtaggccaggaagagggcgttctcacatggcatctcgctgtgactacatcggatcctccaccaacctgatcatgaagactaaacaactctgatgatgatggcgcgacagatcgaggtgcggataggtaccacaaccgacaacaccaagtcttttagtccctcatcggcgcaaggactagggtgtgcaaagcggatccggcggcggctgctgctagagaaggaagagaagagttcaaatgtgtcggagaaacgtataagcgttcaataagtagcgagatacgacgtggatgcctgatttccggtctctacatggcgatcgcgagaagcaaagtggtactacactagtgcgcactgatacaacgacggccatgatctccccttcgtcaccgtctctccctctccgtctcgagctttgtgctagcatggcgacacggatcgcctaaaatgggggctctcgcttggatttccggcatatgctggttttttgattgcaatttgtgatggc

SEQ ID NO: 49937 - DNA, 590 bp, Zea mays
  Clone ID: MRT4577_145540C.1
aaaaaaaaaaaaaaaaaaaaaaaaaaaaaaaaaaaaaaaaaaaaaaaaaaaaaaaaaaaaaacccttttggttccccatggttataggaggcccactggggggcaccctcttaagttagttatagaagaagggaagccagttgagttaaaagttcccagtcaagggccggggccaccaccgaacgtgttcgttggtccccttgagaagggaaaagcacccccgggatgggatcctcgggggttgttggggttccatcgccgcttgaatcttgacgttggccgccgtcgaaggtttcatcgggctcgaaatcaaccgggggctgggcccctcaaagccgtctttttacctgaaggaggggaagttgcgttccttcaacctcagggaccgggggttctccctcgacctccaggggacgatcgcgtcggggaacccaaacgagggggggggggtgaactacaaaacgttggaggggttcaccacgaaccggaacaagggggggacggtaccggtgtcaatgccgggaatctaccagggccacaaggacgtgtcggggtggtcgccggtcatgtcgggggacgcgtcccccggg

SEQ ID NO: 49938 - DNA, 398 bp, Zea mays
  Clone ID: MRT4577_145541C.1
gtccgaaaaaaaaaaaaaaaaaaaaaaaaaaagaaagggggagaaaaaaaaaaaaaaaaaaaaaaaaaaaaaaaaaaaaaaaaaaaaaaaaaaaaaaaaaaaaaaaaggggcggcccttttaaaaaatcaaagtttacttacccttccatccaacgtaaaaccttttttatatttcaaccaaaatggagggaactgcccctcatttaaaaacgtcgaaaataaaaaaaccttgccgtaaccaaactaaatccctttcaaaaaaatccccttttgccaaattggcgaaaaaaaaaaaaggccccaaccaatcccctttccaaaaagttccccaacctaaatggcaaatggaaccccccttttaacggcaaataaaactcggggggtgggggggtaaccc

SEQ ID NO: 49939 - DNA, 737 bp, Zea mays
  Clone ID: MRT4577_145542C.1
ggccgggtttcagccgatcaccacaagacaccatgggaagacgtccagctagatgctaccgttactgtaagaacaagccttacatcaagtcacgctactgccgtggtgtgcccgaggccaagcttagaattttcgatcttggaaagaagaaggctcacgtcgacgagttccccgtctgcgtccacatggtctctttagagttcgagcagctttcctctgaggccctcgaggctgcccgtatttgcgccaacaagtacatttctaagttcgccggaaaggatggtttccacatgagagtccgtgtgcacccatggcacgtactccgcatcaacaagatgctttcctgcgctggagctgatagactccagactggtatgagaggagcttttggaaagccctgtggagttgttgctcgtgtagacattgagcaagtcctcatctccatccgtaccaaggagtccttcaaggctgccgcctgcgaggccctcagacgtgccaagtacaagttccccggaagacagaagatcctcgtctctaagaactggggattcaccaagttccacaaggaggagtacaatgagctcagagcctcaggaaagatcgttcccgatggagcccactgcaagctcatctcccagcacggacccatcaccaagccccacgctcactaaacgaagacatcgatcccaggtgcctttatataaacgctggacgaaaaaaaaaaaaaaaaagcggcc

SEQ ID NO: 49940 - DNA, 643 bp, Zea mays
  Clone ID: MRT4577_145543C.1
tgtgtccgggctgccgcgggggcgggcgcgatatttgttttttgttttttttgccagggaattttttttttaatcaatccgatcaattttacacgggaaaatttcattaagaaacgtggaaatcatgtgaattgtattaaaactatgacatatgacaatattatataaagaaaattttaactctaagagacaaatataattttttaaaaaagaaattaaaaatatcacgtcttatgctaaatatatatagatatatttattatgatgcagcaggttttggaatacagggatttaggcaagttaaaaataaaaagtttatatgcttaaactttctgaatattgttggtctgatttcctatttaaatatcagacatcattataggaaatacatagtctacttacgattgcaatggcactttcaaatataaggcaattaatattttagaaagcagcaacttttactttttttaaaaaaaaaagctagtagcagcatgtaaaaatgagcattacgagaaactcagaaaaacaaatttaccctgaaaagatgaatataattaaaaaacaaagcacctttcatttcaaaaagaactgtaggctaagaccctcatctcagaataaccccatctaagaacactcggttttt

SEQ ID NO: 49941 - DNA, 311 bp, Zea mays
  Clone ID: MRT4577_145544C.1
ggacaaacaaatcacacttatttatccaactcccttacgtaaggcaataacccccattatgtcaaggctccaatttttttgctttatccacgcttgcaacacaagcacggggcgcaggcgttgcattgcatttttttgacaaaatatgacggggtttactgggcccctggcgacaaacaggggctaaaaagggtgtcccgaaaccggcaagagggcggggcatttaacgtttttccctggggaaccccaggagggcaagggtgagggccattaaccttccgttgataaggccccttaagattttttgtttt

SEQ ID NO: 49942 - DNA, 666 bp, Zea mays
  Clone ID: MRT4577_145545C.1
cggccggttcgaagagcccaggcttatctagaaacctcgctgaccctcgagtagctatgaagcagcgaggcgacgacggtgccgacggcgcagctgctttcgccggctgcctggattgcaggtcctccgaccattgctttttgcgggaggcaacgccgccgccgccgccgacagtgacgacgctgctgccgccttcggtttctaactccttcgatcatcgcttttctgaggtacaaacttagttccatggcttccgatgacactgctgaaatgtgaatgttctgtttcgacgacgttgccaagaaaattgttgggaaatcatacaactctcctatcatcagttacacggacttcaactatcgtactagatttagcattgatcgtatctcttaaattcacatttgtagttctgtacaaccaaatatcatttgtggatttagagaaagaactcttcatgaagtcattcatagcatcatatggaagaaatgtcattgccatcacctagatgaaacattccactatctgtcaactccaacaaaactattgtctagaccaaaacaatcattctccaaattaacaggatagtcctggagatgaaggccaggacctaccgtcgtttgagtcaccataaaaaagaagcaacattcgattggttggttggctaac

SEQ ID NO: 49943 - DNA, 394 bp, Zea mays
  Clone ID: MRT4577_145546C.1
acccacgccccacgcgtgcgcatatataaaggtagatcgcgcatttttttttaacacctccggccacaagaaaggggtgggtcattctcctcgttctttctgcaagtgttgttaccacaaccaaaatcccacaatgctcacacaatcctatatatttcttctttttccatacaccttacattaatatagcattgtgtgaaaaaaaaacaactcatccatacaatatgcatcaaacaatcaaaccaggcatcgaacaatcatcactctcgctccttcaacaaacggcaaacctattactggagttacatatgggccataaccttgcagaaaacaatatggaacaacacctactacaactggaaaaaacaaacattgctgcacacactcatcacca

SEQ ID NO: 49944 - DNA, 1042 bp, Zea mays
  Clone ID: MRT4577_145547C.1
cgaaaaaggaaaaaagaaaactcaagagcccaggcttatctagaaacctcgctaaccctcgaggcctcgagtagctatgaagcagcgaggcgacgacggtgccgacggcgcagctgctttcgccggctgcctggattgcaggtcctccgaccattgctttttgcgggaggcaacgccgccgccgccgccgacagtgacgacgctgctgccgccttcggtttataactccttcgatcatcgcttttctgagttgtttgtgttttggaatcaaggtgcacatttgcatgaattggatcttttagcgaccagaccatataggtacaaacttagttccatggcttccgatgacactgctgaaatgtgaatgttctgtttcgacgacgttgccaagaaaattgttgggaaatcatacaactctcctatcatcagttacagggacttcaactatcctactagatttaacattgatcgtatctcttaaattcacatttgtagttgtgtacaaccaaatatcatttgtggatttagagaaagaactcttcatgaagtcattcatagcatcatatggaagaaatgtcattgccatcacccagatgaaacattccactatctgtcaactccaacaaaactattgtctagaccaaaacaatcattctccaaattaacaggatagtcctggagatgaaggccaggacctaccgtcgtttgagtcaccataaaaaagaagcaacattcgattggttggttggctaacggacccagcgcattgtccaaagctcaaccgcagcatggcgggaggcagctcatgcacatcagccagtcaccgatcgagcatcggcttgcggtaccggatagagcaagtgatacatttggcggatagagcaagtgatactatgatatagctagcttttgtctaatactatagtttacaatgttgtatctaaacactatttatcaaaaccatggtatgtttggagctaccaaaactacggtattatcatagcaattgcaaagtataatattataaaactatggttctgcg

SEQ ID NO: 49945 - DNA, 139 bp, Zea mays
  Clone ID: MRT4577_145548C.1
cacagcacgcaggggcgagggtttaaattaccaaacacgtttttttattttcctccgggaagatcaatgaccacaatgaacgggatgggagtgacggtcttgatggttgtccccctcaaccatgaagacaggcttgggg

SEQ ID NO: 49946 - DNA, 485 bp, Zea mays
  Clone ID: MRT4577_145549C.1
attcttcgtacatttcttatgacggtggaggcgtgcttgaatgatatttggaatgataccattcttggatccacatttcaaccatcaccaactccataagctagtagaggtgcttgcaacagatcttgtgactgctgatttgaacgcttattacatcgagcttgaccctgagctggacgctcttgttggagggcttggtggaaggccttggacaaagctcatgactgcggatatccatgctgtagtctcacctgtagccatacctgttgtcgttaagcttctgcgctaggatcaccactataggctcactgatcgggtagctgtgcgacatgcttacttacttcaagacttagttgaggagaacagtgtaacgagcccacaatcgtggcgccctacaccctggaatagacgctggtgctgatgtctgtgacattatatgctacatccgatgcttaagcctctcgatacaggtatctgtgccatga

SEQ ID NO: 49947 - DNA, 256 bp, Zea mays
  Clone ID: MRT4577_14554C.1
tttttcgtttaaaacgacaaaaagattgttcctgggcgcggtgggacaccgtctcaaggcgcactcaactacatacaacctcgtttgcgatgacttgcacaaaaacaagtctgtaccagtactaataacgcacgctgtaatatcccgtgtgggtacacgaggaattcacggtataccaatacaaaagtcctaccgccgcagcaagttcctctatataataaaggctctacccgtctctcatgcactcccctcaaac

SEQ ID NO: 49948 - DNA, 340 bp, Zea mays
  Clone ID: MRT4577_145550C.1
gtggtgattcccccctcgtgagtcatttaggaacaacaaccggggggcacttttttatcaagaccttaacgtgaaacggaactttaagggttcccggggacagggggagaacaaaaccagcgctctagagagaaacctggctacaaataagtatgacccaagcgttaacttttaccaagacaaaaaaaccctcattcgccttactaatgagtgcccaccctgacaaggaagacgggcaaattttccgtgtagattaaaaaagaatgggcaacttatatgtgggccgttggatacaatcaccctccacccagtttttctcttggggacacaccaaacaaaa

SEQ ID NO: 49949 - DNA, 287 bp, Zea mays
  Clone ID: MRT4577_145551C.1
acacatataccatttattcatagattttctccattcttacatcactcaacaatcttgctgcattaacaaaatcttgcggccaagaacaaccatacaacgctatcaaagcaaagcttatattaaacacctcgcaattaccacgatcaccattaacaccattcattccaaatataccataaaaaatatgcaaccctacatgaccaatacacaccattcataacagcacacacacacaacacatcaatactctaaacattacaaccaaacacactgcacaagtccacata

SEQ ID NO: 49950 - DNA, 896 bp, Zea mays
  Clone ID: MRT4577_145552C.1
cccgtcgcggctcgcgaggagagagaagagtaaaagagcaccttcttctccgcgtcccaattcggcacgacacctccggatcagcagcgaagtagcctgcactacgccggtgcctagtagtagtagcaccgctccggctccactgttgaacgttgaacggaagccagaccggcccgcaccttgatgcccgctcctatggcggcttccaccttccccgtcgccccgctgcacgcgccgccgctggtgcgcccccgggtcgtccctccttcccccaccttcggctgctgctgccgctgctccgctccgcgcggggggctcaccttgcgcccgcaggcttgcgctccacgccgccgctgcaaccccgcgatccgcccggtgaggttctgtgcggaagttggttcggtgtggcccgtggtgctcactcgatcgatcagaagggggtttcaaaagggtataagtgtcgcaagggtggatgacaatgctgctggtcaagtcagtttaggtgatgacaacgaggatttagaccatatcaccaacgaaacccttcgtaccacaataaggaaaagcaaggaagtgctggcaaggcacaagatcataatgaatcagatatcagaaaagaagcagctcatctcaactatactagacagttccattcataatgagcaagagccactcagtggtcagagtgatggttccttatcaaacctgaatgcaattgcaaagggcacagagattggttatgaccatcagacataccataataggtctttacagcaatatgaatttgacaccacttatggagaatccatctacgatcagaaccctactatgaaagttcagaagacgacggcactgatttcagtgagattatcagtataaaagttttcctagagcta

SEQ ID NO: 49951 - DNA, 151 bp, Zea mays
  Clone ID: MRT4577_145553C.1
ccccgcgtccgggttctgcaacgccagggcgcaaccatgggtcagaagcagcaagggccggcggacaggcggatggccacgcataactaccacctgcgccgtccctgcgtctgtcaccctgagaaggaaaatggagcgctgttaaggggat

SEQ ID NO: 49952 - DNA, 800 bp, Zea mays
  Clone ID: MRT4577_145554C.1
ggtaccctcgggtcctgccgggcgttgctctctaacccgcgcagacccaccctgcgaacagtaaccctaaaccatgaactgtagccgcgaccgtagcgcatcggcgtcattgacgggtactgttcacgcgtgaacagcgcgccgcctctaccagcaggtcctaaccatcgaccccctttccaatccctcaccgatctgcaaccataacacgaacaatttcacttttttggtttgcgaaattagttattttgctggcaatgcagagtagcttgattatttggtcttgcgcgaagagaacattgtttttgtgaaccctatacatttcattgtttcaaggtaatgcaagtttctgcaattacgattgcccagatcttgttcttgtttaaacgtaattctatttattgtacttcaaatctagaaactgttgctaaacctccaacatagctgtaatctcggacaccatttactttccatgctttaccagcagacacctagccagaacctggtaccatggtgaaatgattctgttctgatcctgcagtgacgttttgatcctgcagtgacggtctgcatctgacacaggaaggaaacgcagttgtccacaaggaggttgtcgaagcattgagaaatgctggtttcaaagctgaacagatgccgtacgactttcctcatcactccaaaatagatggcagttgtccagaaaaggccttccaatgaaatgatttcgagttgtgtgatggtttggagttttggatcctgcattgaagatacgataacgtccatgacatgatcttgagctg

SEQ ID NO: 49953 - DNA, 492 bp, Zea mays
  unsure (1)..(492): unsure at all n locations
  Clone ID: MRT4577_145555C.1
atgattcttactatttttttttgttctttttcctaatgtttttacatttttttatattgtttaacggaaaaaactgaccaaggcgccccagcggggccaaaaatccagactctaggaaaacccccgagttcgacaatagcattgcctttctcagccgcatcccaacctttaaaaaggagagcagaccctttgtagacaaaccggggggaaaaaaaaagaaacaacccccccagctggggacagcaaaccacaatgcgtaccatgtactaaaacaaccgaccatgtcatggagcctgcttgggcgggcttagccagggaactttcaccagacaatcccgctgcgggagaaactgacttccccccccagaggaaagacccctntgttaaactcgagctgactgggcgggacctccacgtgcaggccccgcgaatcgctgaccgctaccgtgtaggaagccaactttcccgcaagcaagttgattacagcgcggg

SEQ ID NO: 49954 - DNA, 516 bp, Zea mays
  Clone ID: MRT4577_145556C.1
ggccgcttttttttttttttttttcgttgaaaaaatagcagaatcaaactttcgtatagggcctctatatagactttcgcttagggcccccaaaatgtcaggaccggccctggccaagcccaacaccttcagcagctgaaacagtgcagcaagcgcaggggccagtcagttttacataaaatgtattatatgatcatcggtttgagaatatgcaagatagagtttgcgtgattcagctttggtgcctacccccttcacaaacggcaatgcggccatcaaccttgatcggaggtacctcgttgatcagttccattggtgacttcttgctcgtgtcctaaaacaaataaaattaatgaaacaaaattaattcagaagaaaagtgatccatatgagaagagcgaaaaaaggtctgcaatttcagcaaaatatcatagcaaccacaaagctaaggtcctgtttggatgcaaagcattttttgttggtttagaaaaaagcctttgtgttatggaatacttt

SEQ ID NO: 49955 - DNA, 118 bp, Zea mays
  Clone ID: MRT4577_145557C.1
cgcgcctcaccccgtcccgcgcaagctcgaccccgtcggcaatttgaacgggaacccggctgctcatcgctccgtcaggaatcaggctggaacttgggaggaaaagaacctcaactat

SEQ ID NO: 49956 - DNA, 305 bp, Zea mays
  Clone ID: MRT4577_145558C.1
acgtgccctacccagcctcacctgcagcctcacccccctgggcctggcgctggtgctgtggacagtgcttgggccctgctgacccccagcggacacaagagcgtgctcagcagccaggtgtgtgtacatacggggtctctctccacgccgccaagccacgcgcgctcccgacccgtggggcacgccaggccaggtcctccctgatggacgcctgccgcccgctacccccatctccaccgcatcatgtttacagggttcggcggcaggtttgttccagaacgccgcctctcacccagatcgcggta

SEQ ID NO: 49957 - DNA, 117 bp, Zea mays
  Clone ID: MRT4577_145559C.1
agtcaagatccacctaacaagaaacctagagtgtagagattgccatttctatgtgtgacttttttatgtccttgcggggccccaggtcgtcgaccagcaaggcgaaaggaactggca

SEQ ID NO: 49958 - DNA, 462 bp, Zea mays
  Clone ID: MRT4577_14555C.1
ccaccaggtgcagagtctttcgtcatctcttctccggcgaagaacccccagtcgcccaccagatcacttgttaaactttgttgaggggtgatggcggcatctttagcaaacctcaactccgaagcagggtcttaacaagctagatgagtacctgttgactcggacgtatatcattgcccaccatcaaccagggacgacttgaccctaaacatatacattacgacatgtatcatggagacgaacaagtcttgctaaggactcctcgacgacgataacttcaccatgcacaaccggaaccgaaatggctatcgttgacccatcagctgccgagcacgacctcaatggactcgaggaagacgacatcgacatccagacggcccagaacatcaagcacaacggcaacatcaacctcgaccccaccatcgcaataccctccaccatacggaacacgaccatggccat

SEQ ID NO: 49959 - DNA, 503 bp, Zea mays
  Clone ID: MRT4577_145560C.1
gggggggtggttttttttttggttttttttttttgtttttttttttttttttttttttttttttttttttttttttttccgaaaaccgatttattcctaaaaggggggaaggggggggcccaaaaaattggggggaaccagcatcaagggggggggggggggggcccccggcccccccggaaccaggaggcccccgcgggaccaggaatccaggggggggggggacaacccgccccgcagggccccaagcccttatggccctaataaggctttcggcggacgcccccattaagaccggaacctaaatagcagggcccggcgccattccggctaacaaggagggggcccgaggcccccgtctgggccaccggcaggtcccaagcatggcggcccccttgggggggccccctgggggggcgggcaggaccaacaagggaggctagaagaaccagggaaggcacccaggaaaatcctgggaggcggcggcacttccccagggggga

SEQ ID NO: 49960 - DNA, 476 bp, Zea mays
  Clone ID: MRT4577_145561C.1
tgaacaaaaaaaactaacatatatattttttttttggtactccgctccggtagtacccattctacatggacatgaacaaatggaattcacgttacatataagtttttcccttgtgccaaaccacaagaggatcagtcgaccatgtcctcgagcacgacggtggcaagcggcgggtgcccttaggggcccttgacccatgtgttggcaataaaccggtagggcgcctaggtgaggtggatgccatccaagctgacgtgcgcgtcggggtcctaacaggtggtggccccgggaaccccgcacaaccccctcacgttgtatttgtacggcccgcctccgccgaatgaagcccctagagcgcctcccttgtatccgtataggtgcggtgtgcgcccaaactgtatgtagggcgtgtagtactcgggataaacaacgcgggactccaggcggcggcactgtaagcggtctaccgcaacgcg

SEQ ID NO: 49961 - DNA, 1318 bp, Zea mays
  Clone ID: MRT4577_145562C.1
ttcttcaaacttcgtcgatggcaatagaggaagacgaagactacgagccgccattgatggccacgtacaagcatctgttggacagtcacccgcatcgaccactgggcgccgcgcaagacgacgaggattgcttcctcctcccggtgatcgacctttccagcctcctgcccccggtgcatcatcgcaagcagtcagcagctgcagagcagtgccgggcgtccatcgtgcgcgccgcctccgagtggggcttcttccaggtgaccaaccacggcgtgccgcaggttctgctggacgagctgcaccaggcgcaggccggcgtcttccgccggcccttccaactcaaggcgcaccagccgctgctggacttctcgccggagagctaccgctggggcacgcccaccgccacgtgcctggagcagctctcgtggtccgaggcctaccacatccccacaacgacgaccacgaccggtaacgacgacaagacccggctagtggtcgaggaggtgtcgacggcgatgtcgaagctggcgcagcggctggcggggatcctcgtcgcggagctgggcgaagacagcgcggcggcggtggtgtcgcggtgcacgcggagcacctgcttcctgcggctgaaccggtacccgccgtgcgcggcggcggccagcggcgtcgtctacgggctgtgcccacactcggacagcgacttcctgaccatactccaccaggacggcgtcggcggcctccagctcgtcaaggacgggcagtgggtagccgtgaagcccagccccggcgcgctcatcgtcaatgtgggcgacctcctgcaggcgtggagcaacgaccggtaccggagcgtcgagcaccgggtgatggccagcgccacgagggagcggttctccgccgccttcttcctgtgccccagctacgacacgctcatccggccgcgctgcggcgccggcggacctcctcctcgctatgagagcttcaccttcggggagtaccggaaccagatcagggaggacgtcaggctcacgggccgaaagctcggcctgcaacgcttccgcaaagcagagtagtggactactataatgttgggcttcaatatacttatttgataactacaagtgacatagcatatatataagtaagtattatgagcccagtagtctaaatgggcctctagaaaaaaatatagggtccttattatctggtgtataaacgaaccaaccacctcagctcacactacctcttgtaatcttttaattaagcaattagattattgctctccatgtatatttggaaatggagaggatatatgaaggaatgt

SEQ ID NO: 49962 - DNA, 574 bp, Zea mays
  Clone ID: MRT4577_145563C.1
cccacgcgtccgcccacgcgtccgcagaactaacagttctgagatcgagctgcacaaggaaggaaagaaggagacacacaatcgtcgcctgcttaaccagagcgacaatgcccaagctcaggctcatcttcaccgttattcttgtggtgtctctactgttcagtggtgtgtcttcaggacaaactgcagctacacaagccagcgatgcagatctttctgaagcggttgaggttgagagacgcagtgggaaggttctgacgtacgttcaggactacgactacggcgggtccaaccccaaacatgacccacgcaggaagccagggagcggacaccctccataggtagccaaggataaacgtccggtgacgctccagccactggactctgctggtacctagctagtcttgctgagttgttcctgtaatgagtagaaagaatcagaacggtttggtcccgtccacgcccacgtcactttgttagctacgtagtagtataataaggtagtcttttagatgatgatgaaataaagatccagaatgttctgtcagaaaaaaaaaaaaaaaaaaaaaaataa

SEQ ID NO: 49963 - DNA, 1157 bp, Zea mays
  Clone ID: MRT4577_145564C.1
ggccgggttctctatagcgtcaacttcccagctgagttctcggaatttactgaaccaaagacaccacttagattccagttcaccaagcaatattacttctgagtcctatccaggaaagttcggtccatctagcggttcttctgcacaaagaaaaagtgcagaagaaaactgtcaacatacaaccaagacagccagcaaatgataatgttatgaacacaagcagagcttcttacccttgtgagaactatgaaactgaaagaagaggattagggaaaagaactctgggggatcctcaagttacaatgggtagttcaatggtagtggatggctcatttgtatcatctatgtcctctgataactcagtcgaagaaagcagctttcaacaactgcaggatgctgttagtcagctggatgtgcaaaccaaattgtgcatcagggatggtttataccgattggcacgaagtgcgcaacatagacaagtttttccaaatacgatgaacagcaatggtggtagcgaggacggaaaggaactggagaacgcagaaacttcgtgcaagttcatggaccctcggagcatcgagacgcagacaaacccgatcgatcggtctatagctctgctacttttccgcgagtcatctggcggccatgtccatgtggctgtagcagccgacgatgcctcgtcactgaaatcccctgctggtgtatgatttcctgcctgccacatctcagttccagggccctgctgctaacccaggatgtttctaggcatgtatgtaaaaaaaaaaacaagcgtattgtgtagccaatagtctgtactctgtagtcacattaattttgtcatgcttgtatcctattgctagacggccgatgtgctaacctagtgctgttgactcaaattttatgcgtaatctaaaaaaaattatttcttttaaaaaaaaaaaaaaaaaagcggccgttctctgtagtctcattaattttgtcaggctcggatcccaatgctagcagtccgatgagctaacctagtgctgttgacgcaaatttcaagcgttatctaaaaaaaaccatttcttttcgtggatcaaaaaaaaaaaaaaaaaaagagcgcgcccgctatagagtacacgcgcacgcgcccgtgcgcatgacgtcataaatct

SEQ ID NO: 49964 - DNA, 311 bp, Zea mays
  Clone ID: MRT4577_145565C.1
attcggctatataataacaaaacgaaaaaacttcagaaggaagtaacagcagcagcaaagagatttctacagctcggacaacagactaataacagctgttttaaccaccttcaacaaccgcagacccaaagtaagcagcagcggtaccaattatccatgtttcctctctcaccctactaaccccattacaaaaattggtttccttaaaaccatctacagcttgtcatggtcctcgttgtcagacaccggcgttggtgcccttgcccccgggcgcgccgccggaccttctggtacacggccgacacgatggg

SEQ ID NO: 49965 - DNA, 187 bp, Zea mays
  Clone ID: MRT4577_145566C.1
ttttttttaacaaaagtaataccacgggaccgcctgacctttcattataaacccgggtattgacatagaccacactggacatgccaacggcacacgttctatcctcacgaataaatacatacacgaggactccataactcagagcaaaaacaaatgcacagctacttgaaacattcaagcacacacg

SEQ ID NO: 49966 - DNA, 1142 bp, Zea mays
  Clone ID: MRT4577_145567C.1
cgtcagtgatgtaatgcacatggtgaacagatataccaagaggatttgatggagttgttgcccactgaccagatatgcagcggacatgaaaacattgatatggttggaaaccagtatccatctgaaaatgcaattcaaggtaccgaagacaagaaattctctatagcgtcaacttcccagctgagttctcagaatttactgaatcaaagacaccacttagattccagttcaccaagcaatattacttcggagtcctatccaggaaagttcggtccatctagctgttcttctgcacaaagaaactcaaaagtgcagaagaaaactgtcaacatacaaccaagacagccagcaaatgataatgttatgaacacaagcagagcttcttacccttgtgagaactatgaaactgaaagaagaggattagggaaaagaactctgggggatcctcaagttacaatgggtagttcaatggtagtggatggctcatttgtatcatctatgtcctctgataactcagtcgaagaaagcagctttcaacaactgcaggatgctgttagtcagctggatgtgcaaaccaaattgtgcatcagggatggtttataccgattggcacgaagtgcgcaacatagacaagtttttccaaatacgatgaacagcaatggtggtagcgaggacggaaaggaactggagaacgcagaaacttcgtgcaagttcatggaccctcggagcatcgagacgcagacaaacccgatcgatcggtctatagctctgctacttttccgcgagtcatctggcggccatgtccctgtggctgtagcagccgacgatgcctcatcactgaaatcccctcctggtatatgatttcctgcctgccacatctcacagttccaagggccctgctgctaacccaggatgtttctaggcatgtatgtaaaaaaaaaacaagcgtattgtgtagccaatagtctgtactctgtagtcacattaattttgtcatgcttgtatcctattgctagacggccgatgtgctaacctagtggtgttgactcacattttatgcgtaatctaaaaaaaatatttcttttcaaaaaaaaaaaaaaaaaaaaaaaaaaaaaaaaaaaaaaaaaaactcgagaaggggc

SEQ ID NO: 49967 - DNA, 2508 bp, Zea mays
  Clone ID: MRT4577_145568C.1
ccggccgggaaaaagatccttctggtaatttggtgggcaaggcgagacgcccatctcccctctcatcgtctctctcatctcatccagcctgtgccaaaacaaaacgagaaaaaaaaaagtcttgctgctgctggtggtggagcgagaaaggaaaaaaaaaaagaaggggtaatctcaggaaccatctagatacagcggcgcggcggtacgtggactggactggagcgagcaagcctgcgccggcgccgccgtcttcccgaagcagaagctgtagttggtcaagaattggggatcctgagttgaatatgatctcaaatccggtggactggtatagtttcggacccggatagaattggtagggatgcaagattggagggtgcgtgagttcgaaggtaaattcactgatgagtttgcccacagcagtagcaacgaacataaaggtggagttgaggcttctggtgtcattagtagtaagaagttgaagcatgcagttgctaatgagaaaatccaaggtgtcatccccggtacaaataggtcaggttcactgaaatgtaattcagagaacatccaacatgcgaacggggtattatcccagaatataagctgcgctggtgactgcaaaaatggctccattgcctttcctttgagagaagaaaatacaataactgagaccagatgtccagctgataactggaactcctgtcagtttgcactgagcaatggttcgtccattctcaataaccacagtgctccccaggatagcctcacttatggagataatgatctaaactacatcgaatggcctggcattgacaattttgaggatgtcgatacattattcaggagttctgattcaacatatggtcagcagcagctggagaatgcagatgggttatcttggattccgtcttcagatgctgtttactctaccgatgttgctttgcagcaagggtttgattcgccttattcagattatggtattctggatgatctctccgcattccaatgtgcagaagataaatcactaccctcagttggtccttcatcggatgtatgtgataaccaattcaatgatacctatctgttcagtgagcagaagaatgtgaatgcatatggtgaacagatataccaagaggatgggatggagttgttgcccactgaccagatatgcagtggacatgaaaacattgatatggtgcgttggaaaccagtatccatctgaaaatgcaattcaaggtaccgaagacaagaaattctctatagcgtcaacttcccagctgagttctcggaatttactgaaccaaagacaccacttagattccagttcaccaagcaatattacttctgagtcctatccaggaaagttcggtccatctagcggttcttctgcacaaagaaactcaaaagctggtgtgacacttaagtgcgcaaatgcagtgcagaagaaaactgtcaacatacaaccaagacagccagcaaatgataatgttatgaacacaagcagagcttcttacccttgtgagaactatgaaactgaaagaagaggattagggaaaagaactctgggggatcctcaagttacaatgggtagttcaatggtagtggatggctcatttgtatcatctatgtcctctgataactcagtcgaagaaagcagctttcaacaactgcaggatgctgttagtcagctggatgtgcaaaccaaattgtgcatcagggatggtttataccgattggcacgaagtgcgcaacatagacaagtttttccaaatacgatgaacagcaatggtggtagcgaggacggaaaggaactggagaacgcagaaacttcgtgcaagttcatggaccctcggagcatcgagacgcagacaaacccgatcgatcggtctatagctctgctacttttccgcgagtcatctggcggccatgtccatgtggctgtagcagccgacgatgcctcgtcactgaaatcccctcctggtgtatgatttcctgcctgccacatctcacagttccaagggccctgctgctaaccgaggatgtttctaggcatgtatgtaaaaaaaaacaagcgtattgtgtagccaatagtctgtactctgtagtcacattaattttgtcatgcttgtatcctattgctagacggccgatgtgctaacctagtggtgttgactcacattttatgcgtaatctaaaaaaattatttctgggcatgttcggttccctgggaatggttgaatcctggtcggattgcttctctaatttatataagctttgatcggttagaacgattcttaggggaatttcgggataaacgaacaggcctaatgcgtctccgtacctggttaaggcgggcataatatggcgttcacatgatgtttctaggcatatatgtaaaaaacaagcatagtgtgtacccaatagtctgtagcctgttccaatcaaattggttttgacatgcttgtatcctattggtaggcggccgttgtgctctctagtggcgttaac

SEQ ID NO: 49968 - DNA, 312 bp, Zea mays
  Clone ID: MRT4577_145569C.1
ccgcgcgtgggtccatgtcaaaactgtgcacttatgagctcagagtgccaacatggtgccaactttatttctgagtgtctgaacttttagcatgctgttaccgcccacttattgcacttgttgacatgctatgatggattcatttcttagcacgatgcgtctcactacaaacagcatccattttgtctggaccctgttattaaaccgtactgaatcctactggcgctaggatgaacgaatcttacattgataagacttgtgactccactacttgtgggtgctaatagagcggtttccttagatgcatttgtg

SEQ ID NO: 49969 - DNA, 168 bp, Zea mays
  Clone ID: MRT4577_14556C.1
aattctatcaaaggatataaagtttaccatcatctagtccgacaacatgaatggcatttgacatcttgtgccgatcctaaaccactagtcctctctcatcatagaactctatctatcatcaccataaagaacatgccttacaccataaacaaggactagaccaaactc

SEQ ID NO: 49970 - DNA, 1027 bp, Zea mays
  unsure (1)..(1027): unsure at all n locations
  Clone ID: MRT4577_145570C.1
cccgggccaactccgaccgcctctgggnggtctggcgcggcggtccggcgcgccacgcggacttcacggaccccgactggctcgactcgtcgttcctgttctacgacgaggacgcccggctcgtgcgagtcaccgtccgtgacatgctcgacatcgggaggctccgttacgcgtacgccgaggtcgggctgccgtggctcagcgcgcggccccccatcaaccctggcgacgtgaaccgcggaagagacccgccgcacctggagtccgtccgcttcccggtgtcgctcgatgccccggtgactgcggaggtgagccggcggccgggaaagccacggagccactgggaggaggtgctggtggtcgagggcatcaaggcggacggcgcggacttcgtgaagttcgacgtgtacgtgaacgcggtggatcacgagaagatcatgccgggcggtcgggagatggctggaagcttcgtgtccctgaagcaccccggaaatatggtggtgcagagcagcatgagggtggcgctgaacgagctcctggaggacctgggcgccgagggagacgacagcgttacggtgacgttggtgcccgtggaggggagggtcaggatcggaggtctcaggatagtgtacatggcggagtgaggaccagcgtaggaaccgtttcctctgcagtacgtccagggaggtaaaacttcatcaccgtcagatgctgatccaacaaaacccataaatgttgtgcttcttcccgtgagaagttaaatggtccatatgccagaggctgtgagagttttacctatccatagctttctttaaacgattttattctctatatcttctttctattcagtgtcatcatatataatccctccattcaaaaaaatatttgttttagtatgttataaattatataatatttgatatatgtgtaagattcaagttattttttgaatatagacataaaaataagtgttagaacgaataatatattaggacagaagaagtatatcatattctatatgtattct

SEQ ID NO: 49971 - DNA, 304 bp, Zea mays
  Clone ID: MRT4577_145571C.1
ccttcacgtgaagcaggttcggattcggctcgaggtaacatcttccaaaatggtcagggctgagttgcctagatagatgtcgctcccagtgactactttttgacttctgtttgtctttcgcttctctcagggaaaaacatgcagtcctctagtgtttcatgtctattctgtggggggtgaacacctaggttctggttaaacagctgtacttttgatagctgtgccaggaagggttaggaccaactacaaattaatgttggttgtcaaatgtagtgtgtttccctaactttctgtttttcctgag

SEQ ID NO: 49972 - DNA, 619 bp, Zea mays
  Clone ID: MRT4577_145572C.1
tgggtacctcgaggccggccgggaaaacaccaaaatccgcgaatcaaggacgcgttaatctcagttggttggactgaactaccctgcccggccatcatatcgaacgtgagcccggccgagcgaaagcaaggaaaaggaatggttgttccaaagttcgcaacgttggggttggccgggttcctggggggaaccgggggggttcccccggccgcggggcgcgcgggaatgtcgggttccaccgggaacagaacgttgatgccgggcctgccgttcgtccaaatggggggggccatgccgccccagccgggttgcgggggaatccgcagcctgttgaagaaggcaaaaaaaacccccaacggccgaacaatctgcggttgcctcaaaaacgtcgccaacggggccaacggaaggggaacttacttaagcggggccgccgggttgccaagaaaggggggggtcgccctgccgaacaaaatcagaaccaacgttaactgcaacacgattaattaagttgatgaggcgtcctggtgcgcgtccgggcgaggaatgattgcatggggcttggcgaaaagaaataaaataaggctacgggaattttagcctaatatcgaaggggggc

SEQ ID NO: 49973 - DNA, 457 bp, Zea mays
  Clone ID: MRT4577_145573C.1
cctgccgggaggcactatacctgtagtactactgtcaagtcagtgtccacagcgctacaagcattctcacgcaagtgttaatgagacgaaacgataacatggcctcgacactaactgccgtgcagtcgttgcgcttaccgcggggctgttgttggcaacagcggcgacgacctctgaggccgcaataacctgaccatcggggagctgcccaatatcacggtgaagatcttacgcccggggctcgtcgataagcccctccacaagctgatggaggagcattaagaaccttacgagcggatctcgagtacacgccgctgtacagagggtgctgctctgcaacctgtctgaggaacgctgcaagaggagatggctgtgcttaagacgacaacaaggacgagcccaccggtacgagttggacgacgacatggcctacaccatgatcgactgaagaggctgt

SEQ ID NO: 49974 - DNA, 194 bp, Zea mays
  Clone ID: MRT4577_145574C.1
tcgcagaaacacaccaagcggagcacattaaccaccacctaaccaccatgggttacaaaatattatcccttcctgggcttttgcgcttttgcgagcgcaacaaatgcgttcattattccacaatgctcacttgctccaagttccattattacacaggtcctcccaccaagtactttaatgggctttgaacaccc

SEQ ID NO: 49975 - DNA, 336 bp, Zea mays
  Clone ID: MRT4577_145575C.1
atgccatgcgcgccgcgcccgctcgctgccctgccccagcgccgagcacgcacccgcgcgacccggccaccctgcccgagcaagccggcttcaccccgcgcagctcccacgcccggccgagcgcgccgcgcccctgcaccgcgccaccgacccgcccagccgctggccgagtgccgtgaagcccgacgccgcgcgacccgccaggccgagcccctgcgcccaacgccaccccgcgaccagcgcccctgcacgtcggccagacccgaagccgcgcccaagccaggaaccgaccgcgcgccgtgcccccgaagctccgcgaccgttcctctgcgttaa

SEQ ID NO: 49976 - DNA, 280 bp, Zea mays
  Clone ID: MRT4577_145576C.1
gaaattgaagaagactttgggaagtccagagtctaatcccagtcaaggagcacagagctaattcaaggtgccaatgatagttggccagttgattggaatcactggaatccggtggaaaactgtcaatcctcgagaacgagatgcgtagagtaaagatggtggatgttgggttgatgcctgctggtaatgggacttccatcaatgttttccgggatgcaagtgttcgttggggaaagaggcaagcaaaagtcctggagatagcagaacacggatggtgaac

SEQ ID NO: 49977 - DNA, 1802 bp, Zea mays
  Clone ID: MRT4577_145577C.1
ctggccgggacatcgacgacacccgcgagccgccgggagcccccagttgctcaagtgattccaggcccacgccacgccaaccccgggctcaactcgagtccacacgccccagcaccacccctgcctctcagtccagtcccccacccaccaccaccactcctcccctcgccgccgcccgttcccgaccgatccggccggatcgccccgccatggaccagtacgagaaggtggagaagatcggggagggcacgtacggggtggtgtacaagggcaaggaccgccacaccaacgagacgatcgcgctcaagaagatccgcctcgagcaggaggacgagggcgtcccctccaccgccatccgcgagatctccctcctcaaggagatgcagcaccgcaacatcgtcaggctgcaggacgtcgtgcacaacgacaagtgcatctacctcgtcttcgagtacctcgacctcgacctcaagaagcacatggactcctccacggacttcaagaaccaccgcatagtcaaatccttcctctaccagattctgcggggcatcgcctactgccactcgcaccgcgtgctccaccgcgacctgaagccgcagaacctgctgattgaccgccgcaacaacctcttgaagctcgcggactttggactggcgagggcgttcggcatccctgtccggacgttcactcatgaggtggtgacgttttggtatagagcgcctgaaatccttcttggtgcaaggcattattccaccccagttgatgtatggtctgttggttgtatctttcgctgaaatggtgaaccaaaaggcgctttttcctggcgactctgagatcgatgagctgttgtaagattttcagaattttgggcactccaactaaagaaacatggccaggagttacttggttgcctgattacaagtcaactttcccaaggtggccacctgtggatcttgcaacggtggtcccgacactcgcacctgattgcttgcgagtcaagcactaaagccttagccaagccctagatctcagcaagcaagctcttaagcgcgagtaatcaagaccttgcaatggtatagggaccgctgattgttctttgtgatgctctgcatttgtctttgcattagctgagtgctcatttctctttatggcgtatgtactctcatcttctgctcaaaccgtcgggaatcgatctcctatctaagatgctgcgtctagatcccagcaagaggatcaccgcccgcgccgccctcgagcacgactacttcagggacctcgagcacgcctagcaggatgatggatggatggatgaaccatttcccctcccctgctccctctgtaaattacggtagcagccgcgatgcttggggccggcgagtacccccgtctgggcggccgttgagttatgtgtgttactctatagtatgactaagctggagtgcctcatgtccaccatgcagtgcagcttttttctccgacttttttttgctgcgtagagaaatgagatgagaaatgtgatccagagatccttgtgccatgggagacctagtagtagactagtagctatgtaggtgtcggcactggcctctcttgaacctgtatgatggctggagagagaggagagacggcggcttctctggttgataagttggtcctggtatggtgtgcttgccgccgatgcacgtcatggtctttcttcctttctgatgaggacttggggtggacgccgagtgagttcgtgctcatgcacggtttgttggccatgcaagctgaagcagctgcagcagagattttggctgccc

SEQ ID NO: 49978 - DNA, 559 bp, Zea mays
  Clone ID: MRT4577_145578C.1
ttggacgcgtgggcgtggatctccgatctgatatccccattccattgccatcgtcgcggtgacggatccctctcgggcccaacctctccaacaattgagtggcccaagcctcggcctctccggcagtcgagtagcccgagggtggcggcactaatgtgggcctggatggtgaggctcgtgtccacgctagactggtgctcacgacctccccatggaccatcgcccagcggtgctatcacccacactggtctagcgcctagtcctcgccaccgtcggcggcgtcgggctcgagtcatcatcagccaggtgaatcggtccgctcattccccttaccccatcctctaggtatggatttggtctatcgacggttttcagatccacaggtttccactattcaacgttgatgccatcccttggagattccacattcccacctctccggtcgccgcagctgtggaggctagatgtgcgacgttggtggctgagaaggaggcacgagcggcggtggaatctgccagtaatgtcgtcgataggttcacttgtcgtccaaagtgtaagt

SEQ ID NO: 49979 - DNA, 516 bp, Zea mays
  Clone ID: MRT4577_145579C.1
gttgaaaaccagataaggatgtaaagtttgatgcatatgtcaacaaaggtcgcagagtagaataaaatgtctgaatacctttgttttcttgcttccttctttaactgtttatcactctttttagcatttgcttcagttccattagcaatttcaagacatgtattactaatattatcctctaggtcagaacccggctctccgttgccatccccctgctcagctgctgcatcctccttgtggtgccttttgaactgcttacggtcgggacgcaggtcggtttgccgccggcgccctttcccttcttcctggtgacgtgaggcggcgccatagcagccaacgctctaacctcctcggaagcgcgtcgctgccaccagtggcggaggacgagctaaaatcaaggtgctgctaacggtcacggttgtatggtgatcggaggcacggacggcgaatgcactcactactgtgcggtgaccggaggcccggacggtgaatggactgctgtcagctttgcgaact

SEQ ID NO: 49980 - DNA, 521 bp, Zea mays
  Clone ID: MRT4577_14557C.1
cttatgcccaactcactgttgagattggacagaatgtgccgatcgtcagagatgatcttttcgttaccaaccccaccagggtcggcaaggtcatcattgacagcacctgccatgctcttcttttgacggtgaaccaactcgtttttgtgaccgatagtatcgtacctgtcaggatgtacaagcacccctgatggtgagtgatgccaagccacatgagtgaggatacataggacaccttcattgctgacctatcagttgctctgtatacagatcaaatcaaaacgggagcccattgcccttttgatcgtctggccaaatacaaccatgtgctcatgatccatgaacagcatcgtgatgccgatgtctacgtccgagcccagtgcatggctccaggggatccctactaacactggaagaggattaagatggcttcttgtggacctatactacctcgctgatgtcttttgctacaatgtttgtacggccacaatacatgtatgagtcacgattgctcgagagct

SEQ ID NO: 49981 - DNA, 404 bp, Zea mays
  Clone ID: MRT4577_145580C.1
ctttatattatatttttttttgtttttttttttggggtgggtttttttttttttgggggtaaaaatcaaacaacatttatttatgattaaaccatatgcgggcgcaccatagttttgggtaaccagaacacaactgggccatgaaaccaggttagtgacgacttacgacacaaaccatacaaattctttgaaagacaacaccctccatgggcaatggcaaaaacccttgataacccaaatacaggaggaggtttaacgactggggggttaataaccaccgggaagaccgagcaccagggggggggggctctccttttggatattggaagctgcaagggggcgaccattcttcatctggttggcggggaaaaataaaccctggtggtctggggggaatccccccc

SEQ ID NO: 49982 - DNA, 438 bp, Zea mays
  Clone ID: MRT4577_145581C.1
acactatactctaacatctacatcacaacaaatttctttctatatcttatttttgccgaatctacactatctgattttatttcaaactttgattaaaatatttatattccatacaactcatgcctcaatgatgatttcttaatgaactatgatgctaaccttatgcttactttatacattatattccatgcattgaatcttaattagtatgcattactacttctgctatgcatggcctgtttcttatgacaacaaaagattaggcataattacaaatatctcttctcctaaagattattaatgtctgcaatctttattcctactatttggaatgcctttcaattaactaggacaactgatgacttctttatctcatttattttgccagctgcgatcattttaagcgatacacattgtattcacaaaaagtaccacaaa

SEQ ID NO: 49983 - DNA, 238 bp, Zea mays
  unsure (1)..(238): unsure at all n locations
  Clone ID: MRT4577_145582C.1
aaagggcccacccggttccgttaacccccggctttaaagaaaaccccaatcccgggaacaaatccttttgggttgggccccgggcaggggaaaaggaaaaggcagggggctctcagaaaatcccccaacctaaaaagggaggtaaaaaaaaccagggggcaaccacccggggggttaaaaaaaatctttggcccccaacagaattgccccagggggttaaaacccccaaaccgnaaaa

SEQ ID NO: 49984 - DNA, 310 bp, Zea mays
  unsure (1)..(310): unsure at all n locations
  Clone ID: MRT4577_145583C.1
gtgtncgagtggtgcatccgggggagtgtgatcctaacaatgcatcccagtggggatcaaggatgaaattgagcttggctttggcctgcctgttntcagtagccctcggcagtgtctccaggccgtaaaagatttttttcctgcttttgcgngggataangatttttttgtgggtggtgccttgccttggnncttgcccttggatccaagccggggggggaagagtatcttttgtgtgaaaactgttttactcttggttgcccttcctctggtctttttttttttttncgctggccttgctccgcggggc

SEQ ID NO: 49985 - DNA, 661 bp, Zea mays
  Clone ID: MRT4577_145584C.1
catggactgagggtggtcgtgggcctggctgggggcagcccactggcaccgaactgccacagatctgacttgccctgttgggaggttcctcgagtacccttagcgcagtcgcgtggaagaagacaggtggatactggctactgttattctttttacagattattactattgttgggatttcgatgcagcctctccaaaattgcatgggggaaggcttgcctcggtttatacttcccaaatcccactcatgtgggagccgtcagcactaggtcttttttgaattagtattgttgtgctggacctagggtatcccatcccatcccatacctgtgtagcccactggatctgccactagtcaggtgtaccagttagtaccatactatccatagtcacgctatatcttgtgctaggggcatccttgtgacttttgaggtccatagtaatgcatagtgaagctaccataatggagaaaattaagtgacacatgatttgttcaatattttttgccattatgctcatgtaaatgttgaggtgttcctattagttaaatagtcttcgatattgtagcaaaaccataatatttctaccaaaaggtgtatcatctgaatagctctattcttaatcttaatgaactttggcaagacaatcaatacaatagtgc

SEQ ID NO: 49986 - DNA, 355 bp, Zea mays
  unsure (1)..(355): unsure at all n locations
  Clone ID: MRT4577_145585C.1
aaaaaagggggcccgctgggaattttatttttcatccagggccaaccccaaattttaaaaaaattcaaatgggcaacacaggaaacctcaaactgaacgtaccctcaggaagggagagggggttcaaacaatgcaaattttctaagccccataacctaagggggggggggtaaccacctttttttgtgggggggtaaggtcaacaacaatccccaaattttttgctggggggggtttccccacacggaacaacanccccccccannantccttattttaggtggcatcgtgcgtcctcctcctcctcctcctttttgtggggggggggggcccccttttttcttttgtctttttt

SEQ ID NO: 49987 - DNA, 243 bp, Zea mays
  Clone ID: MRT4577_145586C.1
ggcgattggccagtggcatatcccgcgccttgggcgtccgggtcccctgaggcaaaaggtgattcttatatttctcccaacaaggcctttttctaaaactgcagacaaccaccggcgtacttgcaaaaccatttttgctccctgcttgtatcttcttccacaacttcacagtcgacacgatgggtgaggcatctgctcctggtaaggaccccaaaggtacggggaaggagaaggcgaagacca

SEQ ID NO: 49988 - DNA, 315 bp, Zea mays
  Clone ID: MRT4577_145587C.1
caaatacatccacccatccttacacagactttcatttaacacatgaggcaaagctcctagcggcacgtacaatttgactaacatcctgataactatcaagacattacgtacacgcacgcattaaccttcacattaaaccaactagctatcataagaccatataactatcatacgagctaactactaatgcaagcctttacacaaactattaatatgatcactacattcttacatcatacaacaaacattcccatgataaaatacatagcatactagactacactacaaccactgatacaatcatctactttcact

SEQ ID NO: 49989 - DNA, 922 bp, Zea mays
  unsure (1)..(922): unsure at all n locations
  Clone ID: MRT4577_145588C.1
ctccctcccgtcctgtcctgaccccctcgtcccggccccgggagacttcacacatcgatccccactccccccaccccaaggaagcgaagcgtacgctacgcgcactgccctccggcgaccgccccgccgctggcgggtcggattgggtccgatccggatctggatcagcaccggcatcgccgcgacaaggatgtcgaccccgaggcagcggcatacctccacctccggcgggggcggaggagggaggcgcgccgcctccgggtcggccatgctgccccccgtggtggtcctcgtgttcctcttcgtggtcgcgccttcgctcttcttcgtcgtgcgcaatgacggtcgcgcccacgcccacgtccacgtagcctccgatcgcaagggtaagaatggcaatcaggaagcagcagcaatgaagaacctcaaatctattttgcccaaggaggtgtttgatgctataactgctagtcaacaagaatcaggcacattgagtgttgaattttttaggaatcatgcatctccctcttggaaaactgatgatctagtcaccgagaagagcatggatgtcaatgacaacgctaaagctgaaaatagtttgctagaacattctgtgccaacaaatagatcacccaaagatccagatgaacatcaagttgacaaagcagcaaaagtagctcgaaggaaacttagggagaaaaggcgtgagaagagagcaatggatttggttcataaagatgatgaagcacgtattaagctggaaaatgctgccattgagcgatcaaaagctgtcgattctgctgtgcttggagaatacagcatatggcgaaaagagaatgagaatgagaattcagactctacagttaggctgatgaggnaccannatatatggctcgtgtctattctacgcttgctaaaatca

SEQ ID NO: 49990 - DNA, 422 bp, Zea mays
  Clone ID: MRT4577_145589C.1
aatcaacagacctcttagttgatccggttactatgaacatacttctataaattctaggatatagtatatttatagaaataacactttatgtatttgacataatgtatactacttattactttactttcttactatagtgtatataaccgcttagaattaccacttagaattaactgcagccttcataacgtgaccatactcagcaccagcatgcatcatgttgtgttctttaagagcatcatggatattcttctgcatatgccaaaaagcagcaggatgacggtggacgaagttattgaccttttcatggaattcatgactgctgaggtcaatcttgagcttctcactttcaaccttagtatcagcagattttccccaacattgccaagtagactcagggatctttcctaacaatgcattac

SEQ ID NO: 49991 - DNA, 2143 bp, Zea mays
  Clone ID: MRT4577_14558C.1
cccacgcgtccgcccacgcgtccgctaagtcggagattgaaagggaattggagtatttgacgaagataaggcttccactccactctaacggtatcatttacccttcgtcgctactccgctctctctccaattggtataatccttcactcttatttacttgtaccaattgaaaaaaagtaaaaacgggctcaaagtctccgttttcggcaattaatgccaaaggagaagatattaagcccaaagcaaaaaggaccgcaccaccatttcaaaaaatttcaaaataaagttttaattgatgattttcacattggtatccacacaatggaaatctcttcaattggtatctttaaaggtagattttcaaaattggtatccaattctttagaagttcatctttaaattggtatctattttaaaaccctcttgaaagctaagaggagaatttcatttaggggagttttgtttagtcaaaggaaaagcatttgaaacagggggagaaaatttcaaaacttgaaaatgcttctcaaattcttattcatttacctttgactatttgcaaaaggatttttgaaaagaatttacaaaaggatttgcaaaaacaaaacatgtggtgcaagcgtggtccaaaatgttaaaaatataaagaaacaatccatgcatatcttatgaaaatttctattggctcaattctaagtaacctttgcacttacaattatgcaaactagttcaattatgcacttctatatttgctttggtttgtgttggcatcaatcaccaaaaagggggagattgaaagggaattaggcttacacctatttcctaattgattttggtggttgaattgcccaacacaaataattggactaactagtttgctctagtctataagttctacaggtgccaaaggttcataataagccaataaaaagaccaagaaaagggttcaaacaaagagagcaagggacaaccgaagtgcaccctggtctggcgcaccggactgtccggtgtgccaccggacagtgtccggtgcaccaggggactccaagctgaactccttaccttcggaaattctcagaggcgctttgctataattcaccggactatccggtgcaccaccggacagtgtccggtgccccaagggagagcgactctgaactcgccagcttcgggaatccgctccgctaaaattcaccggactgtccggtgagtcaccggacagtgtccggtgcacaccggagtgtccggtgagccagcagagcaacggctacttcgcgaagcaacggtcgactgcaacgcattaattgcgcacctgcgtgcgcagaggtcagaggacgtgtagttggcgcaccggacagtctacaggacctgtctggtgcaccaccggacagcccagagggcccacatgttagatctccaacggtcgaaccccaacggctggctgacgtggcaccggacagtgtccgccggactgtccggtgcgccatgcgacagcacacttccaacggccatttttggtggttggggctataaataccccaaccatcccacattcaatggcatccaagttttccaccttcaacacattacaagagctatagtattcaattctagacactccaaagagatcaaagcctctcccatgtccaaagttcactccaatcaatagtgacttgtgagggagtgatatttgtgttcatttgagctcttgcgcttggattgcttctttttttctcattcttcttgtgatcaaactcaattgtaaccaaggcaagagacaccaattgtgtggtggtccttgcggggactttgtgtcccgtttgattgagaagagaagctcactcggtctaagtgaccgtttgagagaggtaaagggttgaaagagacccggtctttgtgaccacctcaacggggagtaggtttgcaagaactgaacctcagtaaaacaatccgcgttctcatattcattagcagcgattgttttgctcctctgtaggactcattataatttctaaagtaacccggcttgtattgtgattaatttgaaatgcagttcgccgattcaccccccctagggactaccaacccttgtcagttcggtagaggacattaaatcttccctccaccctcacattgagaatcagaa

SEQ ID NO: 49992 - DNA, 624 bp, Zea mays
  Clone ID: MRT4577_145590C.1
ctcgagttttttttttttttttttttttttttttttttttttttttttttttttttttttttttttttttttttttttttttttgggaaaaaccataggcaattttccaaaggaattggggggaaaggttttaaaaaaaaattcaggccttttttttttgggaagaataaaggggccccccttttccagggaaaaccaaaaaaaatttttaccaaaaaaattttccaaatttccggccttaaaaaagggggggcttaattttagggaaaaatttttcccagccgcaataaaaaatttagggggggctttgatttatccctcgagtaaacggtgggccctgggggaaaaaaaaaaaataacccagttttgggtttgggggggccacccttccttacggggaagggattttccgaaggcccccctttgggggtttttggggggaggccccctcccccgagggggttaaaaaaagttccaaaaacccctggagttcccctttttttaatgggggcccccccaaaacccgggggggggcccctcctttgccccaatttggttgaaactgccgcccggggggggaaaaatgcaggggcaaaacccgaaaaattccccttggataatagg

SEQ ID NO: 49993 - DNA, 297 bp, Zea mays
  Clone ID: MRT4577_145591C.1
acagctatgattacgtatgaaccactccgtcagcagggagcatccagaacagcggcccttcttaaatacttttttttttaccaaataaataaaacaacaacaccgggaataaaaagccacgagggtgagaaagggagcaccggatacaaaaaaaatgcgattaaaccacataaaaaaaaatacaggaagggtaacaacacataacaacaaaatataaaaaaataggatcaagtattcaaccaaacccttcatagcaagagacggacaaccaccagaaaactcctactataaacaaaa

SEQ ID NO: 49994 - DNA, 281 bp, Zea mays
  Clone ID: MRT4577_145592C.1
cgcactgatctatctaattaaccgccgctctagctagcacacaacctacaaaagcatctgctgcctgaaatatttgcttggcagagttgacatttacattcgatctctcggttactagtgtagtagtagtgttggatcggcagcatttatttgcttcccctgcccctgccggccatgggcaccatgaccctgccgcccggcttccgcttccaccccaccgacgacgagctggtgagctactacctcaagaggaaggtggacaacctcaagatcgagctcga

SEQ ID NO: 49995 - DNA, 1383 bp, Zea mays
  Clone ID: MRT4577_145593C.1
gcctgttcccgccagggagcaacggctaccgttccctgccccccgactccccgaggcaccccctcctccctcctcggcgaaacgacaaccaccccgccggggagggtaatccaagcgagggcgagccatcaccgtgctgttcctcgtttgctgtcgcctcgaagagcctcctccgttccctctccctcgaccgatcggccggtctcacggggcatttcgcggggctggtcgatctctccccgctcattctgtcaagggattggtcggttgccgattccgtgcggccggataactcggatttattcagtttttcgggttcgctacatgcgtgtgcgatgccggccagctccctcccggcgtcccccgacgccaccggcgacattggcgccgcgctcgagctcgatctcgaggatctcgccgccggcggcggcacggactgcatcggcgcgctcgcctgcggcaggagcagcttctcctaccgccgcctcccggagccccgcctccgcctcaccgttcagaagcttgacgactccttcttcgacattgaaatcgcgcggtcggccacggtgtgggagctcaaggtgaccatagagaacttgttctccgccctctatgacgacacccagaagaccatctcttggaatcacgtgtggagtcacttctgcttatgcttcaaggacgagagactgacggatgacaaggcaacattgcgtgggtttggtataagagatggtgatgtgcttcattttgcccagcatctgtctgttgactacagcccatgcagggatcctcccaaaaaccagaaggaagcgtctcacactcacagaaggtcaaggacttcgctggatggttacaggccagtgagcatgctggatgatctcagcgaagatgatgatgagaagtttacacacagcaggtgctctacgagtgtcttagaagatccgtgtctttacgagtacatcgaggagcgcgtggaagaagaaactcccaagaaaggaagtctgttccaaagatggttctgctcctctaaactaaggagcaacaggaggacacatgcagaggacactgtgccactatctggtgagaagaagaatgctcatccaaagctggggaagtggctgaccttcaaattctgagatggtgttgtttattctgtctatacacgctcctccgttcggcgcggccagctgagaagaagatggcatggttccttgtgaacttattattgacggctaatttaggtttcatgtatctctgtgtatggtccgagctattcttccttctaatgtcatgcgcctatgcggcggtggtatgagcagaactgtttgtctcatgactcatgagaaacaacgactgatgcatcacgcggttcacatttttttt

SEQ ID NO: 49996 - DNA, 223 bp, Zea mays
  Clone ID: MRT4577_145594C.1
catacactatattataattactagaataactttattaccttcaaataactacatcttgaaagggcttaaacttaatgctcgcgaacatcatcatctcctctatatccatttccatcattaacttcttcatcaactacatcttctaaaaactttccttctactccttcaaactctctcttttcaacaagaaccctaccatcacctccctctagatccatacctc

SEQ ID NO: 49997 - DNA, 233 bp, Zea mays
  Clone ID: MRT4577_145595C.1
acgagatgttttaagcggctgaacatatcaaaaataaaacctgaatcacccacaacagtgttcgtaaatactcaaacagaggtatttactgaaaaaaactgctgtacgttgtataggattcgatcttacttacgcactcttcctacggcatatctgtactataggattcataaagactaatgataatgccgccttcttaaattatcataactggcacaaccaattctgctcca

SEQ ID NO: 49998 - DNA, 245 bp, Zea mays
  Clone ID: MRT4577_145596C.1
ccacttgttcaaagcctttccaaataagcaggcattcttcccaaaaattgttccaaacaacggttccttggggcccaaacgggccctcagtttttttaccctcccccgggttccaaaaggcccccggtttgggggcagtccaacctttttccacaaaagaagccgatttccccattttgggattaatattttccccaggggtccccatttttttttaaccccccccattttttggaaccgggggg

SEQ ID NO: 49999 - DNA, 173 bp, Zea mays
  Clone ID: MRT4577_145597C.1
ctgcgctaggcgtttacttcgaagacacaccgcgccgccagagcagctcgagagccgccaggcgagccacgcgagagagatgaggctactgactcacaacatgctgtcgtggaacgtacggcgcgcaaccaccggctacccgctgacagctggaggcgaccaactgttgcacc

SEQ ID NO: 50000 - DNA, 436 bp, Zea mays
  Clone ID: MRT4577_145598C.1
acgaccaagaaaccaagcgacaccatgaaggagttgttcgttggcctcgctgctcctggctctcgctgcgagcgtgacctccacacatacaaacgctggctggctctgacagccatcgtccccgagtcatctaccgccgccagtgcattgggcatctaccatccacctgccacctccgataggttacccaccgcggttgcacctggcgcctcaggtccacctgccaccgccttaccatgtgaagccgcgggttcttgtacctccgccaccatgacaatgccgtactcaaacgcaacggactcagtctcatccccgtccacactcatgcccgtgccaacagccatattcaacaccaagccagctgcttggaacatgcgaccttggtagcaccccgatcctcggtcacagcgccgagttcctgaggtcatcaaggcat

SEQ ID NO: 50001 - DNA, 253 bp, Zea mays
  Clone ID: MRT4577_145599C.1
aaaatggggagggggttttatttaggtcacgaacttattgccccaaaaaaacaggaacttagtgcctgcaacttctattgccaaattccatgaccctgtacaaccagtcaaccacaaacatacataaggcaccccggcaaacacaaacgggcctggatgcccgccggcgggcggataaaataaccctggggaggaaaccccccctgcgctcgtggaacttaccgctgcaggggaagaagtcctcttccaccct

SEQ ID NO: 50002 - DNA, 213 bp, Zea mays
  Clone ID: MRT4577_14559C.1
aagcagtggtaacaaggcagaggacgcggggtttgtggcggcgatcatgtgcctgccccgttttctggttatcaatgagatgatttatttgattctttccaaaaaaaaaaaaaaaaaaaaaaaaaaaaaaaaaaaaaaaaaaaaaaaaagttaaaaaaaaaaaaaaaaaaaaaaaggggggggaaagtacctcttgcgttgttaccacctgct

SEQ ID NO: 50003 - DNA, 453 bp, Zea mays
  Clone ID: MRT4577_1455C.1
ggctcaccgaggcatacaaccatcgacggggcaacatgcctgaaagatcaactaagtcacttatgagtagatgggataccataaaaacacaatgctcactattttctggctacatggcaaatgtcctacgagagaactctagtgggttgtccgacgctgataagacatctctagcagcttctcgatttgctactatggagaagcgcccattcactcttttgcattgttggtctattctaaaggatgaaccaaagtggatggatcatagttccaataagcaagttcgaattattgaagttgcaccaattggatcgaacatcatcgacctagaccctaaagactcttttcttggtagcacaacatcaaagcaacatctaggtcaagatgcaagcaagggaaaaactaaaaaggctcgatcaagctcaatcactgtaagctcatcggatgaatatc

SEQ ID NO: 50004 - DNA, 481 bp, Zea mays
  Clone ID: MRT4577_145600C.1
gacccacgcgtccgcccacgcgtccgcccacgcgtccgcccaacgcggcagtagtaactgttgcactcaggatccacgtacacaaaaatgagttgaggcataacgtcccaactcggctggtggtatatgttaacagccaatcatgtttaagctattactctgatcgttaaggtggatccgctaaggccttcggttatttctgatccatgtggattggaatgtattgggcggaatcgagacggatttgacttgctatagatttaaatcgactcaatcccactcaatccacatggaagaagtacctttgcatcgatttgtcattggaatatatacaaggtctaggggtgtaattaacgtaaccgtccaagcatttggctaaagtatacactctttaaatgcataattaactgtctattcatctcctctagacatactcctagcttccgcatgttgttggttccattccaccacacccctagat

SEQ ID NO: 50005 - DNA, 303 bp, Zea mays
  Clone ID: MRT4577_145601C.1
ggaattcaaaacagcacactgatgacatcatttggaaccctggtcgctggccaagcgagtcaatgtgatgtaacgtacactcaaaccagattctttcggtagaatttatcctactatgggtgatgggtcattgggactcatagttgcccattggagcataccggcactagaataatttcagaaatgttcttatgcagattactccaaaatagtttacttttcagatgcaatatcaaatgggactgtgtgttaaactcgacacattgtaactggcccgctagaggatggatgaagatggagcat

SEQ ID NO: 50006 - DNA, 658 bp, Zea mays
  Clone ID: MRT4577_145602C.1
ggccgcttttttttttttttttttgtaaaaaaatagcttttattggtatattcctcgttcgtagaattccagaattcagaaatggcttccatcagccactgagtaacatcgtatcacccacatcgatcagcaaaatttttatcctatcccattagcctacaacgaatgattttctatgcatctgaactctgaaccgaaacgggagcagtatctatgtctgtacacgaaaacgatccagtcaccggcggtgtcagacaagcgctgcggccagtagcaggtagaggcatcccagtcccagcgcggcggcggcgttgcgcgagccggcagacctcggcaggggcgccgcgccggggtacccgctgccgctgccgtcgttctgccgcggcgtgatcttggtcggccccgccgccggggccgagctcgggcccgggctcccgtccggcgcgtccgccaccctcgcgttcctgtagcagtcgaacttctcccagcccaggacggacctctccctgtcgaagacgaccttgagtccggtcatgaagttctctccgatgatgtcgatgccgatggccatgtcgttcctcatgatcgccaggcagtagccgatggcacggccggtcgggtccccgacggggatgaacggcttggtgaccgggaacag

SEQ ID NO: 50007 - DNA, 664 bp, Zea mays
  unsure (1)..(664): unsure at all n locations
  Clone ID: MRT4577_145603C.1
cattgggtacctcgaggccggcccataaaggacgcgtacctgtcttcggaactacatcagacttactcaccctcattactgctgagtgctaccggacgaatgtcacgtacctggacctgtgccaaacctcatccgaagaccgtgccactgtcactggaacgcctgcccacactgcatcacagctgaatcctcaatacaaccaccctgtacgtcccgctccacaaggggcacgaagtcattaaccacggtcgtctaccatacgaccccaaccagggtaaaaaacttactccactcccgcatatgccaacacctgaaactgaaacgaatgaccccctgcgcatgaccttctatactctgctatgctctctactcccccaagttccaatcgtgcacccgtcgtacaaagacgacggtacggaggctgctaccagcctatagacaaacaaggtacaagcgctgggtggcggtgctaatatgcttagccacgcgcatgagatctttaagcacgtaagattataataaataacacctatggacatggactgtctgctgcaaccactcgaatatactgtctgacaccaatatatgctaacggatgaaaacaaggatggaaactcatatatgtaataaccttatgtaccaaaaaaaaaaaaaaaaagccgnc

SEQ ID NO: 50008 - DNA, 522 bp, Zea mays
  Clone ID: MRT4577_145604C.1
ccggccgggatagtacgattcgcttaatgacgactgatctagattgggtcatgctgaagcatgtgtgaggtcaaaagcggcacagggaattaaaggatgctgcacaagctgtgttacgaagtggtgcacggtgctcgcctccagacgcccctcaagaaagtacacataagggcaccatatgccgaccactggttgtcaacatagaggcacatcagatgggataccaacgggtgcaggccacgacgatgaccccgacgactgcggtgacgacgacgtgaacaagccccccttcaatagcatgggggcatgcggaaacatcgccatcttcaatgatgccctgggatgaagctgctgcttcgagattggtgggataactctgcgaagtgctccggccagactcgcgcagctgcacactcacggatatgaactatgagcctatcgcggcgtaccacttcgatttagcaggcacggaggttcggcgccatggccaagaagggcgaggaggagaagctgtcgcaaggc

SEQ ID NO: 50009 - DNA, 598 bp, Zea mays
  Clone ID: MRT4577_145605C.1
cctacatagtacaacattgcataattttctggttttctaaaggtacaactcagtattattttttatcatacatagatagaacaaaggccacaagagctgattttgtgcaccttgctgcatgggcacccacttgattaagatattctaagtgtgagcttttagatttcgaaataacaaattagattctaattattaacctgtgttcaaattttaatgttatctaactctgacagattgtctttgagaataatttgatgaaccaccatgtcgctcttcaatctggttccatgggaaagtaaattacatcgctcgagcgggtcaacatagcctacaggatacatttctagagctgaaatttcagggcatcaagaagtaattaaatatgcttcaagcaaggaagttatttggtataacttttttgaggaataatttactagcttaatgtttggaagttaatgagctgcagatatggcatgtgggtacacgaagacctgatgcatcaaagctcggtgtggacacctcttcttacatgacatgtatgtctacaacttattcgagcttcaatttccagaataaaacatatgtttttatttattat

SEQ ID NO: 50010 - DNA, 335 bp, Zea mays
  Clone ID: MRT4577_145606C.1
tttttttttttatgagaaacaaattatattcaataaaaagctattccttttaatttattaaatgggaataacagagaagcactgaagtaatgtacaaaattacaaggcggcagctttgtgtgtgcgcgcggtggtggtgggggatcaggcgctgccatgagctatgttatacactgcaaaaaggatgacgaggaagatgacgatgctactcttctacaggaagtatgcactctagtttatcgaggatgccaacaacgcagggattatattatggtcggttttgcacaagattacggagctgattgtgcggcccaaagttcctaagtcaactgctt

SEQ ID NO: 50011 - DNA, 2976 bp, Zea mays
  Clone ID: MRT4577_145607C.1
ttttaggtagatattatttcatatgtatagagggtttttatttttatatatttggattttttatatttttatatagtatattttgatttaatcaatttatatagtatattttgatttaatcaaataatatatggaccaaagaaagactacttcttctggttctggatcaaaaattaataaaagaaagaaatccatttttttttttcaaattttaaaataaggaataaatcatgtatatatctaaacaaccttttcgtaaatctaagcaaccctttcgtaaatccaaacaaacttttcataaatctaagcaaccttttcgtaaattcaaacaaccttttcgtaaatctaagcaaccttttcgtaaatccaaacaaccttttcgtaggcgttctcgaataggcccgggggatcgaattgattatagaaacatgagtttaattaatcgatttattagtgaacaaggaaaaatattatctagacgaataaatagattaaccttgaaacaacaacgattaattactcttgctataaaacaggctcgtattttatctttcttaccatttcgtaactatgagaatgagaagcaatttcaagcccaggcaatttcaataattactggtcctagacacagaaaaaatagacatattcctcaattaacacaaaagttcaattccaatcgaaacttaagaaactccaaccagaatttaagaaacaacaatcgaaacttaagttccgattgttgatgttttattcgaaagactcagactcatatataaagtaaagtaatccaatttggattcttgtgtttgttataagaaagaaaaatgggaaaaaataaatagtttttttatttattgcaacatgctcgtcgattcctaccacttaatcttaatttattgtatcttcccggagttccctctccgggaattcggttttaattattcctgtatattacttttttatcctttaattgatgatccttattttattggaaatcgtgtaaagattatttggatttgatacagctacttgtgcaagcattttacgattaagaatcaattccttcttggacagattgtgtattaatttactataactattgaatacgttatatacccgtgttgctgcgtttatccgagtgatccacaaacgacgaaaatccctcttttgcctgcctctatctcgatgagaagaaacaaaagctcttcttacttgttgagtaatcactcgattaagtcttaaatgagcccccctaaagtttgaggcaaatgaacgcatttttgttcgtcgtctccgagctatatatcctcgcggaactctggtcattgaatcaaattaaccttaatgaataactaatgatttctcttcttttaaccctcttttttcccattaataactaaacggattattccgatatataaaatattaattccaatggcttttgctactataaccttcccaaccacgattttttattctattcagttatttcgcatagaaataacaaattctaacgatactaaaaaaacagtgggttccatcgtttttatggttcccttttaaacggcgaggccctctctatacaccggagccctttctttcatttcatcaaaaggtattgtgaacttgtatagttcacattctttggctctacctatccattatagagtaaataactcttttcacaataagagttattcatacagtgacggtatttaattatgaaagttggctaagtagctgaccctttagtccgttcttttaagataaaggagcataagcctttttctttttattactatttcctccgcttaatggataaccatttgttaccaatgggggaattgcttcttccaatctagatgattggatttgcaccaaaggaaaccataaattccatataccatagaaatctaggatagagcttctctatcctattcattggtaccgatcatggatacttcaaaaattttattatttgtttgaactcatgatctgaacgagtcgcacatacaccctagcacatgttcctcgacgctgaggacatcccttaagcgcggccgattttctagcatttcgtattggctgtcttgcatttctaataagttgtttaaccgttggcatgtcgtatgtatatataaaatggattggtttagatcgatcttaacctgatgattcatcatcatgaagtatttctattttctatagcataaaacccgaatttaggtttgagataaatttacaagaaatccacccactaccaatccttaaacatttctggaaaccacactggatcagtatcgcagtgctcgtcaatcatttcatcccctacaatatcgacaagtccataagctttggcttcgtctgctgacataaaaacatccctttccatgtcttcggatacaacccaaaaaggcttgcctgttcttagtgcataaacccttgtgatcatttcgcgaactttgtgtaactcttccacttctagtaaaaattctggtgtccttgcccgataataagcactagcaggttggtgaagcataatcctagcgtgagggaatgctatacgcttggtgggttctcctccaagcagaatggaggaggccatggacgcggctattccgaggcatattgtatatatatcaagtgtcaccgtttgcatcgtatcaaaaatcgccattcctgagattagccacccgccaggggagtttataaacaaaaaaaatatcgctatttccatcttctatactgagatataccatcagacctgtaatatgattcgtgatctcgcaacgaatctcttgacctaaaaaaagtgtcctttctcgatacataacattgtataagtcaacccaagtcgcttcttcatctccgggaatccggtaaggtacttttggaacaccaatgggcatattagattaatattattaaatttaagtaaaaaaactaccccgcgtactctgcgttgttaccactgct

SEQ ID NO: 50012 - DNA, 270 bp, Zea mays
  Clone ID: MRT4577_145608C.1
ctcagtgctgcagcaactccagactgaggtctaccgaggggctcaaacactctacgtgcccaattgtgaccatcgagcgctctaccggaagcggcagtgccgtgcctcccaggggcagcgccgaggtccctgctggtgtgtggatcggatgggcaagtccctgccagggtctccagatggcaatggaagctcctcctgccccactgggagtagcggctaaagctgggggatagacgggctgcagggccactggaaggaacatggagctgt

SEQ ID NO: 50013 - DNA, 323 bp, Zea mays
  unsure (1)..(323): unsure at all n locations
  Clone ID: MRT4577_145609C.1
atccaacccccaggggggcgcctctcgtgcctccggacccgggcccgagcccgggcccggcctgggcatggcagagctccgggctgagngcgattttatttcctcnctttttncccnnncccccagtgggggggggggggggggaccctgtnccccctttgtttccccactagggggggggggggggggactcgcggccgccttcctggccggttccctggcgggcaccccggccttgcggctgcctcgccggggcggcggaggcgcgctgagtggcggctccgtcttcggctgctctctcgctggctgcgctggggccggcg

SEQ ID NO: 50014 - DNA, 286 bp, Zea mays
  Clone ID: MRT4577_14560C.1
gggtgggaattttttttattgtttcttaattgtgtttttctttggttggaaaaatccaggaaaccttatttccattaccattaaacttggtgggcaacattccatttcatgaaccacggttggggcctgcaccgtttttttttacgtgggtaaacagggtttacttagcccccaccagctgggggggttttttacagaccatggccggcccagtgggtaatttaaatccagtttccaacaagcctgtggtaccccttttgttttctccagaagcagttaaaggaaa

SEQ ID NO: 50015 - DNA, 1058 bp, Zea mays
  Clone ID: MRT4577_145610C.1
tattgatgccctagtgctccccgggtctcctgttgtttcccggccccctccttcctcccacggtcccaccatcccagggccgccgcgctgcttctctttcccgtcgcacctccaacgctgccgccgcggcagattaatccaacaccgggccgggatacgtgacaggtttctgagctcgcagctctacgccagcgatgccggagacggcggcgccgatcggcctgtcatgggcgcccaagcttccttccttcgcaacgaccagcggcggcagcaagagcgaccacgcgccgaacccgagcgctgcgcagggatcgctctggaaccgcgcgagcgacctcgtggacgggctgttcgttgccccgagggaccctaggcagctgaataagctggccaggaagaacgtcaaggacactgccggcaagggctggttcgacatgccagctccgaccatcactcccgagttgaagaaggatctcgagattttgcagctgaggcatgtaattgacccaaaaaggcacttcaagcgggcaggaaaatccaaggcccttcccaagtacttccaagtcggtacggtcgttgagcctgcatctgagttctactcaagtaggctgaaaaatagggaacgcaaggcaacattggttgacgagctgttatcagatcaatctctgaagagctacaggatgcgcaaggtacgtgaaattcaggagatccgtacaccaggaggcaaccaaaagtggaagaacaagggcaagaaaacgctcaagagggccaaggataggaggaaatgagactggcgtgctagccttgtggtccagttgtgagagaacagattggagaagtgaaccaaggagcgccttcaaataccccctctctcgatttgtgcggggtatatagattctggttccagtgtagtgtgatgaacttcagtaacatgatgaattgctttagatacttcaaaaatgttgctgtaacacacatgtatggtttttcagcccgtggttatcaattctgtcggttgggagcagaaaaaaaaaaaaaaaaaagcggccggggaaaaa

SEQ ID NO: 50016 - DNA, 446 bp, Zea mays
  Clone ID: MRT4577_145611C.1
ttttttttttttttcttttttttttttttttttttttttttttttttttttttttttttttttttttttaaaaaaaaacctttacaagggttatatttcaaaataaagcaaacacaggccacaattttggtattcttattacaattatgaggagggccgcaaaaccccctaatacaaaacaggacaatattaaggggaggaaccccaatcaaacaaacccccccttaagggggggattgacaacaacacgaggggtttttcacaacgggcttggggggggaagaaatccaaacccagggggaaacctttacaaagaaattcttaagggcccttgcccgcaaataaagcccaccgggggggggggggacagggtacatccaaaaaggggattgaccttggttgggggtttttaaacccccccccaaaaaacccccctcggtgccccg

SEQ ID NO: 50017 - DNA, 1046 bp, Zea mays
  Clone ID: MRT4577_145612C.1
aggccggccggggcacgcttcttcttccctttcccgccacctccaccctgccggctgccgcggcggcggattaacacaataccttggcgagagacgtaatagtttctgaactcaccgcgctacgcccgatgtcggagacggcggcgccgatcggcctgtcatgggctcccaagcttccttcctttgcaacgaccagcggcggcagcaagatcgaccacgcgccggatccgagcaccgcgcagggctcgctctggaagcgcacgagcgagctcgtggacgggctgttcgtgcccccgagggaccctaggcagctgaataagctggctaggaagaacgtcaaggacaccgccggcaagggctggttcgacatgcccgcgccgaccatcactcccgagttgaagaaggatctcgagattttgcagctgaggcatgtaattgacccaaaaaggcacttcaagcgggcaggaaagtccaaggcccttcccaagtacttccaagttggtacggttgttgagcctgcatctgagttctactcaagtaggctgaaaaaaaaatagggaacgcaaggcaacattggtggacgagctgctatcagatcaatctcttaagagctacaggatgcgcaaggtacgggaaatctcacccgatccgtaccccaggaggcaaccaaaagtggaagaacaagggcaagaaaacccttaagagggcgaaggataggagaaaatgagactggtgcgcccagctttgtgccccagttgtgagggaaccaaggaacgccttcaagtcgctctagtgcttttctctcaactttgcagtatagattctggttccagtgtagtgttgtggacttcatgatgaattgatttgtatttctataaattttataatattgctgtaacagcggaattcagaaatatgagttggtagactctttcaagttagctagcttcatatatgggagaagcactgtctcagctaatttttctagctgtgctgtgtctgcttatgatcatatctacagtttcatctttcttttgctttaaaaa

SEQ ID NO: 50018 - DNA, 298 bp, Zea mays
  Clone ID: MRT4577_145613C.1
accacacggattagatcaccgagaaggattggtgatgagcttctaagttctagaggcggggcgccacagggcactgctcgtgaagtgagcgaaatgggggcaactcgattcgcaagcgctgatcgtcgatattaccaccgcagttggactcatacgtgcgatcttaaatccgctaaggactcccttggataccatcactcatcgtgacaggctgcatcagtgtagtcacctgatccttcaattaacagcgcttcgagagagtaactccaaagggctgtcttatcagacatcagcactg

SEQ ID NO: 50019 - DNA, 435 bp, Zea mays
  Clone ID: MRT4577_145614C.1
cgggcggccgcgccttttttttttttttttttttttttttttttttttttttttttttttccacaatattttttttttttttggggtttttttaaaaagcaacaaaactttaattaacccaaaagtcccccaaccccccaaaacaaatgtcaggcatggaaattggaaaccaaagcagggcttgttttaattgctacataaacattaaaattgggccacttttttttataacagtttttgtagacccacatgttaaacttaacacccaaacagggggccaaaaagcttaaaaaaaaaatttccccttcccctttttgtctccacaaatcaaaaaaggcttgcttttttggatggcgcccttgaaatagtgttttcatttttgcccctgcatcttaaaaaacaattttttgggggtcttgcctctttttggaaaaa

SEQ ID NO: 50020 - DNA, 618 bp, Zea mays
  unsure (1)..(618): unsure at all n locations
  Clone ID: MRT4577_145615C.1
ggccgggcgtcccttttcccttgcatatagatataacccagccaccaccgcacgaaccaccaaatccgatccaaatccctccaccgccgtcccggatttaccaaaaccccggccaccaccgccatgggctccgcgagccgcgccatctcgtgcctgtgctgcccctgcaggtgcctcttcagctgcctgtgcagcatcctcgtctcgctcgccgtcacgctgggcctcctggcctcttccctctacctcatattgaagccgcgcatgatcgcggccaccgtcgactcggcctcgctctcccagttcgcgctctccgcttcctccacgctcgcctacgacctcaacgtcaccatgacggtgcgcaaccccaacacgcgggtggggctttactacgacgacgtccaggcgctggcctcgtacgagagccagcgcttcggctacgcgccgctcgacgccttctatcagggcacgggggcggccaccaagctggcgccggggttccgcggcacgcagctgctccagggcgacgtcgccgccgcccagntcaggcagcagcagtccgcggggcgcttcgacgtcgacgtggatcttaacgccacgctcagggacacgtactgg

SEQ ID NO: 50021 - DNA, 213 bp, Zea mays
  Clone ID: MRT4577_145616C.1
gcgagggccgtcctttatttctatttttggatagccaagtggagagattacattatgaggtgggctctagatggacgctgggcagaacccaaactgcctttattcaacaatggtaggtaatgcagtttaacagtgcaggcacatgaggatccgatgtaattacgtcatctgcaagctccatccagatcacacgcactcggatcgcagttccaa

SEQ ID NO: 50022 - DNA, 185 bp, Zea mays
  Clone ID: MRT4577_145617C.1
attcggctcgaggcactacacacagtttgtcatcaagagataatgagccgaacgagaccgacgactgccgatgcgaggacgcgcgtctacagcaggaacgacgtactcggactactggtgcagttagactgctagagaggcatcagcaatggagctctacgaggccgctctggcgtacgaagcgc

SEQ ID NO: 50023 - DNA, 350 bp, Zea mays
  Clone ID: MRT4577_145618C.1
gggccggtcacgccttcttgttctatactccgactcactggcccgcccccggcccagcggggcgaaatggacggcggcgtaccagccccgacgctctggatgcctccacaacgcaccctaaggggccacttcacataagacgccaatccactgcaagagcgggcgctccccttacaccgaagacgcttacgctccttgaccacggcctacgctatcaagcaagacacgggcctctggacccctgaacaccggcttcgccatcagggctggcacagacgacggcaacgcttccctcaaggacgaccaccgatctaaccccaaggacctaggggacggggacacgaacccgg

SEQ ID NO: 50024 - DNA, 607 bp, Zea mays
  unsure (1)..(607): unsure at all n locations
  Clone ID: MRT4577_145619C.1
cttggagggcacttctttcgtggtagttcttttatttttattaatctctgtatccttagatagtcctccaacaaccaaaggttgggactctgtcttacatatctgggtgcccctcatagtgcagtaataagtaagttgattatatacgagctatgtaacttatattttttaatggttggatatcactgagttttttttttttaagaatttttttattgaggtaaacttcacataacataaaattaactattttaaagtgagaagttcagtgccacttagtattgttaacaatgttgcataaccaccacctttatttaaagttccaaaaaaaatgttctcctctaaaaggaaaccccatcccattaagcagatactctccattccttccttcctccagcccccagcaaccaccaatctgctttctgtctctatggatttatctattcttgctattttatataaatcgaattgtatgagaccttttgtgtctggcttctttcacttagtacaagtttttgagatttatttacatagtagcatgtatcaacacttcattnttatggccaaataaaattgtattatgtgtttatagcacaatttatttatc

SEQ ID NO: 50025 - DNA, 543 bp, Zea mays
  Clone ID: MRT4577_14561C.1
atctttcgatcgttttgccatggcagctacaacgagcttgctgctctgcctgttgctcgcctttcttcacggcctccagtttcatatccctcctgtagcagctgcgacgacgtcgacgtcgcacaacaagaccgagagccgacgagatgcgcgcgggaagacgctgagcttcacgctgtaccagcacgagaccatcaacaagaccggctacatcgtggtggacggcgtcgcgggcgcgggcgtcagccagaccaccacgcccttcggcaccatctacgtcttccgcgacgacctgacggtgcacgcggacaggaagtccccggtggccggcgtcgcggaggggagctccatcaccaccagcctcgacgggctgcagagcctgtcgctggccaagatcacggtccaccaccgcggccaccggggctccgtctccgtcctcggcggcacctacaacaccaagccgtcagactacccggtgggtcggtggcaccggcgacttcgcgtacgcgctaggatacgtccggtcgtcggcgttggacttgc

SEQ ID NO: 50026 - DNA, 232 bp, Zea mays
  Clone ID: MRT4577_145620C.1
aaacccaaaggaggaaggaaaccatgatttggggtatatcttactaaatctcacacacaagacaaccgggccattctttgaccaaaaatgacacccctcatgaaacgaacagcagatactttagacaactttcgtattgacagagggcaccacactaaccaagaccatcggcagctaaagcgacccctgacttactgaccacgatggagactgaccacaaagtggtgagtgc

SEQ ID NO: 50027 - DNA, 620 bp, Zea mays
  Clone ID: MRT4577_145621C.1
cgagctcgaattccgttgctgtcgaaaccaatcaagtctagctttatatatcatatatagactataattaacaattccatagcatgatagtaccaatgccctcacctatatgggccatatcaatcctttgttttctcactatagattagcctgcaggacgccatctcttatctacgccaggacatccttgacagctccaagaccatgggggatgaaaagatgacttggaggaggccccaatctcatggtgccaaagtactgggtgaccaggatcatgtccatgatgcccttggcgtggtgcctggaacattctctgataaggcgagcatagtgtccctcagcccatccacaattgcctggcactgccttgcaataccgacaccagtcaggtacttggattcttcctctccttcggctctcttgatctggtgtatcttctcagccttagctttctcactggctgccactctcatcctcttctctatttatgacccttgtcttccccacctccaacatggaccttcggatgacctctctcggctccggcatcgtccacatcttctgcacactgcacgtttgcaataaatccacctttgactaaatccaaccaattcgatctc

SEQ ID NO: 50028 - DNA, 208 bp, Zea mays
  Clone ID: MRT4577_145622C.1
gagttactcacccacaacaccgtggcgaagggttcgacagggggaggggggagactccattaatggcttgattttctcttcagaaaacgggccacaggcctcctgttttccctaagaaccagacgaccgacatctctccttcatctcactctctctgaggcagagagagagagagcacactcttacatgttaacaacacacaccgctc

SEQ ID NO: 50029 - DNA, 220 bp, Zea mays
  Clone ID: MRT4577_145623C.1
ccattagcttatctactccaagcgcagaagacccgatcgacaccatgaggggtgctcgtgccctcgctctctgctctcgctgcgagcgccactcacgcagtacactgggctgcgtgcaccacgcgcggtattacgcgcggcattgcactcgtactgcctcggattcacgcgcatgcgcgcgcactgacgcgcatgcgcggtattgggcaacatcatacgc

SEQ ID NO: 50030 - DNA, 320 bp, Zea mays
  unsure (1)..(320): unsure at all n locations
  Clone ID: MRT4577_145624C.1
ggaatnaccaggggcgacgccacgcgtaccgcggaccgcgtagggcggacgacgtgggcaggacgcgttgggacggacgcgngagggncaacgcagggggcaacnatcaccgtgaattatcgatcgntanctggttttaagtcgttggcaatttcaaatggcttctgacanccatggattagctgactggagggcnagttttctggcatcaaaaattagcagcngcaatgatgtggaggagtttatttgcctgtggaaagtgagaaactgacgatttgcaccgaccatatttattattatataggctttggacgtgtttg

SEQ ID NO: 50031 - DNA, 376 bp, Zea mays
  Clone ID: MRT4577_145625C.1
aaccttgctttgcgcatacaggaatcatccatcgcgccgcgttcgtgctccccctacgcaatactggaaacactccatcactgaactcgcctcctgaaatcggtcgccacgacgccgaacgccacgggtcctgccccggcccacctccctacagcaggtgcagctgcctctggcctgcggtggtatggaacgccgcctactcgactacatccgagcgaggtctgtccctccggcctggtgcaggtgcaaagatcactcctgctcgcgagcacgcagcctcgccctggggggcaggtactaggaccgacggatccggtatccggatcgatccagagattaggggtcgccactcggcggcgaggcaccgagcggagcc

SEQ ID NO: 50032 - DNA, 766 bp, Zea mays
  unsure (1)..(766): unsure at all n locations
  Clone ID: MRT4577_145626C.1
nnnnnnnnnnnnnnnnnnnnnnnnnnnnnnnnnnnnnnnnnnnnnnnnnngcatcggcgccctttttttttttcttgaagttttttttttttttttatttttttttagaagaaactagtcatagttattccagtaataattctcaaagcaagggaagaaaataacagaaagggcgcattaagttgaccagtactagggtttccatctgcagatcgaaagtaaggaccaaccaaaagctaggcaacacaacaagctgcgcgtctcgccatacacaaattcatcacccaaaaaccaaaaccttcaccgtctgatctggctgtctgatccgatgtgtgggagcaagagcggtcggatcggatcggatcacgcggaggccgcggccgtccgggagcggtagagcttgccgaagatgtggagggcggtgacgaagccgatgaagcagagcgacatgacgagcaccatggtaggcgagagccggagccccggcgcctcgtcggtgtagaagcggagcatgttgctcccgccgccccccgagaagccgccacccccgccggacgcggtggcgcggcggcggcgcatcccaggactgcgactgcgaggaggagcgggccatggctgactgcgaggaggacggaagaactcgctcggaggcttcaggatcgggatctgtggcgctcgctgctcaagtcccccagctgcttcgtcgttgtcggaacgagtgcccgagtcgggaagttgtagtcccggccggcctcgaggtacccaa

SEQ ID NO: 50033 - DNA, 167 bp, Zea mays
  Clone ID: MRT4577_145627C.1
attctgaacattcagaaacacaccaagcgaagcacattatccacagcctaacaacattggcggccgagatattatccctgcttgcgctgcttgcgctatttgcgagcgcatcaaatgcgtatcattattacacaatgctaacttgcttcaagttccattattacaca

SEQ ID NO: 50034 - DNA, 641 bp, Zea mays
  Clone ID: MRT4577_145628C.1
ccggccgggccggggacaacgacgaagcagctgggggacttgagcagcgagcgccacagatcccgatcctgaagcctccgagtgagttcttccgtcctcctcgcagtcagccatggcccgccgcgccacctctagcgccgggggaggcggcttctccggggccggcgggagcaacatgctccgcttctacaccgacgaggcgccgggcctccgcctctcgcccaccatggtgctcgtcatgtcgctctgcttcatcggcttcgtcaccgccctccacatcttcggcaagctctaccgctcccgcacggccgcggcctccgcgtgatccgatcccgtccggtcccaccgctcttgtggatccacacaacggatcagactaccagatcagacggtgacttttttttgggtgatgaattatgtatggggagaagcccagcttgttgtgttgcctagcttttgcttgatccttactttctcaacttagatctcagctagatctgcagatggaaaccgtacatgtcatcttaatgggggccctttctgttattttcttctcttcccttaccctaagaattattactgcttgatgcaaggaataattatgtctagttttttcttgtaaaaaaaaaaaaaaaaaagga

SEQ ID NO: 50035 - DNA, 272 bp, Zea mays
  Clone ID: MRT4577_145629C.1
cggcgcgtggccggcggtagtttagggggcccgtgaggcgtgggggcacgggcacccgcacaaggtgcgctgccagtgccagcactcagtcgaacgccgagacccgggaggagcaaacagccggaaaggacggagacgggagaacggacaggcaaggaaggagggacgtcgcgacaagggggaggacccgggagggggaggcccggaggatggaggagggcaggacgccgcggcgacgggcggccccagcgtcacatgcggcggcggcggcg

SEQ ID NO: 50036 - DNA, 2526 bp, Zea mays
  Clone ID: MRT4577_14562C.1
ctggccgggttcttccttccaagccttcgcattttcctctcgtcttccccttccccttctccaataccccctgcttctacatatcctgtcacactctccctccctgcgctgggccttgcagtttttggttgtgtatcggggaaatggcaatcgacgacgaatcgccgatcagagtcaacagcagaggcggcggcgccatgggaggaggggagtgcgacgggccggataaccagcggtggccggcgtgggacactcgagggcggccggggcccctggccggggattattgttacggaagaggtgctcctctctctatctcccccacgatctccgttccttcccctccccgatctccccaatccgaccagaccggcaggcaccttcgactcgagcggagcaggcgaggcagagatggcgctgcgacgggcgctcctcagatcggtcaacttctcccccgacagcaaggctgcaattgagtacttttattctttctcaagggcacagtctgcttgttctctcaatggtgctggtctttgtcctgctagtagatcatttagcacccaggctgccactacgtcaagcacaccacagcctccacctccaccaccccctccagagaagactcactttggtggtctcaaagatgaggatcgcattttcaccaacctctatggtctgcatgacccttttctgaaaggcgcggtgaagagaggtgactggtataggaccaaggatttggtgattaagggggcagactggatagttaatgaaatgaagaaatcaggtcttcggggtcgtggaggtgcaggttttccctctggtctgaaatggtcctttatgcccaaggtttctgatggacgcccttcttatcttgttgttaatgctgatgagagtgagcctggaacttgcaaagatagagaaatcatgcgccatgacccccacaagcttctggaaggatgccttattgctggagttggaatgagggcatcagctgcttacatctacattcgaggtgaatacgtgaatgagcgtctcaacctcgagaaagctcggcaggaagcatatgcagctggacttctcggtaagaatgcttgtggatctggttatgattttgatgtgcatattcattttggtgctggtgcgtacatctgtggtgaagagactgccctattagagagccttgaagggaagcagggcaaacctaggctgaagccacctttcccagccaatgctgggctttacggctgccccacaactgtgaccaatgttgaaactgtggctgtatccccaacaattcttaggcgtggtccagaatggttcgcaagctttgggcgcaagaacaactccggaaccaaactctactgcatctcaggtcatgtgaacaagccttgcaccgtggaagaggaaatgagcatacctctgaaggagttgctcgagaggcactgtggaggtgtgagaggaggatgggacaacctgcttgcagtaattcccggcggttcatccgttccccttttaccaaagcacatatgtgacgatgtgttgatggactacgacgcgctgaaggctgtgcagtctggattgggtaccgcagctgtcatcgtgatggacaaatctacggacgttgtcgacgcgattgccaggctgtcctacttctacaaacacgagagctgtgggcagtgcacgccctgccgagagggcacgccctggctctggatgatcatggagaggctcaaggttggtgacgcgaagctagaggaaatcgacatgcttcaggaggtcacgaagcaaatcgaagggcatactatctgtgccctcggggacgctgcggcgtggcctgtgcagggacttatcaggcacttcaggccggagttggagaggaggatccgcgagcgagctgaaagggagctgttggcggcttctgcatgatgtgccagccgcatgtactagttttctgatttctttctaccgaaataatacaaactgatggagctcctttctatgtaagcaaatgctagcattcctgatttctttgaagcaccgctgcacatgtttacgtgctgcactcaacggaggactcgtgcaccagcaccagcggcgccagcagcgacaagagcagcgtcgtgcagagctcccctccgccgccgacctctggcagccaccgcccccccgggaacaagcgccggaagggcgtcccgcaccggtcgcccttgggcagcctcatcgtcgagctctaggactcttcttcagcgccaaggcaaggcaaggcaaggcaacgcactctgtactgtacatgacatagcccccgaagagaagggaataacaaacagtaagccgtaagatcggacaatccttagttgtgcacttgtgctgctgtgctatagtttgcttcttctcaggttttgttttgcttttacagttactagcagtggtaccatcagtaagataaccgcgactaattttgcagccttgtacattgtaataatattattaccataaaaaaaaaaaaaaaaaaaacccacgcggccg

SEQ ID NO: 50037 - DNA, 699 bp, Zea mays
  Clone ID: MRT4577_145630C.1
ttgggtacctcgaggccggccgggctccttcccgactcggcgactcgttccgacaacgacgaagcagctgggggacttgagcagcgagcgccacagatctcgatcctgaagcttccgagcgagttcttccgtcctcctcgcagtcagccatggcccgctcctcctcgcagtcgcagtcctccgtcggtggcggcggcggcggcggcggtggcgcgcgcccggccaccgtcggcccgcgcggcacggccgccgcgccacctctagcgccgggggaggcggcttctccggggccggcgggagcaacatgctccgcttctacaccgacgaggcgccgggcctccgcctctcgcccaccatggtgctcgtcatgtcgctctgcttcatcggcttcgtcaccgccctccacatcttcggcaagctctaccgctcccgcacggtcgcggcctccgcgtgatccgatcccgttcggtcccaccgctcttgtagatccacacaacggatcagactaccatatcagacggtgactttttttttgggtgttgaattctgtatggggagaagcccagcttgatgtgtcgcctagctcctgcttgatccctactttctcagcttagatctcacctagatctgcagatgcgcaacatacatggcatcctaatgggggccccttccgttattttcctcccatcccttacccta

SEQ ID NO: 50038 - DNA, 324 bp, Zea mays
  Clone ID: MRT4577_145631C.1
atggcccgctcctcctcgcagtcgcagtcctccgttggcgctggcgccggcgccggcgcgcgcccggccaccgtggggccgcgcggcacggccgcggcggccgccgggatgcgccgccgccgcgccaccgcgtccggcgggggtggcggattctcggggggcggcgggagcaacatgctccgcttctacaccgacgaggcgccggggctccggctctcgcctaccatggtgctcgtcatgtccctctgcttcatcggcttcgtcaccgccctccacatcttcggcaagctctaccgctcccggacggccgcggcctccgcgtga

SEQ ID NO: 50039 - DNA, 741 bp, Zea mays
  Clone ID: MRT4577_145632C.1
cattgggaccctcgaggccggccgggatcgtttcacatctgacggcttcgatcagctattgatggtaggctgacttgtgcctcctcatcgccctctccgtctcccccgtggtcgtcccggcttaccaaggacgctccatgggaggcttcctctccagggtgagagaccgcacgacgccgacgagaagctctgcgcgcctctgcagcagcatcccccccaccatctagacgaggtgccttaccaccaggtcagcccgcgcagatggtcccgcccgtcaaccatcaggccacaggccctcccggaagtcctaccatgctcatcatgatgcccgagacggacgagctcatcgacgtgcgagattctcacgcgtgcactcgtggacaacttagcacttgtgtattgctctatgaatagtgcaaggtaagaggatctccgctggactctggcgtctgatctgatggcttgccacttgatgaatccttgttagctgaattaccctctctacggactctactgacatgcatgatgactcatccatatatgtcggactgttatttatcaattcctgaattcatgttgaatgagccccgatactatctgccaaagagagagcttggcatcacagatcctcttctgcacttcatccagagcccatggagctgctctgactactgatcgaagcgctacctctgctcttacttggcaatgtggatgaaatgacagacttggtctcaattttcc

SEQ ID NO: 50040 - DNA, 530 bp, Zea mays
  Clone ID: MRT4577_145633C.1
aaaaaaaatacgcgttcggtaatcttacgaggcactgtttgtacataggggcccaataactttcacggtctaactgggcggaaaaaaccatgtagtctcaaaaacacacacatattcatgtacaatgggggccggggtaacattggacgtatgtatgacagttgaaatagtgaaaatatcgataattaagggaacctaacggaactttttgcctcccggtcgacgtaatggtacgaggcgagcacccaggggaccctccatgaagttgaacatttcgacgggggcgtcgggggggagttgaaccccggggtgctcgccgccctccgtttcccgccacttgaactccctcacaaggttcgccatgaaatagccgatggggagcaacgagacgcctatcgcagggcacatcctccgcccgcctccgaacgggagcattttcatctccgccgccacggacagtagcttcttggtgctttctccacccgcgcagcatccatggaaacgttccggcatgaactcgtcaggctcgt

SEQ ID NO: 50041 - DNA, 715 bp, Zea mays
  unsure (1)..(715): unsure at all n locations
  Clone ID: MRT4577_145634C.1
ccggccggggctctgctctcgacgcttactctgcccctccctcctcccttcgtcttccaccattcactatagcggagcgcaggctggtggacgccgaaggtgaattcggaggcgccggtgccgagcccgatattcatggacgcctctcccctgaacccgccgccgctggtggaggaggagcttgtgctgcgccgcagtgctcgttgcctcaataggccaacccggcccagctacgcggaacaggagcctcctaaaaaacccggcggccggggccggagcaagcggaagagggacgaggagaaaccggagctggcaccggcgcagcagggtgccaagagtccggacaggaaggactccaaggatgaggcgggtgagaagaagccgacgcccatgattgcggcgctgccggtctcttgcgctggcgttgctgctgaagacgatgcgacggggaccgggaagagcgccaagctgagggtgaaggagacactgagggcgttcaatagccactacctccactttgtgcaggaggagcagaagagagctcaggctgcgctacaggagattaacgctaagagtggcctcaaacgtcagaccaaggggggtgaaaagaaacgcccatcaaagcggcctgacctgaaagcaatcaccaagatgcaagaaatgaatgccgtgctntatccagagaaaacgattggacatctaccagggattcgat

SEQ ID NO: 50042 - DNA, 361 bp, Zea mays
  unsure (1)..(361): unsure at all n locations
  Clone ID: MRT4577_145635C.1
ncccacgcatacgccgatcttcttctagtgtacgcaagttccgaatgttgaatttttttggggaaggtatgaggaaaggaggaacccaatgtggtggacttcctgatcgtacttagcaccatttcaaattcctggttaacgtacttgatattttttgttaatgaagggagtttcatcacgttcactttcactctaatattaaagctgctcaagcgcattcattttttaattattaacttgatgtcaaacgaagcttgttttttttactattcatgctccattttttattcatatcatgttgtatgtttaacctttcttttctattctatttaataatacttaagtatgttcttttttgttc

SEQ ID NO: 50043 - DNA, 470 bp, Zea mays
  Clone ID: MRT4577_145636C.1
cgcccaaaatcgggcctttcttggggccgaattccccccaggggcggggcccaaaagggaaaagcaagcataaaggggcaaacttcggggacccaattctcacaccccgaatgtcgaaaaaaaaacccaaaaaaaaaaccggggggggggatccatcccataaatcccgcaaaaaaaaaaaaaccttaaaaaaaaaaagccccgggaaaaaaaaggctacaaaggggggggggggcttggtttcaaattgtttttataatttccacaggccccccattggaaaacccccccccccagggacatcctggaacggcttaataatttggggccccttgataggggctccagcggtgttcaaggggtttttgtggggcaactgtttgcccaaagcattttgaaaaccaaccatttccaggaaaaccctgaggggtccccccgcaaggacaccaaatcccggggaagggggcccc

SEQ ID NO: 50044 - DNA, 912 bp, Zea mays
  Clone ID: MRT4577_145637C.1
ggaaaacgaaaaagcccccagccgaacaccactctctctcactctcccggacttcagaggccgaggacgctggagcacgcgtcggtccggcgcccccatggacccagcctgcgaggagctcgagcgccgcagccgctacctcagcgcgctcgtgcgccgcaccaagttcgccgacccgccccagcccgagccggaggccaaggcggacgtggagcctcctcagctgaaggcgccgccgcacgtcggcggtgagggtaagggagggaaggatgaggccaaggcggaggagaggacgccgatgaagaagccgaggggggaagcggcggcggcggaggcggaggggaggaaggtggcggtgtgcgtgcgggcggcggacatgccgctgccgctgcagcggcgcgcggtgaggatcgccctcgaggccgtcgccgccatgccgcggctcgagagcaagcgcctcgcgctcgcgctcaagaaggatttcgatacaacatacgggcccgcatggcactgcattgtcggcacaagctttggctcctacgtcactcactcgttggggggtttcctgtacttctccgtcgacaaagcctacgttctcctcttcagaactgccgtccagccacttgtccagctacaatgagacctgaaacatgttttactcgaactggtgtagatgcagcgcaaatgtaattttgaacagaatagacgacgctcagcacaccgtgtcttgccgcgtttgagtagcagaggtaatttgatctgtacacaagactgtagaacagccgtgcctctaacgttgtactgcccgaagtcctgctttgtaaacgttcttgtgcaatcgtttggagttaaaaaaaaaaaaaaaaaaaaaaaaaaaaaaaaaaaaaaaaaccccccccacaagcggcggcc

SEQ ID NO: 50045 - DNA, 361 bp, Zea mays
  Clone ID: MRT4577_145638C.1
tttttttttttttttttttttttttttttttttttttttttttttttttttttttttttttttttttttggcaccggggggcattccattaaacaatcgggaagacacaaaaaaaacatcttttactttgttaaagggactactcaaagggacctcccaaaaaaaaggggcaaggggccagtaaaaaaatagaaacccaaatcccggttgacaagaaaaaaaaaactctcccccaaattggtcaggaacccaaaaaaaaaaaaccgggggaggatggccaaccccccccttttgaaccttagatggagaacaaaagctgttgggctgaaaaatggttcgggcacccactctagcgggcctg

SEQ ID NO: 50046 - DNA, 481 bp, Zea mays
  Clone ID: MRT4577_145639C.1
gattcatgtcaggatcttcggcgacgacgaaaaaaacatgcgataaatgcgacgacgaagtaacgtctcgatgtagtacgtgttcgcgtgaattctgtaagtttcacaccaaggcgcatttaaaatcgaaaaaaacgagcgaccacaaaattgaatcactcgattcgaaaactgacacatcgacaaaaaatgaacacacgaaatgcaaaatacatcgcgacatggttgtcgatttgtattgtcacgaatgtaaagcaattttgtgtcgaaaatgcgaagtcgaccacgaatcttcgtgtaaacaaaggcctgattatttgcgcaacgctgcggacgctttattaaaggacgttaacgatttattgaatcaaacgaaacacacacacaccgaattttcacgaattgtgaatctttccgctttaaaacaagccattaatcgggcacagcaattaaggcgcgaggctggcgaacaagcgacaaa

SEQ ID NO: 50047 - DNA, 345 bp, Zea mays
  unsure (1)..(345): unsure at all n locations
  Clone ID: MRT4577_14563C.1
ngatagtctgacccgatcccactcccacggtcccacctcgcctctcgcgctcctgcccacccagcctgtccgccgtctggtgtccgcctgttccccaagcaaagagaggcgcagagccgccgccgttgatctctgacctttccgatccagagcctagctctcaccgtctaccggagctctcaccatggcggtgagctcgcggtttccctcccaacccgcggcgcgtggcctcctgcgccgcaccccgcagcgcatcctccccgtcgagcgcacgccgcgccgcctcgccctggtcgtcaccgccgtctctgggggacctgtacctggcggatcgcccgttcccag

SEQ ID NO: 50048 - DNA, 338 bp, Zea mays
  Clone ID: MRT4577_145640C.1
gtcattgtagggggctcttctgagtacaagatcaataacatcgttgtcccgctacatgactacagtgaagagttagagaagttgggcatgctcatcagagctcgtaacttcctcgtcttccagggtgcagtggaatctattgccatgaagaaccccaaggagaggacagtcttatttgaagaaattagtcgctctggggaacttgcacaggagtatgacaagcgaaagaacgacatggtgaaggctgaagaagacacacagtttaattatcatcgcaagaaaaatattgcagctgaacgcaaggaggccaaacaagataaggaagaggctgaccgcta

SEQ ID NO: 50049 - DNA, 1183 bp, Zea mays
  unsure (1)..(1183): unsure at all n locations
  Clone ID: MRT4577_145641C.1
gggtcttgcttcttgtcctgatatgaaatctagtattgcttctggtgcttcagttacatatgtcatacctgcattgagcctcccactgaaacctgtttataagttgctttgtgaagcctgttgtgtttcggtttccaatgctttctttcttcttcaatgtggtacaatggttgccttatggcctgttgtacatctggatatacttcttattgatagtgctttaggcttgaaacgtttccttcttgacacatgcatgagatcggcagtatcacttttctgtttacttgctggaagctttaagcagtgttctaggcagagaactaccaaggaatcaagaataccttgtacttcagtcagatttcagatatctggtgggcatggtagaagcgaagtagtatttatgtttttcagctttgttggtgtagagaaatggaaatgggaacaccttcaaggaaagcttcaatatcactgttctaaatcggagttgtctaaagattccacaaaatgtactggtcgaagagccctttcttcaatggatctcttctccaagggttttgatgttcaggactttcttccagagtctaattattcagatcgcgaacctatcatttgttgtttggatgaacattgtagatttactcaaagtgttctggacatgacaactgcaccttcactactgccttggcaccataaaaaaatgttaacagaaagcaatttgactaatggttctcagcaatccatgtcatgtactttggatgaggatcagcagcagttggtaacagaacatgcatctgacacagtttttcatgctccacctcaagtttgttcacttaatctcggttcatcacctgatagtccattggatatggcttctgctagttgtgcaaatccatctagctctgctagtagggaatccaatattgctgaaaggaatgtaagcacagaatgtaatggcagcagtattggtgatgcaaatataattcacaggaagtgtgaagatcaaaatgggccttgtgctggtcctgacaagtcattttcctccaaccttagtgttatttgctcttcacagaagtctgcagagagtcgtctttccatanatattgacaaagcaaatgataaacctcttgacaacgatgaaaaagaaaagcaacctatatctaacttggttcaggaattgaatgac

SEQ ID NO: 50050 - DNA, 367 bp, Zea mays
  Clone ID: MRT4577_145642C.1
tggcggttatggtggatcttctggttcatcagctggcggttatggtggatcttccggttcatctgctggaggttatggtggctcttctggtgcatctgctggaggttatggaggatcctctggttcatctgctggtggatatggtggttctagcggtcacgatgatagtcctgttattcctgtcattatcatccaaaaagaagaaggaggtagctccggaggttatggaggttcttcttctggtggttatggtggccaacaagcttcatccggtggatatggtggccaacaagcctcatccggtggatatggtggccaacaagcctcatcaggtggatatggtggtcaacaagcatcatctggtgga

SEQ ID NO: 50051 - DNA, 301 bp, Zea mays
  Clone ID: MRT4577_145643C.1
cggacgcgtggcggcagggtgtttaagaacaaagactccgaaccaagacccgacgcgacattttttttttggaagggggtgggggctttgttggtgctgttgttagtagagatcaaacgggtccgtgggaaaaaaaaaagaggtttcattcgcgtgcgtgcgtgcctgcgccgagcgcccgagctaatctactagtatttagcacgcgacgggagcatctcgccgctcgattcgggcctccccgtgaattcaccccacagcgagccgagcgagcgagaattcgaattggagttggacttgc

SEQ ID NO: 50052 - DNA, 514 bp, Zea mays
  Clone ID: MRT4577_145644C.1
gctccggctcaagggcaagttctggcacacccgcgccaccgtggtcgcgcggatcggaaactacctcaagaaccgcattccaaaaattttggaggtggagatcgaggacgagaaacaattggatgatagtcccgctgctttctgacttctgagggaaaattcttatcggaggctacctttcgtacacagttaagtatggtactccttaccctgctaatgtcaaaactacagacttatgaacacatgaattctgctttagttcaattaacattttctggctgacatgacaagagcattcatcatcatcgatgtgtaaagctgaatctatggatctgagtctgaaggagcgaatatacagacctgaattttctgtatttcccataatcacagctccagcttcgggaatttgcagttgcctttgcggtttgcattataccatatacacattgattgcagatatccaatttttggaggtgcttgttctagtattacgaagaagctgcatggtattact

SEQ ID NO: 50053 - DNA, 210 bp, Zea mays
  Clone ID: MRT4577_145645C.1
gagaagaggaagaaccggctcaccgcggcagatccctacccagcagtggcggtgactgcggcggccagccagtcgtccactaaaccttcggcactgaaagaagagggcccgccgtgggtccgcgtgaacttcgcgctcaccctcacctcaacaatctcattagacggcaacctgcctacctatcgctatagggaaaaactctctattttc

SEQ ID NO: 50054 - DNA, 1082 bp, Zea mays
  Clone ID: MRT4577_145646C.1
gggtacgtcggcgccggccgggccgcccatcctctgagacaaataggataaggagacccacccggcacgactgctctccgcacccgcaacgcccatggcgttcgccgccgtcctccgcgcccgcctcctcccggtgcccactccgctatccagctcctcgccgccgccattcttcgccccttcggcctacgtccgcgtaccgcgcctcacagcagcagcagcgcgcaccgtacggtaccgacgacggggcgggcggcctcaccgcgcggccgcggcgattacagcgtcactcgacctgaccgaggacaacgtccgggtggccctagacgaagccaaatccgagctagggcagctgttcgacacgtcggtgggcatcacagggcaagttgacctcgcggagttggacgggccgttcgtaaagctccggctcaagggcaagttctggcacacccgcgccaccgtggtcgcgcggatcggaaactacctcaagaaccgcattccggaaattttggaggtggagatcgaggacgagaaacagttggatgatagtcccgctgctttctgacttctggggtaccgcacgatcacaatttagttcaatgctgtgtgtgattcatcagtatgtgccaattgtgaggttcaggagaagggacacgttttcagttttcagaattagtactggttcagggagaattcttatcggaggctacctttcgtacacagttaagtatggtactccttactctgctaatgtcaaaactacagacttatgaacacatgaattccaatcaacattttctggctgacatgacaagagcattcatcatcctcgatgtgtaaagctgaatctatggatctgagtctgaaggagcgaatatacagacctgaattttctgtatttcccataatcacagctccagcttcggggaatttgcagttgcctttgtggtttgcattatagcatatgcacattgattgcagatatccaatatttggaggtgcttgttctattattacgaagaagctgcatggtattacaaagaaacaaaatgacaagactatggctgacactagtcatactc

SEQ ID NO: 50055 - DNA, 585 bp, Zea mays
  Clone ID: MRT4577_145647C.1
agcgaccgtcgcctccctttcgccttcgctcgctccctcgcctcgcatcggcgccagaggcctgatgcgcatcagaaccagcacgacatcatcaccccgctacagcaaaaccctccaacgatcgagacccttctcgatgagctcaaggcggcggatggcctacagactgagctcgaggagacaccgctcaggacccgcgaccaatgatgcaatgcggcgaactggatcggggtgcaccaagcgctgatggggattaagaacgaaggacgcataggaccctccctggataccaaggatcacaacgttctcatgcaagtacctgtataaaggtctatcgacaggagataagacaacatgtgacaacagccctcgacactgatgagaaaatgactgatgacgacaggcgaagatgcataatgcaatcccttgatgatactgatgacactgaatgaactatgtctctgttgatgacgacgaagacagcgctgcccactcctggtcttaaagaactgctcatgaaaacgatccggacatggaagataaggatgaattgggacattctttgacatatacgcaattttaggt

SEQ ID NO: 50056 - DNA, 1316 bp, Zea mays
  Clone ID: MRT4577_145648C.1
aacccttgggagatgggcacaaaaaaaaaaaggataataagtagatagctttggagaaactgagggccgggaaaagcaatatcataagcaaggtttaccctgacttgaacactgattcatcgcccaaaggaccagctgcgaaaatgcgatggtaactccgccaccagcaacaaggagaccaatcaaaactatattggtcctgcacctctggaagaaatgcccaggcaaattccccttgcccaaggcccatcgggccctaacaaagagtatgtgtccaaactcaaggacgcgttccccaaattaggagttgtagcccaacaagtccaagcagctggaacacatgtcggaggcagactcggcacggcacataaagatagagaaaagttgccccccaccacccacgaccctcggccggaaaacgtgtatacaccgcacacagtactcgtcctccttgcagagcttgcaccaacacgccgccgccgccgccgcgaggggcggcgccggcagcgggaatggcgtgaagcagccggcctctgctgcggggaagcgggtgatggtggtggtggacgagagctcgggagccaaccacgccatgatgtgggcgctcacccacgtcgccgacaagggggacttcctcacgctgctccacgtcctgccgcgctccggcagcggcaggggcgaggaggcctcctccctcgccaactcgctcggcacgctctgcaaggcctccaggccagaggtggaggtcgaagcgcttgtgatccaagggcccaagctgggcaccgtgctcagccaggtgaagaagctggaggcctccgtgctggtgctcagccagtgcaggccatctccctgctggttaagctgcttcctgcggagcagcggcgaggagtttgtggagcagtgcatcaaccaggcggagtgcctgacgctggcggtgaggaagcagagcaagggcgtcggtgggtacctcatcagcacccggtggcagaagaacttctggctcctggcctgacaaccattttacttgctacatgatcgatcatattttattactcccgcatatctgctaccatttcgtgtcatcaagtgcgtcacaactgttctctatctctcgtgccatgccgtgtatgcgtccatggatcgtcctgccagcctcctcccgttgtaaagccaaaaagagccccagatctctgaccgccctcctataaacctgtattctttcttcattttccctgcgacgagtcttgacttcttgagcgtgcgcgtgtctgtacgggtaaccatcatgtaatgctgcatctgcatatctgttgtac

SEQ ID NO: 50057 - DNA, 259 bp, Zea mays
  Clone ID: MRT4577_145649C.1
tttttccaaggacaatgtccatacgcaagcggtggactctcgtgaagagaggctacggtccttaccaaacgctgaacacactgcactgccttcggctgatctggaagaagacttgaccacttagatccccaaacacccttctgctgacccacacttcgcctagattcagagaccaaccaccagatcaagagttgccgatccagcacacgaacatcccgacctcacgaactgccctgttgtgctacctgcatcaacccca

SEQ ID NO: 50058 - DNA, 255 bp, Zea mays
  Clone ID: MRT4577_14564C.1
aaacccacttgaaaaaaagggttttaaacaattaatttgtttttttaaaataatttaggccaaaaagcattataacagccttaacaaaaacctgggggagttttaaaagacgggttgttttttaaaattggagatttttcttgaatttaaaaacatcccttgcagtttggataccaataaggggtttcgagttaaattttttttaaagcaggtgccagtgccacaaagcaaaaagaccgttaaacgaaacaaatt

SEQ ID NO: 50059 - DNA, 196 bp, Zea mays
  Clone ID: MRT4577_145650C.1
tgctttaatggctatagacccaacaaagggggggataatatgtttgtcgttgtgttcctccacaccaattacaatgacagcctcacaaatccctctggcaatggccactggaaccacaacataccaagtgattgtcgtcgttgtgatcgaaacaatcaaaataacaatcattatcatcaaccacttgaataataat

SEQ ID NO: 50060 - DNA, 447 bp, Zea mays
  Clone ID: MRT4577_145651C.1
atataataaaaaaaaaaaataaatcaagcacaaaataaaaaaaaaagaaaaaaaaaaaaaaaaaacggaaaaaaaaaaaaaactaccaaacaaaaagacaaaaaaaaaaatgggggggccgttttagaggctccaattttatgcccgcgagctagccactgtatactttttatttagggcgacccaactcaaattcaccgccggtgtttttaaaacgtcgttgctgaaaaaaccgtgcgattaccaaccttaatgcccttacgaaacttccccctttgccaaggtgcgtaattacaaaaaaggccccaaccgatcgcctttccaaaaaattgcgaagccttaatggccaatggcaccccccctgtaacggctctttaaccgcggggggtttgtgtgttacccccattttaaccgttacatttgccagcgccttaatccccgcccctt

SEQ ID NO: 50061 - DNA, 314 bp, Zea mays
  Clone ID: MRT4577_145652C.1
gaacaatcttgggaagatgatcttgtccttgtcgtctaaagccaagtcacctcaagaagcggatgcaaagccggccgtggacagtctcagtcttgtgggagaaatgcaacatcttcttgccaaggttgacaaggtgctgcaagcgcagcgtgcatctgctacagatcatcatgcaatccaccactgaccagtctgtatggttaggatgcatctaggtcgttcagctactgacccatgttccttgtagctgctgatcgtcagtcttttgtaaatggatcctgaaatccaccagctcagcggctggtttctctccc

SEQ ID NO: 50062 - DNA, 737 bp, Zea mays
  Clone ID: MRT4577_145653C.1
gtacgtgttgcctcgtacaccacaaccgaattaatgggtttgcatttgggcaaaacgggatgtcctcctcctcctccttcccgcacgtcagacgtcgtcacacacaatctagcgcgtacgtacgtcccaaaccaaaccatgtccgcgagagctcttctcctgacgaccgcgacgctgctcctgctcgtcgccgctgcgcgtgcggggcagccgctcgccggcgggtggagcccgatcaggaacgtcagcgacccgcacatccaggagctcggcggctgggcggtgacggagcacgtcaggcgggccaacgacgggctgcggttcggcgaggtgacgggcggcgaggagcaggtggtgtccgggatgaactacaagctcgtcctcgacgccacggacgccgacggcaaggtcgcggcgtacggggccttcgtgtacgagcagtcgtggaccaacacccgcgagctcgtgtccttcgcgccggccagctgacgaccagctggacgtaattaatcagcggcgccgcaatgtgtctttggagtaacgtgtcattaagcaaaatacaattaccatagtactacactaggacctcgtatcatgaagacatactcttgtgatcttgtcacggactcacgggtcctcacttaataagccgtcttggcattatctgtactgctatatcaacagatcattactgtttttctcgattaaaaaaaaaaaggcccctaaaaaaatgaggc

SEQ ID NO: 50063 - DNA, 279 bp, Zea mays
  Clone ID: MRT4577_145654C.1
gtatattctttcatttactaagggagaaggggttgactgtttttttacaagaatcgagccaagcgcggctctgtggaggtgagaaaacgccggagacaggaggcagaaagctgggagaagtggagctctaggtaaagatatgggccctttggggtagcgaccggggcgcctctttcagtaagatgaggggacttgcctagggcgaaaccgtgagccacgaggggccagggtatgtcggaaggggacgcgcaccctagcagagcccagcacacgcccccg

SEQ ID NO: 50064 - DNA, 444 bp, Zea mays
  Clone ID: MRT4577_145655C.1
ttcacgcgtccgggcaaccttcaattgcggggttccaccacctcacaggtggttaacagcgggtacctgttcgacatccggccggacctggtgaagggcgactctgtcgtgctgccactggaattcgcttccgccgtagagggtcgcgtgttgctgacgacgtggtggccacaggatgcggcgctccagcatgaggcggtggggtgtttctcactcactccaactggaacttctcccaagagagcctctgcgcgggggtgcccatgccgagcgttcgtgctccagcaggtgttgttcagtgctcgtcaacagggccacccgtgttcacgctcatcaacagggccaccggcctcgccatcaagcactcgctcgggcagttcatacatgctggtcccttacaccccgagtacctggatggaccctgcatcaaggttatacacatgc

SEQ ID NO: 50065 - DNA, 743 bp, Zea mays
  unsure (1)..(743): unsure at all n locations
  Clone ID: MRT4577_145656C.1
ccggccggggacttgtgagggagagaagcctggcggagatggagccgagcatcgggaaccatatggcggaagaccaaccgactccggccgcctccactgccgaggaggccgctatggatgcagataccagcggcgagcggcgtagcgctgccgcgttggtgggcctgctccgcgggttcctcgccgtgcaacagcgccgggccgaggcctactccacgctacgaagggggttttctgagtatatggcttatggaggtgaattggcctatcaacaactgtgtggcaatattacagcggagttcaatgattgctcaaaacaaaatttagtcgcagcgatcttgccgatttactgaagggtgttcaagcacatgagaaagagaagttgcatttgacagcgaagattcaggtgctgaagaaagccggcaggccttcagagcgcctggtgaaccacgcggactgcaggtcgcgcagcatggcccagcacgtgtgcgtgcacgtcaaggagatcacggaggccgccggcaccgaggacgccgaggcggatgcggagtatgacgcggccctcaaggaggccatacagggcgtgcaggttgccgtgagcagcataaacgaacacatggaggaggtgcgctacgagattgacggactcgaggcagagacgatcggtagcaagtggagcgaagtcgaggaagcgntccctggtaccctgtctataaatagatagatgagatgagatgttgagc

SEQ ID NO: 50066 - DNA, 1142 bp, Zea mays
  unsure (1)..(1142): unsure at all n locations
  Clone ID: MRT4577_145657C.1
gcgattgggaccctcgaggccggccgggaaagctgtctttccatgatctaggagccgtcgccgtcgagagctgaggcgaagcaacatagaagacgaggggggagtgcgactcctcgtgacttgtgagggagagaagccatggcggagatggagccgagcatcgggaaccatatggccgaagaccaaccgactccggccgcctccactgtcgaggaggccgctatggatgcagataccagcggcgagcggcgtagcgctgccgcgttggtgggcctgctccgcgggttcctcgccgtgcaacagcgccgggccgaggcctactccacgctacgaaggggtttttctgagtatatggcttatggaggtgaattggcctatcaacaactgtgtggcaatattacagcggagttcaatgattgctcaaaacaagtccttgaaataatttccctgctctcaatgccagaatttagtcgcagcgatcttgccgatttactgaagggtgttcaagcacatgagaaagagaagttgcatttgacagctaagattcaggtgctgaagaaagccggcaggccttcagagcgcctggtgaaccacgcagactgcaggtcgcgcagcatggcccagcacgtgtgcgtgcacgtcaaggagatcacggaggccgccggcaccgaggacgccgaggcggatgcggagtatgacgcggccctcaaggaggccatacagggcgtgcaggttgccgtgagcagcataaacgaacacatggaggaggtgcgctacgagattgacggactcgaggcagagacgatcggtagcaagtggagcgaagtcgaggaagcgttccctggtaccctgtctataaaatagatagatgagatgagatgagatgttgagcgtggaagactgaagaagaatcacgaacagagagattcgatgtgaatttttgggtactgttcagttcagggtacccgtgttattatacgtcctccaatccaaaatttagttctttctggtcttttttccctccacgtttgaatgataatgaatacagagctacatataaattatattaatagtttaattaatgaatgtatatttagtctaaaataaaatatattttgggcgnnnnnaaaaaaaggccccta

SEQ ID NO: 50067 - DNA, 386 bp, Zea mays
  Clone ID: MRT4577_145658C.1
tattgccggttcgacctgctcttttttcagctgccgccattctccacatttccaccgcatttgaactaggaaggcgaactccgaccgcgggcgcgcgataacataacttatccatcgatagtggcgggcaatcctactgcggcgcgacatggagcacctaagcagctgcaagatgttaaacggctggaacatccaatttcgccaccagagcgccaccctgggctgcgccatgactttttccatatacctgcccccgtacaccgcttccaacctatctgagctgcactggctctggtgtctcacctgcaccgatcagaatcacattatcaagtccggcgcccagagaaactgcgctggccacggcatgggactcgtggcaactgaca

SEQ ID NO: 50068 - DNA, 367 bp, Zea mays
  Clone ID: MRT4577_145659C.1
ggctggaggcgacgccgagggcgacgaaggcgagcgcgagggagacgacgcccctgtcgcagtagaggcggtagagacggcagacggcgaaccacccgctggttcccccacaaggccaccgaccctatggccgcggcgccggcggtcgacgccgcctgaaggttcaccgtgaactgatggacgacggagacgatcgatagattagattagatggcagccatgaatactgaacggttgattagatggcagccgccatgcatgaataacaacgcacctggtcccatgtggtgcagcggagccagtgcttgctgacgagcttcttcgcgtagacggccgtgagcagcgcgtaggcggcgcaggcggagtt

SEQ ID NO: 50069 - DNA, 294 bp, Zea mays
  Clone ID: MRT4577_14565C.1
cagggtatttctctctgacagaagttcctgattccctcggcagtggcgtggttgcctaggtttgctgtctgtttttgagctactcgttttttcgctgtcttgtgctcgctgtcttccgtggtgtttcagtagcaatggaaaagggtgagtgagcctgtgttgtgttacaagcatcccagttcaatgggaaaacaaacacataagacatgaaccaactgaacagcttgatttaatggaaaatgctaacacaactaacatgacaaataaaaaacagatataacaagaacaacagat

SEQ ID NO: 50070 - DNA, 354 bp, Zea mays
  Clone ID: MRT4577_145660C.1
acctttgcgttcggtctaagatgctttagacagtctcaaatcccaaatccctcaccgcagagcccacaaagagaaatgtacagtgtttaaggccacagctgactagctaaaaagatgcgagcatgcacacctgtatttacatgcatgcatgatcttctgcaccaccagtactttaacactctggaaaccaaccaaccaagctggcaatcaatcacacagagcaaaccgtacgtggctgacgcccgcctattcgtcagccaaatccctatgtacaacgtatctgagggacgacttgcactggatacactcgacacactagtcgacggccctccgccggaggccgagctgcagctg

SEQ ID NO: 50071 - DNA, 530 bp, Zea mays
  Clone ID: MRT4577_145661C.1
gggggggggggggggtttttaaaaattttttttttttttttttttttttttttttttttttttttttttttttttttttaaacgggacgaacgctccgataactatgcaacatgaacaagcaaacatacaaaccaacaagtataccaacaaagggggggggggggggtcaaaaaagcgaaatatggggggggaaagtcttgagtaaaaactgggtcatgggggggtgaaaaactgctggggggggagcgaaggggcttaccaggaggggggactggaaacaaaacgacactatgcgtgtagctggcaaagcggagtaactgagggaggggggggtttgccttggctgagggggttgcgtgtgtgtggaaagggaaagggtaactgggtgtatttaaagctgggggtatggggggtacctcaatgaagttcactattggggaaaatagggacaaaaaaatcgtctgacttaatatgaacaggagagttataggcagaatatgggacgagaggattttgggatttttctgga

SEQ ID NO: 50072 - DNA, 604 bp, Zea mays
  Clone ID: MRT4577_145662C.1
gagtgaatgaaccaatcaatctttataatagtagtagtattgttaggcatgctatacgaatgatttgatatcttcagctgctaccagcagcagcgccctgggattcaggctgtgctgatgtgattatggtggttgaatggtcccatgcccggccctcacctcacatggtttccatgtgccgaagcaacacggaggcgataacgacggtgacgtgtcagtggctcactgactcctgctatagaaaattaatttttattgttgcgttgaggactccgtcaggaaccgagccggatctcttgtggtctcagtgtgccgtctctcgtcgtgaaggtgcgtgccaactgccatccgtaaagagggacataatatacttataaaagcctccttttttttgttgtgcgtaaatggaaaaaaagacgataggcatcatgtgaactaatgtcctttttaccgtgttcctagtacagttattagattaaacagttttaaaaaaatgagttttaaatgtaagtgggtaagcattaggtcaaggtaaagaaatattggtgaccgagccagccggacatctctcgggttctggtaaggggaaaaaaagacgaggggc

SEQ ID NO: 50073 - DNA, 340 bp, Zea mays
  Clone ID: MRT4577_145663C.1
cctccgtcttctctccctctcagggcgtgggcggcgcgcgttgaggttgatgatgttggaggtggctcgctccctcccggcggcggcgtccgcggtgtcggcgtgattgctcgcctagcggggtgttgtgacggtgctggaggaggtggttctttcccttctctgcttcggtggggggggggcgttcttttgtgagcggggttggtctgctcagctggcgctctgccttgggtgcgccggcccctagcgtggccctctctgaaagctgctgctgctgtcgtttttgggtgtgcttgcttcggcttggcccttgggtcctgcgttttgggccttctctctt

SEQ ID NO: 50074 - DNA, 825 bp, Zea mays
  unsure (1)..(825): unsure at all n locations
  Clone ID: MRT4577_145664C.1
tggttacgagcctgaccgcgtcacatactgcacgctgatcgacatccatgctaaatcagggtacctggaagtggccatggacctgtatggcaggatgcaagaagtcggcctgtcgcccgataccttcacctacagcgccatggttaattgccttggaaaggggggccagctggcggccgcctacaagcttttctgcgagatgattgagaatgggtgtacgcccaacctggttacttacaacataataatcgccctgcaggcaaaggcaagaaactacgacaatgtcgtgaagctctacagggacatgcagatcgccggattccgccccgacaagataacctacagcattgtcatggaggttcttggtcactgtggtcatctggacgaggccgaggctgtgttcctcgagatgaggcgcgactgggctcctgacgagcccgtgtatggtcttctggtggacctctggggcaaggctgggaatgtcgacaaggcgttagggtggtaccatgcgatgctccaggatggtttgcagcccaacgtgcccacctgcaattcactcctcagcgctttcctgaagctcaacaggtttcaggacgcctacagcgtgctccagaacatgcttgcgcaggggctcgttccgtctctccagacttacaccttgctgctcagctgctgcaccgacgctcacgcgcagatggggctgtgctgccagctcatggcgatcaccggacacccggcccacatgntcttgctctacctgcccgacgccgagcccggcggcgagaacgtgagggaccacgccaggtatttcctggacatgatgca

SEQ ID NO: 50075 - DNA, 175 bp, Zea mays
  Clone ID: MRT4577_145665C.1
taagctcgtaattcggctcgaggagaaatcaagctgccaattttctaacctacatgtaacagacgatcataagaccatgctatccgcacgctgcgcactcttacccatgcgcgcaagcactacccaagctgccatgccttgggaatgccgaaaaccctatcgaggaatcccccac

SEQ ID NO: 50076 - DNA, 764 bp, Zea mays
  Clone ID: MRT4577_145666C.1
gggtacctcgaggccggccggggagaggttccgttttaagccggtgctccatgtgtcccgtcccgtgtcccgtcccgtctacgttttaagctgcgagcgagatctgctttcacagcgtggctgaccagcagatccgtcgttgccggaacccacgctcgccggctgcgaatgcatctgtagcctgctcttcgtccacacggacaattggacgagctagagtctgcgtcgccggcgatggggtgctccttctcagggctgaacgcactgtacgacaccgtcggcggtcggggtggtgacgtctgggttaacgactaccacttccgcgtgctccgcaggctcggcgatgccggccctgcgggctcgtcggtcttcctcgtcaaggaggtcgtcgccgccgcaaccgcctccgacggcacggctgggtcagagcccggcgcctcagggatcgccgggaagaaaggcatcgacccatcacacatctcagctgacgggacatatgctctcaagaaagttcttgttcagagtgatcagcacttagagcttgttcagcaagagatccgagtgtcctctcaattcagccatccaaatttacttcctcttcttgaacatgccatcgttgctgtcaagaggaagcagtctcatctagcaattttgatggattttgagagtgctggtccagcaagaaagactattagatcacaagctgaagctttgcagttacaggaatgggcttcagagcactgttcttctcattaccgggcccc

SEQ ID NO: 50077 - DNA, 621 bp, Zea mays
  unsure (1)..(621): unsure at all n locations
  Clone ID: MRT4577_145667C.1
ttgggtacctcgaggccggccgggttcnntttnnnnaaaaaaaaaaaaaaaaaaaaaaaaaaaaaaaaaaaaaaaaaaaaaaaaaaaaaaaaaaaaaaaaaaaaaaaaaaaaaaaaaaaaaaaaaaaaccccccggaaaacccccccccccccggttggaaagcaggaaatgttcaagcaaatcaaaaaacaaggggtttttggaaagggaaaaaccatcctctttgcccttgaggggcttttcaatcccaacctgaaaaaaatcccctggaaaaaggtaaaggatgcccttgaaaaggggggaaagtttgaccctaaaatccccccctttggccccccccaggggggaggccccccctccgcctaagaacgaatgtttgcaaccctgcagggggttaaggcccccagggcccttttggaggccccccctgaaacccccccccctgttttttggggccaaaaaaaaaaaatttttccccaattttttttggaggccgttggcaaaaaaaaagaggttttttttgcctttgaaaaaaaggattttgggggggaaatggagttccccgaaaatgagtttcccaaaaaaaaccaggcccacccatttaccccgggtggcaaatt

SEQ ID NO: 50078 - DNA, 450 bp, Zea mays
  Clone ID: MRT4577_145668C.1
ccgcctccgacggcacggctgggtcagagcccggcgcctcagggatcgccgggaagaaaggcatcgacccatcacacatctcaggtgtctctctcacacataaataccataaataaaggtatcgagatccgactgttgttccttgcggcgacgtgcgaatgggtttggatctggggtctatccggcctgctggacagtggaatgacatttgttcacggttggatggattatttcacaattcatggtgaagatcattttaggcctccttgttcggtgtgccgttcttgttccgtgtgagaattaagatcatgatcattttttctcttcaaattgcatgcttcgtttccttagctgcttgatgtaaacaatattagtttctgtaaatgcacttttgaatttcgttcttaccatattttagagtcacaaataaatgtcagacttgattctgag

SEQ ID NO: 50079 - DNA, 409 bp, Zea mays
  Clone ID: MRT4577_145669C.1
acccacgcgatcgcgtgtacgacgccgggtacggcacgcgctcgacggcgctgagcacggcgctgttcaacgacggcgccatgtgcggcgcgtgcttcgccatcgcctgcgacgcggggcggtcccagtggtgcaagccgggcgccgcctccgtcacggtcacggccaccaacctgtgcccgcccaactgggcgctcccgggcgacgccggcggctggtgcaacccgccgcgccgccacttcgacatgtcgcagccggcgtgggaggccatcgccgtgtaccgcgccgggatcgtgcccgtcaactaccgccgcgtcccgtgccgcagggccggcggcgtcaggttcaccgtccaggggcgcagctacttcgagctggtcaccgtcgccaacgtgggcggcagcggcgt

SEQ ID NO: 50080 - DNA, 283 bp, Zea mays
  Clone ID: MRT4577_14566C.1
ctgatcctgcattctaccgcgacgcctaaagtctccagtatagggcgaggtcgacccatagtcccagaacgaaacacatacgccaagaatgagtaaaggacactaccaggagacgcggaagcagaagacgcgaaatacgattcacgcagagaggacgcaagtatcaacgaacgacaaggtacattgaactccatcaatgaaacgcaacgagcacgtcaacacgaaggttgagcgtgccttcggcaagtacaagctcgacatcaagaacaacctcgaacgaggt

SEQ ID NO: 50081 - DNA, 877 bp, Zea mays
  Clone ID: MRT4577_145670C.1
tcgtttattattcccagttcatttagaaggaacattacatgatataactaaaaccatgcttgaaaagaaggaattcttcccaacaattactgttctccagatatttcgccaggtaagtaattacattgtcttctgtgttctgctgaattctgaagttatttggcagatataatagatgtgactttccttcttagtaatccacgtgctagaagcctagagccgtgaacttggtatcaactatcaagcttattttactcatagtactgcataactatttttgtccacatgcttgattctactccaatgcaatttcacttggatacatagggagaaggccggtcgggtaaaaaaaaaaaaaaaaaaaaaaaaaaaaaaaaaaaaaaaaaaaaaaaaaaaaaaaaaaaaaaaaaaaaattacctatttggacagtatccatttgatatggcgcttgatgggtcttctggcgaaagcttgaaaagggtctactaaaatgtccagattaaatggcctgaaaaagcgggatctacataccctgattccctccgccagtttataacttggatgctgcagccacatcccgcagttcgtcctcatattgaggatatcataattcatgttgataaactcttcatgaagtcctctaattaaccgttacaccaagccgtttttccaccagaaaaaagaatcattattatgtaagtctacacgattcattagcaaaatgggatatgtatgttccttgatagctattactgttttaaacgagaaaaggacattctgctgtagtcttcaaccattcggggactcgccattgttcatgagtatgttatctatagatgtttttttgtatgcccgacagtgttaccgggttaatgg

SEQ ID NO: 50082 - DNA, 1975 bp, Zea mays
  unsure (1)..(1975): unsure at all n locations
  Clone ID: MRT4577_145671C.1
ngagagagtggtagcttttaagccggtgctccatgtgtcccggccggtgtcccgtcccgtctacgttttaagctgcgagcgagatctgctttcacagcgtggctgaccagcagatccgtcgttgccggaacccacgctcgccggctgcgaatgcatctgtagcctgctcttcgtccacacggacaattggacgagctagactctgcgtcgccggcgatggggtgctccttctcagggctgaacgcactgtacgacaccgtcggcggtcggggtggtgacgtctgggttaacgactaccacttccgcgtgctccgcaggctcggcgatgccggccctgcgggctcgtcggtcttcctcgtcaaggaggtcgtcgccgccgcaaccgcctccgacggcacggctgggtcagagcccggcgcctcagggatcgccgggaagaaaggcatcgacccatcacacatctcagctgacgggacatatgctctcaagaaagttcttgttcagagtgatcagcacttagagcttgttcagcaagagatccgagtgtcctctcaattcagccatccaaatttacttcctcttcttgaacatgccatcgttgctgtcaagggtgttcaggatggatcccagaactatgaggcctacttattattcccagttcatttagaaggaacattacatgatataactaaaaccatgcttgaaaagaaggaattcttcccaacaattactgttctccagatatttcgccagctttgttctggattaaagcacatgcacagttttgatccaccatatgcgcacaatggggttaaaccagataatgtcctcataacacagaggaagcagtctcatctagcaattttgatggattttgagagtgctggtccagcaagaaagactattagatcacaagctgaagctttgcagttacaggaatgggcttcagagcactgttcttctcattaccgtgcccccgaactatgggagtgtccaagtcatgctgacattgatgagaggacagatatatggtctttgggatgcactttgtatgctatgatgtatggaaagtctccatttgattatgagcttgatgagtcttctggtgaaagcttgcacagtgttattaaaaatgtacagattaaatggcctgaagaagcgggatctacataccctgattccctccgccagtttataacttggatgctgcagccacatcccgcagttcgtcctcatattgatgatatcataattcatgttgataaacttgtcatgaagtactctaattaaccgctacaccaagccgcttctccaccagaaaaaagaatcattattatgtaagtctacacgattcattagcaaaatgtgatatgtatgttccttgatagctattactgtattaaacgagaaaaggacattctgctgtagtcttcaaccattcgtggactcgccattgttcatgagtatgttatctatagatgttttttttgtatgcccgacagtgttaccgggttaataaatgatacagtacctcttttatagttaaaaaaaaaaaaaaaaaaagtagataaaaaaaaaaataaaaaacatcgaaatctttttcgcaaaaaaatcccctggaggtgtctttctcacacataaataccataaataaaggtatcgagatccgactgacgttccttgcggcgacgcgcgaatgggtttggatctggggtctatccggcctgctggacagcggaatgacatttgttcacggttggatggattatttcacaatttatggtgaagatcattttaggcctcccttgttcggtgtgccgttcttgttccgcgtgagaattaagatcatgatcattttttctcttcaaattgcatgcctccgtttccttagctgcttgatgtaaacaatattacgctactgtaaatgcacttctgaaatttcgtccttaccatattttagagtctacaaataaat

SEQ ID NO: 50083 - DNA, 322 bp, Zea mays
  Clone ID: MRT4577_145672C.1
aaaatggaaaaaaaaagttttcatatgggggtcgaagggaattcaacacaaacgggtgggggaacaagggcaacgtgggacaaaaattggaatagctaaaaggtacatgcctgagaggggacctcaaggaccatgattttgtggcaattgcaagaacacaaacaacatggttttcatctttaaagatacccttaacatgtgagggcccatgcggggaccctttttgatttgaattattggggagactggatttgccggggaagcttaaacaaaggctggaaataattgcgcagattatagaactcattttttacaacaacca

SEQ ID NO: 50084 - DNA, 170 bp, Zea mays
  Clone ID: MRT4577_145673C.1
ccgaggtgactcgcgcggttgtttgagaggagaggaggaagatctgtgatatgattcttgatcccattgagccagcatgccattcaagtttgaaaggacgggctgcaaacatttatccttaccatacaccattctgttccctgcatccttccccatcattaaacacctat

SEQ ID NO: 50085 - DNA, 795 bp, Zea mays
  unsure (1)..(795): unsure at all n locations
  Clone ID: MRT4577_145674C.1
agcgatacagcagacagcagcagcagggcaacccaccaaatgccccaaaccctccgctccctcctcttctagggtttcctcctccccgtccgcgccgcccgcccgcccatggccgccacctccggcgacgccccggtcccgcccgccatgccggacctcgtccgtgaccacctctacttcggcggcatcaacgacgccatcgcggccctcaccgcctccctcccggacggtaccgacatcacccacgtcctctccgtgccgctcagggacacggaggaggagaacctgctcgaccacctcgagccgtgcctcgactttatcgacgaggggaggaaggcgggcagcgtgctcgtgcattgcttcgcgggggtctcgaggagtgctaccatcatcacggcatatctaatgagaacagagcagaaatctctggatgaagcactagagtccttgaaggaaattaatgagtccgtttgcccaaacgacggtttccttgaccagttaaaattgtttgaagaaatgggtttcaagattgatacttcaagtcctttatacaggcgcttccgcttgaaattgttaggtcagtcctacaaagttggagagaaaatagggaaccatgtatttgaagacgatcctggagttgctcgacagcctaatcctaaccaggaattgtcaggcaaggagaagacccttanaacagcataccgctgcaagaaatgcaggaggatcgttgctgcacaggacaatgttatcggccacactcctggcgaggggcactctagctttgcgtggcacgac

SEQ ID NO: 50086 - DNA, 371 bp, Zea mays
  Clone ID: MRT4577_145675C.1
agcagtggtaacaacgcagagtacgcgggtgaagttcatagggtcatttgaaaggtagaggcaacccaacattggctcctcctcgaatgcggacaagggacgttgacatgagagcagtgcctattagagagtgtctgagatagagctgggcgaacaaaaatcactctgaaaagggacgattcctggtgaaacctttactttgagatactgaataagaaggtggcgatctgagtggtggtcttagcttatcatgtatgtgatagagatgaaattagaggattatgtgttgatccttgaactcgatggcgtgtttgtttgatttgggtttgagttgttgtgttttgagattggtgttatggtatgagaactgt

SEQ ID NO: 50087 - DNA, 481 bp, Zea mays
  Clone ID: MRT4577_145676C.1
accctgcgagcttcagttcataacaacacctgactgactgacaaacttaattcacacatcgcatggtccaggagaggagcttggtctaacaagagaagaacctatgcgagaaaaaggagcgtgcaggagggagcccacatgttatgggatacattccaacctctgcaggaagctgcagctgacgtattaattggtgcggccgaggaggcactctctatctgtctctctctatgactaactcactaactcactaaccgtatgattttataaagtgagaaaactgactcgccattgtacttgacaggcgaaacattagagctactcctcctactccttacatctgctcatatactctggcctatccctggtggggccatggtgttgctaaaccgcacctcagtaacaccactgcagtgccctccgttctgtcggtggaagctgttctaatcccgacagacgccgacgctttggatcccggctt

SEQ ID NO: 50088 - DNA, 266 bp, Zea mays
  Clone ID: MRT4577_145677C.1
ttttcccttgtctttttgttttgtttcggggaacaccaggccctttaggaccatttttttggtaaaaggtttacaaaaaaccccgcaggttttacaattcggggggtgggcccctttataaggggtgggtattttcacgaaccttttgaactccacttattaaaattctgttataaatacctcttccacggagacccggcagtggaacccgggccctggttcacaaagaacaaaggacgcgtgaaaggatcagacattcacggggg

SEQ ID NO: 50089 - DNA, 178 bp, Zea mays
  Clone ID: MRT4577_145678C.1
atatggtgagggcagcgtcacattctcaggatatctcgttggttagtcagggttgctagagctgtgattggaggaattgtggcaatggcggatgtgccaatgatgctctttgccatgggcgtcactgctgcggtaatcgcctcgtcgtcgatagcacgcatgatgatgtcggtggcgg

SEQ ID NO: 50090 - DNA, 122 bp, Zea mays
  unsure (1)..(122): unsure at all n locations
  Clone ID: MRT4577_145679C.1
gnttgancgcctattcacatcccaaacccccggacctctaggntacgcganaccgngctacgccgcntacgaggcatctcatcncatcnngttcccaccaaaccgataccgctcgnatagtc

SEQ ID NO: 50091 - DNA, 397 bp, Zea mays
  Clone ID: MRT4577_14567C.1
agaccaactgggaaccgggccgccccctcgaggcgggcgctatatttttctctagattgttaaaatacaactcacacctgattattattataccctaggatatacaggaaggtttttgggctaaaactatgcatgaaaatacagatttcaagcagtcactatttctatgtacatgctcatctatcatcaagaaaccccacacaattatcaaatcgatcaaaatactgttctgcgttttcacactttatatttagaaaaaccagctgttaatttacaaatgtctaaagttttcacatctacaatacaaatagggtaaaatgaaattaggaatcatttatgggcaatttataaaactttacccatacctgtaagaccgtgaatgtatatgaaatcattt

SEQ ID NO: 50092 - DNA, 868 bp, Zea mays
  Clone ID: MRT4577_145680C.1
cattgggggtaccgaggccggccgggcccttttgctcctgtcgccgctttgggtcggggtttaagcgagtgttcagggaggccgggacggaggcgacgacgacggacggtgccggcgtcggaggagaagaaagaacaagtagccagctctcgtatatgccttcttgccccatctccgatctggtcgtcgtagcgctcatcgcccccgtcgtcgccggcctcctcctcctcctcctccgctccctcgcctgctccagccgatctatgcgcaaggggctcaacggatggaacaaatcctcgtcgatgctcagggacgggttcggggtcaagtattccggattcctccacatacggccgtgcggtttctgtagaggagactgacggattcgtcctcaaggccgtgccgtttctgtagaggagactgacggattcgaccgatttgcgctcgtctccgttatatttttgcgccagagtttttttgttttttttcttcagaagcttttccccgtagttttggctggagttctccccggcagaggagatacaagagacatggccccgttgaaccaccagcagcatgttctcctcaagaaggccctggcgaagaaacccaaagctaagaggatgtccaggtttggccttaaaccctccgctgcagccctcctgaagtcccggccgcagcagccggcgcctgccccggcccagccgaggcgccgcgtccgggttctcttcgaggatcctgacgccacggactcggactccgacgacgaggaggccggcgcccctacgagcccggcggaggccaagcgcttctccttcgaggcgttcgtcggcaaggtcccagccaagccggtccttccggcggccgc

SEQ ID NO: 50093 - DNA, 185 bp, Zea mays
  Clone ID: MRT4577_145681C.1
ggctattcttccatcatttatgtgttcgttcaactgagccgccatgcgccaaccacggtcagggccggggaagtagcagggccgcggttacggcattcctgcggcgacgcttcagaagccggaaacggcgttggcgaacgtcgaccagatcaacggcgacaacatctcggagagcttcttattct

SEQ ID NO: 50094 - DNA, 681 bp, Zea mays
  unsure (1)..(681): unsure at all n locations
  Clone ID: MRT4577_145682C.1
aattcggcacgagggagtgttcagggaggccgggacggaggcgacgacgacggacggtgccggcgtcggaggagaagaaagaacaagtagccagctctcgtatatgccttcttgccccatctccgatctggtcgtcgtagcgctcatcgcccccgtcgtcgccggcctcctcctcctcctcctccgctccctcgcctgctccagccgatctatgcgcaaggggctcaacggatggaacaaatcctcgtcgatgctcaggtccgtgccccccgctctctttttcctccgtgttttcgccgatctgggaggtttttgaccgggttttgtggccctgttcgtccagatctggggagttcgtggctgctccttccatgggttttgacaaaaaaaaatctgctcttgtggttgcagggacgggttcggggtcaagtattccggattcctccacatacggccgtgcggtttctgtagaggagactgacggattcgtcctcaaggccgtgccgtttctgtagaggagactgacggattcgaccgatttgcgctcgtctccgttatatttttgcgcccagagttttttttgtttttttcttcagaagctnttccccgtagttntggctggagttctccccggcagaggagatacaagagacatggccccgttgaaccaccagcagcatg

SEQ ID NO: 50095 - DNA, 214 bp, Zea mays
  unsure (1)..(214): unsure at all n locations
  Clone ID: MRT4577_145683C.1
atgacgcacaggntatctaataacttattgtgtcccttaggggacactgtgctctgaacgggggtgtttacaagattcagaccaacctgttaccctatacgaggatacactttatgctttctttgtacactctacacatatctgttgtgaaagcctatcacaagcacatctctgtgggtgtgataacaaacacagcgttttagacctattttat

SEQ ID NO: 50096 - DNA, 856 bp, Zea mays
  Clone ID: MRT4577_145684C.1
gaaaaaaatcaccgtgctctgctcctttgattagttattataactgtacatggtgtgtgggcaccaaagaccaaagttgactagctcatccgcgccaccaatgcaacttacaaaggcacaccagttgaccagtagcaacccaacagactagggcatatttggttccttacctcaattgccacactttgcctaacttttttgcctaaggttagttattcaatttggatgactaatgacatgtttgattcactacttcagttgccacgctttgcctaacttttctgcctaagtttagttattcaattcgaacgactaaccttagtcaaagtgtggcacatttagtcacaaaccaaacaggccttaactttaggcaaagtgtggcacatttagccataaacctgtcaagatttaccattaaactgccgactcgtcactccacttccattgaaccagcaacggtatctgaagcgaaagcatttggagcgatgctgcgaagttcctcgttccagataactcctctctgaggaaatgcagattgctggccgtttcttgtcacatgaacatttgcaggattagggatgatcctgtgcgagaaacattcttcagatgctatatacagattaagatgcacatcgctcgctcgcaggctgtatccgagaaaaccggagctggcatcttgtgtgcaaaggatatcttgcagttcgaggtcacggttgaaccctggtctgatcgctgagagcttcatcgaaaggaactcaacctgacgctgcagagattgcacatagtttatgatctcgtcaagcatcatggccttgcctgtaatcttgttgcaacccgggacaaggtcctgaagaag

SEQ ID NO: 50097 - DNA, 264 bp, Zea mays
  Clone ID: MRT4577_145685C.1
attcggctcgaggtggacacgaggttctttttccaactgacggctccgtcatgcggggaccgattaatatgccgccaggcctccacgcgagacgaactcaaacgaaacgcgcaagatatgcctatgcttcctactacctcgagaagatatttcggatgagggagagcgtgccttgctctcatctgatccaccgaggacacgagatcctctagaggcttgcactgtttgccgtgaggctacgggggctatttgctccgctggcat

SEQ ID NO: 50098 - DNA, 374 bp, Zea mays
  Clone ID: MRT4577_145686C.1
ttttactttctctcatagatagcatttctccttaaggggggtacaacaatggctactgggggcatagtacaagtcactactaggggaagggcaacaaaatgggggaataagctgaacatgctttggtttcttacccccacaaacatttaagtacagaggcgaaatctggtagttgccccgttttcctaaacccccaacccattcccctttgaacatttggcaattggatgcactttacaaaaataagggcacaacggcaccaaacacccgacacaagagttcacccggtgtgcacaaagggtaaccatggaagggaaaaaacattttgcagcctttaatcttacaaggccgatggcccacacctggggggaagg

SEQ ID NO: 50099 - DNA, 388 bp, Zea mays
  Clone ID: MRT4577_145687C.1
cccacgcgtccgcggacgcgtgggtctacctcgcgccggcgtttctgacgagactgaaggaagaggccgagcagggagcacgacgcgatgaggctcactccaacgcgtggaactcgcactctgagagactaccgccctggctcccgtgactggcggctccgcgctaccccccacggactgatcaggaagtacaggctcatgtgctgtaggcaacgcttgcgtaggaacaccgaggacatcggtctcatcaagtaccgatggagaggccactgtgcttctgtggagaactgcctacatcatagaaatgggtccctcaatacaaggcctaattaatgcgctttagcttgctgtttgagaccttgagactcatgtgtgaaactcgacttga

SEQ ID NO: 50100 - DNA, 437 bp, Zea mays
  Clone ID: MRT4577_145688C.1
atcttttttcctctcggtgtgtcccgccctctgaggaataggacttccctgaggcattaccgaactcagtggcgaagaaagaccccactacacaaaaaccaaactttcttctcaggagggggggggaaaagttaaccgctaaaatggccccgctggggccccataggggggcccgccggggggtaaaacggacccaaataaaattcgaggactcccccgggccgaaaacaaaaaaaagcctgccccccccctcaaagaggcggggtgtttcgacccccatagaaaaaaagaacttatccccccgggcgcactcttgagtctcacgcgcaaacacgccctcacgaccccccgtttggcagggaaagcttttctaagggcgcccccaaacaaaatgcggcagggacggagcttacacaggagggagaggaaaaaccccg

SEQ ID NO: 50101 - DNA, 233 bp, Zea mays
  Clone ID: MRT4577_145689C.1
tttctttttttttttttttctttaaataattccatccatctattttttgatggtggaggaacacgacacttctattaatcgttgtctgttgagtaacgctaccaaccatgaatatgcgtcacaaatattggatcacatcaacctgttatgagcaactatataatctctgcgagcctattgaagattggatgattgagggcatcatggcaggggggaataggagagatattcct

SEQ ID NO: 50102 - DNA, 302 bp, Zea mays
  Clone ID: MRT4577_14568C.1
gtcacgatggaaaacacacgctagcaggcctgccccggccgttgtcaggctctgcatccctgactctctgatgaagctctcggatcgccatggacgctccgagcgacggcacgcgtactgcgcgcgccaggtgaccgaacaagctcgcgctctgctgctacagttgcttgtccctgtgccagactggtacgaggtaggaagcttatagcagatacagctaatctggggtgcgtagccgaagctagagctagctagcatagcgcgcgcatgagcgtgctagctcgctcggtagctgtgtacta

SEQ ID NO: 50103 - DNA, 237 bp, Zea mays
  Clone ID: MRT4577_145690C.1
cactgccgcttggaacttgttcatctagccgagaggttagatagatatatagatatatagtgtaatcgatcgaatccgccaaccatacaatggcgtccgatggcagtggcgtggtgacggtttacggctacaacggctctgcgctgctggagccgccgatatagcccaagtcgtcgactttctccgtgaaggtgggcctgtcgcagatgctccttggcggtgtgatcttggacgtgg

SEQ ID NO: 50104 - DNA, 553 bp, Zea mays
  unsure (1)..(553): unsure at all n locations
  Clone ID: MRT4577_145691C.1
gggtacctcgaggccggccgggatctcctagccccagctagatctttggacacatatcgaaacagctctagctagcgcgctcgtcgtctaacctggcttccggcatggcttccaagcagatcggagtcttgacctgcttcattgccatcaccgctctcgccttccgtccctgcgcatccgccgtgcccatggacggtggctgnncnaacgnnnnngccacntgcnacnnnccagccnaggncgcngcatgcgacggcgacggcggcgggaaccacgaggccgncgacaccaaccccgaccacnacancaccanccacaccgacacgggcgncnccaagcccaccaccaagcgcgccaccggcggcaaccagggcagcgccgggcccaacgccggcacgaaccccgcccacgccgactgcaccgccggcatcaccggcgaccacaacaacccggcggagaccnncgggctggacctggcgaggaagagggccctcaccagggcggagctctacctcatcgtgcagcgcctgggcgccatctgcggcgaggccgt

SEQ ID NO: 50105 - DNA, 1501 bp, Zea mays
  Clone ID: MRT4577_145692C.1
ttgtcggcacgaggctaaaaccccgacttgttgaccctcgccgccggcgctgggaaatcacacagacacactcacacacaacctacccagacggccagaccccgcgccgccccgccgccacccccacccccaccccaaatcagtcaaacgcgccgccgccgccatgggctcctccgtcagccaggccggggcccctcctccccatccccccacatacgcgtcgactccaccctttgcgcccgctgccgctgacgctgctgacgccgccgccgccccgccgccgaaacctcatgaggaggaggcgactgaggagaaggtggactacctcaacctcccgtgccccgtcccatatgaggagatccagcgcgaggccttcatggcgctgaagccggaccttttcgagggtatgcgcttcgatttgaccaagatgatcaccccgtacttcgctttgactcacagcgttgccatgggatccattgagatcccggcacaggggagcgaggtgatcaaggttcccacctccaattatgagtttggtgccaactttatcaatcagaggacgatgctcatggggagggtctcacatgaagggagggagaacatccgtgtcaagcatgatattacggacaacctttctttaaagataaatgctcagttgacaagtgagccccactactcccaagggatgctgaattttgattataagggcaaagattttagatctcaggttcaattcggaaacaatggtttctatggagcaaactacatccagagtgtcagcaagaacctttccttgggaactgaagccttttggcttgggcagcaaaggaagtctggagtcggtgttgttgctcgctatgacacaaagaaaatggttgcgactgcacaaattgcaaccactggaatggtcgcgcttagttatgtacagaaagtttctgaaaaggtttcccttgcatctgatttcatgtacaatcaaatgacaaaggatgtaacagcaagctttggttatgattatatgctgagacagtgtcgattgagagggaaactggataccaatggcgtaatttcttctcttttggaggagcgattgactccaggtgtcactttccagttgtctgcagagctggaccactggaagaaagattacaaatttgggtttggtatggctctcggagagtaagacgatttgagcaaattctagacacatgtacaattagtggttggcattagtcgacagggattaaaacgattctactttatctttgcatttatttgtctcccagttattcgtttagctgctatggctgtgggccgtggagacatttcgaagttttgattttactgggctcatcacttgagtagtattaaactgaaacgggaatgcgtgaatagattgcgctccaccagattaggatttctgcatgccaaactcttgatttctagtctggaaataagttacgattttattccataagataaagatacattcctctgctaagtt

SEQ ID NO: 50106 - DNA, 434 bp, Zea mays
  Clone ID: MRT4577_145693C.1
aaaaaagaggatcatctcgcttgcagcaagattttcctgctcctacacctaaagaatccgagacccctctctgcgtctcttcaaattcaagatgggcggcggcctcaacatccgagtatgtgttacgatatagctgggcggagacatccccccgagccagaccatgtacctcaacgacctcagcgagaaggtctagaacgatcacttgaacacatcgctttatggcctgagctctcaagatggaaggatactggatgtagtggccctgataactcaaatattgagaggggaagcctgggtgccgtttaccgaaattacagctgctaccgatgctttccgtggattgcaagacttcgatttctatgaggaaaaaatgcgagtacaatatgctaacacttcatcagactgtattgcaatagaatatggcacttatg

SEQ ID NO: 50107 - DNA, 638 bp, Zea mays
  Clone ID: MRT4577_145694C.1
cctcgaggccggccgggccggatttcctcccttcttgcttctcgcctccccacccttcatccacccggcgttcctcgagctacatgatcctggagatatgacacgctgcgctcaatgcgatgcgccgccgccgatacgcgtacacatattcactcctcggcactctatctcaccttccgcacgactgctgatgacctcttccctgtcttccacaagaacagctcagattgtggacatcgacatcccaagggatcgcaggaactggtcactcgggtggtactccctctacgtgaggcacgagcaccaggaccaggcacaaaaagcagacgataggctcgatggcagattgcgacacggcaggcagatcatgctgcatcctgccaagtcacgtgtgccaaatgctgaacggtagtactacatgcacaataacggagccagctccatcgcccaggggtcgatccagaaggcggagaccttcacggaggtaccgtgatgatatatcgagatgactaccacgatatggactatatcatacgcgaagccgtatgcagagcatatatggatacgcccgcgacagggacttacatagggattaccaccatcgcaacctgagtcgcaggtacagtcctgatgattac

SEQ ID NO: 50108 - DNA, 209 bp, Zea mays
  unsure (1)..(209): unsure at all n locations
  Clone ID: MRT4577_145695C.1
cttnccaaaccacactataaaaatttttcaattcacagggggatagaactgagcaatcgtttgtataactgggtttttgctcgccctgacaagttttatatatatgtgcttttgcaccgaatgttgcttaatcaccaaattttctgatccctatgtgtgttttacaagatatcccttttttacagttgtacttttgtctatttgcttta

SEQ ID NO: 50109 - DNA, 341 bp, Zea mays
  Clone ID: MRT4577_145696C.1
attagaaaaacaaaaaagttttattcagggcacgagcttatgggcgaaatccgaacaggagctgggggcgggcccgtacgaaagccaagtaccaggaccctgcacaaccaggcaaccccagacatacataaggcccccaggcaggcacaaacgggcggggatgccggcccccgggcgggtaaattagccccggggaggaagccctccctgccctcggggacccccccggggcaggggtggatgccctcctaaaccctgggccgggccacaaaaaaaccggggacgaggggggaaccaaagaggggaaggctggggctcccaccgagccagctaacccacat

SEQ ID NO: 50110 - DNA, 246 bp, Zea mays
  Clone ID: MRT4577_145697C.1
gcacaaattgttaataattgatctttaaagagaatttgtcgatcttcaaccctccagcgagtgaagacgaaaggaacaagcgcaaccctgaaaaaggatattacagaagatgccacattggaacgcttttccctgctcttaacaagattgcagagtaattgaaccatacacagttgtttttttaatatgttttctggcggctataaaaaaaaaaaaagggtttggtgtttttggatcccactaata

SEQ ID NO: 50111 - DNA, 160 bp, Zea mays
  Clone ID: MRT4577_145698C.1
gtggaagcaaatggcccaaaaaaaaagagccctaaatggttgtgcacagtgtgaaaaaacaactggcgttttttctaacaatgagaacataattatgttttacgcaagccagggcccagtctttgacaaaattccgaaccaaattacaggaaacatggag

SEQ ID NO: 50112 - DNA, 732 bp, Zea mays
  Clone ID: MRT4577_145699C.1
gtaccctcgggtcggccggatcccatctctcccactgtccgtgtcgctctctctctccccatccatcaaatccgcttcgtcatctcgcttgcagtccaaccaagtcctaggaataacaccacggcgcaacaactcgcaccaccaccgccgcgcagtagctagctaccataccagctgcacgcctcagtgctagcttcgccgggcgggggcggctgggacaccagcagtgcgtgctgcgctgcgctgcgcctctccctgccactcactcgaggagcaaccgtcccagctgcaagggcgacaagaggatcgaccagctgctagtagctagctcgcacatgttcccggtcgaagtgtcggcgctcgcggcgggcggtgcgggagcggggcgtcaggctgccggcgacgccgccgggacgatgctgccgccctttttcatgggctccatctggcccgcgaccgctggcgccgctggctccgaggaggacgaggcggcgacttcctcaaggaagccctgcgggctctggtagagaggccaggcgccgccggagaccggcccaagaggcgacgggtctcggacatgaacatgcaagcggcagcatagctagcacgccgccgcaggaggcgggcagatcatctcgctcgattggtcgtcgtagctcaaatacctaattgcatgcatgctcatgtcgaatatataaaaatggtactacctccgaaaaaaaaaaaaaaaaa

SEQ ID NO: 50113 - DNA, 332 bp, Zea mays
  Clone ID: MRT4577_14569C.1
caaccaaacacacccttagaaagcttgatgatcacacatgcaaaaaaagagaagcaaaagaaaaaaagaagcaaagaaaaaaaaaaaaaaaacaaaaaaaaaaaccaaaaaaaaattgaaaaaaaaaacggggaaaaaataaaacaagaggagaaaacaaaaaaaaaaacaaaacgagtcacacgaaacaccgaaaagaggaaaatgataacatcctatagaaaaaaagcggacaagcattcaactgagattcaagcacaaaaagagcaaccaaaaattcccggccctaatacccgaaccaaaaggcatacaagaagccctagaagccgacg

SEQ ID NO: 50114 - DNA, 208 bp, Zea mays
  Clone ID: MRT4577_1456C.1
ccaaaaccctcctgaagcttctatacatcccactatttttacggatccgagctatctagttcaccacccatgcatcaagtacaatacgtgtgcactccacatccgatacgctatagcgcccactaccactgctagccgcaaaaaaagagaagcagcaccttaggacgtgcagatgcataacctatgatagataaggacttgatctccc

SEQ ID NO: 50115 - DNA, 424 bp, Zea mays
  Clone ID: MRT4577_145700C.1
gagccccacaattttaagggaagatttacaacccctttcaacacctaaaagggggcacggggccaagggggaaaaaagtgcaccacccaaggtcctctcaaaaaaaaggccaccctaaaacaattaaaaagaggaagggcaaattctggctcaagcccaaaatcaaggagcctttttataaaaatggataatgaaacttcccaaggaaaaggagcaacagttttaaaaaaaggaaagtttaaatcaccggcctgctaccctgggaggaagggaaattgcgggggataaaaaaaaacacttttaacaaagaaaaggttggaatcaccagccagctttttttcaaggcaaaaaaaagggtcctaaaactggaggcggcccttgggaaaaattaatagtcctgttagagccccgggggttcacccgg

SEQ ID NO: 50116 - DNA, 1715 bp, Zea mays
  Clone ID: MRT4577_145701C.1
ggacggcggcgatggcgaagaggctgctcccgtctctgaaccgggtgctggtcgagaagctggtgcagcccaagaagaccgccggcggcatcctccttccggaaacatccaagcaggtagcaccatcgtccgctaccgttgttttttagtagtttaggggattcagtttccggcgagggacgtttggatcatggtgtcgggcaaggtgttccgcgccgtcgcttgccgaactgaaaacggctgcagcagttgggcgatttggatcgcttttgtaggttaccaatagttgtaagcagctaaaaatttctcaccatgcttcctccctctggtgaagttatgtctgattgggttgtgattagctctatgttattcagattgcttggtttaggctgccattcttaacttagctataacaattttatcgttcaaccagcgaggttatgcttttttttttattaagggtagatttatatactagagtacttgtgaaatactagcatgtttatggctacctgcagttccaaactgttctgtcccattgttttgtgggatctcagtaagatacattacttgctattttcaagtttttacctgaaaatgtacctcagtaagatacatgacttgctattgtctgtgggatcccattgatttcctgtttgacggtatttcttgtctttcagaatttaaataaagattttacttatcgattagcattcaattcagcactgtattttggtgtgttcgactggagaaacggattattgtgggtgtagaatcaattctctgcttgacaatgttgctcttgttgcagctgaatgctgctaaagtggtggctgttggccctggtgagcgcgacaaggcaggcaatctgatcccagttgctctgaaggaaggtgacactgttctcctgccagagtatggtggaactgaagttaagcttgcagctgataaagagtaagcaaaccattcatctgtcatactgctagtgcatgattaatatctcaattaggcacacaatagaactgttgcaattataaaaattgtcttgcagctgtattatttgctgtcctatgaaatcatcaagatatatgctgaacaggcaaacccatgatatgatgtggaatcatgatagtgactgttttaattgtgtcaaatgttgtgttggtgataggctgtttgatactgcatgtcaactatgccttttgcgacttagaaaaaaaatgatgcatcttaacctttgttcgctaactggcaacacaatcagttgtggtcgcaaataccaagtcaactgtttgttggattcttatcattgaagattgtttttttccttctgtttaatgccatttaacctcttctgaaaaatcttcaggtacctcctcttcagagagcacgacattttgggcacacttgtggactgattcagagcatcagcaagcctgtcactagtcgttggttctagacttctagtgtgagatgcgtagtatcagatcctgggatcaaaatccctgagaaagaactctgaactgtcgtgatgtcatagattttgtgatgaaacatcataattgcctgcttcttgttgcaagcgaacttttgcgtttaaaatggttccctaatattgtgttcgcctctctgtccctggttgcaatgctctctggtttacgttggctgttgattggatttacagtaaaaaaaacttatggtgcccggcaacaatt

SEQ ID NO: 50117 - DNA, 268 bp, Zea mays
  unsure (1)..(268): unsure at all n locations
  Clone ID: MRT4577_145702C.1
aaaaccggattttcatggtcatnngtatgggcaccctatttgaggtcagaatcttcctccaacaacccattgaaatgcggaattatttcgatgcttgaccgtgatgttcaaatgttctaagtcccatcagnanatcaaggnatttgcgttggaagcaggtggagtaaggcttgtctgtctgatgtatttacgtgtgttcaaacaagnaatagtcatcatcacgttatcgagcagtccagcctgtaagcttggtcttggtctctatcac

SEQ ID NO: 50118 - DNA, 135 bp, Zea mays
  Clone ID: MRT4577_145703C.1
gcgatcttcaggaggaagggggagttattctctatatccccatcatcatcccttttactgatgtcagagcatactgtacttcttaaacaaaaaccttctataacaattgataataacataactttaactttttac

SEQ ID NO: 50119 - DNA, 389 bp, Zea mays
  Clone ID: MRT4577_145704C.1
gaactgcatccatctattccaggagcatgtcatattgagcctcatgcacctgctctagaggagcttcaacgacaccaagtggcacgtgtaccgactgtgcgttctgaaagctagcctgaacctagcgctccagatcgagatgatcaaactcgaggcgaagcacagaagtactactatcttcggactacaacggactgaagtccggagaaactacctgagcctatgacagtttcggagagctctgatgacataactgaatgagtcgaatctactagagcacaaggaccgaagtgctagtttaacagagtgaccaaactgtcaggacggactattcctgacgagttaaaagatgcacgggaattgccagacaaggtatcagatcaacaacc

SEQ ID NO: 50120 - DNA, 354 bp, Zea mays
  Clone ID: MRT4577_145705C.1
attcggctcgagcgatggcttagcgacttttttcacaaacatggcgcgcttccaagggagcaatgctcactactcttggagcttgtcggaattgcaacacacacacctacgcagtgcagtcacgtatggacgctactaacatctgcagatacatgaataggaggatgggatgaagaaaataagccatactgacctcgacattagcggcaatcccggatctggcataagaacatatggcgacatgactatatgatgtcatgaagagaatgcagacataacctatacgacaacggatcgatacataccaacggtccatggggcactttaattgcttaaaaaaaaaaacaaaaaggg

SEQ ID NO: 50121 - DNA, 280 bp, Zea mays
  Clone ID: MRT4577_145706C.1
ctacggtctcgagtgagttccttgtgccccgctgatacatctgggtaaacatcgacatcgtagagctgttcgttggtttgaattgtaacagtgctagaacagaaggatgcccgttcatcatggttaccatggaatttagtccttgatatgtagctggaaatgtgaatgtgttgagtgtgaaactgaccgtgagctggaaatgtgaagtatggataggggaaaacgtcgacagactttgacatcttgtacaatacgaaataaatagcctggctgttttctt

SEQ ID NO: 50122 - DNA, 401 bp, Zea mays
  unsure (1)..(401): unsure at all n locations
  Clone ID: MRT4577_145707C.1
cacgcgtacgctgacgctttgtctcgccccctttctcttcatttttctaaccgcgcaccnatcanaaggtgccttccttctactcgtcggcggacacatcaactnttcccctttcttacgaaataacatcatgaataatactgctcacccacttcaacaagccccaccttgaccgcttctacttccttaagccaatctcgcacaagccaaattgtattgactcccatcctcattgatcaacttcaaggtatccaccttcattcccaacattggttatgtttctgacaagtcgaaacatcactaccttcccaacaattacaaaacacttcttggtccacaacgtatcttacctctaattgctcatacatcacaacaccacctacttccctcaaatttctcac

SEQ ID NO: 50123 - DNA, 303 bp, Zea mays
  Clone ID: MRT4577_145708C.1
cccgacaagccaaacgaagccgagacacgggcagggactccaccggcaccggagcagggggcaaggggaagaagggagcggccgggcgcaaggcccgcgggccaaggaagaagccggagacgagggccgagaaggcttgtccccagcgggggggcagccgcaacgggcgctactagaaaaagggccgccacgcgcaggggggcagcaccggcgcccccgtccacccggcccgcagaccacgaataccacgccgcggaggggcaggacctcgccgggaacgccggcggggacaacaagaagacc

SEQ ID NO: 50124 - DNA, 307 bp, Zea mays
  Clone ID: MRT4577_145709C.1
aaaacaacagatattttatttccggaaaatgcataacgctaataatttagggggggactgaaaccacctccacgatcttgatgctcactttgacaactgaaaagagcattgttttccaaggccgcaatcccgtttaaacggggtgcctgaatctaaaccgggttttcttccatgaaaatgaaggcaaaatgtaagatgggtttgagctttgcttgcaacacaacgcactgacgggattatttccagcagtttttccaaattcaccgagtccaagttcatccgcatggatccctccagtgatgaatgc

SEQ ID NO: 50125 - DNA, 1169 bp, Zea mays
  unsure (1)..(1169): unsure at all n locations
  Clone ID: MRT4577_14570C.1
ggtcctggtggagctcatctcgtccaagcccgccgtcaacgtcacccggcaccgcaacgagatcaacctggccggcatggccatcagcaagatccagaagtgccagctggaggagctcgtcgacatcgacctgggctccgaggccgacccggccaccaagaagacgatgacggcggtcgccgagctggccttccgttgcctgcagcagaacggcgagatgcgcccgccgatcaaggaggtgctcaagngtgctcaggagcattcagggcgaatcccagacggggaaggccggagacaaaatcaaggacggacccctctctcccaccacggttcatgctccgtgggagagcagggccacgacgcccaacaccagcagggactagaccagtcggtcagtgtcaaggactggagaccggagaagttgtttgtgttgctgctgtgtgactgcgaggcatgccagattgcctgtcatttattttcaggcttcgtagtccggttcctggtgatgtaaatatttgttttgttggtgctgtcaggacagagggaatgcacatacatatgtaagagtggcgaatggtaagatacatatatacacgggtacatactgaataaatagatagatgtcgcttgtgactaaaaaaaaaaaaaaaaaaaaaaaaaaggttagtccttgaggactgagaccggccgaggtttaattcgtgtttgtgttgctgctgtgtgactgcgaggcatgccatctattttcaggcttcgtagttagttcctggtgatgtaaatatttgttttgttggtgctgtcaggacagagggaatgcacatacatatgtaagagtggcgaatggtaagatacatatatacacgggtacatactgaataaatagatagatgtcgcttgtgactaaaaaaaaaaaaaaaaagcggacctaaggttagcccttgaggactgagaccggccgaggtttaattcgcgtttgngttgctgctgtgtgactgcgaggcatgccatctattttcaggcttcgtagttagttcctggtgatgtaaatatttgttttgttggtgctgtcaggacagagggaatgcacatacatatgtaagagtggcgaatggtaagatacatatatacacgggtacatactggataaatagatagatgtcgtttgtgac

SEQ ID NO: 50126 - DNA, 579 bp, Zea mays
  Clone ID: MRT4577_145710C.1
tttttttttttttttttttttttttttttttttttttttttttttttttttttttttttattttttttttaaattttttttttttttttttttttttttttttttttttttttttttaaaaaagggacccaaaaaaaattagggggggggggggaccggaaaaaaaaaaagggcaccccccccccgaaaaaaaaaaaaataaaggtaaaaaaaccccaacttccaaaaaggaaaaaaccccacgagctaaacaaccagctcagaaaaggggcccttttgggaaaaaaaggaaaagaggggtttaaaaaactccccttgggccgccaccaaaagggggagggttttgaaataaattccccccgggggcattaggtggcccatgggagaaaaaaagccaccccacccggccgtaggagccccacacccccgccggggagctttgagaaaaactcgaggatttcttaaaaaaattagtcgccaaaccccggtcaaaaacacgaacgtggggggaaattggaaaaaaggcctttaaataaaaaaaaaaaattttaaattcttccctaaaagaaatccgcccgg

SEQ ID NO: 50127 - DNA, 329 bp, Zea mays
  Clone ID: MRT4577_145711C.1
gggcaaatccgcagccataaaggttacacaacagatccccgtaacatggaatgaagctagtaaggcgtgtcttaacacagcatttactgctgagcgccatttgttcacagagcatatatgtcataaactattaaattgatgaaaccgtgccatggggccctcaaaaacaggagcctttcaaaaccactctaatggacaagaatgccatatgagagtgccctgaaataatatttaattaatgccgaagcgacaacccaatgacctatcgcggcaaacaggcttaactgttgtggctgttgctgctgtgcagatggttgctgttggttatt

SEQ ID NO: 50128 - DNA, 242 bp, Zea mays
  Clone ID: MRT4577_145712C.1
cgggaagtgcttcccacagatccacttcagccgccgccgcgcgtagcaagcaggagcagcaaggatgccggctggccacgggctgcgctcgcggacgcgcgacctgttcgcgcgccccttccgcaagaagggctacatacccgttcacctccttagctccggacctactgcatcgccgatgaccttgatgggaaccccttcgacctcggactctatggtgtcgacggagccgacgttcaaga

SEQ ID NO: 50129 - DNA, 1118 bp, Zea mays
  Clone ID: MRT4577_145713C.1
ggccgcttttttttttttttttttacgagctgaacacaatgtatttacatatagagtagtcaggattgcgcgcttggcacaatttacatgtacatacaggcagcagaggctgtgagcattcaatcaggccctcgggatagtgttcagatgtcaacatggccaagccacgctagcctcaaaagaccaatatggcacactttacaataagcttcaggggaaacaggtggcgacgaatctaatacactagctaagttacagtgaatgataccgcggtgcatgcagttcccgaggatgttgcggttttgatgcactggatctggatacagttacttggcagctggagaacagaactcatgtctcttccacttgctcttcctcttcctggagaaggttctccctgttgtcatgggcccagaagccacgcacatctacaagcatgctggcgatagtcccgccttgcttgcaagaaagaagatctgatagcgagatcctgagaggatctgcgggcttcaccatgtcccagatttcatccctcacatcttcgatgcaaagctcgtagttcccgccctcaatccatttctggtgtacatctctaaatagagtgtggatgtctgcagttgtaaggaacccccttccattaagatcaaggcatctaaataaatatgtcaagccttcaggggtatctttgttttctagagccaaaacaaaatcaagaaagctttcgaagtccatctcgcgactgtttccacctccaactttgctccggcggacatgctcatcaaaaactctttcaatgaaaatctcagtcaatgtgccatctgcatattccttgagttcttgtttgctcagtgtaccgtttgtatccttatctagtgcaagaaacatgtcacatatgcgctgagctgaagttaaggaaaaccaattttctgcctgctcgacatcagttacctcttcctcgctttcctgatgtagttccattagctcctgaagacaattgctcagcaacactttcttcatgcatgctttcccccgtttgtgtggatcacagaagaaaaagaacttgtgtgcagctatgcggcagaacatctgaacaaatgcagtaggcatgtcacgcaatt

SEQ ID NO: 50130 - DNA, 308 bp, Zea mays
  Clone ID: MRT4577_145714C.1
agggtgagcacgctatcagacgttacgaatctgggcaagagcctcccgctgctggtgaactatgcgaagctatatgcccatctaacgcaattacaattgaggctccacaacgtgaagaccgtagtcgccacaccacaagggatgatatagacatataccaaatgcatttactgggggttctgccaagaggcttgaccattccctgcatattcagagcggagcctaacttttagtgtgctactgagacacacgaagaactactgtacgacaagaataaattgttccagaatggtgacccgatgtaaaac

SEQ ID NO: 50131 - DNA, 224 bp, Zea mays
  Clone ID: MRT4577_145715C.1
acgatcacggataggctcctcatctggtgatacttcatgattgcagacgtgcgctccaggatgggcgcggagctcatcacgagatacgcgtaggagctccccatgacggacaacgtgatgcacattgtatgcatagagtgtacgatccagtgctatatcacctttgagcactgctacacgtaccacgactacttcgtgtatacgtacattaattcgacgacggg

SEQ ID NO: 50132 - DNA, 285 bp, Zea mays
  Clone ID: MRT4577_145716C.1
gataaacggaggcccttttgtttttcaatagaaggggcgcaaattggccaaacccgaggctgcacactatggctataaagcgaggtgcaacaccccccaactgtggactctgcaaagatctacctggtgtgatacccttagactatttagctccagattggccgaaagctcaaccatatgggagcattcttcctgttaatccaatagttacaataaccgaggtttcaataataccatgcaaggacggattggttcataaaagcaacaaaagacttcatgggccct

SEQ ID NO: 50133 - DNA, 262 bp, Zea mays
  Clone ID: MRT4577_145717C.1
ataaaagtcaacaacaatatattattgggtcccattcaaaatcactactcactctttatacttcaccaacaggcggatattgatcgatcttttccgtcatacatgtatggtgtagatcggttggtagtggagtttataaacacaaagttttttagacaaattaaaaaaacagcctgttgttttctttccggcctattattattgggttttgtgttccacacatcaagcacctaacaggtttaggctttaggggctagagttt

SEQ ID NO: 50134 - DNA, 211 bp, Zea mays
  Clone ID: MRT4577_145718C.1
gtgtttgaaaaatacgcatcggagatagagtgacttacaaaccctactgatgtgacaggcatttctaccattccattttgactggacggagcaaaacgcacaccatggtgacaactgacaggattcacatcatggctgagaggggtgtacacttgacaccccttcttcaaaaaaccagcaggtggatagctccatcctcaccctcgctctg

SEQ ID NO: 50135 - DNA, 771 bp, Zea mays
  Clone ID: MRT4577_145719C.1
atgttgggggatgctggcacgaaattttttcacgcaaatgccactatcaagcaccgctacaaccatattttgtctctcgttggcgttaatggcactgttgttacctctcatgtggacaaagaagaaatgcttttccaatccttcaaagatagattggggacttctcaaccaacatctatggttttcaacttgtcttcgctgattcagcctgttagcaacctgtcaacactggaaatgcccttctcccgcagtgagattgatcagatcataaagaatttaccttcaaataagtcgccaggtccagatggtttcaacacggattttgtgcgcaaatgctggccggtgattgctacaaatttttatgagctttgtgataaattttatgatggatcaatctgcatggatagcattaatggttcttatgtgactctcatccctaaacacagctctccggcctcggtgggagattacagaccgatatcccttctcaacacaagtatgaaagtgctgactaaacttcttgctaatcgtttgcagttggtgatgaccaaactagttcaccagaatcaatacggcttcctgaaggcaaggacaattcatgactatttagcttgggcctttgagtatatatctatctgtcacaagtcgggtaaagaaatggtcattttaaaactggattttgaaaaaacttttgacaaattagagcatgcggctatcattgatattctgaggcataagggctttggggacaaatggatccactggatttga

SEQ ID NO: 50136 - DNA, 553 bp, Zea mays
  unsure (1)..(553): unsure at all n locations
  Clone ID: MRT4577_14571C.1
cattgggtacctcgaggccggccgggatcatcactcacaagccttcaactcctctactacactancacttccttcaaaccaaaccaaccaaccaccccaacactcaaaatgtctgctcccaacgccaacaaccccaacgagggcatcatcggccaggccgtcaactctgtcaagaacgccgccaactacgtctccgagaccgtccagggccagtccgctgaggcctccaaggagggcaacaagcagcaggccaagggcaacgtccccggccaggactccatcaccgaccgtgcctccggtgctctcaacgctgctggtgacaagatcaaccaggagaagcacgagggctccgccgaggccaacaagcgctccatctaagtactaagtacttgagcactggttcgacatttctcttcgattcagaacgataccactatggattatgagcgatgagcactgcgactctcgcctggttacgacagtaccatgaattaatagccataagataccaataaatctctttacaactaatttgagaaaaaaaaaagcggcc

SEQ ID NO: 50137 - DNA, 264 bp, Zea mays
  Clone ID: MRT4577_145720C.1
accgacccatcgcgtccggcggcagtgcgtacagaggatcgtctaacataacagcatgaagatggtcatcgctggcgtcgtgtgcctggctctgtcagctgccatcgcctctgcaatgcagatgccctgcccctgcgcgactctgaaaaaacatgtacgtacgctagctccatcctgacgacgatgatgggcgcctgccggctgtacccctacgcggagtacccgaagcagtcgagcttcacccggtggcggcggccccctact

SEQ ID NO: 50138 - DNA, 570 bp, Zea mays
  Clone ID: MRT4577_145721C.1
taagaacatgccgcaatcggtccagagcgcccactccttatcagccgatctcgaggtagctaaaacggacgcacagccctaggcggaaagcagagaggaacgcacagcctgggggagatcggaacaccagaagggagggcgcgctacgcaggtggtcccggcctaggagctgctgggccaaaggcgagcctgtgtaccgggtgcgatacaaaggaggctgacgaggacttcaaggctggaaggatcttctacaggaaggaggaataccaaggtgtatgaaatcatgcgaagagacgatgatgaagatgacgacggcctcgttgcaaatgacaaggctaaggaaatgcgccatagatcaaaggacccgcgatagagccatgctacccttaaatgaggaggacaagcgtgccatgacagcaagaatggacgctctagaatggtcttgaacgtgcaggtgccagcattaagggcatacgccctcaggaagggggagggaaggccacggactctgctagagagaacgcatacactattacgataggtccagatgaatgtggggcaggcaagaag

SEQ ID NO: 50139 - DNA, 366 bp, Zea mays
  Clone ID: MRT4577_145722C.1
cttaataatacttttttttattatcttctttcagatatgctgcattcatggttagatcgaacttcgaattctacaatgcctagtttttcatacattaacgaaaaaatgcatctctgtaaaaggatgatgtttgttaatagttacaactttgtttaaaaaaacctctatttaatggtgaaaattccttgttcattttagacaccatcaccttcacttaccatgataattcctgctgcaacaacaccgtatcattttcctttcctgcaataccgggaacttgccacaagagaaggccgtttttttgctttgccaacctgggcagccagccgtaaggggccattttctctaaaaaaaaacctgccccca

SEQ ID NO: 50140 - DNA, 173 bp, Zea mays
  unsure (1)..(173): unsure at all n locations
  Clone ID: MRT4577_145723C.1
gctcgaggacctgacctaacagtaacaggctgagcggacgacggtggccatctccgacccgggtgcattccaagctcggggcatatatttntatatcatacanataactgggacatgtaaacattttttgggggtttgggttttcaggtttgtcacaaacaggtcactggctc

SEQ ID NO: 50141 - DNA, 256 bp, Zea mays
  unsure (1)..(256): unsure at all n locations
  Clone ID: MRT4577_145724C.1
ctgactcgttgtgtattcatcggcgctgccgagctcgctagactatattcaccgagctagggaccagtggaattctaacagtacacgatacatgcatntagacaggccatccacaattatttgaatgtcaaactcaatgagacagggcacaacaccagtgacttatgtaagctcattacatactcatatatagagaatgaagctatggatgacgaagggtttatcccggagctagcattgatcaccattggaggag

SEQ ID NO: 50142 - DNA, 1470 bp, Zea mays
  Clone ID: MRT4577_145725C.1
atgactgcagccttcggcacttgtccgaagcgaaggttaaaccgggtaatggatgctctgaactttgagtatcctgactatgagcgactggaccgaggcaccgaaggacagaagagaaagagagttgccagcgtcctgaataaagaagatgctaaattggtgaaagatgatgaagaaaatctgataaagagaaagctgaggcctgagccgaagacagatgcttcgaagaaaagaaaagttgcggctccgaagcagaaggcaactgatatagaagaagaaactgttgcaacaccttctgccaccaacgtggaggaaatcttaaaagtaatgactgaatctttgcctatcaagctaagtccactagggccgcatctgacgaagctttttcagaaggaaaaggagccctcgataacgaagaaagcagctgggccgaaaaaacgaagaattgttacagtgacagaagttattgaagggacaccaccaccagcttcggcttcgaaggcactagctgttgagagcgcaacagctaccgaagctgcacctactaaagctgcagctgccgaagctgccacaaccgaagatgtacatttagaaagcaccatttctaacattgataagatacttctcgacatggccacagaagaagctgccgtagccgctgaagaagccatggctacagtacctgagaagaagaaggaaatagctcaagaagcttcggaagaagaaaactttaactttcaaaacttaattgggcaagaattgtcggaggctaagaaaaaagagttgagagaatacgccatatcctgtgggtatcaaccaggggcactactcttcagcggtgttgatgatgaaaaattgggatgcgtccgagatcaaattggagcgaaggttatcggtactctgtcaacgagtattggtttcccgaagcttgagactgacataagccgctaccgacgacaacatcttgtcggtagtttattctattctaatttcaagggtttagaaagcaaattaaaagatcaagcagctgctcttgaaaagaaggatttcgagcttcagacaacagaaggtttattggcagaagctaaagctaaaattgcaaagttaaatacggagcttctctcgaagtcagaaagcttcgaacaagagaagcagaagttaaatgccaaatttaagactgaggtcgagaaaagttcgaatctgcaaaaatcattgacagagcttcaaaacaaatgtctggagttcagtagccgtccttcgactgaagacttgccaggggccttcgagcatatcgagggtgaaattgatgaccttgatgaaattatagctggacatggtgatttctgtgccttggtagcttctcggggcacaactgtcgccttcctgaaatctggttgcacacatggaaaggatgacgaagctgaggaacaagttgacgaagctgaagagcacaaagccgaagctcaatag

SEQ ID NO: 50143 - DNA, 2388 bp, Zea mays
  Clone ID: MRT4577_145726C.1
ggtacccgcggccccctctcgagttttttttttttttttttttttttttttttttttttttttttttttttttttttttttggacgggtcctaccacatccacaggggaatttcttttccattgcccacccatgggggggttaataaaaaagggagagggggaaaaagaaaaaaaaaaagaaggttttgaaatgaaagctaaagcgcttgaatacacaagctcccaggctcgaaattgtttaagagagcaaacaaggccgattacagcagttgggggaggtttacagggtccagagatcaaacttaccataaacagattcaatgaaccccccgggcattcgtctaatcgcctttttttcggggccgcatttgaagccggggcaaaattttgctcggaaaccatttttataaaattcacaagggaccctacttttcctgttcgaagctttctgactttgagagaagctctgtatttaactttgcaattttagcttcagcttctgccaataaaccttctgttgtctgaagctcgaaatccttcttttcaagagcagctgcttgatcttttattttgctttctaaaccctcaattataacttcatgttttttatctttaagatcttgttgcattctcaaagctttactcaacagcatactctgtgcacaagcaaccttgaaattggaatagaataaactaccgacgatgtgctgtcgtcggtagcgtctaatgtctgtctcaagcttcgggaaaccaatactctttgatagagtaccgataaccttcgctccggtttgatctcggacgcagcctaacttttcatcgtcaacaccaccgaagagtagtgcccctggttgatatccacatgatatggcatattcttttaactcttctttctcagcctttgtcaactcttgtccaactaagttttgaaaattgaaaatttcctcttccgaagcatcttcagccatttccttctccttctcaggcactgaagccatggcttcttcagcggctgcggcagcttcttctgtggccatgtccagaagtatcttatcaatgttagaaagtgtgctttctaagtgtacatcttcggccgtggcagcttcggcagctgcagcttcagtaagtgcagcttcggtagctgttgcgctctcaacagctggtgccttcaaagccgaagctgacggtggtgtcccttcaataacttctgtcacagtaataattcttcgttttttcggcccagctgccttcttcgttatcgagggctccttttccttctgaaaaagcttcgtcagatacggccccagtgaacttagcttgataggcaaagattcagtcattacctttaagatttcctccacgtcggtggcagaaggtgttgcagcagtttcttcttctatatcagttgccttctgcttcggagccacgacctttattttcttcgaagcatctgtcttcggctcaggcctcagctttctctttttcagtttttcttcatcatctttcaccaatttagcagcttctttattcaggacgctggcaactctctttctcttctgtccttcggcacctcggtccagtcgctcatagtcaggatactcaaagttcagagcatccatcacccggtttaaccttcgcttcggacgagtgccgaaggctgcagtcattagttgatcttcttttttagaataattaccaagaatgtcgttgcacataacttcaattgtgtctaaccattcttggcaatgtactttgaaatgtttcttgaatttataatagtagggcaaccaaacaagttccccctttttcttttctcccttgagcttcggcatgtcccactctttcaaagttgggaacactctaaaagccaagaattcttgcaccagatccccctggctttggaggacccagatgtaaacactaagcctaacgatggcgttaggaattagctgatgaagataaatcccaaacttcttcaaaacatcagcaatcatcccattcaaaggaaatcttaatcctgctttacagaagcttttgaagactaccacctcatccttttccggcttcggagtaatttgctctccgccaaaacgaaccagctccttctttgcttcactgaaatagcctaacttcatcagcttagacatatcaccttcggtaatggtggatttcccaaactccaggtggctgggtttagatggcacggcgctgtaatcatcttcagattcaatttcctcagcatcaacctgctcagcttcagcggcaggtgcatcctccgatactaccagccctgaccgttgcatcacttcagagattggagcggtttcggcaccttcggcttcctctccgtcgcgagtaaccctagctgttgagcgtaccctagccat

SEQ ID NO: 50144 - DNA, 863 bp, Zea mays
  Clone ID: MRT4577_145727C.1
ctcgactttgacacagatccggaggatattatgattagtggagcgccaaatccagaagaaattagaaattctgtaaaaagggctaatgagaaccatttggcaaatcgactacgctattctcttagggtctatgcttctgtgttgtatctgcagctaccagattactttaggatcatacttcgagggcaagaagttaagcgtcatcgcattgccgctgacctaatatatcctgaatgcatcagttataaaccacatagttgtggaataaaagaggctacggttcttacaaccattggattcttaaagggtgccccgactattagcgtgcacggatttaatatctatcataaaaatcgccttattttgccatttcatagagttctgaatacttcaagcagcaaaggtagaagcgtctctggggtgttggaggtagacttcatcaagcccactcatgacaaacaggacttcgagaagtcacagctgttccagaagctgatcaaccgcctgaaggagatgactaacgagtactgggaactttacagtgacaagattggatacatgaaaaagccacgcgtgagtgcagctcctcttcctcctccagtaatgctgccgatagcaaatggcactgctgaaccatcagataggagcgcacctgctccgacgcaacccttgagatcgcacagcaactacttgaatgcagttccaatcgcctcagcgccccctggttttcactcagcacctgtcaaagcagagagcgttgcaccaggagcgcatatgggctactccccgtcctcgctaaacgtgcagaccatgcaagtcaacgggataaaatcgccttccatggtgcctggcaccgattcggt

SEQ ID NO: 50145 - DNA, 392 bp, Zea mays
  Clone ID: MRT4577_145728C.1
cgctctacaacgccacagcttgcgcccgcaatggcgctcgtctccgcctgctggtcctgcaccaccgacgccacggcgctccccaggaatgggcagcactcgtcgtactgcttcctcggcggcatgacgctgctgagacaggccgaggcggcccggccgtaccacgtcgtgcgcgccacggcagacccgaacaggccgatctgcttccccggcagcaccctttcggcgtggatcgactgcaggctgaccggcgacttcgagctctatccctgtggcactggatctgacccggagagcctgccgacgatacgtgcacgcggagctggtgcactgtcagttaccgatgctcatctcggcgggcatgttcatacccgagttcctgaccaagatcg

SEQ ID NO: 50146 - DNA, 540 bp, Zea mays
  Clone ID: MRT4577_145729C.1
aaaagggaaaagaggctttcagccgtcgcagccgccgccgcctcgtccgccgtagcccagcgcagcagcacagtcgattacatgatcttagtcattgctgagacgtggagcgaggtcgagcacacgcaggacatgctcaaagcgtgtggaccttgctggactgttcaatgagagcgcacagtgaacgtgaatcgactatgcatacgattaccatcgcgtgtgaacacgacgaagtacctcgacgtacactgccggagcacgcgcgtggaagatactgcaagaagacggctgcagtagggcgacacgtgccagcgccgtcacagcgctctctcatgcatgcatgatgagcgcacagcgcgcagcaacgggatggaatgtccatgtctgcacgcatactcatagcataccattgaagatgcttaccgctgctaaccgaatccaacccgatccaggacgcgatcatacagcaatgatcaccagtgaggccgccagaggatgccgacccctattggtgttgctaggaggtgtgacgaggcatat

SEQ ID NO: 50147 - DNA, 339 bp, Zea mays
  Clone ID: MRT4577_14572C.1
tattttcttattttttttaattaatttttttttttttttttttttccaacgaagggggaagggcatccaataatggaatacaaacatattttgggaacatacacttaaaatgatgggataataacatatgtccaagggaggcgtatagtgaaccccatgatggaatacaaacaaatttggtaaacatacacacattaaatgattggagaatcatgcatagatctttaattttagccaaaatcaggaacgataaagttgtctttgtagtttttataaggcactttcatctgtgaatttttgaaaaggcgccccccgttagttttgaaaaaacccgggatt

SEQ ID NO: 50148 - DNA, 304 bp, Zea mays
  unsure (1)..(304): unsure at all n locations
  Clone ID: MRT4577_145730C.1
ctgccnatttagttgaaccaagggcgtcttcgcacagcacaactcggcccccgtttctgcgccttgtatggaataaccactgaaccactggctaggctcccctcctagcacgattgctatatatatatatatatatggcttgtcctgcaattacacgaacttcctgtttgctgattgttctatatatgaatgaacgcaatgcaaggcaccattatttctgcgggccatggccttaaggaaaccaagttcttggccaactctatgggctgattataaagcccaaattcaatccagagccccttct

SEQ ID NO: 50149 - DNA, 479 bp, Zea mays
  Clone ID: MRT4577_145731C.1
aaacacaaatacgtgcatataaattttaaatccggctcgagacggacatgaccgtaagcactttacagatgaacatgaacccaaggagcgaccatggatcgataatgacgggtgctagagacaggatcttatttagacaccgctattatatttatacaactcgtagaccgcctctggactatcgtgcgccatagcctgaccggctcagttgcaactgaagcaagagcagccggatctgatgccgcaattgcaggtgttgcatgcgcatgcgccaccctcggtggccgcctcaaatccggctgctcttgccttggtggtcggtgcgccgaggaccgtagtcttcatgctactggagaggacgatctccacgttaggggacatgcagttgcatgatctgtcagatgatcagatgtagccacagtcttacttgtcgatgctgcatgacatgatcacaggcgatggggagcaggctctagctg

SEQ ID NO: 50150 - DNA, 1933 bp, Zea mays
  Clone ID: MRT4577_145732C.1
gctccgtcatccatcctagcaccgtcatccatccatcggctggatttcccaagcacgctgctgccagggtctccagctgcaagcacgcatcagcattccacaagcgaaatggcggcgacggcagccgtgccttcttggcgccgggcattcgcggcgctcttgctggtcctgcagctgcgcggcgcgcggtcggcgacgttcaccatcgcgaacaactgcggctacacggtgtggccggggctgctgtccagcgcgggctccgcgccgctgcccaccacggggttcgcgctggcgccttcggagtcccgtgccgtggcggcgcccgcggggtggtcgggccgcctctggggccgcacgctctgcgccgccgacgccgccacggggcggttcgcgtgcgccacgggggactgcgggtccggcgacgtgcagtgcagcggcggcggcgccgccccgcccgcgacgctggcggagttcacgctggacggcagcggcgggctggacttctacgacgtcagcctcgtggacgggtacaacctgcccatgatcgtcgcgcccagcagcgcctccaccacggcagccggcggcaagtgcgcgccgacggggtgcgccgcggagctgaactccgcgtgcccggcgggcctgcgggtggaggccgcggcggacgggcccgtggcgtgccggagcgcgtgcgacgccttcggggacgcgcagtactgctgcagcggcgcgtacggcacccccaccgcgtgccgcccgtcggcctactccgagttcttcaagaccgcgtgcccgcgcgcctacagctacgcgtacgacgacgccacctccacattcacctgcgccgccggcagcaccgactacaccatcaccttctgccccgccgtgcccaccagcgtgaagtcgacgggacagaaccctcaggccgccgggttaccgcagcagctgaacaacggcaccaccatggtcttcttcggcggcaacacgcagaccagcagcgccgccgcctcttctgccaactctctcttcgcggtcaccgtcaccgtcacagcagccgtcgcgctcgcgctctcgcgctcgactcgcctgtgaccggtcatcatcgctgtcaggtgggccacgcttatcagaaaaccggtgagcatacatacagtatgttgagcccctagcgactgcgacggaacatgagcatagtattctaggcttgtattgtagcttaggtaggacgagtagaatttcttctattgtttttggcttcgaaaatattcttttcttccgttgggcagagactacaggtgtgggggtaattctttcactgttctttctcctagttaggtcgtatgcatcgggaggatgtgttgtaacctcaaaagcgattattggttgattgattcgattggggagataatcaaaattcaagcttctttcttctctcaaaaaaaaaaaaaaaaaaaaatttttttttttttttttttttaatctaatccttaaatcttatagtctaaaatttagagccaattgtcatctctacttacacctactttaagcaccttttttcatcgacaatattcttcctcttttgtgtaatttcccatcacgattgttgaccttgaacggatccgccttatctccttcaacaaaggttcttgagctttccaaaattcatgattgggttttttttccataacatgggagccgcatggccttccatttctaacacctaccatctgtcgtcttcaagctcttagctaggtggctcacaacgttcatccacctatctgagtttcttgccaacacttcaacttcagggttctggtcttgccatttcaagttttcagctctgtcctggtggacagcgttgatcggcaagctaaggcagaatcggtacaagctgctcaggtagccacaccatcagaagtagtcgctggtgagacaa

SEQ ID NO: 50151 - DNA, 188 bp, Zea mays
  Clone ID: MRT4577_145733C.1
gggggcctccaaatcaaaggaaaaaaaaataacgggtccaagttacatcccaatccatccatgggcagaggaatgggatgtttccacgaggctcggcactggggaaagggcatacctttgcccccaaagaggaggatcggggggggagctatattaaaaaaaggcatctttaagaattgggattcaac

SEQ ID NO: 50152 - DNA, 182 bp, Zea mays
  Clone ID: MRT4577_145734C.1
gcgtggccgtgggttttcatcgacgaacgacgacgactctgccgcgcgcgtttaggcgcgtcgccgccggccacccggccgccacttcgacgcggctgtggtggtttaaaattctccggctcgccgcccacggcctcgctgcacgtagttgcagatcaagctctctcacgagggtttatttt

SEQ ID NO: 50153 - DNA, 701 bp, Zea mays
  Clone ID: MRT4577_145735C.1
caattacgcaggactctacgtctagatgagaaaaaaaagcatcgcgtgcagggtcgacgactgaatgagcaggatagatctgaagggcgtgccgacagagccgacttgaaaattttcaagcgaaacgatttgaatgagcaaccaaaacaaatcattcgtcaagctaggctttatataccttgtcacattggccactaaactatacttcagcagcagtatagcaagttagcataacaaaataaagccaatctgcgaaagaactgtcggttaatcataggaagaaacaagaaaaaaagaagcaagaagtagaagagaaggggacgacgagtaactaacctgccgctgctgcagtgctgcctgcgtgcctgccggtggaactgacgaactctactctagactgaccgaggaagatgagaccagagtggcagatacgccttcgcccttgcctggcctgaactcgaaacgttccggtctcgttccgtcggcggcggcgtcaagtcgatgcaagcagaagcaggagcaggagcaggattggacgacgggaggtgaaaccggaaagcagggctgcaggggacaaggcgacatggcattgggaaccacgaaagcaaaagcttgggtttctcactctgtcaagtttatgtatatgtatgtaaaggaggaacgaaggtggccagggcatgaacccgaatgattgctatcct

SEQ ID NO: 50154 - DNA, 288 bp, Zea mays
  unsure (1)..(288): unsure at all n locations
  Clone ID: MRT4577_145736C.1
ccgggagacacagggggaggcatnactatccggggaccgggggctaccacacacagcnccaagccacnggagcngcaccgggacaggagcggcgagacgcccagagacgacaaggccaagaccgacaacgagcaagaacccaacccacggcacgagngggagagaacacggccacggcnggagaagcccgaggccgggcggcacaaccaggaccccaacggcggccggaagggcagcancgcnccgcaagcgacgccgcncccgcaccggaaggggaaccngnacaac

SEQ ID NO: 50155 - DNA, 657 bp, Zea mays
  Clone ID: MRT4577_145737C.1
agaatgtctagactaggacaagtaggtggggatgcatgcacatgtctaggaatggctgcatggcttggcccatgccagtagggtggctggtggcacctcagcatatgctgtctgatggcaatgaagcggtgcagcaatacaagcttgtggatgatcaatggccaccttaaacgctttcgagttagctgtgcatgtgtttccacaccatgttggtgttcagatatgtatgtggccttacttgccacaggttatgcaatcgtaagccaattgcacctttaaaacaagatcgctgactagattttttaattttcaaatcctatgactagattacacccaccacacaagttttggtacctataacgtgccttagtctctatgatttataccattcatttctgtattattgcttgaatgtttattctcactaagtatattcatcaaggtacgatctaattatttcacacaaggaagagcttgcacttctcatgacactggagcaggggaaacctatgaaagaagcccttggtgaggtcaattatggtgcaagtttcatagaatattttgcagaggaagcaaagcgcatatatggtgatataattcctccaactttatctgatcgcagattgttggttctgaaagcacccgttggggtagttt

SEQ ID NO: 50156 - DNA, 814 bp, Zea mays
  Clone ID: MRT4577_145738C.1
agcggcggtcggtcttgtcgctccgcctcggaactccacacggtcacacctcgctcgctctcgctcccgtatcgcggtttccttttcgaagccttgctaggtttagctggggcctccgtctatcctgtcaatggccccttaggcggctgtacttcagacttcagaggtgacgtgaggcgtggggacgcgcgtagctgattggttcgaggaggcggggatggacccggacttctcgccggcgagtgggggcccgagctttgagttcgccttcaactcggtcaacttctctgaccgggtgttgcagatcgagatcgtcgctggggatgacgccctcggggccaagggcgccaccggcgaggggtgctcatctcttgccgactgggcgtgccaccgcaagcgacgacgggaggagctccgacgcgacaaagatccagcaaactgcaaagttgaagctgaagaatgtgatgcctacgaggaaggcaatgagcctgtagctatgatagaagaatctccgcctgatattgaggcagatggtgaggatggaaaaagcagcgactcatactgtagtatggagtgtactcaggttttgagagttaagtctatgtacatcagctctgcaattctagctgcaaagagccctttcttttacaagcttttctcaaatggaatgaaagaatccgatcagaggcatgcaactcttagaataactgcttcagaggaaaatgcgcttatggagcttctaagctttatgtatagtggcaagttgacgacaaaccagccaactgtcctgctggatatagtgatgatcgctgac

SEQ ID NO: 50157 - DNA, 193 bp, Zea mays
  Clone ID: MRT4577_145739C.1
ctcaacactcacacacgctcttcttctgacaagattagaacaagagccacttacttaggtatcacggaactctcttaacaagcgttacataccagcagtctcctgtatctctagcaatgtactagcatggacctctcatctgacaagaaaaccaagtaatgaccaggaccaacatcaatcacccacattctcc

SEQ ID NO: 50158 - DNA, 663 bp, Zea mays
  Clone ID: MRT4577_14573C.1
cctcgaggccggccgggaactgccccctctccctggctcctgtgctccccatttccagttttccacccgacgagaggcaaaagcctcgcgccccacgccggtccggcggcgacccccgccgtttcccgcagcgaccaagacgcgggctgtggtcgcctccgccccgtgcctacccggccgcgggcgtagcagcctcctggaccgcagcgccctcccccctcctttctcccgagcgacttctgatccagccgcgtcgcaacaactggtcgttcgagtctgatctccgccaccgcggcggaacgaggcgtctccggtccccgaggcgattcggtgaattcgaagctcgtacgacgggatcctgttgagttttgacaatgcggggctacgggtacgagaccaatggtaaccaccaggaagtggaagatgagtacggagatgagtactatgatcaagatgagtatgatgaggaaggttcgggtgctggggatgagtattttgaggaggaagagcctactgagggacaaaaggagatcctagaattgagagaacgattaaaagagcagattaggcgaaaggcaaaggctgctgcttcctgcacagctggcagatcgtcttctttacaaatacctcagccagggacaatttggctctttctttggggca

SEQ ID NO: 50159 - DNA, 3142 bp, Zea mays
  Clone ID: MRT4577_145740C.1
aaaaacccccagatttctctatatcacgacgctacccctccacgtcgccgcttctcgtgttcttgttcgtctccgcctcaggcaaactccacacggacacggtcacacctcgctcgctctcgctcccgtatcgcggtttccttttcgaagccttgctaggtttagctggggcctccgtctatcctgtcaatggccccttaggcggctgtacttcagacttcagaggtgacgtgaggcgtggggacgcgcgtagctgattggttcgaggaggcggggatggacccggacttctcgccggcgagtgggggcccgagctttgagttcgccttcaactcggtcaacttctctgaccgggtgttgcggatcgagatcgtcgctggggatgacgccctcggggccaagggcgccaccggcgaggggtgctcatctcttgccgactgggcgtgccaccgcaagcgacgacgggaggagctccgacgcgacaaaggtgagagaggatttctgattatctttttttttttcatattccctagaatttgcgaattggctgtggattccaaactggggaaagacagtggttggttgtttgaattgaattattccatgcgttctctggaacttttgaggtgatttgatttgaccttaccatgtgctcgggctttactaaagccttcggcctcaagtgctaaaatcccccctttctattcaaaataggaagggtattttagcccccctcgttcccctccaattccctgactcccaaactagccccaagtgttgtgaaggcactttttgttttaatcgaggctgtgaaatgtgggattgtggttctctttttcaatcctttgagttggcgtagtggcaattcagattatcatttactaagcaatctgttaccaatgaaatgaccaagtggtggaaattagtggggataattattgcaattgacacttggctgtgggtgatatgttctgctgtattggcacgatgtcattcatctctgcatttggtttgtgcaaactaattatttgtatgccctaccttgatcaatgcctgtaatatgatttacataatcatgaacatatgaacaacacactcaagaccagcctgtgcgaccgaacaaagcttgcaagtttgggatgtaatctctttggctattgctgcatcggttgtaaatgaggaagaggaaaggagcgaggaagaagataaagaagggagagtgtcaagggggtgcatatcttggctgttggatcgatccaacacccaaaaaatgtgattgaagccatagccaaatatcaggcaactgataaggatgctgatctatattagtgatatttttttgtgctgaccatcatgccttggcaatttactatctcattttctttcactgattgctgtaatttccagtttattcccatcttatgtctttcatagttctgcatgatcttcaactatcaaatttatcatgcgtataacttttgaactactgttttatggacccagaatctagaaaatacatgccagatccagcaaactgcaaagttgaagctgaagaatgtgatgcctacgaggaaggcaatgagcctgtagctatgatagaagaatctccgcctgatattgaggcagatggtgaggatggaaaaagcagcgactcatactgtagtatggagtgtactcaggttttgagagttaagtctatttacatcagctctgcaattctagctgcaaagagccctttcttttacaagcttttctcaaatggaatgaaagaatccgaccagaggcatgcaactcttaggataactgcttcagaggaaaatgcgcttatggagcttctaagctttatgtatagcggcaagttgacgacaaaccagccaactgtcctgctggatatattgatgatcgctgacaaatttgaggttggttcctgtatgcggcactgcagtcaattgcttagaaatttgcctatgaccacagagtctgcactgctctatctggatctaccttcaagcatttcaatggctgctgcagttcagccattgacggacaccgccaaggaattccttgccaacaaatacaaggatttgactaagttccaagatgaagcaatgaacattcctcttgctggaattgaagccatcctatggagcaatgaccttcaggtcgcgtcggaggatgctatctacgacttcatgataaagtgggcacgtgctcaatacccaaaattggaggaaagacgtgagatcttgggcacacgcttgctgccccttgttcggttctgccatatgacctgcaggaagttgcggaaggttattgcctgcagtgatctggatcacgagcaggcgacgaaatgtgtcacagaggcacttctctacaaagctgatgcaccacataggcagcgtgcccttgcagcagacgtgatgacatgtaggaagtatgctgagcgagcttacaaatatcgcccgcttaaggttgtagagtttgataggccgtaccggcagtgcatagcatacttggacctgaagcgagaggagtgcagccgacttttcccatctgggcggatatactcgcaagctttccatctagctggacagggcttcttcctctcagcacactgtaacgtggaccagcaaagtgcgttctattgttttggtctcttcctagggatgcaagagaaagggtcgacaagtgttaccgtggattatgagttcgctgcaaggacaaggccgtcaggcgagtttgtcagcaaatataagggctactatactttcactggcggtaaggctgttgggtaccggaatctctttgcgatcccgtggccgttattcatggctgatgacagtctcttctttatcgacggggtattgcatctcagagctgagctgaccataaaacaaccctagatgaggccgtgtttgtgccgcgcgcgtgtccaaatccatgcaatggtgttctgcagtgtagaatatggaaatcttgtgtgctgttttgttttgaaaacgacaactcaattctctcttgttcagttgtttgtacacctgaggaggatcatgtcatgttttgtactctcactaaactgtgataagtgatttagctaatcaaactttaagttcaccagcaacaaaaaaaaaaaaaagcgggc

SEQ ID NO: 50160 - DNA, 359 bp, Zea mays
  Clone ID: MRT4577_145741C.1
gtgtaataaatcagcagggcagggctttgactacaagcaagatatagtaccagcaggggaatactaatgcatcggattctaatattgcaacatatgcacttcccatacacggatgcggtgattagccgtgcctacattatttgccaaagctgaaaaaaagcctctcagaacaaaaaagttctgagaaggaggacttaagaccagctttggcgctaaagggatgctccaataagatagatactgctactgcagcttctatgaaaacacctagagatttgtgtcatcctctgggagaaacgcgaacatactgttgccacacttattattgggtatacgaatccctaatgttgaattaacaa

SEQ ID NO: 50161 - DNA, 359 bp, Zea mays
  Clone ID: MRT4577_145742C.1
cccacgcgtccgccgccgcgcggcggccgaggaggctactactagacaagagatgcgacgtgccaaatgggtgtgctgaagctagcaatggcgtgcctagttatctgttagcgtttgctctgtgctcttctatggagctccgacccccggactggaattatcccgtaggcctttccaggtgctactttacttcagctgctgtgcctgtgcaactcgtctgggcaagttttgtggctcgctcgtggttttgtagctaggttaagcgagtgaagttacactcggtagcgcagtgtttcctccatcggacgatatgcgagattgtttattctgctgttaatctacctaccttcctatttcgt

SEQ ID NO: 50162 - DNA, 558 bp, Zea mays
  unsure (1)..(558): unsure at all n locations
  Clone ID: MRT4577_145743C.1
gtgctggatgcgcccttaagcagtggtaacaacgcagagnactttntttttttttttttttttttttttttttattttttttttttttttttttttttttttttttttttttttttttttttttttttnannagggnaaaggtttattttaaatgttaaaaatttaaattttttaaagttcattggcattttaccggaccaattttttagggaattttagcataaaaatttttttttttgaagttcatggggggacccaattttatttttaaaatcaacgaaataggggggggattttcagggggcattttttttattctttttgggtaatagggtactaaaagaccaatttttttccacaaagtttggggtaaaccggaggggaggtttccagtttgaattaaggggtgttccttttttttggggccaaaaaaattttgatttttttggaaccatccggggttttttgggttgttaccaatgtttaagggggatttttggaattatccataacagtggggggcggtaggggctgtattttagagggccaaattcgcc

SEQ ID NO: 50163 - DNA, 285 bp, Zea mays
  Clone ID: MRT4577_145744C.1
ggcaagactctttaggctatgttgggatactttagtatttatgccaaaacatataggttgaaggggattggagtgaaaattagtttaatttataccaaaatccccataaaaaaatgtgttttggggggaatactaaagtagtcaaacaaacccctagggaattaattttacactaggaacatgtttttacacaacacacaacaacaacaacaacggggggggggcaatctatagcgaatttaattacaccggacccttgggcggacccttgggcggacccctggg

SEQ ID NO: 50164 - DNA, 327 bp, Zea mays
  Clone ID: MRT4577_145745C.1
ggcacaactacattggcacatgctgtgcttgtggcttactattcacaggatacaacaagaagacggagatacgtgtaggtagaccgtacctgtcctgctacaaaaaaaaaagttgaggatttccttgctccatagtaacagtccatcacacattatagcttgggattcgcggaagtggagcccttcctcctggtgcaaagccgggtggtaaaatggacatctgtaaagcactgtatgcgtggggacatgctgccgggacacagattacattttacatggacatgactcaggggtcgatatactgtactgcatgcacgcaatgttcac

SEQ ID NO: 50165 - DNA, 428 bp, Zea mays
  Clone ID: MRT4577_145746C.1
aaacaccccgaaccgagcctgcatttcggcgccctcatcaagcgaggcagtccccaacacactactacccaaacaaagcacaaaaaaatcggaagaaaagcaaattgcagcgcgtaccattccgtggcggggcctgatcgaggctggcggcgtcgagggcgaagaagcggctccgctagcgcgatcgccgctaccgacctcccgtcgccgcgagggggtagttactagttagcgccggagcgaccgacacgcgagccctaggcgggatccgcgctgccgccgcgggcgtgggtggagtccgcgggatcgcgacgtgaagcgtgccgctagatttggattcggacctgcgtttcgtgtttgtttgtttgtttttccttccagggaggaaggcgactagcgctagcgcctaccgaggcgcgggcaggtga

SEQ ID NO: 50166 - DNA, 261 bp, Zea mays
  Clone ID: MRT4577_145747C.1
caattggttcaagataaatggaggatttgttttgttaacaaacgctagctctttcgagctagctaacaagatggctgattggctcgtcgacaagaaagagctagctaacgagatggctcattggctcgtcgataaaccgagctcgggatacaattgaaacgggtaggatcttgcctgagtcctcctaggagtagcaccggggcgatgaaactggtgctgggatgacacaaattgaccagggcgcggtactcgattgggaat

SEQ ID NO: 50167 - DNA, 380 bp, Zea mays
  unsure (1)..(380): unsure at all n locations
  Clone ID: MRT4577_145748C.1
acaacccagccaggccaacaccaacgccccgcgaaccacccngcccaagtatctcatggtatgtcaacactaataagttgcaaaagaatacatttccagtgtactaaacatgacgagatcatagatctagataatgattcatctcactctttgatagaacaagtacataaaacccgttgagaagacattcttcctctaaagattggagctacttcatacataactcgacccctggaagtcgatgagaagcggtcgccggagcagatcgacgccgacgagaagtcgcgtgcccttcgcgttcgcttgcggtccaggctaggatattttccacccccggtcgatggggcgtgtttcccgggctagaatgacgagtaacgatc

SEQ ID NO: 50168 - DNA, 316 bp, Zea mays
  Clone ID: MRT4577_145749C.1
ggtttacgtggtatgctaataagagcatcagatggaaaaggtgttatttaccaggcgcgaaacacgaaagaagttgcattggacatgatcaatatgcatgaaaagcaggaattcatggatggagaaaagaatgttgccataatatcagaagcaggatcagctggcgtttttctacatgctgatcgaagggcaaaaaatcagaggagaagagtgcacataacactagagctttcttggagtgcagaccgtgcgattcagcagtttgggagaacccatcgttctaatcaaacttctgcaccttgatataggctttttt

SEQ ID NO: 50169 - DNA, 329 bp, Zea mays
  Clone ID: MRT4577_14574C.1
gaggtacacaaaggagcgagaggttcacattcacaaccttctcctcggagagggcgatgccataacgccacggagcctttgaactctacgaaaatccaaggccaaaaatgacccctagcacacgcacaggcacaagatcaccgaggaggtcgctgccgcggcggccaccggcgccggcggctacgtattccactaccaccacgaggaagcaaccaagaccacaaggacgcctacgaggccagcggccgagaacaagcaccaccacctgttcgtatgaccgtagtaccggccggtacgcgaccgacctacctagctgcggctcacacaac

SEQ ID NO: 50170 - DNA, 573 bp, Zea mays
  Clone ID: MRT4577_145750C.1
gggctcacactcccacgcagccgccaccaggagcagagtccttcgtcacctcttctccggcgaagaacccccagtcgcccaccagaccacccgttaaacctcgtcgaagggagacggcggtttcctccgcaaacctcaactccgaggcagggcctaaaaagcccgacgagcaccctctcacccgcagccacatcaccggccaccaagcccccaaggatgacttggccgtctacacttcgttttcggctgctccctcgtccaagtacatcaacgcagcaaggagggttaaccacattgacgcgctcgcgaggccgagcggaatcaccgcagagggccaaggcgcgaagggcgaatcctcagcagctccctcagccccaactccagatgttgccgaagcacaggccccaggcgccgaggaggacgacgacgatgatgccgaccctcccggtgaggagaccgaagacgagaagaaggccgccgaagagcgcgccgcagccgccaaagcctccggcaagaagaaagaatccgggatagcatcagcgccacccgacgcgaagccacgggacgatgaga

SEQ ID NO: 50171 - DNA, 204 bp, Zea mays
  Clone ID: MRT4577_145751C.1
agtgtactatacgctgaccacctcacattatgtaagaagctgcccagggggcctctatctcacaccggcggaatctatgagccgctttaaggctcactcccagacacccttcctcggatcccatggtgctgggatccgagaccgcgacgtcatcctcatcctgacgctcggagaacgccttactcagggccggctgggacggct

SEQ ID NO: 50172 - DNA, 386 bp, Zea mays
  Clone ID: MRT4577_145752C.1
gggctaggccattttgaagcccaaacccgcaccaattttcatcacgggcattttcccacagaaggaagtttttaggggcaacgaagggcgtcatcagctatttttttttcgaaaacttaataacagctgaagcgtcagtttgcgccatacaggtggcccttttttaaagacgactggctagcttttttggcccaaaaaaatggttgcgcccgagccaattccaagctccattagaggggccggggcctcctccactgggtgggggagagggcatccctttttttggacgaacaggttcacttttatgtccttcaggtggaagaagctttcgcacaaagattttaacttcccgacagttgttgtcccaggcagtttttttgtcaggg

SEQ ID NO: 50173 - DNA, 326 bp, Zea mays
  Clone ID: MRT4577_145753C.1
aattccaattccgcgcctggcctactcactctcctggtactcatgacgcctgcatttccacttctgagctcacattattagtcagaggcttgggatccgtactcgggcaacacaatctcgaaaaactattcgatgcacataattcaggaccacattgacttcgctacccttcttaaatacatcaactagctcaatcatcacatcaatcttgaccgtgctatgcacgatgcccagaccattcgcactattgctcatgaaaacaacactttcttcattccaactggcaccctaactttaatgcccctcactaccgatggttacattta

SEQ ID NO: 50174 - DNA, 231 bp, Zea mays
  Clone ID: MRT4577_145754C.1
ggcatgagcaggacagagttggccagacggcgcttcggtggcgctgacagggctgcttgcccttgtccttgccgcgtcctactggtccaagctgacaacgtacttcttgggggccgttttccccaagaactttgccgccaggggggtcttaataacgggggcttcttcgggattggggagcacctggcctattagtacgcgaagcggggagcctacctggcgctggtggcg

SEQ ID NO: 50175 - DNA, 321 bp, Zea mays
  Clone ID: MRT4577_145755C.1
cacgagtacgcgcccctcatctcctcgctctcccgggacggcttcaacccgtcctccatccaggaggccacgggcatctccggcgtggagcagaactgcctggtcgtcgcgtcccaggtccgcgactcgctcctcgacgaccgggccgccgcgttcccgcccgaagaagctggctgagcagggcatagctgctgcggcggccgaggtggtcatcgtggtccggccgcccaaggacgaggacgacatggttagcgacgaggagtgggactgatgactgatctggagagcgtactggttgtggagatgccaatttgtctttct

SEQ ID NO: 50176 - DNA, 336 bp, Zea mays
  unsure (1)..(336): unsure at all n locations
  Clone ID: MRT4577_145756C.1
cccacgcgttcgccctcgcgttttcccacgcgtccgactagttctagatcttgcgacagtactcactgacgctgaggtccccctggacggctacggtggtggccgtggaggcggcggctacggcggtggcgggcgccgatcggtttcggagaagagaagcaaatcaagatgtttctcggctcgctcccgcggcgcccgagcaaggaggctgcttacaagcagctgcngtcggacatcatcatcatggcctgctgcgccgtcgtgaatgcggccaccccttacattctgcaattcgctcgcccgcgacggcgacattcaggaactcaagctagatct

SEQ ID NO: 50177 - DNA, 711 bp, Zea mays
  Clone ID: MRT4577_145757C.1
cctcgaggccggccgggccgggtttcctattatgatttacctttgtgcacttgccaccttgtcgcctcctcataatctcagatgcgcgtccactgcgatactatccatcctgacatcttgcatgattcattccatcatgtcttggccattttgaccaggaaattccgcaaacatgccatgtaaatatggcatacttgattccatgcatgctgcagcattgcgcatcatcgccacgatccatgaaatcacaacgtggactggctcgttcttaaatgatctcatccaggcctgacgaggctaacatgcgatacaaaaatgcaataatgcctcaagctcgtttcactctcttttactacactgaagcaacaccgaaggggtgctaccctgccttttgagaaacgctcgctcttttctctacggtgacaacgccattggtgtactctctgctgcagacgtaacaccttcattcttttgctgcacgtgaatgccaaggcgagactatgtactttttggctacacaaccttgatcgcatgctataatagaagctaactgaatcttagagatgctgatgagatgtaaggaacttatgcatctgctgacgtggtctctagcttgactagggaaccctatcagggtgtatcctgcctggtaacaccaacgcataggatgcgcacctcttgtatacagaacctcagagatgctgctatgtg

SEQ ID NO: 50178 - DNA, 231 bp, Zea mays
  Clone ID: MRT4577_145758C.1
aaaaaaaaaaaaaaaaaaaaaaaaaaaaaattaaaaaaaaaaaaaaaaaaaaaaaaaaaagagaaaggtaaaaaacactaaaaaggttccgactctaaaacgcccttccttgccatgctatttcttttctatcgtgtcgcctaatctaatttcactgccctcttcgtttacttcggtaacccctgtattgtcccttgctttgccccatcttattcgtttcgcttcccatcc

SEQ ID NO: 50179 - DNA, 1178 bp, Zea mays
  Clone ID: MRT4577_145759C.1
taagaactcggcatgagagacgtcaatgttttgttgtcacgctggtgtgctcagtagaataggcatcactcgatgtggttcagctcttctggcctgagaccttgtcctcccaccagtagatgaacctgaggttggcaccctgcttgtccatctcgtagagctggtaccagtggtccgccacctcggatcccagcacggcgccggtgatcgccccgaagccggtcgccagcaggtctccgtgcggcgccttggagtacttgcggccgaggccgcgagcaaggccaagaatgccacacccacccatggcgctcctcctctccccgaccgtttccttcctggtctccccgtgtgctccacgccctcgagctctctccgctgccgccaatgtatcctaccccgcctcaaggctgcaatgcaagaacctgtcctcccaacagagccctctgaatgtgactgctacctgtgcttctttcgctgagaagaggctggttcttgtccatgccacggcagagggttctgaggctggtgcggagcagccagaagagccgaaaccagcgaccaagatcgaggaaatgccgctcgagtcgaagcagaagatgatcatggagcaaagagcgcggatgaagcttgccaagaaactgaggcagcggcgcaagcggcttctccgcaagaggaagcttaggaagaagggcaggtggccaccgtccaagatgaagaagctcaagaatgtatgaacagcgtcaacgttgactgccattctgccttggttttatgtgttgtgattgtgattgcacagcttacgaattttgctgttcagaatctgagacacacggtacctacaaaatgtaactctgttttcacgtaatttgaatcttcttacagtctgaaaaaaaaaaaaaaaaaaggcccctactagtctagaaactgaggcagcggcgcaagcggcttctccgcaagaggaagcttaggaagaagggcaggtggccaccgtccaagatgaagaagctcaagaatgtatgaacagcgtcaacgttgactgccattctgccttggttttatgtgttgtgattgtgattgcacagcttacgaattttgctgttcagaatctgagacacggtacctacaaaatgtaactctgttttcaggtaatatgaatcttctaacaatcccaaccaaaa

SEQ ID NO: 50180 - DNA, 565 bp, Zea mays
  unsure (1)..(565): unsure at all n locations
  Clone ID: MRT4577_14575C.1
ttttttttttttttttccgggaagttgacagtgtgcattgcttttagtgatctaataaatggagctacaccaaaagatgaatatcatatgactcttgccaatatgtttattgcatgaaattgggttataaattaaccttcatacgcctattgccaatattttttttcttttgtaataagtgtggcaaaaagaaatcccttcatgcagcagggtacagtgttcatagaagaaacggtggtgggtggctcaacttaggtcatcgccatccagcagaggctcgatctgccactcgctgccatagtaggagttgggcaggccaagccagaacttgaaggcctcggcggcacgcttgcgctctcggcgccggtcctggcgcgcttgcgatgcatgcttgctggtgaacatcctggagtgcatctcaatgtacatcttcttgtacttggtcttgttgggagcgatgcccttctcctccatgcacgccacgatctccagcgccttcttgaagaaggccgccctcacgcacacgtccgccagcgcccccagcagttcctcgncggcctccttc

SEQ ID NO: 50181 - DNA, 292 bp, Zea mays
  Clone ID: MRT4577_145760C.1
ggttggggttttttttttttttcttttttttttttttttttttttttttttttttttgcccgaggcaaaatcgacatttcccaacaaaatagggaacatcccggtaacttgggggaacaaattcatagggggagataaaaaaactttggtttaccaggaaaccccaaccaggacagaaaccttccccttaaattaccccaagaaaagttttttaagtcctttccaacataaaacaaaatttaagcccaaacatgactcccatttttctttcctttgtttcccggacttaaaa

SEQ ID NO: 50182 - DNA, 152 bp, Zea mays
  Clone ID: MRT4577_145761C.1
gaaccgaactccagacgcagagcggaaccacgacctcaggtcgccgtccgcctcctggccgactgcggcagagactacaagtaagcttccgccggaattccgcgccagcaggctccagaaaagggcaggaaacggccattacgacgcctagt

SEQ ID NO: 50183 - DNA, 739 bp, Zea mays
  unsure (1)..(739): unsure at all n locations
  Clone ID: MRT4577_145762C.1
ctgatgcagtgcttcaactgacaacaaaggaacttctcctttcttctggcaacgctgggtcctagccccgccctcggcaagcaaacgccggcgggtgaggcctaagattccggcagcatggccgtgcgcctccgtggggctcagctcggcctgctccttggcgctacggcatgggagcatgtagatggtccaccccggaggaatgcacgtcctctgcatcactccttggaacaccgtcagcagcagcgagatgaaccccagaagcatcagctcttctttgaccttgaggagagcctcgaagagcgccttctggttcttccccttgaacgtctgccagccgtcgccagtggacagtggacgccaccaaggtgcggcattaaattcaggagggagacgaggagcgaggcgtttcgatgctcaggaagacacgcaaggaaaatcggttaccttgccgaggtaatgcaggcacctctcggcggcgagggagatgaccacgatgagggagcagaccgccgccacgatccacgtcggcgtgaactccagcgccgttgactccgattccccgctgccatccgccattccgtgattccctccctcctctcgcgacgcggctccgggcgggctgcagtgaagtggttcgcccggaaccccggacgcgggccggcagtggggttttgtttgcctgctctgagcgcgccggcttttcctgtcgttggcccaancgtgccggcccggccgg

SEQ ID NO: 50184 - DNA, 476 bp, Zea mays
  Clone ID: MRT4577_145763C.1
ggggagccgaaaatgggagctttttttggttcgccccacaagcaaaatccttttgcataaaatttcaccaacaaaatcgctttttttaaaaaaacacttttcagcccccacaaatccaggagggcagggggggctttagcgctttaccaaacaggcctaacaagaaaacggaagttatgggaggaggggggcccacttggcttgccctctttatttaaattccccaacactttttgaacactggggggcaggggggaacaagagccggctaaattattgaaccgggactgatctggactggaacccgctccaaattttctaccgagctttgggctctggagctcgcacccctttgatcaaggctgatcggggggcagggggacccaaacgggaggggggccctaaactacggggaatttttggccggctcgctccacctgcaaagggaggggaaagacaagcatttcccgggggcc

SEQ ID NO: 50185 - DNA, 612 bp, Zea mays
  Clone ID: MRT4577_145764C.1
cattgggtacctcgaggccggccgggatcatatagccactaccgagcgaagtcgctatgaactgtggggcgccgaagaggaaagggtctactacgacgaaaattgaagaacgccgagctggagtcatggcggctcgctcctggtacggcacgggagggcctacagggacgcgtcacaagactggtcgctcttgaggaagaaatgtgtctagaatggcacatcctctgccgcgtcggcctcttctccgaacataacaaaaaaaatctcatcgtcgaactcacccggagcgaagtagcttactctgccatatgattacctggaccgaacgtatgaagcggaacacctcactggaaaggtcccagcataatatggctacgatgatccagctaagtctcaaaagcaatacgactgcgcctagagccagtgctaataactgatgcctgccagatgacacaggcacggggactgtggagctgtactgccagaagtctggaattgtgaaggaataactgctttcgcataggacttctgggtataataggatgccctgcgtcctgtcatgccagacgctgagctatatctgaaaaaggatgctcatccatctgacggact

SEQ ID NO: 50186 - DNA, 328 bp, Zea mays
  Clone ID: MRT4577_145765C.1
gggaaaaattacaggccagggggttggattttcctgaaaacaaatttttttgccaaaacaccgggcggacatttaatagccgatgggggaattggccgggaaggttacaactaaaactccgactccggccatttgattggggccccctccggcaatagcagggggtaccctgggcatggggggaatttccggttcgaaaaccctttggggaaactggcccacctaaaccatggggggccgatcaaattcgggatccggggtgccccaacacgggatcctgaaaacctttttgacctcctccacgttaacgtcgccccgcaattttgta

SEQ ID NO: 50187 - DNA, 247 bp, Zea mays
  Clone ID: MRT4577_145766C.1
gttttcatctttccctctctttttgcttttagctcgccccttgcgttcgcggtaatagcggatgttttcatgtggatggagcttttcgtttgtgcctgctcctgtgcctgcgcctcgccgggctcgtgccgctgttacccttcttctttaggtgacctgttctgtgaaggggctcttcctctctcaatctggtagctttgctctttcgctccctttttccgtatcatatatctccggttcctttttt

SEQ ID NO: 50188 - DNA, 357 bp, Zea mays
  Clone ID: MRT4577_145767C.1
cgtaccggaccggcagttcgcgcgggcgcacccacgcgtacgcagacgcgtgggcggacgcgtgggcggacgcgtgggcggacgcgtgggcggacgcgtgggctcagaagccgcaagactgttcagctagaacatccgggagtacaaccgcagtgtccgcgagattgtggagctcagcgggacagccgactagtgcacgaggatgcccatcgtgcccgcgagggcacaatatggaaccatgaacgaacatccttgtgtctgtggttcgccagacctgtcgaaccattgagtaagtccacttctagtctgtcgtcgtcacgcgctcggtctgatccgagagatcggttgcccaaggtg

SEQ ID NO: 50189 - DNA, 145 bp, Zea mays
  Clone ID: MRT4577_145768C.1
gagagcttcaaggctgcccgccgcggcccttcttccggacagacttaatctatggcacgggcccttgaatcgcgtgcgcgcgaactttacatacgtgtcgactgccaacacaatcgccttaccctatttattcacctggcttaaa

SEQ ID NO: 50190 - DNA, 376 bp, Zea mays
  Clone ID: MRT4577_145769C.1
ttttttttttttttttttttttggacaaaggccaaaaggaagatgccgcgtcatgttcattttgaaagcttttacaagtactgccaagcctttgacgctgtctttattatgatataaagctgaaaattgtgaagctgacctggggaaattgttctttttttgcccaagcccatggcaatctgaactttgaccagtggccttttggaaagggtcctatctgagcaaatctttagactagtaagccttgtcaattacagatcattttttttttttgggtatgtgcctacatagcctgcctgagaacatgggaacaccgaacacaacacactaatgtgattaattttctgaagaagccccatgttatatgttttctaag

SEQ ID NO: 50191 - DNA, 253 bp, Zea mays
  Clone ID: MRT4577_14576C.1
acagatgatcaatatcgcaaaaattcaggggggaactgtaccttcaggcagtgccacctatacctatatagagaaagattaaaccttaacaatcacagggtcataaatatacgctgagtgaaatagatatccaattagactatcacacaatatacggatcgtaatcataatatgacaagcctgctatgtctatacacttacccaacttacattatatgcgttcctatacctgatcagtacagagataaagaaa

SEQ ID NO: 50192 - DNA, 449 bp, Zea mays
  Clone ID: MRT4577_145770C.1
agccgcggtccggacggcagcgcgtgccccgcgcgccccgccccccccccctccccccccccggcagcccgagcccagcccgcggccccagcagcagcgccgcagagcagccccagcagcagcgccatggccgggtggaacgcctacatcgacagcctcatggcggacgggacctgtcaggacgcggccatcgtgggctacaaggactcgccctccgtctgggccgccgtccccgggaaaacgttcgtcagcatcacgccagctgaggtggcggtcctggttggcaaagaccggtcaagtttttacgtgaatgggctgacacttgggggccagaaatgttcggtgatccgggactcactgctgcaggatggggaatttagcatggatcttcgtaccaagagcaccggtggggcccccaccttcaatgtcactgtcaccaagactgacaa

SEQ ID NO: 50193 - DNA, 811 bp, Zea mays
  Clone ID: MRT4577_145771C.1
cctctgttcaagcgttcggtgacgttcacggagcgggacgacgacgacctggcggagcaggtggccaaattcgggtaccagcatgagttcgccgacatctcgtggttcccggggcacggacgggcggtgtaccgcatcgacgaccgcctgccgctggccgcgtccggcgagggcgccatggactttatcggcttccgcgccaccccaacggtcgtgatccaggccagccgtctcgccgaggacctcttcgagcgcgcgggcaacggcagcggcaaatgcctgacgtcgtgggtgacccacgcggcgctgtcggtggccggctacgggctgcagcggcggagcggcgggctgttcacggggtacccggtggtggggccgcagcaccggatgcaggcgtcgggcgggtgcgtgacggggcccgagaacgcgctgctgacggcgtgcccctgggacccgcgggtgccggccggcaccttcttccaccagaccaccttcagccttcccctgcgccgtgccgcggcgttcgtcaccgaggtgcgccggctgcgggacctggagccccgggcgctgtgcggggtcgagctctacgacggcatcctcatgcggtacgtgaaggcgtccacggcgcacctgggcaagcccgcgccgcgcggagagccgtcgagagacatggtggacttcgacatcacctactaccgcagccgcgaccccgggcgggcgcgcctgttcgaggacgtgctggaggagatcgagcagatgggcatctttaagtacggcggcctgccgcactggggcaagaatcgcaacctcg

SEQ ID NO: 50194 - DNA, 495 bp, Zea mays
  unsure (1)..(495): unsure at all n locations
  Clone ID: MRT4577_145772C.1
gggggggattgggcgatggagaggtggagaatgcggcgttagcgaggatgtgggggaggaacaagcttttttttttttttatttattaaattacatcttttttttttttttaatttatttctctttcttttattttttttttttttcttcttttttttttttttttttcctttttttctttgggggtgattttttgtcgttgtaagagggttgcggtgttggccgctgtgtggtggtagttcgggggcgcctgtgggtgggttnngacggaatctgggtttggggccgttcgctgggttggtgtgctggggtggggctgctggtccgtggctggggtgtttagttcctgcccgggcggcctctgctgggccttttctgctgttcttgctcgcgctggcggccggtcgtggtggttgttgggggcgctgtgccgcctttcgtgcgtcgggttcggtgggctgggcggtcgtgctcttcgggtgggcctgggggggc

SEQ ID NO: 50195 - DNA, 375 bp, Zea mays
  Clone ID: MRT4577_145773C.1
ccttctctacccactcttcctcagactttatcaactcatcctctcttcctttaacacgacttcctcatgacaagcgtagtttctttctccttacaaacaccctcaacattccacacatatagttctctaaaaaacccctttaaaataccaaatattacatatcataaatattccatccctcctctaaaatctaaccctcataaatccaaactctctgataaattaccatcctcttataaaattccctatcctaacactctattaatcatagtacatttcaatatataccattacgaccaatataaaattacttatcacatcaatgtcctacaattccaacatcataacctaacttacaccatttaaatttaatac

SEQ ID NO: 50196 - DNA, 356 bp, Zea mays
  Clone ID: MRT4577_145774C.1
caaagtagaataaaagagatgacctacaaaccatgcaacatacattgcgtggtcacagcgaagacaaggggcgcttgggttgcagatccttatctggggactgccgctacttcagatacatgactactagggtgatactctcattcacttgtctaggatttgtattagcttctgttctttaattgttgcatgaaggtgtctgatttgagcgcatatttgaggatctgcggattgtgctggtgtatttagtgcggtactgttcatgttcaggtttaggatcgcagttttattgtcactttgttgtgagcccgaacgcatctaccaacaatctattctcataagtcgtgccttatgtg

SEQ ID NO: 50197 - DNA, 1514 bp, Zea mays
  Clone ID: MRT4577_145775C.1
cggacgcgtggggtctggccgggatccaacgcaccctgtattccttttccgccgcacggcgtcgccgtgggctcggtctcgctcgccgctcgccgcatacggccgcagccagacagccaacgtactcggggcggttgccgggccggggtccgcgatcgatggctgcgcggcggagcaggggctgggcgcgcggcgcggcggcgttcgcggccgtggcgctggcggtgggcgcggggcggaggtacgggtgggacggtgcctccgcggtggcggcgttccgcgaggcccagggcgcgctggggcactgggcggcgccggcctacgtggccgcgcacgcgctcacgcttgcgctctgtccgccttacgccatcttcttcgagggcggcgccgcgctcatcttcggcttcctgccaggcgtcgcatgcgtcttctccgccaaggtcctcggggcctcgctctccttctggatcggcagggcaattttcagatacttcacttcagcaatggaatggctacagaggaacaagtacttccatgttgtggttaagggggttgagcgtgacggctggaaatttgtattgcttgctagattctctcctttgccttcctacatcatcaactacgcgctatcagccacggacgttgggtttttcagagattttctctttcccacagttatcggctgcttaccaatgatactacagaatgtttccatcgtaagccttgctggtgcagcagtggcgtcaaccacaggatcaaataagtcccatatatactcttacctgtttccagcaataggcattgtgtccagtgttctcatttcatggaggattaagcagtattcctcagcccttgctgttcctgaagagctgcaaagttcacctactaatggagatcacaatggtgacgctaagctggcttccgcgccatctaaaaataccggatctgggaaaactaggaagagaaggtaactgacagtatccccctgtattcactatttactacattgtgataccaagtaccaagcagctacagccaatgctagtcaaacatttggatttccacattggtttaccactacagtaagctgtcttgtctgttccatgccatgatcttttgggggggtatttaacagatgcgcaggcagctaccttcttgtttgtcaattgtcaatgagcttctgttcttgtggcagataatatcataaaatgttgtaacagatgcgcaggctcacatagtcacatgttgtacacccgaataacctggtggtttagatttggatcgtcctgagttcaattgtatcctggggatcaatattggttttccctccctaattattgaacttgacatgtgcacggtgtagtccaaccagtttatgttctttggtgtaacaatttaattcagaactgtgtttgcttttgtgtggttgtagagctgtggtgacatctgtctgctcttcgtacacaatccaaagcaaataatgcaatgaactccaaaagccgtacattcgtatc

SEQ ID NO: 50198 - DNA, 858 bp, Zea mays
  Clone ID: MRT4577_145776C.1
atggctgcgcggcggagcaggggctgggcgcgcggcgcggcggcgttcgcggccgtggcgctggcggtgggcgcggggcggaggtacgggtgggacggtgcctccgcggtggcggcgttccgcgaggcccagggcgcgctggggcactgggcggcgccggcctacgtggccgcgcacgcgctcacgcttgcgctctgtccgccttacgccatcttcttcgagggcggcgccgcgctcatcttcggcttcctgccaggcgtcgcatgcgtcttctccgccaaggtcctcggggcctcgctctccttctggatcggcagcaattggaaaccttttaagcttacatacaagatgcaaaaccttagggcaattttcagatacttcacttcagcaatggaatggctacagaggaacaagtacttccatgttgtggttaagggggttgagcgtgacggctggaaatttgtattgcttgctagattctctcctttgccttcctacatcatcaactacgcgctatcagccacggacgttggttttttcagagattttctctttcccacagttatcggctgcttaccaatgatactacagaatgtttccatcgtaagccttgctggtgcagcagtggcgtcgaccacaggatcaaataagtcccatatatactcttacctgtttccagcaataggcattgtgtccagtgttctcatttcatggaggattaagcagtattcctcagcccttgctgttcctgaagagctgcaaagttcacctactaatggagatcacaatggtgacgctaagctggcttccgcgccatctaaaaataccggatctgggaaaactaggaagagaagatag

SEQ ID NO: 50199 - DNA, 170 bp, Zea mays
  Clone ID: MRT4577_145777C.1
tcttgccgaagacggagctgttggtcgaggcgaccgattaccttcgcggcgagttctgctaagcgccttactgggatagcccttcccaggagctgtgttaccattgaagacacctcatgcgccatttatatccacgactctatggacctgagcggcgcagatggcttaca

SEQ ID NO: 50200 - DNA, 334 bp, Zea mays
  Clone ID: MRT4577_145778C.1
ttgtgcccacacgggcaggcggggaaacaaggggcggtttctcaccccgctcatgcggcagaacaccaaagaagacgcggtacagacggcagcccgcgaacatcgcctggacgctcggcgaggaccgcggccggtcgcaaggcgtcgtcaccgaccccgccggggtaatgaaagaaagcattcccttcagccgaagcgcctcctgagaagaagacgctcgtggcgctaaccgaatgggaggggctcatggctcggtgcccgaggaactcccccccgaggacaggaaccacccccggggggaccctaaccagggcgaccatggggcgcggaggcc

SEQ ID NO: 50201 - DNA, 336 bp, Zea mays
  Clone ID: MRT4577_145779C.1
gggttgttgttttgtttgagggtgggttattcacccccgagcccaaaatacaggcccacgcacttggtaacctggcacacagaggggaaaataccgggcgggggggggagattgtaaaggggactttggtacaaaaaccgggggaagggcataaaacccaaacggctggaaggcacgtctccccccgggatagggggaacatcgggggtcttcccctcaagggacactggcacctggccaaaacacgaaagaacgggcggggacctctcgtgaaatgaaagggaaagctaacaaacctggcagcttcaagaaaaatgtatgggggataccaggttg

SEQ ID NO: 50202 - DNA, 230 bp, Zea mays
  Clone ID: MRT4577_14577C.1
tcctgaataacaagcaacagctcatgagagctcgagaagctgcaatttgggagctcgaagaacgacacttaacagagcaaacacgagttgctcacacagcagcttaaagatcagtatttcatgcaaagacatcagctacttaagcgccacgagaaggaaacagagcaaatgcagcgttacaatcaaagacttattgaggaattgaaaaacagacagactcaagacagagc

SEQ ID NO: 50203 - DNA, 147 bp, Zea mays
  Clone ID: MRT4577_145780C.1
atcacacgttccttcccagctccacagtgtagcctcttcgcgacatgatctagatccaagtaatataagtattcttccaaccctgcaatatcatctccgcccgcactcctcctacaacaatctattgctcgtgccaaagtgatatgt

SEQ ID NO: 50204 - DNA, 565 bp, Zea mays
  Clone ID: MRT4577_145781C.1
cccacgcgttcgctcgaggggctaaaggccatatgtcccatgcccacccttgttgcatgtaggatcatattacgtgttcgactcttcgaggccggcctacaaatgctgctccctgggaagcgctgctaatggcccatatggtctggcgggaacttgccgtgctacagggcatatggattacaagcatatgctgggaccttgataacttacctaggttggcggaggttagaaatatgtaaccctgcgatagtgtatgatgactggtgggagatatactttcgctttgattgtggaagctgagaactctgaactatcttatacatgcagggccatgtgtttatatcttgatctgactctggatcctctgggaatgtgataattgacttctactgtggtatggtgctgtacccttagattggcaggtactgtgatatcaaagtcctgaccatgtgacgtgccagtatgatgacctgggctgtgcttgccgatgcctattgcataatacagtatgaagatactggctgcgttgctgattctatgcttgtgaatactgcgcttatgttga

SEQ ID NO: 50205 - DNA, 743 bp, Zea mays
  unsure (1)..(743): unsure at all n locations
  Clone ID: MRT4577_145782C.1
cgtaagagagctatacggaaaaggagccgccagggagaagaacagaacggagcgaggagccatggccgccaggaatttcttagtccgatcccccaaggaggaggaatccagcgctgccgtccgagaggctgtcttgttgggagggaagaacgccgccattgctggtactgtggttgcggttcccacgttggttgcttgccgtgtccttccttgggctaagcataatctgaactacaccgcacaagcactcatcatatcggcagtctgtatcgctggcttcttcatcaccgcagataaaaccatcctacggaacgcaagacagaacaccattgggaggatcgacaagtcgacttgatccaggactgtacagaaccgaggctgatgcgaatcgcgtcaaaactcccctctgttccatccatggatggtgatgcacgactgtacggcgattttcagtttcaggcttattttgtacctaaccttgcaatgtaaagactaaagagagttgctgcctgctagggcagtggaccccgtttgctcccaattggaagtggactaagagatgggatgcttagttaaaactgttgttgtgttgtcaaaaaaaaaaaaaaaaaaaaagagctgaaattgctaaggttatcggcggcggcggctacaacgcggnggccgattgctgatggaaagatgcagcttgagttcttgctggacgcggtggaccgttccctctcagggangagttcgaggac

SEQ ID NO: 50206 - DNA, 506 bp, Zea mays
  unsure (1)..(506): unsure at all n locations
  Clone ID: MRT4577_145783C.1
cagaatcgaatgtaaaattaagaaagaacacaccggtaatgatacctgaaaccgatctaccttccaccgactcaacgagcggaataccatcctgggatcaaaagccacccacactattacctaccatagaggagagtaaaccagaccagaagccgcaccaccatcggtgtcaatgcgcttacgtacctcctgcgtcgcgggcgaaccatgcgatctccacgagtaccaccgtgtaccgaacctgtggtgagaccatttccttaaaccaccttataataaatgacctaggagaccaggcaccaccctcgagtatagcgttaaaaataccccaggagcgcattatttttattaccttctccgcgcagcggccatgcgatgcgattccctcgccccgggaccgcgcaccaggaccgcctcatcancttaattaaatcgtgnttgcgagttaaccgtgtggtgcctgagtcttgtaccggcaggggcgacgcccgcacttgcgtgggcag

SEQ ID NO: 50207 - DNA, 301 bp, Zea mays
  unsure (1)..(301): unsure at all n locations
  Clone ID: MRT4577_145784C.1
cccacgcgtcctaaactaaacaacacctatttctctaaagatcacaatgatnagagcccgtgctgttttagccgtgctggccacctacttcttcnctgtgcccactcacgccgagcagtgctggtctcaatccagccgctcgctgtgccccaactgccttttcttcagccaattctggtagtgcatcagcacctcctactactgcggcaactggtgccaaaaccagtgcaactgcagcttctgcatcacccctaacccttctaacaaccgcggcatttctttcattattccctaatctctc

SEQ ID NO: 50208 - DNA, 242 bp, Zea mays
  Clone ID: MRT4577_145785C.1
agctatgacgatcctgtacacgtgcgtcagctcggatgctgttgagtataccaatctttcgatgagactaggtgacatcagctgcctactagaagcatcagatgcgcatggcatatcaaactttcgcaggccgctagtgctacactctacaccactatgctgtcgtgctggctatgcatgcgcatacacaactgtatatgcttagtgctactcttcgccggcggttccttttcttcttcccc

SEQ ID NO: 50209 - DNA, 377 bp, Zea mays
  Clone ID: MRT4577_145786C.1
cagaaaaaagggcttgtttttttatttaacctcttagagatcagggccctgatgggatgctacagcagctgccacgggggttcatccatgctgttacgttgcggaagcagatccatccttgctgattgctggggcctatccgaaaaggtgcactggtgtggaatccggaccacaaaagcatgtcatcacagaaattaaggacctgtctgaaaggtgcactggattgttaatctgaagcttaaaagcatgtccgcacacaagggactcctctgtcgttgcttcccacggtagcaaaacagaaggccaaaccggacatttcgccatcaaccattagttcgtaactgccggttgcatctttgccctttaatctgggatgc

SEQ ID NO: 50210 - DNA, 599 bp, Zea mays
  Clone ID: MRT4577_145787C.1
gggtacctcgaggccggccgggagccacccgtcgagctgctggctccagccagcgcccccatcatcccaacgtcgaccaccgctgcaaagtacagtaccaagcagacgcaacaagaactggacacggagagagagagagcgcgcgcgggggagcaaggagatacagctagagagaagaaccaaaccacgctacacaaactgatcttcatagtcgtctttcccgaattggggaagaaggcagcagccggccgcccggccagatctgggagggcttatcctactggctgggcttctacacccgttctggtggtaccgtctaccccgtggaagagtgcttatatagaggagatggtcccctagttaccttgttcttgccagtggcgccgttgctagggttggacttgggagatagtatggttcatgaggaatcgaggatgggattctgtccatttttttatttcatctaaagaaaatactcggcctaaggtgctgattattgctaggcgtactagctagattggtgccttttccggctatggttgtgagaaaatttatgacaaaagggccctatatacaaaaaaaaaaaaaaaaaagcggcc

SEQ ID NO: 50211 - DNA, 809 bp, Zea mays
  Clone ID: MRT4577_145788C.1
cattgggtacctcgaggccggccgggagagctgtctttacctgccgataattccgtcgcccttttttcgacttcaacattccagactcccttctactgcgagttctacgatactaggctgccacgtacaaaggtccaccgctctgcccctcccccaccgaccgtgctttgttgcgcccgcgtagaccgacagcaccacaacaccatacctgaagcttcagcaaaggaagcgtattctgttcgaacgattctgggagtattcgacttgagttacacgtggcaatccatctgaggaaggagaaggcgcaactcggttcaacatgttcgcatccaaacggctaggcaaggagctatctaaggtaccgtaatcctcctgtcccttgcgtattgcacagactcgcatcccctcggtcaagtcgacgcgcccaacgcacgatacacaaaaacatagtagtttcatgcatatatatggaatggtcgctaaatcagagggacagatgcatgagaagcttccgccaggcataacacttgttcaagctgacgacttccaaacctgggtcatggacatcaaagtcatggactcgaatcccatctacgaaggcgaaacataccgcgttgaagttcagtttctagtccgcagtatcctatcgaggcccccgaagtcgtattcgtccgcgatgaaactcatccgataccctggaacccgtatatctactccaacgggatcatctgcctcgacctgctagaccgctctggctggtctcccgtacaaacgtgaagaagcgtatgtgtgagcttgcagagcatgct

SEQ ID NO: 50212 - DNA, 194 bp, Zea mays
  Clone ID: MRT4577_145789C.1
acaaaaacaatggggaggggtattttttaaaatgcaatcacacacacaaaaacattggtcgcataaaaccacgataacatgacctgcaccttcccaatcaaaagaaggttaggcaaaatcaccagctaccatcacagattcatggggagatctcgccccaaatcacacttggatacccaacatctacagtaacc

SEQ ID NO: 50213 - DNA, 444 bp, Zea mays
  Clone ID: MRT4577_14578C.1
attcggctcgaggctgcatttgatttattgggtctcccagacccttacaaggtgaccatggcatttctagtggtgcctgctccacttggatccactactgacgaggcatatcctgacacgcagacgcctaatccagccacggaccctgatcgatcgttgcctgcacgaatacccaccaccgttgctgctgaccactcataagggcagccatgaccaggtcatgctactgctcatcctaaaacgacagtgtggggcatcatgccgatgagcatgtggcggataataggctgggagggggtgatctgcaaaagatttaacaaagggctgtattctacgcctaagcccttgaaaccggtcatataacccggaccggtacatgtagagtttccacatctccactttgtaccagcaattaaatcttggagctctcgccacagaacaatg

SEQ ID NO: 50214 - DNA, 210 bp, Zea mays
  Clone ID: MRT4577_145790C.1
tctgttgcatggacatgatcatcaaggacgtcaacctgtcggtgcccgatgacagcctcgacgctgatggcatacacatggtcggatcatacgggatcaccatgaccaacaccgtcatcggcagctcgcgactactgcatccccatcggcccgaaaacctccatggtgaacatcaccgtcttgacctgcggccctggcacacagcatcac

SEQ ID NO: 50215 - DNA, 470 bp, Zea mays
  Clone ID: MRT4577_145791C.1
cagggggaaaaggggttaaactttaataaaaatttcggttcctttttttttttaaaaggcccccaaaaaatcctttgggaattaaaaaaaaaaaaatgttgggactggtcctttgggataaaaaaaagttttttaaacgggggggggggggacccctagggacaaaaacaattttaaatttgttaaagccggtccggtttgaaaccaaaaaaaaagggggaccgaggtaacatgtccctaaaaggggggctttgatccccatgtttaaaaaccaacccggttttcccttttcgtaggaggaaaaagattaggcaaaaccccccgggggttttctttgggaaaaaatttggggggaaattccccggccaaatattttaaaaaggggttttgagatttatgggccgtcttttggttaaaaagctcccaaaaaaaggggttttttttgaaataaaactttttaaaaagaggtt

SEQ ID NO: 50216 - DNA, 364 bp, Zea mays
  Clone ID: MRT4577_145792C.1
cagttcctaaaattttgtaatattattatttgtccattagtgccactgttttggcatgaaagacacattaaaatttatctattacttaatttaaatacataaaaccattggaaattcataactaaaaatccataactccaaaattaataatttctgttcatatgatctcattttaatgtgtatattattatcatgtattttgtttacatgtttggtgtgatgttaattttccctttatactatgtatgtttatattgatgcgagtagacgagcaagctactgtggatcctgaggttcagcagatagaagttgctgagcaagagctcgttgaaggcaagttgtgccctggatcacttccttttta

SEQ ID NO: 50217 - DNA, 365 bp, Zea mays
  unsure (1)..(365): unsure at all n locations
  Clone ID: MRT4577_145793C.1
cgtgaccaaccagaaaaagaagttacatttccagattctaaaaaaaaaaaaaaaaaaaaaaaaaaaaaaaaaaaaaaaaaaaaaaaaaaaaaaaaaataaaaaaaaaaaaaaaaaaaaaaaaaaaaaaaaaaaaaaaaaaaaaaaaaaagggaggggaaganngnnttngtgcangaagnaacaaggngntgnatacaaggaggggggtttgataaaaccctgagtaggngagtgtggaactttatgggtggaggttaaatgtttaagattagatattaaaagactngatantggtgccctnattncggnatgttttactagacctaatcaatatttcgtttgagattatcgtcgtatatttcac

SEQ ID NO: 50218 - DNA, 726 bp, Zea mays
  Clone ID: MRT4577_145794C.1
gccgggtacgtgaccgtgaacgaggcgcacggccgcgcgctcttctactggttcttcgaggccaccgccggcgccgccaagaagccgctcgtgctctggctcaacggcgggccgggctgttcgtccatcggctatggcgaggcggaggagctcgggcccttcttggtccagaagggcaagccggagctgaaatggaacccctactcgtggaacaaagaggctaacctgatgttcctggagtccccggtgggagtcggcttctcctacaccaacacaagctccgacctgggcaagctcggtgacaagatcaccgctgccgacgcgtacgtcttcctgctcaactggttcaagcggttcccgcagtacaaacaccacgagttctacatcgccggggagagctacgctgggcattacgttccgcagctgtcggagaagatcttcgacggcaacaagcacgggcccaaggagaaccgcatcaacttcaagggcatcatgatagggaatgcactgatggacgacgagacggaccaggcgggcatggtccagtacgcgtgggaccacgccgtgatctccgaccgggtgtacgccgacgtcaaggcccactgcgacttcgccatggccaacaccaccgccgcgtgcgaccaggcgctggaagagtacttcgccgtctaccgcctcatcgacatgtacagcctctacacccccgtctgcaccgacggctcctct

SEQ ID NO: 50219 - DNA, 512 bp, Zea mays
  unsure (1)..(512): unsure at all n locations
  Clone ID: MRT4577_145795C.1
tgctatcttcaggaaaactgaatatccgttcaaaactgcattgacaaactgcagtgacacataatctnnnnnctaagacaagagtataaaactgcattgtcaaattgcgttcacacatataaaactgcattgacatatttctgaaaactaaggagtataaaactacattgacacctttctnnnnnctgaccttggtgcatcaggaacttaggaaagactgaaccttcggtgacaaaacataaccatttgccgggaggtgaaaggatgaatggtccttgccgaaggacgctgcaagccgacgttgttatcccgacgtgcttggctcgataggtttagatcgtcgcgcccgacatttgccgggaggtcaaaggatgaatggtcctcgccgaaggacgctgcaagctaacattgttatcccgacgtgcttggctcgataggttcagatcgtcgcgcccgactagttcatatcctgaatgtatcatctcacactccaacgcctcggctggctcctt

SEQ ID NO: 50220 - DNA, 622 bp, Zea mays
  unsure (1)..(622): unsure at all n locations
  Clone ID: MRT4577_145796C.1
ctccaccgccccatgtgatggatatcttcagnaattcccctttcgagcgggcggccgggcgaggggcaagcttttttttttttttttttttttttttattttttttttttttttttttttttttttttttttttttttttttttttttttttttttttttttttttttttttttttccctttttccttaaaaaaaaaaccccggggggggggggggggaaaccaaaaaaaaaacccccccccccccaaattcgatttcttaacatacaaaaagggcggcctttaaaaaaaaagccaacccaatttaaaaaaaacctcttgcccccttcccattttaaccccccccccccccccccttagggcgaaaccccacaacccgggggcccttcctaattgcccccttctcccaacccaactttgcccaatcaaaaacataattcccccccttgtaaaaattttctcccctaacaattccccccaaaataccagcccgaaacattaaaggcaaaacccgggctccccaatgagggagcccccccaaactaatttccccgccccaaaccccccctttcccgggcaaaaacctttcccccccccttcattaataaacccccccccccccc

SEQ ID NO: 50221 - DNA, 775 bp, Zea mays
  Clone ID: MRT4577_145797C.1
aagtgataaaaaatgcatatcttgtgttttacgggaacaaacacaagatatgatgttatatataaccttgatatcatttctaagttgttcgtcatccaaaatatataaatataagttgcaatgatcaggtacttttagtgagtaggtagcaaaatctaaagtgccatatctagtttacaaacgacaacatatgtagaatcttcgtgccatatctaagtgggtcatcatccaaaactatcataagttacagtgcatcgaatggttttagcggtcagaacatggctggagggttaagaacatacgagagaattatgtttagttgtaaaatggcaggaccaataagaaaagatgtgacactgcattcaagggccaaatctcaattggtttcatgtttttgtatatatcatttatggtgatctttttggcgtgtggaatctttgatgtgcactggttcttgtttaagcctgtgaaatgaaaggtaaaatttcaacaatattaccaatcattagacaatgaagtacaaatatgatgtctgtgtaagtagtctcttttgtaaggttggtcaactatgtactatataaacaaaaaaggaaatagatgtgatttaggaaaaataaacgaatatgtaaagaaagaaacataattcgtagagagttacatgtttgataagaatatgtaactctttaaagctccgctggttttacaaaaagttagtgacaattagctactacataaaaaacacttgacatgttcatctgaccaagcgagcttggtg

SEQ ID NO: 50222 - DNA, 1618 bp, Zea mays
  Clone ID: MRT4577_145798C.1
gtgccaaccctagccagctatgagcatcccgccgccgcctcctcgcctcatccgacgccatagcacctcttcctgttcgcacccccttctccctccgtccccccggccaagcgctcagcctggtcgcagcttctccacgctcgctcggggctgctttgtccccgtcttcctgtctgcaacccgtgtgcacagacgcggcatgctcggtcatgggcttctccttcccattctcgcgcgccccgcgcggatggctgatgaagctcatccccacgaactacctgctccgaagcagccgacgctggaggctgaccgtcccgtccgccgtcggtgatcaacttgctattgggaaggaaacaacacgtcgtttgggaatgagtactaaatgtacccttcctcttctttactctgaacagaataaggatgagtcacttgcttccttgccaattgatgaattgtccgagaaggctgatggcttatctggagcctttccagatctatgttgtatcaattaccatccgtattatgcttggttttatgcttcttgcactgatattgaagtttgacttcgcaccatttatggtccagatcattgccatcctcaatgacgcttcctgtaaagacgatgatgcatcccgcatatatgcgtgagccaaactctccccaattcttcccgagcgcgcgcaatccagtagcttccgatgtcttttttccagccgcgcacgcagttttgttcgaggaaaggagggcaagagcgggagagacaccatcgtcgttggaggagccagccgaggcgttggagtgtgagatgatacattcaggatatgaactagtcgggcgtgacgatctgaacctatcgatccaagcacgtcgggataacaatgttagcttgcagcgtccttcggcgaggaccattcatcctttgacctcccggcaaatgtcgtaactgaagtgtctgtgcaagcatgatgaattttatttaggtgtgttttggttggagtgtgagatgatacattcgggatatgaaccagtcgggcgcgacgatctaaacctatcgagccaagcacgtcgggataacaacgtcggcttgcagcgtccttcggcgaggaccattcatcctttgacctcccggcaaatggttctgttttgtcaccgaaggttcagtctttcctaagttcctgatgcaccaaggcttaaacaataaccagtgcacatcaaagattccacacgccaaaaagatgaccataaatgatatatgcaaaaacatgaaaccaatagagatttggcccttgaatgcagtgtcagatcttttcttgttggtcctaccattttacaactaaatacaattctctcgcatgtacataacccttcagccatgcttcagaccgctaaaaccatttgatgcactgcaacttatgttagttttggatgatgacccacttagatatggcatgaagattctacatatgctatcgtttgtaaactagatacaataatgcatgcatatatatctagcctttagattttgctaccttctcactaaaagtatctgatcattgcaacttatatttatatattttggatgacgaaaaacttagatatgatatcaaagttatatatc

SEQ ID NO: 50223 - DNA, 265 bp, Zea mays
  Clone ID: MRT4577_145799C.1
cgcacgcctccggcgaacaccaccattttccctgcgatgcctataccaatcccggcggcgctctttcggggacgatgagctactacaatccccacggccatggcggcgcgcccccgtcttcgccgagcccctcccagtatgcgcccccgccgtctccccaagggtacccaatggacccgcacgcggagcgcgggatggagcaccaccaccaccaccagtacgggccgtcttcgccgtagccgatgtacgcgtcgtcgtacgggca

SEQ ID NO: 50224 - DNA, 865 bp, Zea mays
  Clone ID: MRT4577_14579C.1
ggcggtaggatagcctcccaggtctagctgttccccctatcacttcctccttccccatttcgggaaagatgacatgaagatcagtttgtgtaaacgtgttgccctctctctctctcttcgtgtccagttcttgttgcgtctgctttgtactgttgcagcggtggtcgacgcgacggcgggatgggcggatgaggggcctggctgctagatggtgtggctcacttctctttctgtcagctctctctctcatcctagggacttgttccgccgtatacatccatcaccgccgtcccacttccgtccatcgctgcgcgccgatgatgcgtcgccgtcgtcgtgcaggcggtgcagcctcacatcggtcgccgtggtggcactgtttgctctgaggcgcctgccggcctggtcgtgtccctacctgaaaccttatcttgtgccctgctcggattacgatgagctctgctagctctttggaataaggtactctttaaaatctcatggaagccgcccagcgcatgtacgccatggattcttgcgctggcaacgtttcttttcttttatcggcgaggttctcgttgccatctttgaggcttccgatgatggaattttagccaggcccgtccttcaggcttcagccttgggggggaagggacgcgtgcgtgatggttttttttcttgttaacacctctatttgctcacctcccgacgagtgtgattaacggaaagcactgtttgactagtccttgctagccctgctctctctctctctctctcttacttatctactcgtttcctcttcctttccgtaaagattgcacgcaaaaactattggatcttttcccctttcgatgtgctcatctcatgt

SEQ ID NO: 50225 - DNA, 345 bp, Zea mays
  Clone ID: MRT4577_1457C.1
gtccggccacgcgtccgggctttgctagatctaacttcatattaggatatgctgctgctgctgcatcaggtttgaattttactaatccttttctcaagcaattggatgaatgtgacacttatggtgaatcagtagaaaacactaatctggaagctaatggtccatgggaaaggaagagacagaagaagctcaaggctgtggttagagaggcacgggaaaagttttctaaccctagcagtgatgctttaaccatcgctcgtgccctgcagttctttgagttgtcagaaaacccagtggaattctgcagagccaattcacttcatcttaaaaccatggaagagatgt

SEQ ID NO: 50226 - DNA, 445 bp, Zea mays
  Clone ID: MRT4577_145800C.1
aaaaagggggaccggaaaaccaccaggaaccaattttggaaggtttttttggctggggccaaagggcaccaccccctaaattttaaaaaaaaaataaagcccccgcccttcttttggggatttgggaaacacccctaaaatttaaaggggtttcccggaacccccccccaagaagggtggcccccccttcctgcctttttttgggaaaagcgtcaaacttttttgaaccaaagacttaaaccggaagccacctttttgttttcccgcccaaaatttccccgtttttcgggaaaactgaaaaccccttttgggttggcttccaaaatcaaaaaaaaagccccccaaaaaactaagaaggggtcaatttaaccctaaaaagggccacctttttgttggggtggggaatctaaaggaagccccaaaaactttccccaaaacaaggttt

SEQ ID NO: 50227 - DNA, 348 bp, Zea mays
  Clone ID: MRT4577_145801C.1
acaaaaagatcttttttatttagaccagcgacgaccaaacaaaaggcaaaagacacccatccaagccacaatggttatccggcaaggggttaaaaattgtaaaaaaggcaatgcttagaaaaatgcttcctttttgatgggacaacacccttctattcattctctacccatgcaacggggcaccgcaaggggaagttactcccaggaggatggctgcagaggcaaggggatggaagccaccgttttttggaacgcagggcgggcgacaatggcctcccaccaagccttggaggtgcggctgtctgccaaaagcccggccttgggggtctaagctgacgtagaacaacg

SEQ ID NO: 50228 - DNA, 384 bp, Zea mays
  Clone ID: MRT4577_145802C.1
ggggcgccactcttccttccctactccctctccgctgccaccaaaatcgcacgcgagcccgatagatcccgggggggggcacccgcccggcggggcactctttgaccgtcgaatctagcatgttttcggaggagaggaagcctcgaatatgttccggtaccagttccacacctacgtgacgacatggagcccccaggggcggctgttccaggtggagtacgccatggaggccgtcaagcagggctcagcctgcgtcgggcttcggtccagcacccacgccgtcctcggcggcgtcaacaagccctgctccgagctctcctcctaccaagggaaggggttccgcgttagtgaccactccggggttggtgctttgcggtcttaccg

SEQ ID NO: 50229 - DNA, 667 bp, Zea mays
  Clone ID: MRT4577_145803C.1
cattgggtacctcgaggccggccggggtgattcttcgacccaaagaagcgcccttcctctacttcatcatggccgaacaagttgagaagtcgttccaaaagcaaccgttgttccacaacgccaaggtctcgaccacctcgcgcaaggtcgctggcaaggaccgccgttggttcaaggaggtcggtctcgggttcaagactccccgtgaggcgatcgagggtacctacatcgacaagaagtgccccttcaccggtctcgtctcgatccgtggacgcatcctcaccggcaaggtcgtctcgaccaagatgacccgcaccatcgtcatccgtcgcgagtacctccacttcgttcccaagtactcgaggtacgagaagcgtcacaagaacgttgccgtccactgctcgcccgctttccgtgtcgaggtcggtgatgtcgttaccgttggacaatgccgtcccctctccaagactgtccgcttcaacgtcctccgtgtacaaaaggcgaaggccaagaacttcatcaagttctaaattttgtctttttgagtaatactacggtctctctctccaacctcccaccagtcgttgggggaaacaagttcggcaccatttgaggaagttgttaatgaagggagtggcttcttaaaaaaaaaaaaaaaaaagcggcc

SEQ ID NO: 50230 - DNA, 161 bp, Zea mays
  Clone ID: MRT4577_145804C.1
ctcaactcaatacactcacctacatatacacacatagacaaatatatcctggctcagtcaccaccaacagaaccagcctactccatcatcataccaccccaaccacttattcaacatcttctgccgcaccaactacaactactccctctccatcctctact

SEQ ID NO: 50231 - DNA, 920 bp, Zea mays
  Clone ID: MRT4577_145805C.1
ctccgacggacgccaccgcaacgccgcggaaccccatcctcgggagcctctcctccgacggtcgatggcccggctccctgacgccatcctcgcaacgccaaccccagcctcgagaccgtcatctccgacgccatccccaagtgcctccgccgctgctccacatcctcttcccctctacaaggggattctgatatcatcaagactacaccaggtgagcagtaaaagagtggtggcagtacatcctctctagagttgttactcagttttgaaaaaggatgatttggaacaatgtgtatgagaaaggcttatttgatgtgatgcatgatcacaaagataatccaaaattcaaaggtcaaaatggttggaatcgtgatggatggaatagtatcactacgaagttcaatggaaagttccctctagctcatttctctaaacaacaaccacaagagaaggagagagagcttaaaggatactacaaggcaataagggattcaagaaaaaaaaagcggggctggttggaatgacactctatgcatggtactggccaaaccagaagtttggccatggctgatttgaggctcacccaaaggtatcaaagtttcgcaacaggtaattccctcttttttatagtttagaagggctatatgaaggtgcgtgtgtataattctgcattttgtttatttttgtgatgagctagctatttatattttgtcctgctgttcaacaacatatcaaaccaatagcactgtgatgagctagttgtttgtttttgtcctgctaatcaacaacataccaaaccaatagcattttgttcttaatttcttgattagtagttctcacaatagagtatacttctgctacattttgtataggtagtgtggctaccggagagttaaatttcacatcaaccgctgctgatc

SEQ ID NO: 50232 - DNA, 433 bp, Zea mays
  Clone ID: MRT4577_145806C.1
atttttacagaatggtttcttctctgaactgatcgacttcaagggtgttgggttgcaagtggcgtataatttcctgttatccagctagctctagcatcaatcatttacccctatgagatttagatgaggttgcagctacagaaatagtggtggcttgcatgctattatgaatagcatgctgaagaagctagcaaagaaggatgaagaagtggttgttgcatctggcatcccatgtacaacaatcagaactggttctctacaaagcgctcccgggggcgagagagggttcaattttactgaacaaccaagggaagaaaacgcaaagaggatgctgctgccatatgtgtggaagctttgaatagcattccccaaaagacactcctttttgagagggattgccaatggacattttgggcagcgtgtgaccaaactg

SEQ ID NO: 50233 - DNA, 375 bp, Zea mays
  Clone ID: MRT4577_145807C.1
aggacattcaaaacggcgagcattattagcaaaatagctcaaacggttcatgttatccgttcacactgcattatgtaaccagagaacacacccaaataagcctttccataaacacttggctattggctctgcgacacacctcaaacaatgtgttcagccagggccaggatcttgtggcgcttctaatggatcagcttgtgggggacggggccgaatacgcggttgccgatcagctcacccttattgttcacgaggaccaactacttttcttgcatctggacctgggtgtcttcgctgagccctttattaatggctgagcgtacgaccacgtcacaaactacgtgtgctttgtcgacctcgccacgaggatgggcc

SEQ ID NO: 50234 - DNA, 250 bp, Zea mays
  Clone ID: MRT4577_145808C.1
ggggaaaataaacaattggcattactaccgggatatcgaacgctttatttatttaaacaaacacactgggttggaaactttttggtttggtggactagggattcacattcgcgggcaacaaagctggaagggccttcttttttggtgggggagcacctacattttcctaaaaatggccagccttgcctgcaaaatgggggggattccagggtgaggattcccaggacttttagcctgggaaacccttccc

SEQ ID NO: 50235 - DNA, 300 bp, Zea mays
  Clone ID: MRT4577_145809C.1
aattgaccaaaaaacagggggaggaaaaggtaaatgaggactccacgattagagctcctttttttgggaaccccagaaccaagattggacagggccaccttcaaaaaaaaagataaaccgggcacgtagtttcactgaattacgagttgtcgcgatttggatttttaagtacacacaggcgggggaaaccacaaggagaaaacgaggcgctttgttgttttccccccggactatcctgggccatgtagatcctgcccacataccgttaggcagcggagggcggtttgctggcctgatgaa

SEQ ID NO: 50236 - DNA, 458 bp, Zea mays
  Clone ID: MRT4577_14580C.1
gggcccaaaggggtctgggccgattccttgaacaaatttaactccaaacgggggccaactgcaatcagggtccaaaacacccaaagccctccaaattcacacaacaggggaaacaaggagtttcctttacccaaatggaaataaggggggccccaggaggactcaaaccttcaacaactacaactagtaccgtttttttatggggaaaaccaaaaaaacaaaacccccatttcctttttaatattccaagcaccggttggtttcctccttcaattcccccggggtagtttacccttaccccaagctttactcactttgcccttataacctttacaaaatcctcgtagttgatcttaccattcccattaaccttggcctcccggatcattttattaaccccctcttggggcaactttttccccagggtgggcatcaactggcggagctcccccccaaaa

SEQ ID NO: 50237 - DNA, 413 bp, Zea mays
  Clone ID: MRT4577_145810C.1
cggggcaaggggagagccggggcgaagaagagggccaggggaccacacggggggcgggacccgacaaaaaaccagaacaagagcaacaggccccacgaacggaggcggacgcgggacccggcggcagcgggggaggacagggggaacgcgagacgggggggacaccgggggcacaggggacccggggcccaacgggagcggagcggccagggggggggccgcccacggacccggacccaaggcaaccccgcaccaaagcggcagcacaaaacgagggacggcgggatcacgattaggaggcggcccggcgggaacaccaacgacaccgcgaccgcaaagagggggaaaagcccggcaagggcgatccagggcaggggccgaacggggggaggccccaccggacggaaccggga

SEQ ID NO: 50238 - DNA, 444 bp, Zea mays
  Clone ID: MRT4577_145811C.1
atcttgttctgattctgacggcggagacatcgcaaccgcgtcgcagatggacaaggcgtcgatcatcaaggacgcgatcgagtacatcgagcatctgcaggcggaggagcggcgggcactgcaggcgctcgaggcctggcgagggggcgcgctgcggcgccggcggccacgggcacggcgaggaggcgcgcgtgcttctgcagcagaccgccgccgccgcctgcccggagcccgtggaggtcctggagctgcgcgtgtcggaggtgggcgaccgcgtgctggtggtgaacgtgacgtgcagcaagggccgcgacgctctggcccgcgtgtgccgcgccctcgaggagctccggctccgcgtgatcaccggcagcggcacctccgtcgccgggtggctcatggccaccatcttcttcgaggtacgtcgtcggcagggggattcgg

SEQ ID NO: 50239 - DNA, 401 bp, Zea mays
  Clone ID: MRT4577_145812C.1
ccgctcgccatcttcgccggcattaccacctcctttgccttctccatactcatcttgggcgttttcgggggctaccgcgacatcgccctctctctcgcatcgcagtctatcgcccacctcatctggggcagcagcataacttcccatgtccggcccccacggacgccgtcgtcagccttgtgcatcaacagccgcgccaacagcgtgaggccgaccggctcgtgcacgcttctcaagaggcaccgccggcgacggcccagctcgtccggttactgccgcaccgtgacgcccgggagcgacattggcctggggcttatccccagcgtacgcgccgagcgggactttgagggcgttggcgggtggcgccttggcgacgacgatgataacgacgcctggacgac

SEQ ID NO: 50240 - DNA, 343 bp, Zea mays
  Clone ID: MRT4577_145813C.1
ctggcatccactcgtgctgatccctctttttccccgcaccatcgatcaagcttgacctggcggagttgatcatgcatggtttgaggttcttgtgcagactaaggaaccaggagctggaagaacatgggagtgaatcatatcactccaagggactctgcccctcctgtataatcctctgaaactcgactcgctctgtcaccctagtttctactttctagctgccaggaggaagaaatgtactgtaactaacagcaagcaaagcataagaatctgcatggctcacggtgtaattgttttttaaaaaaaattaaataagaatatatcgaaattaattagcatatat

SEQ ID NO: 50241 - DNA, 328 bp, Zea mays
  Clone ID: MRT4577_145814C.1
attcggctcgaggcgactgcggaaactcattgctggtgcctctgcaaacagcaaccttgggctgcatcatatccatcacggcgctcatatgcggggaatggctggggcacacgacattacgagactgtggccttactcctgggagtgcttgttgtgctgctggttgtgacgacggggttttcatggacataaatgtgactgcatctacatggccgccgtcacgaggccatatgttcgtaccaatgagcacggggcggagttcaacacccagtacaccagcttctgcgcgatggtggccattgacgacccgatgacgacgggggccacg

SEQ ID NO: 50242 - DNA, 503 bp, Zea mays
  Clone ID: MRT4577_145815C.1
ttgtcccgcgtccgccgaacgtccgtctagcgggggtcgcagcctacgacccgcgtccggggataggtgtctttttagtagttgagggcgtatgatcaatcatgtcagggcgggacgaggctgacaaacaagacacggtattttttttatgtggtggacctacaaaagtgcttttgggggggagctagtctgaaatttgttaaatggtgttccaatggaggaggatgctgtactatgcctgagctgggagatgctgacaatacatgcaaagggctataaggcttgtgacaatctcttatccagacccgtgcaacatggacacacgctttgggagtggcattgttacaggatcgagcacatgcaggtacttgttgacatatagccgggccttaagtgacgttcaacaggctgttggcaaacatttaactatttgggctcacaatgggtgtgctttaataccggccacagtacctggacgaaacctggaattgctcaggaataag

SEQ ID NO: 50243 - DNA, 319 bp, Zea mays
  Clone ID: MRT4577_145817C.1
gccagccgttatggagcaaaaaactctgccagccttaccgtccctacggcacgacgcctctaacgtcggcgaccgcgacgacgatgaccccgcgtatcccctcctcgtgtgctccgttcgcaatcgctgcctccatctcctacaggttccatgttgacgctgtgtgccccggcctgtcccaagcttcaataggtccatacatgcatgcgcagagtttgccggccggacttgggatggaagaattatcatttgtgttttttatacagaaatgtagcttgtaaactattagtaaagttatatacaagttttattctgaacc

SEQ ID NO: 50244 - DNA, 396 bp, Zea mays
  unsure (1)..(396): unsure at all n locations
  Clone ID: MRT4577_145818C.1
gccgtgtctccaccgaccgccccccccgtgcgtcgcgtgctgtcgccgacccccgggcccggaccaccaccacgcgactgttcctcctcctcctcctcccttcctggctcctccctcccctctccccctcccgctgccgcgcgcccgccagcgctgctatataacccgcgcgtcgagtctcttcccggcaacctcgtcaatccaatcacccacccaaccaaccacctctgcacgcgcagcccagatctcggccccttcccttcctcggaccaagcaccagcaatggccaccacggnagccgacgccacggacgcggcgcccaaggaccagcccgccaacggttccgagcaggtcacgcgccactccgaggtcggtcacaagagcctgctccagggc

SEQ ID NO: 50245 - DNA, 306 bp, Zea mays
  Clone ID: MRT4577_145819C.1
gcacgcataccccacgcgtccgcccacgcgtccgggatctgttctataggatcgtaccgttgcacccttgattattaaggaggcaaggttgatgaaccatgacctgtgggccagagcgtgattaacggctattaaggaggcaaggttgatgaaccatgacctgtgggccagagcgtgattaacggccaggacctgcttgatgtctgtttccggagctgtagaggatcgttccccccttctggggtgggctcataggttgttgacaggttctctttttaaaaaaaaaaataaatataacaagctgac

SEQ ID NO: 50246 - DNA, 246 bp, Zea mays
  unsure (1)..(246): unsure at all n locations
  Clone ID: MRT4577_14581C.1
ccgggccgacccagcgnccggggngaacaacacacagaaagaaggggagaagcagaggctataccaagggnacaacgcagggaacncccaganncaggaggcagcncaaaaagctagcagngacannggcgnnggaccnnggaaaccccgnnnncgnnnngagnacgnaannacatangaacagcagcganacggggaggggggagngaannaaangnncacanannnngnggacngannnannnc

SEQ ID NO: 50247 - DNA, 483 bp, Zea mays
  Clone ID: MRT4577_145820C.1
ctctcatccgaattcccaggcggcaggtcggcgaggagggcaggaagaccgaagaccgagccgtgcgggggctcggcacgggaacgggacaggaccccaaactctcagatccttcctgcccgcccgcccgtgcccgtcgactcgtcgttcttgccggccgcgcctcacctccgccctctcctcctgcagggggatcggagctccacaggctgcgcgagggtgctgctgctcttgggctacggctccctcatctgggatacacggagggcctgcatgcttctcccggggcctggccagaatccccttactgcgtcttgtccgggccttacggcggtcgttaattctacgtgggttgcgcacagaggccgcctggcgctgaaccccagacacaatacaatgaggacaagcccgatgggtctggtactagaggtgattgctggcaaggattcactttattacggagcagtctgctgggaactctcc

SEQ ID NO: 50248 - DNA, 513 bp, Zea mays
  Clone ID: MRT4577_145821C.1
actgttcattttgctatcaaaaacccggcggattcctctctgggcgggtttcatagcgggagccaacaaagggaacaacaggggcaccagcacctaatccaaagggtgagcgggccccaacacggtgacggaaaccaacgggcacacgaggctctagatggatcagaggactcggacgcacccaagatgggcccacacatcagttcctccagccaccggcagcggcgccgaagccgtcaccaccaccctcgcgctgaccgccggagtcgggaccgcctacgaagccgaagccacgaccctagcgccgaccggcggaaaacggaacgccgtcaaaaccgccaacaaagaacccgccagaaaacatcacggcgacagcacgcggcgcctaatgaccgacctcaccgacaacgataggggactgggcccggtcacggtgaagtcgcggaacccgagccccctgccggacatatgcatcaaaccacccagcatggagagctcgatgagaaaggaacg

SEQ ID NO: 50249 - DNA, 387 bp, Zea mays
  Clone ID: MRT4577_145822C.1
cccacgcgtccgcacatgttaagttgtcatgttgctttgttgtgatactgattttgatgggttgatttggccatgttgtgtattaccatggtcaaccatctgcatatgagagattttgagctcattgactgctatcagcaaaacccaacataatagctttagaaatgactatattcttatctgaattaatgcaggatgtgcgccatatgaagacatctccattgacagatgaggagaaagaatgtatccaggaggggctgagaatattcaaaaacgactggacatcagtttggaggtttgtagtgccacatagagatccttcactgctccaacgtcaatggagagttgcaagtggaatccagaaatcttacactaaaagtgatgctg

SEQ ID NO: 50250 - DNA, 484 bp, Zea mays
  unsure (1)..(484): unsure at all n locations
  Clone ID: MRT4577_145823C.1
ggggcaaccaacatgttttgtaacaattaacaagtcccttacaagaacgatgaatttattctaaacaaaaaaaaaaaaccaccccacgaagggggggggagaagaaaaaaaaaattttaccgaaacccaacttaaatccttcctttaatcttattattaacaccaacacggggcgcgcggaactaaacccaacatgcagtctgggggcgacttgacgaccaccaccacaacgggcgcaggttgttggtaccctaccgtaccgtacgtgcgcgatttgggggcttcgatccgtccggtcggtcggtcacaacaagcccaaacaggcgcaggccacccccccggcaagggaaaaaaaggtcccggccccccccggcgcggcgttgggcccgaacccggggtcctgcgggtacaacgtcccttcggacgggggngtgtagggcggcgcgtaccaaccggaccccgagggcgtggggttgtaacccgg

SEQ ID NO: 50251 - DNA, 266 bp, Zea mays
  Clone ID: MRT4577_145824C.1
ccggccggacgcacgcgttctgccagaccaacaacgacattaatgagctttttctcaacgacatcaataacagcacacatcgccatgctctacatactggggtacttcatccaagtgctcctcacctgccttaatcctttccaaaacctcctcgaccacctcgacgatcccatacacaacaacgtactcaccagcctaaagttccactataacctagtacatcaacatacctgctgattcccacaccgccttcaatagtttgctct

SEQ ID NO: 50252 - DNA, 271 bp, Zea mays
  Clone ID: MRT4577_145825C.1
aatttaagagcggcacaaacatgggggctgtggcactaacatgcatcgttgacatacatccaggggttgtgcatttccaccgtttgggaaagcttccgtagaatacagcatcacctgtgcatttgcttatctcttcggctgtactacttgtctgtctatcattgagctcataatcgacaactgcttattaagcaacacttctgccttatgatttattgtggcttccatgcgcatatttatattattataaataactcatatctgtctatca

SEQ ID NO: 50253 - DNA, 1945 bp, Zea mays
  Clone ID: MRT4577_145826C.1
cattggtacctcgacctcgatcgcggccgggccgggagttatagcttaattaatccttttctttataccgactccctcgtggcctcgtcgcctcagctccaccaccaccacctccacccgcgcctccaaaatccaaatccgatcgatctccgcggcctccagatcccccggcgggcggagacggcgagctccaggcggccaagaagcccccccctcgcagcgctcctctcctctgcctctccgaatcccttaccagggggaaaaaacattgcctgaaagttcttcaggccctggtgtagcagctgaattacccagtttaatggcgaagaacgagctttagatggtctaaagatggagatgagatagaagcaccacaaagtgtacagtggggtagcaaggatatgactgtcatgatgcctcagcgccaccgggctacagccaagaagcccatgtggataatcgtgctcttgtgcatggtttgcatcgtgctgattggggcttacgtcttcccaccgcggcgcttctctaactgctacctctctgcttcaagtgtatgcgcacctttcaaggattggctcccttctatgggccgtcgggagagaactgacgaggagattatttcatctgtagttattagggatatcctttcaatgcccatgcctatgccaaaaaatccaaagattgcccttatgttcttgacaccaggttcattgccctttgagaaattgtgggagaagtttttacagggacatgagggaagatactccatctatgtgcacgcatcacgtgaaaagcctgttcatactagttctttgtttgctggccgggatattcacagtgatgcggtagtatggggattgatttcaatggttgatgctgagaaaagattgttagcgaatgcactggaagatgttgataatcaagtttttatcttgctttctgacagttgtgttccactgcattcatttgattatgtgtataattacctcatgggaacgaatgttagcttcattgattgtttcaaggatccaggtccacatggcagtggaaggtactctattgagatgtatcctgaaatagacgagagggattttagaaagggtgcccagtggtttgcagttacaaggagacatgctttaatgattctggctgacagcttgtactacaagaagttcaagctatactgcaagccagcagaagggcgcaactgtattgcagatgagcattatttgccaaccctgttcaatatggtagatcctggtgggatctctaattggtctgttacacatgtggattggtctgagggaaaatggcatccaaggtcatatagcgctgatgatgtcacctatgatctcttgaagaacattacagcagttgatgagaacttccatgtaacaagtgatgacaagaaacttgtgatgcagaagccgtgtttgtggaatggatcaaagagaccgtgctatcttttcgctaggaagtttaatcctgaagcacttgacaacctactgaagcaatttaccagttacacatctgtttgagtcctaccggattctttgccttgtgctgtcaaatccgacaagcttttttctcttcctgtttatatgtaaattgtgaagtccgtacttattaggatctgggcctgaagataccggtacaactgcaacagctgtgatggcttggagctgagtcatgggtaaaacggccacagcgatgtttatagaatggcactgccctcatagtaatttatcgtgttcaatgtatgtctccatagtcttccacccaactcccaactcattagttctttattcttggagaacagtttttgtcagagtgttatactgtcatgatatgatccattctttgtagacacagagattacaacagatgtatcacaaatgcagtcttaattttgtcactattaaatcttttatcatgcgttctactg

SEQ ID NO: 50254 - DNA, 1784 bp, Zea mays
  Clone ID: MRT4577_145827C.1
atatcagacatcacatctagtgccagttctagcttaattaatccttttcttttaacagtaccgcttccccctcccccgtgggctgagcctcgccccgcctcaactccacctccgcctccaaatccgatcgatctccgaggcctccagatccccggcggccggaagacggcgagctcaaggcggtggacacccctcgcagcgctcgtctcctctcgctctcccaatccccttaccagattgcagcagcagggaaaaaaacatcgcctgaaagttcttcaggccctggtgtagcagctgaactacctagtttgatggtgaagaaagagctctaggtgatctaaagatggtgatgagataaaagcaccaaaaagtgtacagtgggatagcaaggatatgactgtcatgatgcctcagcgccaccgggctacggccaagaagcccatgtggataatcgtgctcttgtctatggtttgcatcatgttgattggggcttacgtcttcccaccacggcgcttctctaagtgctacctctctgcttcaagtgtatgtacgtctttcaaggattggctcccttccatgggccatcgggagcgtgctgacgaggagattatttcatctgtagttattagggatatcctttcaatgcctatgcctatgtcaaaaaatccaaagatcgcccttatgttcttgacaccaggttcgttgccctttgagaaattgtgggagacgttcttacagggacatgagggaagatactccatctatgtgcacgcatcacgtgaaaagcctgttcatactagttctttgtttgctggtcgggatattcacagtgatgcgatagtatggggattgatttcaatgggtgatgctgagaagagactattagcaaatgcactgggaagatgttgataatcaagtttttgtcttgctttctgacagctgtgttccgctgcattcatttgattatgtgtataactacctgatggggacgaatgttagcttcattgattgtttcaagggatcaggtccacatgggcagtgggaagtccctattgagatgtatcctgaagattcccatcaccaggtatcatctgccaccacaagaaacaagcagcaacagccaggacccaagagccagccagccagccagcttccacctctagttgtccaacccaactgagagcataggcatggcacatcacatctagtgccagttctagcttaattaattaatccttttctttaacagtaccgcttccccctcccccgtggccttggcctgagcctccgcctcaactccacctccgcctccaaatccgatcgatctccgaggcctccagatccccggcggccggaagacggcgagctcaaggcggtggacacccctcgcagcgctcctctcctctcgctctccaaatccccttaccaggttcgtgccattcatgctgtgtttccttttttttttcttcttgctattgccctgcctggctgctccctgcattgagcttggttgcatggaagctggaggtttccgtgcgatttggagcgcgctggtttgggtgtaaagcttcgatctttacgtaagaaccggtttccggtgctggcgctgctgtgggttagcttgcgctggctggggctggttcctgcgggtggtgctgaccggatcaactggcaatgcgaatggaaggggttgtttggcttggtcagagctcgactattcttcactcaccagccgccgccgtggactcggccgctgtcttttttggggggcaaatcggctgctt

SEQ ID NO: 50255 - DNA, 1147 bp, Zea mays
  Clone ID: MRT4577_145828C.1
aaccccgggtttcgcacgcgtgggcgcgactttgtacaacgccctttgatagatatttgttcttgagcttcttcgtttttgcaccaaaagacaagcaggatgtcttgcagctgcggatcaagctgcaactgcggctcaagctgcaagtgcggcaagaagtaccccgacctggaggagaagagcaccgcggcgcaggccaccgtcgtcctgggtgtcgccccggagaagacagctgctgccgagttcgaggccgcggcggagtccggcgccgagacctcccacggctgcagctgcggtgacagctgcaagtgcaacccctgcaactgctgatcgaccgacgaccacacatggggaacgaagaccgacgatatgcatgctgctgcttatttgatggtgatatcgatcttgtgccggcgacgtacggtactactagctactacactacatgtagtgctctgcaattgtgttattgtgtgtgacgtatgtaactgatggttgaacaataaggacgagctagctatctgctatgtatttcgatctggctcgccagcatgcatatatatgcgatctatatatctgcccttgtgtgcctgatcgatcgagagagtatacctcttttgcttattggccttggcgtcagtcttgtgctcttgcatttaattatgtgcatgtgtgtgtactgtgtatccatcttgtgctcatacatcgatctctatgtgtctctgtacgtaatgacgatatgatttcgtccagggtgatttatatataaaactggtatggtttatttgcctgagtaaaaaaaaaaaaaaaaaaaaaaaaaaaaaaaaaaaaaaaaaaaaaaaaaaaaaaaaaaaaaaaaaaaaaaaaaaaaaaaaaaaaaaaaaaaaaaaaaaacaataaaaaaaaaaaaaaaaaaaaaaaaaaaaaactaaacaaaaaaaaaaaaacattaaaaaatgaaaaaaaaattggagtcccctggctgaatttcaaaaaagcacatccgggtaaaaccaggtggttccatatttaagaggccctaaaaaaaatccctttccaacagtttcacaaactgaataagagaaaaacacgcgccctctctcacaaaattaacccacccaaattcgctatttacacgcaccttgaa

SEQ ID NO: 50256 - DNA, 415 bp, Zea mays
  unsure (1)..(415): unsure at all n locations
  Clone ID: MRT4577_145829C.1
cgtggtttcgcactacgcttcacactctctttgtttcctggccagtggcctggtctgttcggctccgatttcccgattcgattccaatcatccctttcccggcgtcctgccgtcctgcgggagggaggttgcaagcggaaccagcccggcaatggcaggtgcggctgcgcggcggccgggggcgaagcccaggggcggcggcggcgcggggaagaggagcgcgtggttggcggcggacggcagcaagctctacgagaggttcacggagctggagtacctgatccttggcttggtgtccaccgtcccggcgttcgtcatccccctattcctcgtagggaaggcagatagtgttagaaatttcaaagatcgatattgngtcaaggctaatatttggattataatgtttagctatgtt

SEQ ID NO: 50257 - DNA, 178 bp, Zea mays
  Clone ID: MRT4577_14582C.1
cagagatgcttggcttgtccaacttctatagataggtgtcagctcatgtcttgtttgctacagatagatttctctccaggttgtgtggagcagttcaacacattttttttcgacagataaatctcaccagcttcttctgttctcatactaggtgcgttgcatatcaagctgaaaaagc

SEQ ID NO: 50258 - DNA, 1468 bp, Zea mays
  Clone ID: MRT4577_145830C.1
ctcgaggcctggtccgttcggctccgattcccgatttatcgattcgattccatcatccctctcccggcgccctgccgtcctgcgggagggaggtgcaagcggaaccagcccggcaatggcaggcgcggctgcgcggcggccgggggcgaagcccaggggcggcggcggcgcggggaagaggagcgcgtggttggcggcggacggcagcaagcgctggggggaggccttcttcctgctctacacgcccttctggctcacgctctgcctcggtgtcgtcgtcccattcaagctctacgagaggttcacggagctggagtacctgatccttggcttggtgtccaccgtcccggcgttcgtcatccccctattcctcgtagggaaggcagatagtgttagaaatttcaaagatcgatattgggtcaaggctaatatttggattataatttttagctatgttggtaactacttctggacacattacttcttcacagttcttggcgcgtcatatacttttccatcatggaggatgaataatgtacctcatacgacatttctcctgacccatgcttgtttcctgttctatcatatggcatcaaatatgacacttcgtagattgcgccattctacagctcatttaccacagtctatttgctggttatttgaagctgcatggattttagcactgtcatacttcatagcgtacctggagaccctagccattgcaaatttcccgtactatgaattcgttgaccgggatataatgtacaaagtaggttccttgttctacgcaatatacttcatcgtcagcttcccaatgttttcaaggattgacgagaaagacgagaagtggagcctgtccagggtagccgtcgactctctgggcgcagcaatgctggtgacgataatactggacctatggcgcatatttctggggccaatagttcccgtcccagagtcgaggcagtgtggccaaccagggctcgcatggttccaagcgcagaacggaagcacctgattcagtgaagctgcaagttctgcgtttccacttgaatacttcatcatcacctagcattcaccgaggcggagatcttagagcaataaccctcgagagaaatcatggcctcactccttttgataaatagctgtgccttctgtggccggatgcaattgtgcaaatgccactttcagtagttatatttgtatgttttctccgtttggtgaattacagagagatatgtctgtaacgtgaacaagatcatgctgttctaattcctgaaactctatgtggtgctttgtgatcggattatttttaggtgtcgtttgcttcgttggggtgtaggtgtaaccgatttgattacagcggcatccgattacgttgttgcattgtttgagccacaacttttaatgtgctaccatgtatgtaatcatatacgaactaaaatgcagtgttatctagtatgcctcccgt

SEQ ID NO: 50259 - DNA, 402 bp, Zea mays
  Clone ID: MRT4577_145831C.1
cacccttccctgatctacctccctagcctgccgccaccaccgtcgtctctgcgccgcgcagatccgccctgctggtgcggcaccactcgagcatacgtgtacggacgcgacgagacgtagtccccgcccacctcgccgaggactcgttcctgtttcgtgcgcgccagcactaccggtgtccgtgcgtggctgggccaggtcgattcgaccgaatccggtggagttcaccgtaccgtggtgtcaaatcggtgagttccatagtgttacgcgtgggggaggagcgttcgggtctgtctggccggaagtggcgctgggatggctctagggtttggttttgatcttttggcctgagggcatggcgaatgagggccggatgaagggcgtgcagggcgttgggggtgg

SEQ ID NO: 50260 - DNA, 214 bp, Zea mays
  Clone ID: MRT4577_145832C.1
ggggttcagttcagatcagtgttggccacccgaattgggtggcttccactccatcccagtgagcaatcaagcaaggaggagctgcatcagctctccctcccgtcctatctatctatatgattttttcctcttccttttgagcattggattagtgctctcaactacccacaagtgtttattagtcagccagctccttcagtgctactagcagctc

SEQ ID NO: 50261 - DNA, 226 bp, Zea mays
  Clone ID: MRT4577_145833C.1
tcgtttcatggtcaccgtcaggttgaagggtttagtcttattgacggagcacacgacttcctccctcaacgacagcatcagggacgacccgcgcctcgccaagctaccgataagcagtagcaggcgcaactactccattgacggacacacgttgatcttgctggtggaccacggatctaggcatctagggcatgaggctgacactgactctcggaggggtccctac

SEQ ID NO: 50262 - DNA, 239 bp, Zea mays
  Clone ID: MRT4577_145834C.1
cacccattgcttacctattaattcgaagatttaactgaactcgactctcacatgacttaccttaattttgcccagaactatcatcgagctgaacacgaatcagttactatccatatccacttctattatattctcactcgtcgacatatccctactagttgcagatgttattgctgatcatccaccaattgtccgctccaatgctaacatgatccaacatgaacctctatgacttcaaa

SEQ ID NO: 50263 - DNA, 597 bp, Zea mays
  unsure (1)..(597): unsure at all n locations
  Clone ID: MRT4577_145835C.1
cattgggtacctcgaggccggccggagacagaaacccccaacagagacaatgttcagcgcgcgagcccagcttgattagatagacggcatgagctccctcggcgccgtctccgggaagcccgcgagcatgaagggtatcgcgcggcatggtcgcatctccagagaaggaagctcgacggcggcagggcgcgggtccgctccatccgcaagccccgggaagccggcgcggtggtcaaggacaggagacgagagcggctagtttgacctcgacgacgtcaaagacacgaccgcacagggggagcccgacgggtctgacgcgacgacggcctacaacccgttagagatgaagttcatggagacggtcgcgggtccgaatcatcaagagaggaatgctgctctagatcctgctgctgaggaggaggataacttctggtctacntcggtgagcttgtcgttacggacctcctgtcgataaagaagggacctgacgagacgccgcagacgatacccgcgcggaaagatctatggtcagtttctccatttgcatgaaatactagtttgctttgtactgctatcgacatacggtccgctgaaatc

SEQ ID NO: 50264 - DNA, 848 bp, Zea mays
  Clone ID: MRT4577_145836C.1
aagcatgagacaactcgtccatcagttgggtcgaaaacaggaactgggtatttacttttcacagtgagggcattcaggtatcggtagtcaacacaaaacctccatgtgttgtcctttttcttcaccaacaaaaccggggaggcgaaagaactgaaactcttttggatgacaccttgttgcagcatgtcggcgatctgccgttcaatttcatccttcagttgaggagggtaccgataggctttcacaaccaccggttgggctccatccactaagggaatagtgtgatcacactctcgagtgggtggcagtccagtggggtcggcaaacactgactcaaattgctgtaaaagagactgcacttgaggatgaatcatagattgagttgtatctgaaacagtgggagataccatcaacacttcaatcacagtgcactcaggaataacagcagactgaccatgtaaagtcacagtagctccctggtatggtatagataaccactgttgggtccaatgaacacgcatgggactaaaagcttgaagccagtccattccaatgatcatgtcgtaacatggaataggaagaagtgtaacatctgtctggaaagtacacccttgtaactgccactgaagctgctgtatcttgtactgacagtgtagaatttccccactggccacacgaacttgtaattggattggaacaagctggacattggtgagcattgtctgaaatttagtatgcaagaaggaatgagaactgccactgtccactaagatgagcattgggtgaccctgaagaaatcccctgaacttcagtgtacgcacgggatttcgacccagtccagcaacccg

SEQ ID NO: 50265 - DNA, 395 bp, Zea mays
  Clone ID: MRT4577_145837C.1
ggtaccggcgcccttcctcgagtttttttttttttttttttttttttttttttttttttttttttttttttttttttttttttttttttttttttttttttttttttttaaaaaaaggggtttcgggttttataaaacgcttttgaagggttttccaggggccaaaaaagttttaaagccccttaaccgggttttttggggtcaaaaccccagggcccaaatgggaaaaggtcggggggggccttttccttaaaaaaaaaaccccacaccggggtaaaaccccgccgggaggctcccccaaaaaatatcttccccccgggtttctttttgggggggttttaatctaaaagggggggaaaagaaaaacccgccttcccccccatgagaacaagttt

SEQ ID NO: 50266 - DNA, 406 bp, Zea mays
  unsure (1)..(406): unsure at all n locations
  Clone ID: MRT4577_145838C.1
tcgggcccgttatgatgagattgtgaaggaagtatcttcctacctgaagaaggttggatacaaccctgacaagatccactatgttcccatctctggcttcgaaggtgactacatgattgagaggtccaccaaccttgactggtacaagggcccaaccctacttgaggctttggacttgatcaatgagccgaagaggccttcatacaagcctctgcgtctccccctacaggatgtgtacaagattggtggtattgcaactgttcctgttgcgcgtgttgatactggtatcatcaagtcctggatggctgttacctttggccctagtgaccttactactgaggtgaagtctgttgaaatgcaccatgaggctctccangatgcccttcctgttgacaatgttggcttc

SEQ ID NO: 50267 - DNA, 738 bp, Zea mays
  Clone ID: MRT4577_145839C.1
attcctcttccccttctctctcggccactgctggccggacgcagcatgactccatatacctgacgccctggccttcttcctactcttcacctagcgcgagcaccaccaactacgcccacctcatgatgggagagcttcgcactgatagaaacaccccctcccgactctaccatatggcatggctaaagcctattccatggctactccaaagcacaacagacacggctccatctcaaatctcctactctactatcataacatggaatatgattggcatattgtgtgtgctatctctctatgctacctactgccgttgctgtcgaaggcctacccaacacttccaaatgcagctgcactgacactgaatttgctgggatatcgtcatcatctcgactactgatatgtagaccatgatatgatacaatgtgctccgcagaatgaccgattactattcaatcatacaacatatgcgtctggtgactgtgtgcatagattgatcctgttgtgctcgagtaatgattgcaaaagaatgccatttcggtctatcatgaaaacactttgaaattcacgagatggataatgtactttccatgcctgttcccaagaatggatatccaaagctaaagctagtgagaaaaatgatctcaggccaatacatgatgcatttatgattggaactgcagagaatcctaataacagacgatttgatttgcttatcacagacgctcaattcctgac

SEQ ID NO: 50268 - DNA, 158 bp, Zea mays
  Clone ID: MRT4577_14583C.1
gcacacacaccaccaccaccaccgttcccttttgaccgacgcatcgcaaactgctaacaggccctctgactactagaagcgacccccgggtcaatgatggaacattatcttgacaagggaggtaaatttaactcttgaagcatagagcagccccgcgt

SEQ ID NO: 50269 - DNA, 581 bp, Zea mays
  Clone ID: MRT4577_145840C.1
cgcccacgccgttccgcccaacgcgttccgcccacgccgtccgggacatgacccgcaagcatgctctgcgttggtttcaacgcttggagtgaagccagagatttgcttgttgcaacaagattggatgccaccacacccaagtactccaaggcccgttatgatgagattgtgaaggaagtctcttcctacctgaagaaggttggatacaaccctgacaagatccactttgttcccatctctggtttcgaaggtgacaacatgattgagaggtccaccaaccttgactggtacaagggcccaaccctacttgaggctttggacttgatcaatgagccgaagaggccttcagacaagcccctgcgtctccccctacaggatgtgtacaagattggtggtattggaactgttcctgttgggcgcgccgagactggtatcatcaaccctggtatggttgctacctttggtcctaggggccgcactactgaggacaagcctggtgaagcgcaccatgaggctctccacgaggcccttcctggcgacaatggcggcttcaaagtctgcaacggctcccgcgaaggctc

SEQ ID NO: 50270 - DNA, 124 bp, Zea mays
  Clone ID: MRT4577_145841C.1
cgtccggtcacagagactccagctcagcctgagcgggtctgtcctaaacaggcgggatatggtgtcgaatggaactgggagaatagagaactaagatcacaatcagccacaaactggaacctgt

SEQ ID NO: 50271 - DNA, 216 bp, Zea mays
  Clone ID: MRT4577_145842C.1
ccatactcgatctcatagatccctatggaattctttaaaaggccttgggcgatgaaagtcgtaagtacggcttgtagggagatctttcctatacttcgagatccaccctacaatatggggcctaaaagccaaaaaaataagcgattcatttttagcccttataaaatgataacggattcttgaacctattacacgctcatgtcacgtctaggtact

SEQ ID NO: 50272 - DNA, 2139 bp, Zea mays
  Clone ID: MRT4577_145843C.1
ggccggggctgtccgattgtgcgctgtcgcagcctctgccctctcccagcccgctcctccatctccggtgagacgcgaattgaatcgcatcgaatccatgggcagctcctcgaataccaacacgagcggcggggccagcgacaaggaggagaagaagaaggaggacaagatcaaaggcaaggactcgtcggggccatccttcaaggagaacgaaagggtcctcgcctaccacggccccctcctctacgaggccaaggttcaaaggatcgaaaaccatgaagatgaatggcgctactttgtccattatctcggttggaataagaactgggatgaatgggttgcaaatgaccgcttgttggaattgacggaggaaaacgtgcgcaaacaacaagagcttgataagaatcaggtagttgacaaaacaatgaagtctggacggtcaacacagcataaaccaaaagtctccaatgcggatgcaaaagctgataaagatgacactaagagtctcatttcagtgaaggggaagaaacgtaaaagtcagcttgggactgagattcaggacaaggaaaaaagatcatcacatagtctactagtgttgcagtttcctttgccactgaagaagcaacttgtggatgattgggagtttgttacgcagatgggtaagcaggcccaagtggcaagctcattagctcattcagaaaaagactttgcaactccattctcattcagaaggaagactttgtaactccatgtattccaattatttttaatggaaattcagcaatctgtcaacccttgtggtagtcacttgaatattacagacatttgctgaattggcagttaaataagaaatgccgtccatgcaataggatccaaagaatgcggcaaacattttccatatatttatttatttctccaaaacatcaaacctcaagacagatttgtccgtgcaatagggtccaaaagaacactaatatttgagtttgtatttttttctggacccactgataaatagggaaactctgtatatcattatcatctcaaagagcgaaagggcctctagcgtaatggttaaggcttccgagtagcacttccaggccctgagttcgatccccctcgggagtgaattttggatttagttaaaaaaatcccttagttgagccccgcccgctctcggggatcgatatcctgcccgtcatcctccgactgggccgttgcagagtgggcagttgatcggcccgttagtgatgggggccagggttcggggttttttcgtccgggaccatgtttcagtttcttcttaatataataccgggagggcggtctttccctcgccggccgagttttttttattatcagctcaaagaaaacaagctaaccttagtgataaactgatccgaacaccagatgaaagtcttctttgaaatagataaccatattcgcctcactttttttgttcaccacaactacctgagatttccttggcctgcagcttgtgaagctaccacgatcacctactgttgatgatattctaaagaagtacttggaacaccgggcaaagaaggatggcaagataaatgactcctacgctgagattctgaaaggattacgctgctactttgataaagcattgcctgcaatgcttttatataagaaagagcgagatcagtatgctgaagaagttaaaggtgatgtctcaccatcaactgtatatggagctgagcatctattgcgcctttttgtaaaattgccagagctacttgcttctgtcaatatggaggaagatgcgttgaacaagctacagctgaaactgctggacgttctcaagtttcttcagaagaatcagatcaccttctttacctctgcgtacgatggttcttgtaaaggtgcagatgaggataaaaccaaatgattgcatgtgaacgttttatatcatgtaacatctttcgatggacttgtctggcactattgttgatatgaatgtcgcttaggacaacaatcggtttatgtaggatagatgctgcagattcctgaaagacggtacttgaactgcccggagcatgttgtattttcttaagatgctggaactaagacggcttagtcgaattttcactatcaagtgagtctcggtcttgcccc

SEQ ID NO: 50273 - DNA, 1268 bp, Zea mays
  Clone ID: MRT4577_145844C.1
ttgggaccctcgaggccggccggggcgaatttaatcgcatcgaatccatgggcagctcctcgaataccaacacaagcggcggggccagcgacaaggaggagaagaaggaggacaaggtcaaaggcaaggactcgtcggggccatccttcaaggagaacgaaagggtcctcgcctaccacggccccctcctctacgaggccaaggttcaaaggatcgaaaaccatgaagatgaatggcgctactttgtccattatctcggttggaataagaactgggatgaatgggttgcaaatgaccgcttgttggaattgacggaggaaaacgtgcgcaaacaacaagagcttgataagaatcaggtagttgacaaaacaatgaagtctggacggtcaacacagcataaaccaaaagtctccaatgcggatgcaaaagctgataaagatgacactaagagtctcatttcagtgaaggggaagaaacgtaaaagtcagcttgggactgagtttcctttgccactgaagaagcaacttgtggatgattgggagtttgttacgcagatgggtaagcttgtgaagctaccacgatcacctactgttgatgatattctaaagaagtacttggaacaccgggcaaagaaggatggcaagataaatgactcctatgctgagattctgaaaggattacgctgctactttgataaagcattgcctgcaatgcttttatataagaaagagcgagatcagtatgctgaagaagttaaaggtgatgtctcaccatcaactgtatatggagctgagcatctattgcgcctttttgtaaaattgccagagctacttgcttctgtcaatatggaggaagatgcgttgaacaagctacagctgaaactgctggacgttctcaagtttcttcagaagaatcagatcaccttctttacctctgcgtacgatggttcttgtaaaggtgcagatgaggataaaaccaaatgattgcatgtgaacgttttatatcatgtaacatctttcgatggacttgtctggcactattgttgatatgaatgtcgcttaggacaacaatcggtttatgtaggatagatgctgcagattcctgaaagacggtacttgaactgcccggagcatgttgtattttcttaagatgctggaactaagacggcttagttgaattttcactatcaagtgagtctcggtcttgccccaaaaagaatgttttgtacctcctctgtcccaatttatacgacaatttataattcgtat

SEQ ID NO: 50274 - DNA, 2442 bp, Zea mays
  Clone ID: MRT4577_145845C.1
ggttattaaagcggtaaaacgttaaaacgttatgaaccaactttttaacatttaaacgtttaaacgaacgttgaaacgtcttttcagatttgacatagaagttcaaatataaaatatgttcatacataagttgagtacttgagttcacaaaccaaatagcacaaaaagaaacagatcaagttcaacaacacaagttcaaccacacaatgcctcactatttgttgccattgaaatttactgtgagcaaatagagattgattcactataagcaaaatcaacaaatagggcctaaaacaatgggcgctggctggtactatgatcttgggcgctggctgctggtcttgcggagggaggaggagggcgctggctgctggtcttgcggtcgccggtcggccggcggtggcgcaggcgcgcagcggtctgctgtgggcctgtccgcctgtgggaggagggagtagggggagccgaggtcagtggagggcagcggcatacctgtggggcggtcggccggcggtctgctgatgtctgctgactgctgtggcggcggaggagaggagggcagccgactaaggagtgctccgcgctggagaggaagcctccacgggtacgcgctggctggacctaaaccctaaaggcccaggaaaggcccacagatgggtaaaacgtccccagaacgcgtaaaacgtcctaaaacgtgtttaggacgcttaaacgacgtttaaacatccaaaacggacgttctacgccagttttctaaaacgttcggacgttccagctcctaataacgttttctcgcttaaacgacgcttaaacgtcgtttaagcgacgttttaataacaatgttgctgggaatgttttcccttggttgtaacctagtatagctttctttaaattgctactcccttccctgggacaagtcaaatatcttgtttccttttataatgaggttctaccattttttctctattccacatcttaggccctgtttggaactcctagagctaatagttatccagctaacaaattgttagctggattgagccagctaatgaactaatggttggctgtgaggtagataataattagttggtgtattagttgggtgtgtttggaacctctatagctaattttagcagctaactattaaaggtttcaaacagggccttaaaagaaaaatcaggcaatccatgcgggtgctttctaaattgatccaaagcctgatattcatttttcaaacatcaataacaatgacattcaacaaagaattacttacagctgaatgtgtggaaataaaagcactgaaaatgttgcatagttcatttcaaagtgttggagctatcatagtaccggtatgaatttattacccacccatccttagtgccagcagctgactcaaaattcaatgttttagctatctgctttagcaaattaagagactaacaaaccactgtgcttatcttgtaacatattaattactatctctgaagattcaggacaaggaaaaaagatcatcacatagtctactagtgttgcagtttcctttgccactgaagaagcaacttgtggatgattgggagtttgttacgcagatgggtaagcttgtgaagctaccacgatcacctactgttgatgatattctaaagaagtacttggaacaccgggcaaagaaggatggcaagataaatgactcctatgctgagattctgaaaggattacgctgctactttgataaagcattgcctgcaatgcttttatataagaaagagcgagatcagtatgctgaagaagttaaaggtgatgtctcaccatcaactgtatatggagctgagcatctattgcgcctttttgtaaaattgccagagctacttgcttctgtcaatatggaggaagatgcgttgaacaagctacagctgaaactgctggacgttctcaagtttcttcagaagaatcagatcaccttctttacctctgcgtacgatggttcttgtaaaggtgcagatgaggataaaaccaaatgattgcatgtgaacgttttatatcatgtaacatctttcgatggacttgtctggcactattgttgatatgaatgtcgcttaggacaacaatcggtttatgtaggatagatgctgcagattcctgaaagacggtacttgaactgcccggagcatgttgtattttcttaagatgctggaactaagacggcttagttgaattttcactatcaagtgagtctcggtcttgccccaaaaagaatgttttgtaaaaaaacctcctctgtcccaatttatacgacaatttataatgcgtatgcaaaaactgataaagatgacactaagagtctcatttcagtgaaggggaagaaacgtaaaagtcagcttgggactgagtttcctttgccactgaagaagcaacttgtggatgattgggagtttgttacgcaga

SEQ ID NO: 50275 - DNA, 375 bp, Zea mays
  Clone ID: MRT4577_145846C.1
gggggggacatgcaaaacggtactggaaatccccaaaatacaacagccgggggcggcagctacggggaaacaaagggacagagaacgctccccggcggccattacctaaaaaaacaagggccaggcccccattaaatacagccccctgggggccccgaaaaaagtgggggggaacaaaaaaagccccccgtcacacccataggaggcggggggtagcacgggccacccccccaccaaaaagggcttccactgtttgggcccccccaggaggggggcccatagggccccccccccgggggccccaaacacgggtttaaacgagggggactttttggcgggggccctgcaacttttgcagggcacaacgggggggaa

SEQ ID NO: 50276 - DNA, 412 bp, Zea mays
  Clone ID: MRT4577_145847C.1
agttgtttcctctcgccaattatttacggagctaacttgcgggtttgcattccagtctgcgagcaatgcaacgaagtgcgtctttcataccaggagaccccactgcagctggcaaggtcaccgggatacggccgtcctttcttaaagaatggaaaacatggcgctattgtatccccatccccagcctgttcggatcatcttggcatagcacacctcaaatgctttccattcattactggaagaagaacagcatttctctatgcgccaatgggaatgccactgtcttttctgaacggaagggtacgtacatccgtatggaacctggccagtgctaaagaagaggaggagggaaatgccagtgttgtgccggatctctttcttggaatggaatcatacttttgaacggcactat

SEQ ID NO: 50277 - DNA, 252 bp, Zea mays
  Clone ID: MRT4577_145848C.1
ggtatctgtattcaatagaataactgaggagtccaagtctgctaggggggggggttcccagccagcaggcattggtggtgaaccctacttagagcttggtttgtagatatatatcataccatatctcgcatgggatgtgttgcgcgattacaggacttgcttctcttatgttcgaactacatgcttgttagttcataatcctttcttaatcgcgtcgggttgatatgggcccttgtctgtccgataagatgc

SEQ ID NO: 50278 - DNA, 407 bp, Zea mays
  Clone ID: MRT4577_145849C.1
ttttatatacaaagatcattttttgagctttgacatcaagttttcatatttctacataaagatcttgacataaaatctaacatggctaatctgcactcttctggaatactaccaccacctaccatgatgatgaacttgacataatatataaaggatcgctttcatactccaagcgacttattggcttcctaaattatatcgatgaggattgtctcagaagctgagaatacaagcccttaataaatcacagagccacatttatatgtaatgagcccttctgttcctgtaagcactcctacattactaagcttcaccatggattcggccaaaccattgtctaaggaaaattggttgctgctgccataatacaccgtaggagcagcccctctagccttaattagtgcttg

SEQ ID NO: 50279 - DNA, 489 bp, Zea mays
  Clone ID: MRT4577_14584C.1
ggggtaaaggccgattcccaactcgataatttctgcattaatttccaatgagaaaattttaaaacaaacttgtaaccagttatttacgttcgattacattcctatccacattgaccccgttcaaagcagtctgttcgtggactccagcgttcaggtatcagagcaaaaagcattcttaacaaaattcccaactagctgtccagggaaggacctaccttgcccaaagaaatcaattgggatgaaaatgtggtactaaaaatactcgacgatatgatactatttggtatgcggggctttacattgacatgcgttattctttaactgggtggttgtgttgtgcttaaaataaaaaatcagtccttggttgcaaaacaacttgtgtccattgtttgtccattttgaaacggtggcacttttaccctgtttgttgtaaaaaaggatttatacaaaatggtccaaacataataaaatgacccccattcccttttt

SEQ ID NO: 50280 - DNA, 275 bp, Zea mays
  Clone ID: MRT4577_145850C.1
gggagaaatagggattcttaacctggggtggttagacaataaagggaagacgaaacagagatccaacccaccaaacttaagaactgaagccgggtccattcaggaggggtccattcagtaggggcgaaaaggctagaacctagatcctacctccgtttttaaatatttatcgccgattagtttatttttgaactaaaacgcgacaaaaaaaaacaaagggggcattattttttttacaggactatttttttttgcatgccatccatatagaaagc

SEQ ID NO: 50281 - DNA, 159 bp, Zea mays
  Clone ID: MRT4577_145851C.1
ccgcccccccctcgggttttttttttttttgaccaaagctctgctttatgacctgtcattagcgcggtaggttaaagccgaaggacccccgctaggctttacaactcgcaggtagactgatccttcgatccactctccgaccgcgaggaggcagggtct

SEQ ID NO: 50282 - DNA, 252 bp, Zea mays
  Clone ID: MRT4577_145852C.1
ttttaccacatcgaactgtgcgcgcgctgcgagggcagcagcggcggtcataagcttccgttgcgacagctcccgacctgctgccggtcttgccctcttctagtcggcgcgaatcccgaggcggacgaggaagatgggagctgagtgggggtgggccccattagccatgagtgtcatcggggcccccctggacggcggccttcttgccaaagggcccgggcttcggctctggccagtggtattggtgaagcg

SEQ ID NO: 50283 - DNA, 142 bp, Zea mays
  Clone ID: MRT4577_145853C.1
cccacgcgtccgcccacgcgtccggttagttacctggtgctaacgaagtatactcacggggaggggctaattttacctccgtcacaagcatttattaaaacatcattctaaaattcaaacccatgaacactcagacctaacc

SEQ ID NO: 50284 - DNA, 1151 bp, Zea mays
  unsure (1)..(1151): unsure at all n locations
  Clone ID: MRT4577_145854C.1
ggtaccctccnggttcggccggtcgttcttcggggtgttactggagccagcttggtcggttcgtttaccaccaaagcgcctcgcaaaatctcgccgccgaccgccatggcagccgccgaggcgacgcgtccgctgctcgttgctatatctctcgccgtagccgcctgctgcctcgcgcagctggcggtgggggacacgaacggcgtctacgagccgtgcagtgacgcacggatccagcgcggggacggcttcaccttcggggtggtcttcgcgggatacaacgccttcttctccggcaacacacagctctccccctgcgaccgccgcctcaacctcgctgcctccgggcagctcgccgtcttccgccccaaggtcgacgagatctccctcctcaccatcaacaccactaccggattcaacccagcttcagctggtggattcatggtagcatttgccggcaggaagtatgcagctagatctattccgatatttgtatccaacacctcagtcacagtgtccagcttcacactggtacttgagttcaacaaaggcagactccaaaacttgcactggaagaaggacggcgcaaacagacatgcgccatcaggacgcagagctgcaagagccaagggcccgtcgactgcagcgtcggcatccagctggctttctttggcacggacaagcacgagtcggttttgaactcgtggtacgaggtgtccaacctgaggcagtactgcctctatgggctctactccaacctcaaggacaccctgagcggccagttcaacaagatcttctaggctgttttggcaacctcaaggacaccctgagcgtccagttcaacaagatcttctaggctgttttggtgctgccattgtttattctctcctgctcccatcccgatctttcttaatcctgttttggtgcttgtatccagaccagttttaaccctgtctcagctctaccgtatgtaccattgcccgttggtgtcgttttagtgcctaacaatatttatgaattttgtgatgagctagctactgtcctgccgatgactatgtttgcttccaaaggacacggcttatcgtcgctgatataccactgtgtcgaggtattatgttataacgtcattgtggtcttgacatggactgcct

SEQ ID NO: 50285 - DNA, 842 bp, Zea mays
  Clone ID: MRT4577_145855C.1
cactcctatgggcgattgcgggcctcgacgccggccgggaactttcgggcgccaatccacggtcaactacacaacaccttgtcgccttaaacgcacaaccagcgacaagatgcgaacctacgaggacaccttctccggcgcgagaatctaccctggcaagggtaagctctacgtccgtggcgacagcaagatcttccgattccagaacggcaagtcggagtctctcttccttcaaaggaagaacccccgccgtatcgcatggaccgtcctctaccgccgacagcaccgcaagggtatctctgaggaggttgccaagaagcgaacccgccgcactgtcaaggctcagcgtggcatcgttggtgcttctcttgacgtgatcaaggagaagcgcaacatccgacccgaggcccgttccgctgcccgagcccaggccatcaaggagagcaaggagaagaagcaggccgatgctgctgccaagaagtccgagaaggctaagctcgctgcccaggcctccaagggccaggctgtccgacaagtcagcaagcagggtgccaagggctctgctcctaaggttcaggccaagagccgttaagttaggattggactttgagggaggaagaaaatggaagagtggagtccgtggttcttgtgtctttatccggccggttcttctacaatctcgggtgcatggattgccaatagggtgcattgatagctgagcaatgcaaaatggtcaaacaaacaaaaaaaaaaaacagcggcccgctgccgtgacgaacaagggatgtgcagttgtgcggtggctcggtaaatacctcacggcgttattgggaactagcaac

SEQ ID NO: 50286 - DNA, 1108 bp, Zea mays
  Clone ID: MRT4577_145856C.1
actcgctgttactgtcacccactagccacgaccacgagctctctcgtctcttgagaaactgcggtcattcttcactggagccagcttggtcggttcgtttaccaccaaagcgcaccgcaaaatctcgccgccgaccgccatggcagccgccgacgcgacgcgtccgctgctcgttgctatatctctcgccgtagccgcctgctgcctcgcgcagctggcggtgggggacacgaacggcgtctacgagccgtgcagtgacgcacggatccagcgcggggacggcttcaccttcggggtggtcttcgcgggatacaacgccttcttctccggcaacacacagctctccccctgcgaccgccgcctcaacctcgctgcctccgggcagctcgccgtcttccgccccaaggtcgacgagatctccctcctcaccatcaacaccactaccggattcaacccagcttcagctggtggattcatggtagcatttgccggcaggaagtatgcagctagatctattccgatatttgtatccaacacctcagtcacagtgtccagcttcacactggtacttgagttcaacaaaggcagactccaaaacttgcactggaagaaggacggctgtggcgcttgctccggcaagtcgaacttcgtctgcctcggcaaacagacatgcgccatcaggacgcagagctgcaagagccaagggcccgtcgactgcagcgtcggcatccagctggctttctctggcacggacaagcacgagtcggttctgaactcgtggtacgaggtgtccaacctgaggcagtactccctctacgggctctactccaacctcaaggacaccctgagcggccagttcaacaagatcttctaggctgctttggtgctgccattgtttattctctcctgctcccatcccgatcattcttaatcctgatgttgtgcgtaacattattttggtttgccgtccgggttgcctgtatccagaccagttttaaccctgtctcagctctaccgtatgtaccattgcctgatggtgtcgttttagtgcctaacaagatttatgaattttgtgatgagctaaaaaaaaaaaaaaaaaaggccccta

SEQ ID NO: 50287 - DNA, 1233 bp, Zea mays
  Clone ID: MRT4577_145857C.1
gggtacctcgaggccggccgggcgcgggctccaccggctctaccgctgtcgctcacgagctctccccgcccgggagaaacggcggtggttactggaagccagcttggccggttcggttgccaccaacgcgccccgcaaaatctcgtcgccgaccgccatggcagccgccgacgcgtcgcgtacgctgcttgctgcagtatctctcgccttagctgcctgctgcctcgcgcagctggcggcgggggacacgaacggcgtctacgagccgtgcagcgacgcacggatccagcgcggggacggcttcaccttcggggtcgtcttcgcgggatacaacgccttcttttccggcaacacacagctctccccctgcgaccgccgcctcaacctcgctgcctccgggcagctcgccgtcttccgccccaaggtcgatgagatctctctcctcaccatcaacaccaccactggattcaacccagcttcagctggtggatttatggtagcatttgctggtaggaagtatgcagctagatctattccgatattcgtatccaacacctcagttacagtgtccagcttcaccctggtactcgagttcaacaaaggcagactccaaaacttgcactggaagaaggacggctgcggcgcttgctccggcaagtcgaacttcgtctgcctcggcaaacagacatgcgccatcaggacgcagagctgcaagagccaagggcccgtcgactgcagcgtcggcatccagctggctttctctggcacggacaagcacgagtcggttctgaactcgtggtacgaggtgtccaacctgaggcagtactccctctacgggctctactccaacctcaaggacaccctgagcggccagttcaacaagatcttctaggctgctttggtgctgccattgtttattctctcctgctcccatcccgatcattcttaatcctgatgttgtgcgtaacattattttggtttgccgtccgggttgcctgtatccagaccagttttaaccctgtctcagctctaccgtatgtaccattgcctgatggtgtcgttttagtgcctaacaagatttatgaattttgtgatgagctagctactgtcctgccgatgactatgtttgcttccaaaggacacggcttatcgtcgctgataccactgtgtcgaggtattatgttataacgtcattgtggtcttgacatgacaatgtcttggtattataaaaaa

SEQ ID NO: 50288 - DNA, 757 bp, Zea mays
  Clone ID: MRT4577_145858C.1
tatacttcctgtcaaattaagattgtagtttgatatgatctgaactctatgcctgcgtctccccacttttcattgattaactgtttggatccattaaaagtcaatgaaacatgtgattcgaagcggtttcgaaaggtgatgcaggggtgaagtttgcatagcattgataggccggaaatcggatttgaggacccaatgatatgccgctgcatggaaagtttcatcatttcatgcctgtggtcggtttgctcgtgaagattgcttttgtttgctgtggaagcgggtgcaagtattacacagcagcaatatcgggactgttgtgaaggatgaagttgagagtcaacatctgagaaccatggagctcaccatacgccacaaaggaactaaagctgctagtttaggcatggttaagagagtcagtgctggtcctttaggttaaataaaaactttgcggggccgcacagtgtgcagaaaaggttgagtctagggcactaggctgatggtctatgtatgtgatgtacgcagataggcagatacctatgcgttcaaagtagcgcatcaaattttggccccattattttcactgcagtatcatgatgtgatgttgatagtagagatagagcaagtatgatactccctccgtcctaatgtttgtcgttcttgctttttaaggagtcaaacatctatttttatagtaaaattattcgaagatacaaatgttactaatatattttatattaatggctgtaatcgcatt

SEQ ID NO: 50289 - DNA, 1226 bp, Zea mays
  Clone ID: MRT4577_145859C.1
gggaagtaaaatttggtcctttaaaacggccccccccctttttttttttttttttttttttttttttttttttttttttttttttttttttttttttttttttttttttttttttttttttttttttttttttttttttttttttaaaactaaagttaaagctcaagtggtgaccaaaaaaagggcgctaaaatgacaccaacgggcaacggtagagttcagacagcgttaaaacaggtctggatacaagcaacctgggcgggcggcaactaaaagaatgtgaagcaagcacaacatgaggaaccggagcaaccgacagaaagaagaggagggagcaggggggagaataaacaatggcagcgccaaaacagcctagaagatcttgttgaactggccgctcagggtgcccttgaggtttgagtagagcccgtagagggagtactgcctcaggttggacacctcgtaccacgagttcagaaccgactcgtgcttgtccgtgccggagaaagccagctggatgccgacgctgcagtcgacaggcccttggctcttgcagctctgcgtccggatggcgcatgtctgtttgccaaggcagacgaagtttgatttgccggagcaggcaccgcagccgtccttcttccagtgcaggttttcaagtctgcctttgttgaactcgagcaccagggtgaagctggacactgtaactgaggtgttggatacgaatatcgggattgatctagctgcatacttcctaccagcaaatgctaccataaatccaccagctgaagccttggggcggaagacggcgagctgcccggaggcagcgaggttgaggcggcggtcgcagggggagagctgtgtgttgccggaaaagaaggcgttgtatcccgcgaagacgaccccgaaggtgaagccgtccccgcgctggatccgtccgtcgctgcacggctcgtagacgccgttcgtatcccccgccgccagctgcgcgaggcagcaggcagctaaggcgagagatactgcagcaagcagcgtacgcgacgcgtcggcggctgccatggcggtcggcgacgagattttgcggggcgcgttggtggcaaccgaaccggccaagctggcttccagtaaccaccgccgtttctgttgggcggagagctcgtgagcgacagcggtagaggtgggtgtgagggagaaggtgactaggtgaaagtggtggggccccggccagg

SEQ ID NO: 50290 - DNA, 1170 bp, Zea mays
  Clone ID: MRT4577_14585C.1
cccatttccccatctccgacctcccccttcctctcccccctgccgctccccgcgccgagaaggagaaccccagccgccgcgcagcgcgccgcccatggcctcctcgtcggagaacgcggctgtgccgccggaggaggagccccaggccccgccgccgccggacacagagcctaccgaggcggcgcccggcgaggctgaggatgagccgcaaaccctagagcgagcgcaggagctcttcgacaggggttccaaggccatcgaggatgaggacttcgtcgacgccgtagactgtctcagccgagcgctcgagatcagggcttcacattatggagagctcgcgccggagtgtgccagcacatacttcaaatatggatgtgccctgctatacaaagctcaggaggagagtgatgttttgggaaatgttcccaagagcttgccaaatgaagactcagtgaagagtacagctactaaagaagaaatgggctccctttaaaaagagctagagcagcttactagtatattgcctgatcttgagaagaagcttgaggacctgtctgaagcaaacccaagcgctgacatggatgagatggtgaaggcaattgcgtccagggtaactgaagtgatgccaaaagctgcatcttttacttcttcccagatggcaacctcaagcaatggattcgactcctcggttatgtctacggcagcgacaaccggaagctctggaagcacggtgactgaccttggggttgtaggcagaggcgtcaaacgagctagcatcaagccgatctctgctgaacctgctgctaagaaacctgcacttgattcaccatctctccaaggtgacagcagcatcaactctgaggttgtccctgcaacgcagactggagacgagtccgtatctaagtaaattacaatttcattagccctactgtaatgttaacttgctggaacatattagctgctatgtaaacgcttaagaagggactgctggagccatagactcatcgtgagctgacaattgaaatgttaaattgctgagatcatcatggcggtaaatcatgtatgctatatcaaatatgcttggtgaaaaaaaaaaaaaaaaacaggccccaggctgtgaacgtgacgttcactgcgcgtgctgagaggacacgcgtggcgttctacagg

SEQ ID NO: 50291 - DNA, 1115 bp, Zea mays
  Clone ID: MRT4577_145860C.1
ggaaatcacgtccgcggcgagcaggggggggggggggtttctagcggccgaagttcttgctgaccaggtacttttggcttatgaatccatgaagcgcggtaacttgacatcagatcttgaagttgatacaattcagacaatgccactgcacacatcttttttatgcgtatctgaactgggggcctgccttcttatggaaatcagaaggttggcgagcaacaattgtgctgagtttctagagagctaagttcttgctgacaaggtacacttaacttaggtgggcatgaagtgaattgaaacatcattccagacaaggtttttcttcctatactttctgtcaaattaagcttgtagtttgatatgatctgaactctatgcctgcctttctattcttttcattgattaactgtttggatccattaaaagtcaatgaaacatgtgattcgaagcggtttcgaaaggtgatgcaggtgtgaagtttgcatagcatcgataggccggaaatcggatttgaggcatgtctagtatcagaatccttcattcattccttacctaatttctttgagaggacccaatgatatgccgctggatggaaagttcatcatttcatgcctatggtcggtttgctcgtgaagattgcttttgttcgctgtggaagcgggtgcaagtattacacagcagcaatatcggggactgttgtgaatgatgaagttgagagtcaacatctgagaaccatggaggtcaccatacgccacaaaggaaccaagctgctagtttaagcatggttaagagagtcagtgctggtcctttaggttaaataaaaactttgcggggccgcacagtgtgcagaaaaggttgagtctagggcactaggctgatggtctatgtatgtggtgtacgcagataggcagatacctatgcattcaaagtagtgcatcaaattttggccccattattttcactgcagtaccatgatgtgatgttggtagtagagatagagcaagtatgatactccctcggtccctccgtccaaatgtttgtcgttcttgctttttaaggagtcaaacatcttgaactttgaccatatttatataaaaaatattaatatttatagt

SEQ ID NO: 50292 - DNA, 1212 bp, Zea mays
  Clone ID: MRT4577_145861C.1
cattgggtacctcgaggccggccgggacccactagccacgggccggagctctctcctctcttgagaaactgcggtcgttcgagagagttcttcactggagccagcttggtcggttcgtttaccaccaaagcgccccgcaaaatctcgccgccgaccgccatggcagccgccgacgcgacgcgtccgctgctcgttgctatatctctcgccgtagccgcctgctgcctcgcgcagctggcggtgggggacacgaacggcgtctacgagccgtgcagtgacgcacggatccagcgcggggacggcttcaccttcggggtggtcttcgcgggatacaacgccttcttctccggcaacacacagctctccccctgcgaccgccgcctcaacctcgctgcctccgggcagctcgccgtcttccgccccaaggtcgacgagatctccctcctcaccatcaacaccactaccggattcaacccagcttcagctggtggattcatggtagcatttgccggcaggaagtatgcagctagatctattccgatatttgtatccaacacctcagtcacagtgtccagcttcacactggtacttgagttcaacaaaggcagactccaaaacttgcactggaagaaggacggctgtggcgcttgctccggcaagtcgaacttcgtctgcctgggcaaacagacatgcgccatcaggacgcagagctgcaagagccaagggcccgtcgactgcagcgttggcatccagctggctttctctggcacggacaagcacgagtcggttctgaactcgtggtacgaggtgtccaacctgaggcagtactccctctatgggctctactccaacctcaaggacaccctgagcggccagttcaacaagatcttctaggctgttttggcaacctcaaggacaccctgagcgtccagttcaacaagatcttctaggctgttttggtgctgccattgtttattctctcctgctcccatcccgatctttcttaatcctgttttggtgcttgtatccagaccagttttaaccctgtctcagctctaccgtatgtaccattgcccgttggtgtcgttttagtgcctaacaatatttataaattctgtgatgagcaagctactgtaataaagatgccctttgtttgcttccaaaggacacgggcttatcgacgcttgttaaaaaaaaaaaaaaaagcgggcc

SEQ ID NO: 50293 - DNA, 352 bp, Zea mays
  Clone ID: MRT4577_145862C.1
tttttttttttttttttttacatttttaattttttgggtttttttaaaaaatattgggggtaaatcacattttacttttaaaacaagacacacacccccattgccctcagggaaaaagcgtgtttttctttctaggaacccccccccaacaatgttttaccagaccacccccccccacgcgaaactatccaatcaaccccccccccgcacaggctgaccccaaaaaaaggttaaagttaccaaccacaacccctttaaagaagtaatggaccaaacacaccaccagggactacgttcaaatatgggccccctccaaagcaccaaaactttccagcacaggttttattttaac

SEQ ID NO: 50294 - DNA, 302 bp, Zea mays
  Clone ID: MRT4577_145863C.1
ctcgctccgttcacagctaaagatatgtggaagtccgcgtttttcttgtctctgctgaacaacccctaccctcaacacatcgatgcgctccagaccaggatcatcaataagggcagctatcgctgcttcaattaagctggctccccaggcaacccaggaattttcaatttccccttgcgtggcctcgtcctgaagtcaaattctatactgggaaaacctatcatacgcgtgacaccaaattttatggcacagacggtgatgcagcaccagcccttgctcacgatgccattcttgaacatgct

SEQ ID NO: 50295 - DNA, 228 bp, Zea mays
  Clone ID: MRT4577_145864C.1
cttcaccaaagcagattacttgaagacctatgcacatgtcctccagcctgttgacggccaagctaactggccaatttcagacatgcctagaccaaaaccaccagcttttgtcaaaatgccaggaaggccaaaaactgaaagaactagagaggtgagggaagcacctaaggggactaaactaagcaggatgggcattaagatgagctgcaggttgtgtgacaaacctgg

SEQ ID NO: 50296 - DNA, 187 bp, Zea mays
  Clone ID: MRT4577_145865C.1
gtcaccacgctacacatccacttccatagagctgatcgtactcttgcactcgcattctttactgctctagttaccttatctattgtactaccctcgtctgtagtataacctgtgatctcacccatggccctgccgaggtccagacccgaccgtcgtgggaccgagaaacgccggtggtggagacccc

SEQ ID NO: 50297 - DNA, 285 bp, Zea mays
  Clone ID: MRT4577_145866C.1
cttctgctccccctacctatcaggttctttttcatgacgctctccagactattgtttcgggggtgagcgtatccatattgcagcgtcggatcatgaataccgttgcttcattggcagccatttctgggccacggacgacaactacctccacaacgtcttcagcacctaccgcaaagtccttgactacaagattatcctcgatcgctatacacacaggtgccaccgctctcccttcgtcacctttttcactgaggaggcgatcaagaacgccatcgatggcatcaa

SEQ ID NO: 50298 - DNA, 238 bp, Zea mays
  Clone ID: MRT4577_145867C.1
gctatcctgtggcaactcaagaggactattttttctacaattgctaaggaacttgaaatgggactctaaatagaaagagaggagggatgcttacattctcatttgggctaatatcaagggcatggaatcaggcaaaacttcacatattgaaagcttcaaggacaaaacgattgcagatggggagtatcttccatgagctcctaaatgctgtgcagagcaagcgttgtagactggaaca

SEQ ID NO: 50299 - DNA, 269 bp, Zea mays
  Clone ID: MRT4577_145868C.1
ttgttttttgttttacttgggttttttggtttttttttaaaaaaaagggggcactctaaaaagaaagaagcccaagggcttcaaccgaactggttaaacctttcctaaactggcaacactttattcaagatactgtttttaccgcaagaatcttgccttatcaaaaaccgtctgaatgtgccaaccccgtctccgctagaagaaattcacctggccgattggtgctaacgaacggcactcaaacaggtttaactgcgagaacggggagc

SEQ ID NO: 50300 - DNA, 740 bp, Zea mays
  Clone ID: MRT4577_145869C.1
agccctaaatgatttcaatattcatagatatcaagaatgatcaagtaagctccgaccatacaatttcttacgtcataaacaacaaccctgatccaatgtaacaattgaaccctaagtacaataacaacattataccagtaacaaaaatataaacggactgatacatcccaacgcaaaagagttcaacatcattcacttcatgattgtatcagttgtagtttgtgttcaagaacgggttcttctcgttgtagaaggggtttgtgaaactgctggtgaggctttcattgactttcttgcctttcaccgcagagtccggctgatggcgagagaaggccctcgggttgaagttgtcatcaaggtcgatgtcctcaaaggtagcccagccctcactgccagtgatgtccctctgcttctccatctcttcgacgtgctgcttgaacccttccttagccgcggtgatcacgccatccccgtgctgatcacaccatgcctttgggaagaaggacttgaggtcagacttgtccaccggaagctttgttgagatggcctccatctgctgattcgagaagttcaagttccgatttgtagatgatagctcagcctgaatccttgagagctctttctttgtgttctccaccagaaccttgtcacgcagcagctcggaagcagagtcatcgtccgtgtccgagtgcagcctcgtcttggccctcttggcatccggtccagaagcagccatgggc

SEQ ID NO: 50301 - DNA, 348 bp, Zea mays
  Clone ID: MRT4577_14586C.1
ggaaaagcaagcgcagggcatcaacttatttgggcacaagcccaaaaaaaaggatccaaattcaaaaaacaaacttgcttaatttcaaaaaacttttttggacgggggggcatttttaagcatcagctttaaacctcactgaaaacctaatttgggcaaccaaaacattcagcttttctttaggagggacagcagggaaacccttttgacccaaatctggtccatttgcttacaaaaaaggggagagatcggcgaaaaccgaaaccactatttcccgccttcgctgaaaccccccgaacggccctttccctcccgaacaggccccatcgggcccaggaactttttgtt

SEQ ID NO: 50302 - DNA, 175 bp, Zea mays
  Clone ID: MRT4577_145870C.1
tctgcactgcgacgctgtacgtcaagcgtcggatatcggctcgagcaaacagcttacccagcctcacgtggatagacgaggtcctaaatacaagctgcataaattgacataattcaatatcggcatccagaatgatagacgtggactcggtaacgtactttggcacatgagacac

SEQ ID NO: 50303 - DNA, 494 bp, Zea mays
  Clone ID: MRT4577_145871C.1
cggacgcgtgggcccaaccccacccagcgcgacgaagccggggggcgatcgctccagcgccgccgcgccagcgacctcaccccccgggagccgccggcggtacccccctccctatcacgcctcatcgaatcctcagatctaagttttttttggttttgtgagttatccaaagttggaccgcaaagatgagtactgctaatcactatcagcacatcaagtcaaccaagcctgttgtagatctactaatattggagtgtttctttgcttaaaatgtggagatgttcatagggcacttggacctgacatttcaaaggttttatctgtaactttggatgattggtctgacagtgatatcgactccatggttgaggttggtggaaactcatatgcaaattcaatttatgaggcttttcttccaaaagatcacccaaaacccaaaccagattcaacgatggaatataggacgaaatttataagagctaagtatgagacac

SEQ ID NO: 50304 - DNA, 640 bp, Zea mays
  unsure (1)..(640): unsure at all n locations
  Clone ID: MRT4577_145872C.1
cccacgcgtccgagaaaattgaaggatctcatgataaaaagtgataataggatatgtgctgactgtggtngcacctgatcccaaatgggcatctgctaatattggagtgtttctttgcttaaaatggggagatgttcatagggcacttggacctgacatttcaaagggtttatctgtaactttggatgattggtctgacaatgatatcgacttcatggttgagagctaagtatgagacacaagattttttgaagcccagtttgcgccatttattgagaacatcttttaaatctaccaattctgtgaagagtgtagatagcaatttctctatcactctaaagaaagatatctcttaagatacaagagaatttgttggagagctgaatattacagtcgtgaaagggactatacttggccgttagagacatgctcacaagtgatccatatgttgttttaacactctgagggcagaaagctcaatcgacagttaaaaaaagtgatctttatccgccatggaatgaagagcttaagatatctgttcctcgaaattacggacctctaaaacttgaagtgtatgaccatgatacgttctcagccgatgatatcatggggtgaagcagagatagatctccaccaatga

SEQ ID NO: 50305 - DNA, 288 bp, Zea mays
  unsure (1)..(288): unsure at all n locations
  Clone ID: MRT4577_145873C.1
ncttttctctgggtccgacgccgcctcggcgtcctcttaccacgggtcgggggtcgtataagactatgaccgnggccaatgagtcacatctttnntntaccagcatctctcctacccagcatcactctcggagtacgatcgagggaggtgagatgacagtccctttgtactgaatgctttcctccgacaggccaacggcttgccgcatgatccgttttacatcggtccggaagagaaccaaggagccaattgataaattgcaaagtaccttccaccgctgggagcaaa

SEQ ID NO: 50306 - DNA, 978 bp, Zea mays
  unsure (1)..(978): unsure at all n locations
  Clone ID: MRT4577_145874C.1
cccacgcctccgcccacgcgtccgcccacgcgtccgcccacgcgtccgcccacgcgtccggaagatacaagagaatttgttggagagttgattatcacactggtcaaaggcaccaacttggccgttagagacatgctaacaagtgcgcttggtgnaggttgatcgctcggagggcagaaagttcaatcaacagttaaaaaaagtgatttgaatccggtatggaatgaagtgcttaagatatctgttcctcgaaattatggacctctaaaacttgaaatatatgaccatgatattttctcagcggatgatatcatgggtgaagcagagatagatctccaaccaatgatcacagccgccatggcctttggagatacttcacgtcttggtgacatgcaaattgggaggtggttcatgaccaaagacaatgccctgatgaaagatagcacagtgaatgttgtggcaggcaaggtaaaacaggaggtgcacttaaagctgcagaacgtagaatctggtgagatggagttagagctagaatgggttccgatcctctagactatgataactcccctgatccttttgtctaaaaaactatcctcaagatgcatcaaaattttcaagctgtccactttgatgatcttggacatttttgctggatggcttgaatttgttaaaaaaatgtcattgttaaatatcctggtgtaactgtcagctataatcacagcctttcatttcccccctttggttgtcatgccttgtaactactcgccgtctcttgattgttgttgtattgtcccattgaaaggacatgtgtattataagagatgggcaattatagctganaaaaaaaaaaaaaaaaaaaaaaaaaaaaaaaaaagaaaaaaaaaaaaaaaaggaaaaaaaaaaaaaaaaagggggggcccgtgtaaaagatccaaaatggggggggcggccttaaaaaaccaaacctttcttacgggg

SEQ ID NO: 50307 - DNA, 283 bp, Zea mays
  Clone ID: MRT4577_145876C.1
cggacaatatctttaaccactttatcaaaattttacctttttaatactaaaaaaaacaacgcggcactgtgtaatctgaagcctgctatcatcataaaacatacagttgctcattccagcacttaccgggttatgaaaactattaactcctgatggttacatgcctgattcagtcctaattgttggaaacagaatcacacatcaagccttatcaagtcttattaagtggttgaagaacgaccatatggtttttattaaagaagcatcattttccatgttaaat

SEQ ID NO: 50308 - DNA, 308 bp, Zea mays
  Clone ID: MRT4577_145877C.1
tacacctattttgactttctcgaaaatttataagggcattcgaaaaattacacttttttcactataaaattttactcatcaccatattattatataacacattgttccaagttcccatcatttactcctcttcttaatcatattgatacatataattcaaatctctatactttatcaactatccttatatatttattatatttaaatatcaatattttatcaactttctattcaacttttctttaaccatcacttctttctactacttcttcttctcttataactataactccattaattaattttat

SEQ ID NO: 50309 - DNA, 314 bp, Zea mays
  Clone ID: MRT4577_145878C.1
cccttcgcgatgtaatatgagccgtataattggaatcggagggctccgatttgtccatgttaggccggctatgtgacaattgctaaagaggccctggctaaaaaaaaaaaaaaaaaaaaaaaaaaaaaaaaaaaaaaaaaaaaaaaaaaaaaaaaaaaaaaaaaaaaaaaaagcatccggatgaaaaaattaaaagaaatcaaccataaagagtaacaaaaagcaatcaaataaaaaaaagatgagccatagtttaaaagatcaaacaacaatcaccagccatacttatgaaacagtcttttatacaaaccatt

SEQ ID NO: 50310 - DNA, 385 bp, Zea mays
  Clone ID: MRT4577_145879C.1
aaccccttcacggacgaggacccagacaccttcgacgcggcctaccagcaccagcgggacatgctgaagaagctgcactaccggcagcaccagctcgacaacatggtcaggaccatccagtcgtggcccgggagggaagcatcatagttctcgaccacgtatcgcagacgtgctcatcagctgagattgctgccgaggtcatagctgccccacctgttcctgcatcattggccgcggctctgcagtcccgctgcgatccatggatgaagtagggccgattctggtgctgaaagggagtcaggacgcgatcaacggacaggagggggcggtgagcgcagtgcatgtaggcacatctcttgtcgtcactgattcggagagtatcaaa

SEQ ID NO: 50311 - DNA, 1734 bp, Zea mays
  Clone ID: MRT4577_14587C.1
cggtacctgacggtggagcggctcacggtaacgagtcaaccatcgaggagaacgggatccgcatcaccgcgcagggcctaatctgcaactatgtctcctacgctacctccctcctctaggtgcctgggcttgtcctcaccatcgccgtcgtatcgtactgtacttaggatgcgctgttctgttcgactcccgtccctgtcgattcgaagagatccccagcaacgtgagggaggtgttcctgaccggccccacctccaagctcggcagggccatcgcgctctacctctgcaggaagaagatcagagtcctgatgttcactttgtcatcggagaggttcctgaagatctagagggaggcaccgccggagtaccagcagtacctcgtgcaggtgaccaagtaccaggccgcacagaactgcaagttttgcatgaactattggcgttggctatctaaaaggacagaaaggcagacatgagcaacagatcccgctccatgggctgaaactgggattcgtgatggcaggcgcccctcttagtcgtgtgtagggcgagctgctgccatggtggctttttcttacgggtgtgagctccgctcgccgccggtcttggacgccgtggctaggctcctaccacccctccctccacccgggactccacgctgccaccgccacacgacagtacgcatacactcttcttcctcccctcgctctcgatggctggcgtccgctccctcagcgcctccgcccatgcccggctcccgcacttgccggctccccgatggagatgaatgaagaaaggaagatctgcaagaataaagtcgaggcggaggcttggtttactggtcttagtgccttgatatgtcgaagacagcatggatcccaggtccaacatatagatggaatccggattgctggacttcctattgattttccaagatcggagatgcaatttcatactgtgcaaaagcaatttcgctatgcaagtcacgcatacagaacctgaaaagttccaaggatgctttgttggatggtatagatggtggtgatgcatctgctgctgaagctgaaggaggctcagaaaaatctaccattgaaaaagagctagagcagcttactagcatattgcctgatcttgagaagaagcttgaggacctgtctgaagcaaacccaagcgctgacatggatgagatggtgaaggcaattgtgtccagggtaactgaagtgatgccaaaagctgcatcttttacttcttcccaaatagcaacctcaagcaatggattcgactcctcggttatgtctacgacagcgacaactggaagctctggaagcactgtgaactgaccttggggttgtaggcagaggcgtcaaacgagctagcatcaagccgatctctgccaaacctgttgctaagaaacctgcacttgattcaccatctctccaaggtgacaacagcatcaactctgaggttgtccctgcgacgcagactgatgaatccagctaaagctctacatttgaaacgaacgctttctgacgggggcacggcgataacacgccttctattctagtatgcttagatagattcaatgttagcgcaaacgactgatgataagtttttcagttagtattttaatttggatttagagtacacttatgtatgatttatttgacaatgcttatttatgagacattgaattgtacttatctatattacattaaatatgatgttattttggccc

SEQ ID NO: 50312 - DNA, 414 bp, Zea mays
  Clone ID: MRT4577_145880C.1
ttttattattgtcttgtcccaatcatgattagatatgtttttttttggggcattaatcttcgacatttgcctccatgggggcagccaatgccatccttaatgccagggcggctctctctatagagcatgcttgtagcaaatttaatatcttccatttactaattcatgcaaagcaatcttagcctatagttttgctatatgatcaattttgttgtttatattaatcccatgcgatcatgaagtagcattaacatcaatatttctacatttaaaacaaatagaagcgtgctcaacagtagaggtagaggattcacaggattggaattttacaaccgtaaaatgcacaaatcattttagtcccaaaatccgaattggtcgccttgcacaacatcaaaatccttagccctagcaagc

SEQ ID NO: 50313 - DNA, 862 bp, Zea mays
  Clone ID: MRT4577_145881C.1
ccggccgggcttctcctcctcgatcggaagaagctaaggaggcaccattgcttatcgtctgatccccgcggggcgcgtgtcgctgcacaagatgacgacggcaacagccggtggcagcgtcgccgaccgcatcatgccgcacctcctcaacatatatggatcgtccgcgacggcacgggacttcgagatttacgcgccaaatgcgacgtttgaagacccgctcatgcgagctcacggggttaagcagatcaaatcagcgttctacacgctgccaaaggtgtttggggaatccaagatcaccgaatacaccgtacaagagaatcccatggggccgggcaagaccgaggtggtgatccagaacaagcagcactacaaggtgctgggcaagccggtggatctgacgtcgctcatcaggctgcagctccaggacggcaaggtggtcaagcacgaggactggtggcacgggaagcctctcaagaacagggacacggtgggcgtgccgctggtgggccgactcgcagaggccagccgccggggcgccatgctgctcacccacgcactcatgggcttcggcaaagacccaacccagcctcctcctcctccgacacattgaattcgtcagactcgtagtctgatcaatccaaccaatcatatatgtttgtatatctatctgtctgtctgcttcgcaatgctactctcacgcataacacctgctggacattatcgaaaaaaaaaaaaaaaaattttgttgcgtgcacaaaacttagaacacctagtttgggaactcaggccccctccagttttgagttaattttcaaattagctctaatttcttctgcataaagaacctatatcatcgatt

SEQ ID NO: 50314 - DNA, 379 bp, Zea mays
  Clone ID: MRT4577_145882C.1
gcggaagagggttggaggggcttcatgcgaggcaacggaacaaactgtatacgcatggttccttattctgctgtgcaattcagcagttacaacttttacaaaaagagtatattcgaaccatatctaggaactgacctgactcccgtcgcccgcctgatttgcggtggactggcgggaataacatctgtcttcctgacctatcctctcgacatcgtccgaacacggctatccattcagtcagcgagctttgcagaattaggagcgagaccggacaaactgccaggaatgtgggcaaccttggtgtccatgtacaagacagaaggaggtgtatctgctttataccgcggcattgtcccaacagttgccggcgtggcccctt

SEQ ID NO: 50315 - DNA, 983 bp, Zea mays
  Clone ID: MRT4577_145883C.1
gcggccgttccgggggacgcattcccgccaccagatttacggacgtaggacggccttcctccgccgggcagggacccatggcgagtcagacaactcttcgtctttctttcttcttcttctcttctccactgcacatcctcctttcttcttctcctcgtcgatcggcaagctaaggaggcaccattgcttgtcgtctgatccccgccgggcgcgtgtcgctgcacaagatgacgacggcaacagccgttggcagcgtcgccgaccgcatcatgccgcacctcctcaacatatatggatcgtctgcgacggcacgggacttcgagatttacgcgccaaatgcgacgtttgaggacccgctcatgcgagctcacggggttaagcagatcaaatcagcgttctacacgctgccaaaggtgtttggggaatccaagatcaccgaatacaccgtacaagagaatcccatggggccgggcaagaccgaggtggtgatccagaacaagcagcactacaaggtgctgggcaagccggtggatctgacgtcgctcatcaggctgcagctccaggacggcaaggtggtcaagcacgaggactggtggcacgggaagcctctcaagaacagggacacggtgggcgtgccgctggtgggccgactcgcagaggccagccgccggggcgccatgctgctcacccacgcactcatgggcttcggcaaagacccaacccagcctcctcctcctcctccgacacattgaattcgtcagactcgtagtctgatcaatccaacgaatcatatacgtttgtatatctatctgtctgtctatcttcgcattgttactctcacgcataacacctggacattattttcttttgttgtgtgcacaaagcttagaacctagtttggaaacccatgtcactccagatttgagtaaaagtctttctaaagctcacgttataagtccaaaaaaaaaaaaaaaaaagcggcc

SEQ ID NO: 50316 - DNA, 2070 bp, Zea mays
  Clone ID: MRT4577_145884C.1
cggacgcgtgggtgcaatagcgtctgaagatggggcatatgagttttgtgagcccggtgtaatagacatgatcttccttcaaatcttaagcttaacagatggttctaagtgcgtagaacttgccattaacctactgcagttactagttcataaactcaaagttgacactatgagttcggagaaactgcaaggaatgactagaatggtaacttgtcttgccaggatatttgctgttctccacactgcagttaaatttgatgccttgcacatgcttaccttcctcctgtcccaaaaagaatctccacttcatgattttttgagatcaatacctgcatcaatttgggaatctcacattcgagttggaatcactgccattctccaaaatcgtgttgtatcctctgaaaagttgcacgctcttcttttggcggagtgcatgatgtccatactgggcgaggattggttgtcagaagattgtgaagtccaggataaccaaaatgtgttgtctgttgataaatttgtattgcttgtgctggaatccgcaagggttgaagtggcagtcttgctaaatgagcttgcttatctgaagtacgagtcatcaagaatttctcagacagatgaagccatcagtcagaaacagaggaacctggctatactattttcgttaatagaaagaataattaaaatgatatcaaatgccagtagtggtgaaggtgcaccaattcataccatccgtgaaagtaccataatgcaggccattacgggattaaatgagacaatcaatttagtcttagactttctgcaggacgcgaaggatcatggtcaatggaaaggtgacgatcttttagcagctgcaagaatagtaggaagttatctggcagaagcaccatatgcctgcaaggagaagactgggaatctattggaatttatcttttctatagaaggtcaagatgaatcaagttccttctattctatttgcttcatgcttccaatgctatcccaaataacaatggaggttgatggatgtagaactttggcatcatttggtggccataaggcagttatagattgccttgttaaaatgactgagcagggtggaatgacgattgataacggtagcatgtttttggcatgtgataccatcataaatttcatgtctaatatgaagagtgtccatattccagtggattattgtttcattcgcctcctaaaagcacttgttacatgggctggaaccacagatgcctcatcagttaccatgacagcatcctgcttatgtgtaatgctgttggacatgacgtcagaagagtttctattgagctgctctcattttgacggcaatatccttgggagtttgtctgagatcatcatcagaagtttgcagcaggatatccctgatgatgatagtgagcaattcaagcagaagcagatcattgtatcaggttataagcgatgggctgatcgatttccacgtgttaaagatgttgtggagcagcatgtatccgtgtgaatgtgatcaacccccaggagctgttctctatgaatgcaaacctgcaaacgtgacagtgcagctttgacaatgcctcggttctggtggttcattccttttacctggttagcgaaattctccagcggcaggccggcagctaacgaggtgcaccaacgtggatcagaaagatgtcgttgtttatccgggaaattctcagctgcgaagcaaatctgacattgtaatgtttatgctgcacgagaaagaacaaggcggtttggggactagattctcatctcgctttcaccatttctgaacgcatgtgtaacagaaccaagcccaagtttcaggcaaggggttttcatttatattgtttagcatgtatacatgcgagacgaacatatgaaaggataaactcctacttaaatgtaagtagagatattgtagtggagtaaaaagcacacgtctagatttgagatggctcctaaatcttaaaaagtgagtctgaactaatggaatgttgtttgggatagctcctaaaccttaacaaatgaatctgaatctagaatttactcagattccctgtg

SEQ ID NO: 50317 - DNA, 888 bp, Zea mays
  unsure (1)..(888): unsure at all n locations
  Clone ID: MRT4577_145885C.1
gttggggtgtgtgttttttttttttttttttttttttattttgaaactgcttggggagttttttttaaacgtttgaaatgcttgacactgcaggatactgcgtctgaatcataaaaatggcccgcatcataggcggagacttggaacaccgagatttgtttttgtttaagtttcagcccaatttgtacatcgaattaataaatgcatcctctgctagagaaacccattttgaatgagttgatgctctgactatagaatccaccattcttccgaagctgcttcctacaaaactcgagatgcaacaattgaaatccttgtggaaaggatgtgtttttgataaccttcagtctttcagatggaaattctccagccttcatgaccttggcagaaactataccactgctgcctagtgcatttgttatctgaagaaaactggaacgtgaacggccattcattgcacgtccattactttcataaaaaaactgcagcttgttattattgtcttctgatattcgcacgttgcaattgtcatttgaatgatccaatttgtcaattgcataaggaccattgggggaaccatttgagttgttgatgttctcagtcaaaccaacagctttccatgcatcagcaatgagacagtaggtgctttgcttcggcttgacaccagtctcccgcatcatctgaaggacttcctcagctttccatggctgcttctgttcgctgtagccccagatcagagtctcaaatgtcctgagattgggatagacgcctgacttgcacatcttgtcatagactctcatggcactctccatgtcggccacgctgcaccacccgctaatgacagtggntgaaagtgacgacatttgggcagagaccaagatggctcat

SEQ ID NO: 50318 - DNA, 294 bp, Zea mays
  Clone ID: MRT4577_145886C.1
ccgggagtggcctgaacctctgaaaaatcgccatcttggatccttggaagatatatatgaaaaacagaaggattttatagagacatttatggctcagcagttcttatttcaaaggcaatggcagcagattcgtaaatatgcacaaaagctgggtatcagcatcatgggtgacatgcctatatatgttggctaccatagcgcagatgtttgggcgaacaggagatcatttttgctggacaaaacggtttccccactttcgttagtgggcgtccacctgatgcatttagtgaaacg

SEQ ID NO: 50319 - DNA, 513 bp, Zea mays
  Clone ID: MRT4577_145887C.1
cacagcaatccacacaagcactttgacgttgcacgggcgctgttacatacacaccaagcgtcggcaccaatggggtactaccagtaggtggactactgctcggaggaggtgaggtcggtggccccggccggcttttgccgtcacggaggcggtgttcagcagcacgttgttaaggagaagttcgtggaggtcgacacggtctcacgcgccggtgccaaccaccaccacctccaccatggtcaccacggcggacacgggttcgtggtgcgcgagaccagggttcaggaggacattaatcacctgcccggtgaggttcacgagcgcagggagagctttctcgccagggttaactgagcccgccggcggacggcatccacgcccgttcgtgcctgcctgcgtgccttaatgtatgtctgtggttgactggttgtgcaaggttcattgtacttggctattcgacgtgcacgctctcagcttctgttcgaattactacaattagcttgggacctgaat

SEQ ID NO: 50320 - DNA, 282 bp, Zea mays
  Clone ID: MRT4577_145888C.1
ttactctcacggagagagatatacggggccgtgtcattaagaatggagggtgtgataacattactgaacactcatgctacatggttcgataaggatacgaaccaatagccactgcacctaagaccgcctcagagttatgatgatcaggcgaatacaggccacacagactttaactctcagaggctaacttgacaacctcaatatcatgacttatcaagaacttacgggcactacaccctgacctgcactatgaagtaacgatccttcgagcgcctaccccat

SEQ ID NO: 50321 - DNA, 894 bp, Zea mays
  Clone ID: MRT4577_145889C.1
cggacgcgtgggcggacgcgtgggtgagacggaaccgggacagcaaaggaagatacggcgcgatattttagactacaggagaccggcgccgaaagctccgtggcctcgtctccttccccacttcggcctcggcagttccgcgtgccggccggagcctcgtctcgcttcgcatctcgcacttcgcgccttcgccgctgcgattcctcagcagctcctcgaccgctccacccacccctgcgccggcgagatggagctcaagcccggcatgtcggcgctcgtcaccggcggcgcctccggcatcgggaaagcactttgtattgcttttgcaaggaggggtttatttgtgactgtcgttgatttctcagaggaaaatggaagagaagttgctacattagttcaaaaagaaaatagcaaatttcacgaagatcttagaattccatcttcaatatttgttaagtgtgatgttagtaatgcagataatcttgctgcttgttttgagaagcatgtacagacatacaatggactagatatctgcatcaactgtgctggaattgctaataaaacactagtttatgatgatacatctgatggaactagaacatggaggcatgctgttaatgtgaaccttgttgctgtcattgatggtactcgcattgcaagtcaaataatgcgaaaccaaaagaagcccggtgtcataataaacattggttcagcggcaggtctttatcctatgttcctcgatcccgtatatagtgcggcaaaagggggtggggttatgtttacaagatcactttctccattgaaacgccatggtgttcgtgtcaatgtgctctgcccagagttgtccaaaccaatatggcggaacaatgagccgcaaagttatagattcatctg

SEQ ID NO: 50322 - DNA, 1772 bp, Zea mays
  Clone ID: MRT4577_14588C.1
atatctctttctatagccagattctccccacagccagattttcagaaaagctcgtcagaaaaaaagctgaaccaaacaggcccattaccctcccgagatttcgcgctccgttcacccaaaatttccccatctccgacctcccccttcctctccccctgccgctccccgcgccgagaaggagaaccccagccgccgcgcagcgcgccgcccatggcctcctcgtcggagaacgcggctgtgccgccggaggaggagccccaggccccgccgccgccggacacagagcctaccgaggcggcgcccggcgaggcggaggatgagccgcaaaccctagagcgggcgcaggagctcttcgacaggggttccaaggccatcgaggatgaggacttcgtcgacgccgtagactgtctcagccgagcgctcgagatcagggcttcacattatggagagctcgcgccggagtgtgccagcacatacttcaaatatggatgtgccctgctatacaaagctcaggaggagagtgatgttttgggaaatgttcccaagagcttgccaaatgaagactcagtgaagagtacagctactaaagatgacagtggaacctcaaaggtctctggtaccgatgcggaggatgctgcgtcatcagaaaaagttgatgctgaagaaggtcaaaactcaaatggcaaaaatcaggagaatgggaatggtgaagttgagaaagatgatgacgacgtcgacgatgatgagaagatgggagatgaagaggataatgatttggatctttcttggaaaatgttggacattgctagggcaatagttgagaagagccaagataacactatggagaaagtaaaaatatattctgctcttgctgaagtggcaacggaaagagaggacatggacaactcactcagtgactatatgaaagctttatccatgttggagcatttggttgagcctgaccatcgtcgagttgtggaattaaacttccgcatttgtttggtttatgaactagtttccaagatcggagaagcaatttcatactgtgcaaaagcaatttcgctatgcaagtcacgcatacagagcctgaaaagttccaaggatgctttgttggctggtatagatggtgatgcatctgctgctgaagctgaaggaggctcagaaaaatctgccattgaaaaagagctagagcagcttactagcatattgcctgatcttgagaagaagcttgaggacctgtctgaagcaaacccaagcgctgacatggatgagatggtgaaggcaattgcgtccagggtaactgaagtgatgccaaaagctgcatcttttacttcttcccagatggcaacctcaagcaatggattcgactcctcggttatgtctacggcagcgacaactggaagctctggaagcactgtgactgaccttggggttgtaggcagaggcgtcaaacgagctagcatcaagccgatctcttccgaacctgctgctaagaaacctgcacttgattcaccatctctccaaggtgacagcagcatcaactccgaggttgtccctgcaatgcagactggagacgagtcagtatctaagtaaattacaatttcattagccctactgtaatgttaacttgctggaacatattagctgctatgtgaacgcttaagaagggattgctggagccatagactcatcgtgagctgaccattgaaatgttaaattgctgagatcatcatggcggtaaatcatgtctgctatatcaaatatgcttggtg

SEQ ID NO: 50323 - DNA, 743 bp, Zea mays
  Clone ID: MRT4577_145890C.1
gaattcggcacgagcagcatcctgcttatgtgtaatgctgttggacatgacgtcagaaaagtttctattgagctgctctcattttgacgccaatatccttgggagtttgtctgagatcatcatcagaagtttgcagcaggatatccctgatgatgatagtgagcaattcaagcagaagcagatcattgtatcaggttataagcgatgggctgatcgatttccacgtgttaaagatgttgtggagcagcatgtatccgtgtgaatgtgatcaacccccaggagctgttctctatgaatgcaaacctgcaaacgtgacagtgcagctttgacaatgcctcggttctggtggttcattccttttacctggtacttccctgcgacctgtttctgatgcgattttggttagcggaccttggcttatgggaattctgcaatggggaatgttaggttagcgaaattctccagcggcaggccggcagctaacgaggtgcaccaacgtggatcagaaagatgtcgttgtttatccgggaaattctcagctgcgaagcaaatctgacattgtaatgtttatgctgcacgagaaagaacaaggcggtttggggactagattctcatctcgctttcaccatttctgaacgcatgtgtaacagaaccaagcccaagtttcaggcaaggggttttcatttatattgtttagcatgtatacatgcgagacgaacatatgaaaggataaactcctactt

SEQ ID NO: 50324 - DNA, 644 bp, Zea mays
  unsure (1)..(644): unsure at all n locations
  Clone ID: MRT4577_145891C.1
aagtcaagttcccacggtccatcctctcgagagtctatgcccttctcccgaagccgcagacgcagaaaacggctctacatatggaggcgaagaagaagccgtcggcccccgccgccgtcggagccgcgccgccgcctccgggtaacgggtacttcagcaccgtcttctccgcgccgactgcgggtagcgcaagtgacgcaaagcatgcggacttgtacacgatgctgaacaagcagagctccagagggcagaatggcagagtacaaggggggcaacccggatggctctgctaccagaggtgattggtggcaaggttcactttattactgaataatctgctgggacctctcccttttgtgaacaaggaataaaaggggtagagctgagaatggtttgttgtagtgttggaagtgttgacgcgagccgtcaagcatcgatcgagagtaatagttgtaatagttgaaagctgcgtcgtgacttcaggcatgctgttggtggaggcagtattttagatccatcatcacgcctggacagatgtgggtgtccttttgtattcctgttgcccctgtgttcttgtggtttaggtgcagtgcaggtgctgtactanaattatgaaactcgcagttcgatagaatcagttgccc

SEQ ID NO: 50325 - DNA, 619 bp, Zea mays
  Clone ID: MRT4577_145892C.1
cggacttgtacacgatgctgaacaagcagagctccagagggcagaatggcagagatggcaaatcccacagccgccctacttacaagggggcaatggcaaacatgctcatccaaatgagccatcagaatctccttacttcggctcatccgtgcattacggtggtcgggagttctacagcagcgttttacggaagcaaccagccaatgaaccccatacggattacaaggggggcaacccggatggctctgctaccagaggtgattggtggcaaggttcactttattactgaataatctgctgggacctctcccttttgtgaacaaggaataaaaggggtagagctgagaatggtttgttgtagtgttggaagtgttgacgcgagccgtcaagcatcgatcgagagtaatagttgtaatagttgaaagctgcgtcgtgacttcaagcatgctgttggtggaggcagtattttagatccatcatcacgcctggacagatgtgggtgtccttttgtattcctgttgcccctgtgttcttgtggtttaggtgcagtgcaggtgctgtactaaaattatgaaactcgcagttcgataaaatcagttgccaaagagtctcagttcgc

SEQ ID NO: 50326 - DNA, 462 bp, Zea mays
  unsure (1)..(462): unsure at all n locations
  Clone ID: MRT4577_145893C.1
ttcgcccttgcggtcggggcgggtctcttcattaatgggagttgcagattccccttcactctcttttgcctgtttgcgcgggtgattcattgagcctttttgtgtgggtgtggatctctaatagcttgcccctgtttgctttggtgtggggggctggccgtgtttcgttgctgggccttctattcgcctggtatgctttcttgtgccgcgcttcatgttttgttggcctngtcttcttgctttcccctgtttggccctcgtccgggcccgcttgggcgattgcggccctggcggccgttctggcggtcccgtctcggcctgcttggcgtctctggtcactgctggtcctgtgtgcttgtttccgctcctttttccacccctacgcgccggtggctgacttgtgaagcctgtggggcctcttgcgtgcgctaactcccatttgttgcctggcgctttctgccc

SEQ ID NO: 50327 - DNA, 135 bp, Zea mays
  Clone ID: MRT4577_145894C.1
gttaacaatgccaaaaggttaacatattcttcattatttttgtattgcaaaaggtgaaatagcaagatggtaccaaattaattgattaaagtgcacatgcttacagatttcaacagtttacacgatttcagtaac

SEQ ID NO: 50328 - DNA, 2253 bp, Zea mays
  unsure (1)..(2253): unsure at all n locations
  Clone ID: MRT4577_145895C.1
cggacgcgtgggcggacgcgtgggtgagacggaactgggacagcaaaggaagatacggcgcgatattttagattacaggagagtaggagaccggcgccgaaagctccgtggcctcgtctccttccccacttcggcctcggcagttccgcgtgccggccggagcctcgtctcgcttcgcatctcgcacttcgcgccttcgccgctgcgattcctcagcagctcctcgaccggcggacgcgtgggcggacgcgtgggcgcaaagcaggccgacctgtacacgatgctgaacaagcagagctccagagggcagaatggcagtggcattacagatggcaaatcgcacggacgggcacatcgaggcgggccgggaggacgccacgaggcgaacaaccaactgcttccttccccgccgcgccgcctacaactaacacttcacgtgcccccatccttttccgcctcaagtcaagtgttcacggtccatcctctcgagagtctaggcccttctcccgaagccgcagacgcagaaaacggctctacatatggaggcgaagaagaagccgtcggcccccgccgccgtcggagccgcgccgccgccgccgggtaacgggtacttcagcaccgtcttctccgcgccgactgcgggaagcgcaagtgacgcaaagcatgcggacttgtacacgatgctgaacaagcagagctccagagggcagaatggcagagatggcaaatcccacagccgccctacttacaaggatggcaaacatgctcatccaaatgagccatcagaatctccttactttggctcatccgtgcattacggtggtcgggagttctacagcagcgttttacggaagcaaccagccaatgaaccccatacggattacaagggggacaacccggatggctctgctaccagaggtgattggtggcaaggttcactttattactgaataatctgctgggacctctcccttttgtgaacaaggaataaaaggggtagagctgagaatggtttgttgtagtgttggaagtgttgacgcgagccgtcaagcatcgatcgatagtaatagttgtaatagttgaaagctgcgtcgtgactacaagcatcctgttggtggaggcagtattttagatccatcatcacgcctggacagatgtgggtgtccttttgtattcctgtttccctggtttaggtgcaggtgctgtactaaaatgatgaaactcgcagttcgataaaagcagttgccaaagagtcgcagctggcaggattacttgtctacaagccagctatatggcatggtttggcagccaccgtatctgaataaaatcatagtacaaaatatgaatatatatgtcatacgcattccacccacccctgcgccggcgagatggagctcaagcccggcatgtcggcgctcgtcaccggcggcgcctccggcatcgggaaagcactttgtattgcttttgcaaggaggggtttatttgtgactgtcgttgatttctcagaggaaaatggaagagaagttgctacattagttcaaaaagaaaatagcaaatttcacgaagatcttagaattccatcttcaatatttgttaagtgtgatgttagtaatgcagataatcttgctgcttgttttgagaagcatgtacagacatacaatggactagatatctgcatcaactgtgctggaattgctaataaaacactagtttatgatgatacatctgatggaactagaacatggaggcatgctgttaatgtgaaccttgttgctgtcattgatggtactcgcattgcaagtcaaataatgcgaaaccaaaagaagcccggtgtcataataaacattggttcagcggcaggtctttatcctatgttcctcgatcccgtatatagtgcggcaaaagggggtgtggttatgtttacaagatcactttctccattgaaacgccatggtgttcgtgtcaatgtgctctgcccagagtttgtccaaaccaatatggcggaacaaatgagccgcaaagttatagattcatctggtggatatttggagatggaagatgttgttaacggtacaccatttctgtaatctagtgttattacaggactattagctttgtaaccatattttatgtgccatgatgatcaatgcaagcgtcagatgaattgttttaaacttttagtgttatgttgaggtggggtgttttaaagatgaactgcccggggncntttgttatcggggtaaaccctgtaaa

SEQ ID NO: 50329 - DNA, 142 bp, Zea mays
  Clone ID: MRT4577_145896C.1
ggctagcccaaccatactctctcttcccagcgatgtagccgggtttttcctgagaatagtcaccgggaacggaggaatctgtccacagagaggcccatccacgcctcccctacacagggcgaccagaacgaacccagagaca

SEQ ID NO: 50330 - DNA, 147 bp, Zea mays
  Clone ID: MRT4577_145897C.1
gatccttggatgcttaatgctggttactcattgacttcagatacagcaggtgttcaggtgcgttgcatggatgcccctggtgacattattagaatctggatgcatggctgacttgaagaacgaatacgcttgacaccatcagaagtc

SEQ ID NO: 50331 - DNA, 404 bp, Zea mays
  Clone ID: MRT4577_145898C.1
ggttggccctttgggctggtttatgtgcttgtttatgtgcttgtttatgtgcttgtttatcgtgcctggctgtctcctgaggttactcatgactaggtggtgtttatggactcgaattttaatttggaacttctttttatgcgtgcttctgttagttttcatgctaggttctctcctattcctgtagaggctgatgataatggtcattataattagatcccttttactatttattttgatgagcatagttctcctcctgttaatcgtgtgttggagattagtgctagtacggaggcttgtattgatacgcataatattaatttggatggtattagggatcattctcttgctggtacggttctcgctttaatgactcatgttcctcctgttgctcgtcacgctgc

SEQ ID NO: 50332 - DNA, 324 bp, Zea mays
  Clone ID: MRT4577_145899C.1
cccacgcgtccgatttcgccgccgaggtcgagtcctcgcttggcctggaagccatggagctgtgcgggccaagagtgaccgaccatctggttgccaaggtcggtcatcgcacaggacaggacgcataggaagcctatggttgtattgcataggagtcggttaggtgtagagagcccccccgacacaagggaaggcgtcaaattttctggtgggttggaaggtgtgatctgtctgtatatagctagagcggcggtcatttgtttgttttaaagaaataagcctaattttgttgcatgttaattgatactgttttttgatggaggg

SEQ ID NO: 50333 - DNA, 154 bp, Zea mays
  Clone ID: MRT4577_14589C.1
ggccattgctgggtactctggtgctgtatcatgttcaatggactacgttaacgggggcagggcatatcggggggggggtgagagcctgtccatctgttcagggatttggaaaggagttcatctatactatgattcgcacagatctgaagaaaga

SEQ ID NO: 50334 - DNA, 752 bp, Zea mays
  unsure (1)..(752): unsure at all n locations
  Clone ID: MRT4577_1458C.1
ccacgcgtccggtctccatgagggaagagatgtacaggaaggctaaagagtatgaatctaagatcattggttttgagctagctattagaaggccatattttcatgtcaagcctcttgacaatccagagcttgaaaattggcataactaccttgactacatcgagaaggaagaagacattaataagtatttggacgaagcttcctttgtaatgggatattgaactgaggatagagcgtggacataatgtttggtttcgatgaggctaagtatttgcttaatgctcaccttcttaaccatctatctatcgagcaggatggtccctcctttcttatggaggggcctccgtaatcagctaatggagtaatctgttataaaattgtatgaaaggtgtgtgattgcatgtgctagttattcagaattctggatccgctatgtgcaatgtatggaggataaaaggagtctagacctagcaaacaatgccctggctcgtgctactcatngtgtttgtcaagaagcagccggagatccatctgtttagtgcgcgctttaaggagcttaatggcgatatttttggagcacgtgcagaatatcagcatctgtattcagatttatgccctggctttctagaggccattgtgaagcattctaatatggaacaccgactgggagataaagaaattgtcctgttcagttatggaaaaggtcatcgctgctgagaagggaaaggacagagccagctcttaccaacatt

SEQ ID NO: 50335 - DNA, 249 bp, Zea mays
  Clone ID: MRT4577_145900C.1
cgacgacgtgggagattagagatcagacgagatgagatgagacccagagaggcgtcgcgagtccagcggattgtgctggatggaagggaaggagatgaattcgcgcggcgagaggtggcgcttcttacgtggcggccgtagggccgaggagggggttctccttgagcggctgaaaggagaagcggcggaggaagccgcggccgacgcatccccgccgctgcgcgggcagttgttgtagaacatgaccag

SEQ ID NO: 50336 - DNA, 680 bp, Zea mays
  Clone ID: MRT4577_145901C.1
aatagagtccagccacgaacacccgccgcgaaatcccaaatcaccaaccaaatcccctcccctcctctcccgcgtcccgacgagcaccagccatcagacatggacgcctcagccaccggagcgggagcgaaggcgaagaagggcgcggccgggcgcaaggccggcggccccaggaagaagtcggtgacgaggtccgtcaaggccgggctccagttccccgtcggccgcatcgggcgctacctcaagaatggccgctacgcgaagcgcgtcggcacgggcgcccccgtctacctcgccgccgtcctggagtacctcgccgccgagctgctggagctcgccgggaacgccgccaaggacaacaagaagtcccgcatcgtgcccaggcacctgctgctcgccgtccggaacgaccaggagctcgggaggctgctggctggcgtgaccatcgcgcacggcggcgtgctgcccaacatcaacccggtgctgctgcccaagaggacggcggagaaggagcccaaggagggcaagtcgcccaagaaggtcgccaagtcccccaagaaggccgacaagaaggcgtagagagagccgcgcgtcgattagcttaagctttgctgtaacagtgatcgctgttttactaattgtgtcgatgtagatctgtgctgtcatgaaaaattaattca

SEQ ID NO: 50337 - DNA, 668 bp, Zea mays
  Clone ID: MRT4577_145902C.1
gaacacccgccgcgaaatcccaaatcaccaaccaaatcccctcctcccgcgtcccgacgagcaccagccgccggacatggacgcctcagccaccggagccggagcgaagtccaagaagggcgcggcggggcgcaaggccggcggccccaggaagaagtcggtgacgcggtccgtcaaggccgggctccagttccccgtcggccgcatcgggcgctacctcaagaatggccggtacgcgaagcgcgtaggcacgggcgcccccgtctacctcgccgtcgtcctcgagtacctggccgccgagctgctggagctcgccgggaacgccgccaaggacaacaaggagtcccgcatcgttcccaggcacctgctgctcgccgtgaggaacgaccaggagctcgggaggctgctggccggcgtgaccatcgcgcacggcggcgtgctgcccaacatcaacccggtgctgctccccaagaagacggcggagaaggagcccaagtcgcccaagaaggctgccaagtcccccaagaaggccgaaaagaaggcttagacagagacgcgcatcgatcgattagcttgtcgtgctctgtagaactaatggtgtagatgtagatctgtgcttccaagaaaaaccaattcagaaatctctcttcgattggcttagccgctgt

SEQ ID NO: 50338 - DNA, 214 bp, Zea mays
  Clone ID: MRT4577_145903C.1
attcacaatttctccattttaacacaacattttttcaacataagaaaagaacccattccctttatacacaaaaataactaataacactttacataacatacccaattttccttaatacacaatttattatttactattacctaactaaatacctccatacaattattaacacctcaatttcacccttattctctaactctaaacttacaaaaac

SEQ ID NO: 50339 - DNA, 575 bp, Zea mays
  Clone ID: MRT4577_145904C.1
gatgtacggtccatccccttgtctgacgcgtgcagatatgggaggacacatgtgtcttgagaatagacaccctacggcaggttttgactgatgatggagctgaccgcgtgacgagaaaagccagacctgcttaagatacagactctgcatctacgtctccaaaagaagatctatcatatgctagacttaaaatggatctgaacatttctgcgagaagaacacgtcgggtactgatacaggcattctgttttatacgcaaggagctccattgacgttgatgcagctaccagatgtgtaccatgttttcctagagagaagtatcacgacgcggtggcctaattgtggctcagcgactgtggaacactgactatgtgtgctctgtggaaaactatgtcacgactagtattaaactatgctgcaggactggaaaatgccatactcatgcattgcaatgtggtgctggcattggcttattacttctattgaggagaacagcaatactgccgcatgcgatctgctcggctaacatttaggccgtctctatacctggatgctaacggagaggaggatattga

SEQ ID NO: 50340 - DNA, 314 bp, Zea mays
  Clone ID: MRT4577_145905C.1
gatgtggctgcagaaccaatccaagcgcgtggacagggcaaagacaccctggcttatggctggcatgcattcctccatgtacaacatcatcaccgcacatcacatggctggtgagagaatgagggctgctttcgacaaacggtttgggaagtacaaagccgactcggtgcttgcaaggcacgttcatgcttatgagagatcataccgcattcctaatgcccactacaacataacgtccggaaatcggcatgcagcgcccgacaaattaggttccgtatacaataaccgtcagcgatggaagcaaccagaaggga

SEQ ID NO: 50341 - DNA, 396 bp, Zea mays
  unsure (1)..(396): unsure at all n locations
  Clone ID: MRT4577_145906C.1
gggattcgctgttcttcggccggcgtcgcgctcacgtgcgcgggattcctgcctggcttcgctctgtatatttaaccaatcctcagctctcatcttccaaaagttctcacctgcgccgacggtcaccggtcggtcaccatgatctcacggccgctatgcgcgctgagagagaaaaatcgagtggaggagagagaaaattgggggctgcatgagttcatccgaagccgatccttggaccctgctatacctattgcttagcttccgcggctgtacaccatcgagcgccaagagcaccgtgccggcgtggccgatatcccccaggcaggaacttcaccttcgaactgaccacggcgcatggacctcggcgcgaggacacgtgtcatctgnaaagcaagt

SEQ ID NO: 50342 - DNA, 496 bp, Zea mays
  unsure (1)..(496): unsure at all n locations
  Clone ID: MRT4577_145907C.1
ncnccctcaccccccccccatttttgccgtttnagaagcacgaaagcaaggcacaacagaggccaggagggacaagcataaaagcagccccaccacccgccacccacagnacagcgcncgcacagcaaaggaccaagagaagcccaaggccgcaaacaaaaccagcaacagaaggnaagaagcacaaccgcaacagccagaacggagnacncgagacacggcacggcacaaacccaaccgaagcaagcagccaggcgacagaccggacaccgaaccacaccacggacaaagacggacaagacaaacggagggagcccaccaggcagcaccaaagcacaaggcccgcacgcagccaccgggggcgcccaacccgcaaccacgagccccccggaaggccaaagcgggacaaaaagaccacgcgcgaaaagagcccagcgggaagcacggacagaggcaagggccccagggaccccccacccccggaaaagccccagcg

SEQ ID NO: 50343 - DNA, 298 bp, Zea mays
  unsure (1)..(298): unsure at all n locations
  Clone ID: MRT4577_145908C.1
gcgccgcttggcatcggcctctagtcttcctgctttcaactgctccagccatctcctatggtggccgagctcgcccaactccctctctgttggtggctggcgccccatctcccatgcgccgagcgccctctccctactcgagctcgtcctcagtcccatcgtgcccctgcgctcggtcctcgttgaagtcacgcctgggtgctgtccccgtcgaccgcgcttgctcatggacctccagaagntcgacgcgaatggcagagcccgccactccccgtccgatagttgcactcacgccacc

SEQ ID NO: 50344 - DNA, 966 bp, Zea mays
  Clone ID: MRT4577_145909C.1
gccccccctcgaggtcgaccggaggcccgggtaaaaagcccaacgctgggctccgctcccggtctctggagtctggactcgcctccacggctccaccatgtatcccaaggcggcagacgaaggtgcgcagccgctggccacgggcatccccttcagcggcggcggcggctactaccaggcgggcggcgcgatggcggcggcgttcgcggtgcaggcgcaggcgcccgtcgccgcctggtccaccgggctctgcaactgcttcgacgactgccacaactgctgcgtgacgtgcgtgtgcccgtgcatcacgttcgggcagaccgcggagatcatcgaccggggctccacgtcctgcggcaccagcggggcgctgtacgcgctcgtcatgctgctcaccggctgccagtgcgtctactcctgcttctaccgcgccaagatgcgcgcgcagtacggcctccaggtgagcccctgctccgactgctgcgtgcactgctgctgccagtgctgcgcgctctgccaggagtaccgcgagctcaagaagcgaggcttcgacatgagcataggatggcatgcgaacatggagaggcaggggcgcgccgccgccgccgtgccgccgcacatgcaccctgggatgacccgctgacgctctgccgctcgcctcacttctgctgaggaaatcaagtgatttggtattggtccgctcccagcaggcagtatcaactactgtaaccaatccatgatctgtatgcggtatcgggctgaactgatactttatggacttgttgcttcaacttggtccgtaaaacgctcaagaccacatgaaaatatggtccataaaacttgttcaaaaatagacattttgcactacattttaattctatgagataaaccatgattatgtttaatctctactactattaaaaacttaaggggtagtttgccttccgatccagcaaaaaaaaaaaa

SEQ ID NO: 50345 - DNA, 192 bp, Zea mays
  Clone ID: MRT4577_14590C.1
tcatgccttgatgattgtctaaaatatttctccggtttaaggtcaactaattaacactaacgcaagggttaaatctaaaaacttaccaacctacccctattacagccttacatatcataccatcatctccattttacatcttatcatctacttctttttattgctatcaaactatatccactacaaatatat

SEQ ID NO: 50346 - DNA, 169 bp, Zea mays
  Clone ID: MRT4577_145910C.1
gggtaaacaaccaaaggccgggggtttcattaaaaaaaaatgcccccggggctaccgcacccttctttgggacaaaagggttttccccgacccctcaaaaacattaatcccgcctaataataaaaatgtgcttttttcgaatttaccctcccaaaacttcttggggggc

SEQ ID NO: 50347 - DNA, 158 bp, Zea mays
  Clone ID: MRT4577_145911C.1
tagcggcgccctggcagcttgcttggaaatggtcagagaatgaaggtgagagtggttgcaccgattgagaacgttcacttttcatagcgtacgcaaaaagtcgcaaccctgcatgtgttttggcttaaaacgggattaaggtaagcaaagtacaaaac

SEQ ID NO: 50348 - DNA, 645 bp, Zea mays
  Clone ID: MRT4577_145912C.1
gccggccggtttccaaaaaaacttcataaggagctcaaatttctacttatagatagctacgataggagacgaaaaaatgattccacttctcgctgctgccatgaaccatgttgcagcccatcctgatcttaggagccatctacgacgacccaacaatgaaagcttataacgagaccacctgccgtcatcttctccacagagcagcaagtgaaggtgtaacctgagctttactccacgatctgcaagagtaagcagccaaaatggagaccagatgactcgagtccctcgaaaaatcccacaaaggaactggatcccctctgacttcaccttatgaggcgccacttcaactgaccaaattgaacgcggtagtaatgaagatggaaaggcttaaagcaactgtgatcacttctgccacaatcatccggaaaggatactgtgacgggagcaattcagacattgcgagataattcgtaccatatgtacatatacggacgtgagattgctcaaggagatgttgatggacgcgtataggttcactatctcttgacccagaatactgccgaatgtgacctaagaaggaggtattaacccggaagtgatcaagtactacagaaacctcatcaccttgttgctctaaaacggcat

SEQ ID NO: 50349 - DNA, 792 bp, Zea mays
  Clone ID: MRT4577_145913C.1
atgttttgatgtagcatttttctttggcgcaactgagcgttataaaaccaaaagaaagtttctgaagtcagctttgacgagagcaactgagaagtaaaacatgggtaagtttagagccttttaaggcaccctgtgctggaaaaaagtatataagtttttcaaaaatgtttgcccaccccttctccaaatgaaaacgccttctcgcaagaactataagccccattttaaccccaacctcaaacagtacgcattcatctatatattttgttttgtgttccacctgaatattgttttccaaaacttggtttttttgcacgcaggagaatagtcggaatcgctcacgtagaggatctcgagtcaatcaaggatgccagcaagagagcagagtgcgagcgtgctgccctcaactgtgcgaagacgatcctcaagggaagacaccagtttgagacggtcgagcaagtcgtcgagcatatccagtcattcgatcaggactgagaagacgacagtctatttgtgcgctgaagcctgaaggagccatactctcgtcaattaacccacgcatgcccgagtatcgatgaatcgtctgttttgtagtgatgaagcgaccggttgtttgtgatttctgtattggttgctaggtgagaaaagtacccatttgtgtgtgtggtctcctggcttgaactgtgtgtacactttccgggccggcatagcgagcagctcaataatgaaatgcatattagtgcatataaacacgtgtattaccaataaattttgttctggtggttctctggc

SEQ ID NO: 50350 - DNA, 650 bp, Zea mays
  Clone ID: MRT4577_145914C.1
aaaaatcggctatcattaataccatgccccagcaaagctgcgcataaaatgactaatagctgcgctgccgctccaatgctgcgagccgctacagtgttcagatgacacgggtctgtgcacgtcgacgaccagagcaccgccgcctactacgccgtctacactccggcgaggtgccactcgaagcatcctaatggcacgctgatagagcaggagcagcgacacagattgcaaccgaccagctgaccgagcgcaaatgtacacgcgcacactgcctcttcgtatggatgagatcccgaaacgctgcccccccgggggctacgcccccgttaacagcggctaccgctgcccggaacccggctatcgaaacattctcgaagtgtcccacctggggttgggcaccatgaatgaaactcgccgcccatgatatcgaagtccactaccgccaggggcaagatatatacatgcatgtggctgctaaaactccactaactacatacatacatgctgaagctgcaatctagcttatattgtactgctataagtcaagaaaaactaagctataacaaatggtgaactagtaggatcacactactaatatacgatacgagggaaccaagtgattagtttgctgaaagaatgaacaactgctt

SEQ ID NO: 50351 - DNA, 452 bp, Zea mays
  Clone ID: MRT4577_145915C.1
accgaaatacaccaattatcctctttgtcattacaaaggccgtctctaattggaggcatctatttgcatgatcaactcaacaaaccttagcctgcctagactgatggatctctcctaggcatccatattcgactaaaatgtagacgaggtgtcgtactgcaagctagggaatatcctcgtctggtatgaggacctggtgtcaccagaggaacaggatcgatcctgcactcccatatatacaggcgcatatgttaaaactatgaccttaggattcggatctgacaagagatacttaagcgtggagcatggtcaaggggatgcctgagccttctatgacgcgcactagtcccgattagatggtgacaacagattcggttgctactatgagggctgcggccgctgatatgaatgtggaagcctacgctcaaagggctgtcatggaggcgaaaatg

SEQ ID NO: 50352 - DNA, 108 bp, Zea mays
  Clone ID: MRT4577_145916C.1
tcccatcacttttccgaaagagacaggggacgttcacacgtgtaccatacgttggccagccctaaggcagggggcctttagcacccctgctgtgtcaatcaggggccg

SEQ ID NO: 50353 - DNA, 362 bp, Zea mays
  Clone ID: MRT4577_145917C.1
cataccccggggaaccgttggttttgaaacaaaaatggcttaaaaagccttccgaacaaatttttttggaaaaaaaaaatagcccgcaccctaccttaaaccaccgggggtgtctcgctcggccaagggcaaaaaaatgaccctcgctgttctgcaactgccttgggttcccccatcccccccaccctttttggtgggggccccgaaactctgggccctgatcccagagggggatgggtggaacccctttccccttggtgcatgcaaaaaaaacctcttgcacaagcgttcgggtgaaccccattcccttgggccgctggataaccccccggtcctccggggaaactggcaggcgttggggc

SEQ ID NO: 50354 - DNA, 273 bp, Zea mays
  Clone ID: MRT4577_145918C.1
catacggatgacacttgcattcctaatcattcctgttgctagtgcacgggctacagggagggggcaccacaatattacatgagagtgtcatataaaattcaactatcttatttatactgaacatgagatcgctgctatacatgcttatacaagcaacgatttctttgtatcacatgaaacctgctaaacattaagcaatctatcactgtaatggaactataagtactgtgattctctatactaagacatgcacctattagtactctaatcttc

SEQ ID NO: 50355 - DNA, 334 bp, Zea mays
  Clone ID: MRT4577_145919C.1
gccctgggtttttttttttttttttttttttttttggttttttttttaataagaagtccggttttagtatatatatatatatataggtatacaaatcattatcactcggtgggaccacatataattatattgtgttatcaggcagaaccgccaatcggtatcaacccaacggtggtttggttcacgggcgtacattaccacaaaaactgaccccaaacatgcagagggagagatagcaaactgaaaaactctgtttctttttttctttcacacaccacacaatacctatgtttggcagccagctcggccttttttattattgttcaaccccccc

SEQ ID NO: 50356 - DNA, 307 bp, Zea mays
  Clone ID: MRT4577_14591C.1
caagcaagttaaccaagtatgaacacaggagtacaaacctcgggagcacgtgggccacaaggaacaaacttaggagttccaacaacacagaaaaatggcacaaaggcaccacaggctggcgcaaatgtggagaatgctaagggaaataattttaaacatgtgcaacatggatcaatgggaagctgctcagcaacaggaaaggactgggcccatgcagggtgcatagaaagcacagaaacagtccagaaacaacatgagagatcaacaatgaaatgagtacaatgcagactaataacaaagcaaaaag

SEQ ID NO: 50357 - DNA, 2561 bp, Zea mays
  Clone ID: MRT4577_145920C.1
cgcatctagcagccggccggtatcatcggtccccgtctctgaacagcctagcaaagctcggccgtcatctttaccccttgaccccttccctcccgcttcgccgtcgccgtcgccgcgatctatccgcatctagtgcgcacgcactcgtccctatccccttgcgccggcgtgtgtcgcgcagagagcggagcttatccatcatattaccaggacatgatgatttaccagtcgcactctcaccaaccgctcttgttcgctaccagatccacagcgcgcacttgtgcctatttatttattgtggaggcgtgggtcggcgagggactcggatcagccgcagttgatctggaggcgcgggccggccatggaggagggtggcgagcacacgagtcttctggttaaggatgatgcatcatgtcatgacgaggaaacacagagtctattggaagcaaatctagggccacagctgaaaagtaaatgctctgattggagagcaccggcactcatcctgggattggaatgcttggagagcatggctttcaatggcattgccacaaacctagttgtgtatctccgttcagttctccatgggggtattgcttccagtgcagcaactgtatctctttggtacgggacaagcttctttgtgccaattcttggagccgccatagcagatacttgcttgggaaattataagaccatcttgatctcccttatcatgtacctatttggaatggtactaattacagttgcaacattcatgccttctacttcagtcttgtgcgacgtcagttcatgcttgtcatcaaatggaactcaaaccatgattttctttgctggtttgtatctcactgctgttggatgtggaggagtaagatctgcattgcttccgtttggtgctaaccagttcaacaacgagaacagtctagacataaaaaagagaagaaatttcttcagcttgttctatatatgtgtcatctttggtgtgattacttctgggacaatcatagtttgggttcaggaaaatgttagctgggctattggatatggagtcgccactacatgcataggtcttgctttgataggatttctggggggaacaccaatattccaagaagatgagccttgtggttctccagtgaagagtattttccaggttattgttgcctcttttaggaacatgagcttggaagtacctgctgatagctgtcttctgtatgaggtcgggagcaaccacatacaaaggacaaaacttgctcactctgatgattttaggttcttagataaggcggcagttatttctgatccaagcctggtgtatggaggctgtcgaagctcatggagcatatgtacagttactgaagttgaggaactgaaaatacttatccgcttgctcccaatatgggtgactggaatattctttggtgctgcgatctcgcaaatgcacaccacttttattcagcagggaactgtgatggacaccaagatcggttccctgtccattccaccagcatccttatactcatttgaagtgatatgtgtcacgctttgggtacttgctgtcaacaaagtgcttgtgccggcaatccgaacgtattttgcaaatggggtagagctcacacagttacagaggattgggatcggtcgtttcctgatgatctttgccatggcaatggcagcacttctagaaaccaagaggctgcatattgttcaggagggggaactgctaagcattgtatggcagcttccacagtacttcgtcattgctggggctgagtgcttcggtatcatcactcagctggagttctttcatggccaggcgccagactccatgaagagcattttaacggcatttgcattgctcaccactgcccttgggaattacttgagctcagctatcatcaccctcatcgcaggggtgaccagggtatggcatagccctggttggataccagatgatctgaacaaaggacaccttgactactactactggtgtcttactaccctctcattggtgaattttgttgtgtatctgtattttgctagtaaatacaaattgaagaaagttgtttgttaatactaccaaacactaatgaaatatctttacgtgtaacatgaaatataacgtttcaaatgtttatgtttattaatataaggtttcaaatgtttatgtttattctctatatgtatagcagctcgcgcgcgcggaagccttaggctatctcagcagatcctctatctcatcttttattttaaacttcactctgcaaacaatatcatctacagtttcgtgttccctattttatacgatccgctcaagacagttttatgtcccagaactgccccttctcatagcgatgtgtaaatgttaggagaaagatattgtatgtagtaactattcattgattcattctctatgcttatgctggagggatgtgttgattatttcagttatatggaatgtaatactgatttgctggtggttgagttcgaaaaattaaatactgattttctggtgaaacaagcttggtgtaaacataattttgttaaagcatccatgattt

SEQ ID NO: 50358 - DNA, 315 bp, Zea mays
  Clone ID: MRT4577_145921C.1
aaaaaaaaaaaaaaaaaataaaaaaaaaaaaaaaaaaataaaataaaataggggaaaattggagaaaaaaaaattgataaaaaaacaaaaataaatgaaaattacaaaaagtgcaaattcaatataaaatgattagcaatttctagaacaaggaatacagtgccatgctttaaatgatataatatgcggtatatcccaactggtacacatcggaaaatacgtgaacgaaacaggcgcaatagtggataagctgcatgatatactaccgaaggacgtattgtacacatccattttatcaatattctggttatagat

SEQ ID NO: 50359 - DNA, 287 bp, Zea mays
  Clone ID: MRT4577_145922C.1
cggccgctcgagccgtctgtccggacaaccacacacacgagctccgccactcccccaaactaaacccccgccccggcccgcgcgcggatgaaaccctagcccagatcccaccgccccgcccgcccatggccgccgccgcgccgacgatgctggagtccctcccgtgggcgctgctgtgggtgctgtgggtcaagacgaagcagaaagaactgctcatcaggatctccgcgctgagaggtcatctacgtgttgcgcctgtcggcgtgcgccgacttctcagtgctccg

SEQ ID NO: 50360 - DNA, 787 bp, Zea mays
  Clone ID: MRT4577_145923C.1
cgtttacttaacaattatcggtccatgccctgtcatggccggcaccacatccacatctactaggcatctaggagcagccgcccatagtttgctgctgctgctgcttctctcctgtatcacagtactaccaccaccaccatttgtttatctgatgaatgaacggtggcgatgatgacgataaaaaaaaaaaaaaaaaaaaaaaaaaaaaaaaaaaaaaaaaaaaagaaaaaaaaaaaaaaaaaaaaaaaaaaaaaagatgcccagccccatcgagggcatgaacggcaaggagctcgacggccgaaacatcaccgttaacgaggcccagtcccgcggcggccgtgaaggcggcggtggcgaatacggtggcgggccccgtaatggaggcggttacggcggtggcggtggaggctacggcggtggtcgtggaggctacggcggcggtgggggatacgggggggcaaaccggggggggggttacggcaacaacgacgggaactggaggaactgagcggtggggtcccctgaggcctagttatcttgttcgcttctgcccccgtgttccccctagtttaaagggggtttatcttcgtctggggtcgtctcgtgtccgtatgtttcgtttcgggttcgttgttgttgttgcccatctgtgtttttgaccgcaagctcgctcctctgatgttgttagtgatgtctacaatcgtccaatcccgagcctgcattgagctccaccgtttatcttatctggctatacctaaaaaaaaaaaaaaaaaaaaagaaaaag

SEQ ID NO: 50361 - DNA, 2597 bp, Zea mays
  Clone ID: MRT4577_145924C.1
ggttttctagttcagtcaaatcattcacaccctcggggagctggaacgtctcttggtccgccctcccctcacccggaaggtgaaagggaaatgtgctatagggccatttctacctattttgatgattaagtacccaacacaccacattagactaacaattctgatatgagcatgagcacaggttctagccaaagcaaattgaagtacaagtccatatgagccgaatttaagggccaaaatagcaactttggacaaaccaacataaacacaaggtttaagtatttgaataagttgcacatatcttatatcatgtttcttgcaccttggtttggcttctaactcatttatgcaagaaaagtgacttttggacttagttttgggcatattgcaaatcctggtgaatctgagaagaaaatgtatgtttccacacttagtcaattggattaagtgctaattatgttatataaatcgtagggaagctatcaaagaaagccaaaagaagttggagaaatttggctaagaagatccaaatctgggcaagtctcggactcactggacgatccgatggtgcatcggacagaccggttgcccgaacgaacaaagtcttcagtctcaggaattttactaaaaaatcaccgaacggttcggtgtgcaccgtacagcccctccaatggctagtatgacattcgcccaacacttcaacgactagattgggtcactagacagtccggtgccgtcactagacagtatggtgcccctagaaaaggaagggcgccaatcaagctaatctgtcgaacgttattattctctatctagtggctcacaagacagtccattgcgctcggagacaggaaggttttggatcttccaaatggaaaagcaatgactcctaggccccttagggctataaaagggactccttggtgccttcaacggggccccaagcatctcaagagcacaccaacacttcaaaactctgcgaccatgtattctagtgattttagtgagatctgagctccattttttgtttgtaattgtgatactgtgttcttacgctcatttcattagatttcttgtgtgtgttgctgcattgtgcttttgtgtgtgtattctgtatccctcccttactctatgttttgattgtgatcatattgtaaggctgtgagagactccaagttgtggaggttccttagaaatgggaatactgatataaggaagaaactgtgacactcaagtttgatctttggatcacttgagaggggttgattgcaactcttttccaaaggaggacaccacaatgtggagataggctttggacgaaccacaggataaaatcgttgtgcctcatgtctcttttatgttattgtgattttccttcttcctaagttctctattctcacttatggtattgctctaagtttaattcatatcttgatagagcaatcaagtgaagtgaacctctctctctctctttttctcctttcagacttggtttaatttgcactaactctaacttttagaccatgtttgtgttgtttttagctattttttcaggatcacctattcactcccacccctctaagtgctctcaattggcattagagccggtctctttcgttgggtctaacaacccaaagagatggctagcgacgatgctaaagggaagggcaaggtgaccggtgagaaggagacgatcaacaacgagcccaagggagacaagcccattgacttgggttcgaacaacaagaagaaggatatgaagaagaagaagtgcatgaagaagatcgtctactacgacagcgatgcttcttcatcttcaccaaaggacgatgatgactcctcttcttcaaagaaaaaagacggtcaaacaaactatactagaacgtcttttaattactctcgcattccttacaatgccaatgctcatttattatctattcctcatggcaagcttcctcactttgatggggaggatcattcttggtggagtcacaaaatgcgtagtcatttattttctcttcatcctagcatttgggacatagtagaaaatggaatgcatatttttgatagtgatgatgagaattgcaatgttatttatatgcaagaaatgattcacaaaaatgcccaagttactactgtgttgttaacttctctatacagggaggaatataacaaagtgagtggtcttgacaatgctaaatagatttggacactctcaagatcgttcacgagggcaatgatatgacgacgatcaccaagatgtagctcattgaaggtgaatttggaaggttctccatgaagagaggtgaagagccaactaagacgtataataggatcaagacccttctaaaccaaatccgcaactatggaagtacaagatggatggatcacaacattgtgtgcctaatgctatgttcatttaccgttcttgatcctaacattgtaaatttgatccgtgagaatcccaggtacaccaagatgacgcccgaggaaatccttgaaaattttgtgagcggacgcatgatggttgtaacacccgaaatcctattttgagattttaaaagtttctccaaaagattggagataaaatgacttct

SEQ ID NO: 50362 - DNA, 606 bp, Zea mays
  Clone ID: MRT4577_145925C.1
ctccgtgttttctcagaggtgggttggcttctcctcccccaccggttcgtgttcaggttctggttcgtgggcgagagggaagagatggcggcgtcggacgttgagtaccgttgcttcgttggcggcctcgcctgggccaccgacgaccactccctcaacaacgccttcagcacctacggcgaggtcctcgagtcgaagatcatcctggatcgggagacgcagaggtcccgcggcttcggcttcgtcaccttctccacggaggacgcgatgcgcagcgccatcgagggcatgaacggtaaggagctcgacagccgcaacatcaccgtttacgaggcccagtcccgctgcggccgtggaagcggcggtggcggatacggtggcgggcgccgtgatggaggcggctacggcggtggtcgtggaggctacggcggtggtgggggatactgcggtgcaaaccgcggcgacggttacggcaaccacgacgggaactggaggaactgagcggtggactccgctgagggctagttatcttgttcgcttctgctaccgtgttgaccctatttgtatagggggtttatctttcgttctggggggcggtctcgtggt

SEQ ID NO: 50363 - DNA, 586 bp, Zea mays
  Clone ID: MRT4577_145927C.1
atggtgtccaacactcctttgaccacggtgtttacgtcgaaaaccacaattaatattgtaattctttatacccgacggtagaacggtcaggtgtcgaaaagcatgactaaacgtgttacaaaatatgtacacacatagccccacgcatcgccgcactaattaccccactgactctgcacgggctgctggaaaagctgatgcctaagactattctgagaactcaaccatgaaatcgccatactcgacgacgtagtggaagactgcgatgaaaacatccatgaaaataccaagaaggccacggggagggccaataggcgtagctataaatacagtgatgcactggataatctgttcttcaccatcctttacaacgtactgaagagggtgctgctggaacttcttgactaccttggtgaccacaatgaccaacatggacgcaagactggcacaaataacagctgattctaccattggtcttataagacgcttacgaagatgattaaagtgcttaatgatgagctccatgatcttcttctgcgcattgtggttctgcattcgttccatcgtcatcacagaagtcttgcac

SEQ ID NO: 50364 - DNA, 336 bp, Zea mays
  Clone ID: MRT4577_145928C.1
ctcggacaaaaggggattcttggggaaaaaaacccaaccaaacaaacgttttatgcacccaatttttaaccggtgccccgggacctttgttgggaggtgtatttatgggccgggtgatgaccatttttttttttttaaggaacattttgttcccgttagagcctcctttggggggcaaaagggaaaccccgggaggaaaaaggaaaaccttaatggaagcccccccaaagaaaaaatatctcaaaaagggtccgggcaaaaggggatctttccccccccacaaaaggcccctcccccccctctgagctaacccccgggaggggttgttaacccccc

SEQ ID NO: 50365 - DNA, 1389 bp, Zea mays
  unsure (1)..(1389): unsure at all n locations
  Clone ID: MRT4577_145929C.1
attgggaccctcgaggccggccgggatccgttttaactcacagagcagaaagaccgactggcccgcggttctgctttccttcctttgccccgttaccaatataattttctggaatctcccacactagaaaggttccggatgtgacagacaatgatatgatctcatggcgtgcgaagaaggaggtgaaaactgtcatacctgcgatggacacgctcccggcgccccgtacatgcgtacggccacaccgacgcgctcacaaacttgcacctgtactccctgaccaatgcgatacccttcatcgccttcacgatcctcgatatctacagcaataacgagcacatactgatgggcaccactgagaatcacaccgttcgaacattgaatatcgctaccatagaatccatgcctaacactcaaaccaatgccattctaatgagaacaggatagttataccatataacatattcttatgcctataatacctcagaaccattgtgacacactctcaccaagagacaggccctgcgatcgatcaatactattcctgctaagctgtagtccacgactcttgttttcacatacggtgtcgatctgttctacacccagcttgccccgtcaaggacctacgattccctcaccgacgaattcagctacgcgctgcttctaatcacgatcgcagtcctggttgctgccatcatcgtcacatggatttggtccgagaagaaggagttgggggacaagtggaggtgagcgaggtctcaaagttgtgacgcggaagaaaatttcgggccccagtcagctagctcccttgttttggtcccccccttttttcattttagtggtagagttcacttcacctttgactataggcattttatttatgtaaccattcgacaagaagaaagcctatctgcctgctgtgaatcgacacactgccgaagcagccacctgtgcagctgaaaatttctggagatggcatcaaaggatattagcagagcgcagatggcgagagaatggtttgcttataatgtgtaagctgtgtaccccgactgcaaccgaactctttagcagattatagcaattgctgttgatatagcgtttctgcttaaaaaaaaaaaaaaaaaaaaaaaaaaaaaaaaaaaaaaaaaaaaaaaaaaaaaaaaaaaaaaaaaaaaaaaaaaaaaaaaaggnagaagaaaaaaaaagatgccaagctgacgaaccagaagctaagagaacctaactttttttataaggtcacctaatttaaatgccgtgcccgaaattaaacaacggggaaacggggaaaaccccggggttaccaaacttattggccttgcccaacttccccctttgcggactggcccaaattcccaaacggcccgaact

SEQ ID NO: 50366 - DNA, 348 bp, Zea mays
  Clone ID: MRT4577_14592C.1
gggcgcgggggggaagggtacggtggaaacgtgcgtcgcggctactgacgtgctcttagccacatgaagaggccgccgatgaaggagtgaatgaagatgctgcagaaagtgaggagcgtgaggtgacaaacactacgcctggtatgcttctcacttgtgtgatgactgttctatcactgcgagacaaccagggcttgagatatggtttccaagactagagcgaccttatggactcgcctggacacgaggaacattgttcgctagtgccctctggtctattgctcaccaatagggccctggaacgcggcgactgtatattgccgttggtgttgtgcggacctgtatgct

SEQ ID NO: 50367 - DNA, 457 bp, Zea mays
  Clone ID: MRT4577_145930C.1
tgggaattcggctcgagcacgctggacccgtcatctatgctcgaaccgaccgcgctactgtctggggcgtagtgcaagggccgtggcggctgtcattgcggacgccgacccgctcagccacatgcagagaggcctcctgagccgccagcaactgcgaggggaggactacacgccttgatcctagcttcaaaggctaaggtggcggaccgcgtggtccgcctagtacacggaccccctgattatgactgcgctcctcaggacagccacatgcaatctaaagctcaagctcctgcaccacaacatttgactcctccgaagacatcgacgaggtcttcttatgtattatcgagttgtaccaacctgaaacacctggcctgagcgaagttcaccttcttaaaagacttggagaccactacctgctgaatgactaactaataaatgacgaaggagtgatggc

SEQ ID NO: 50368 - DNA, 260 bp, Zea mays
  unsure (1)..(260): unsure at all n locations
  Clone ID: MRT4577_145931C.1
atcaccaagctcttcgacctttattttcagctagccngnngcactngccaaggaggagattgtacttccctcgactgctctctatatcgctcctcttcttacagatacagctacagaagtgctccttgactagttattgccatagtaacccacgctataactactgccgaatctcatccctttttgattgttccacaccctttttccattgggtaacatgattataatttcacccttactcccattttttattctaaaaa

SEQ ID NO: 50369 - DNA, 232 bp, Zea mays
  Clone ID: MRT4577_145932C.1
atgggggggatattgagtatggttaggacgcgtccagggcgaactgcctttggggcgaaactcaaatgagacctctgccacggcaataaggcaactttgatgttatccaccccgctaaaagtggtagctagcaggttgcaaacaaccggtgaaggtaactcctgaaagttacatggacccaccgctatgacaacgccgcatttgaatcgcgggcgcctgaataccaccctgg

SEQ ID NO: 50370 - DNA, 386 bp, Zea mays
  Clone ID: MRT4577_145933C.1
ccacgtcctagctttggtctggcattcagaccaccggcggaggcccaggagggggcacgcgcccggaagcaggcgctgggcggtacgcgagctctccgatctggctctgcgagcagatggaagatatctgcgccctcatgcgccggcttcagggccgcggaccaaaccgcctaactcctacagagtcaatgcttttgccgaagttacggactcctccagcctactttcctatgctacatacggtccattgcacaaacgttgtttaccttgtatacctggtgcggttataagaacgaacgagagcggacggaatgcattacttcggatacacacgggccgtcatggggcgcaccggacaaccgagcgacgtgagctgctcttccgag

SEQ ID NO: 50371 - DNA, 252 bp, Zea mays
  Clone ID: MRT4577_145934C.1
ggaccggcccggaaaccccgggccgacccacgcgccatacacaggaggcgcgacacgaggccgaagcagcagtggaaagggaacccgcggagcgcccgccacaggcccgggacagacccccaggaacaagagcacaaggacgaacacacaacggagaacgaggcacagacgaacgaaaacccggcccagcaccacaaccagacccaaaaacacaggggacacgacacaaaggagaggaagccgaccaggaca

SEQ ID NO: 50372 - DNA, 218 bp, Zea mays
  Clone ID: MRT4577_145935C.1
accacgcatccgcaatatcttcttttcactctttggcgctcatgattccaccaggatgcgtcagcctccacacatggcaggtgcaattgaaaacccacttacagacagccttacacatctgcacaactctatcactaacaagatcaaaatctcaacatagcttatatatcccagctcatgtaatctcaaacacaacccatattctgacaatctaacta

SEQ ID NO: 50373 - DNA, 372 bp, Zea mays
  Clone ID: MRT4577_145936C.1
gtccgactcctcttgacccgaacgctgtctgcgcgcgacgacctctggctgcagacgcgtgtgctgcaccagcgctctctcgcttacccgacccgagttgcccaacacgagactcgtcgctactggaccgcaccgacgttcgacggacggccccagtggggctgctgggctcttggccttgcgccgttcggcttgcctgtccgacgcgcgtgctcgtcctcgtgctcgtgctcgccttctgcagctgcctcctcgactgcggtccaccaaattagttcagtttgatcttctagctagtaaccggaactagaactagcttagttttacagaaactataaattcacaccatgaaccctctgaacgcggactgga

SEQ ID NO: 50374 - DNA, 529 bp, Zea mays
  Clone ID: MRT4577_145937C.1
ttgatgcgttatcgctacatggtacgaattgatcacttgcatcacagcaacaagatactgtggtactgggaacaacgcaggggccatgcttgtagaccggaggggctgattgatagtgccaaagaccattcatacacttccacctactgataattcacctgaatactgccccgaacgtggggatgccacatggatgcaagagcttaacattcagcggtcacctacttcaaccagaaggcagacacaagctgccggtgataggaatactattgcttacatatgatacattgacacgactagagcacacctaacatgctgctggaatatgatttcgttctgtaagtcagcaaatgttcttatacgcagaattacaaggctacactatgtgtgtagttcaagaaagaacaatcaaccaacaagacatcatggatacacttgtgatcaggtccctggaaatcctttgtgatgcatcggacttaactgtagatgtgtgctaccgtgacttcagctgctaactggggagctgcat

SEQ ID NO: 50375 - DNA, 264 bp, Zea mays
  Clone ID: MRT4577_145938C.1
gaaaaccccatttctcctttgcccttgaacaattttttaccttatggaccaaaccgaaaaccacggtgggccaacatgcatccggcaccctaaaggtccccgggggcccctcccttactttccgggaaccaatatgggggcgttggcccaatccttttttttgacggggtcctgaattttgtaagggaggttttagagggggcccttcccggaaaccaaagcctggacaaaaaatcctaacattgaaaaccttgtaaggggggc

SEQ ID NO: 50376 - DNA, 425 bp, Zea mays
  Clone ID: MRT4577_145939C.1
cgcatcgaaagggggaggggtccctttaaaagggaaaaaggcaaaaaaaagatggggcccgggggcaaaaaccaaaccataccattaggggggcaaaaaaaaagaaaagggggggacaaaaaccacttaagagggggggtcaggcccacaattagccctgaaaattagggccaatttacgggcccacccgggaagggggggttgggaacaaaaaaaaagacaacggggggtcacaaaaaaaaaaaacatcccggaaaaggggggggggaaagcttggggagggggattaggtgccaccaaaaagggttcccaggggaaaaaccccccccaggagcaagggggaccttgggcaaaggacggccccaaaggaaatttccggggttttaacccccggccctggggaaataattgggtgggggggaaac

SEQ ID NO: 50377 - DNA, 364 bp, Zea mays
  Clone ID: MRT4577_14593C.1
tcgggttggggcgcagacggccggccccgttatcgcacttacccgaggctcggcggggctgggcggcttgcctgtcatgctgaacgtggactgtgaccactacatcaacactgcgcaagggctgcgggcgggcatgtgatccatgctcggccggcacagtgacgcggtgcactaacggcagctcgcggagggataccaggtcgtggcccgaatgtagctgcacgccaacggcaacggaatgtccttcgacggcacgctcagggtgctgaaggggatggagggcccaatataggggggcacggggtgcatgcctcggcgtatgacgctttactgattcgacccgacgtgaaccaacgtgggcggt

SEQ ID NO: 50378 - DNA, 538 bp, Zea mays
  Clone ID: MRT4577_145940C.1
gccgccgccgtcctaccagcaggcggtgtcccggtccaaggccaacaagttcgcgaggaagcagaggccagcagcgctgcgtcgcccggaacgaacatggtgtcgttgtcgtcgacggcgacgacgagcggcggtcgccgcgttcttccaccttgtgcttctgatcggattctgatgagctgccccggccggatcggacgtaccggtggattactggattattagctgttgcactacgtgcggtgttcattgggtgttgttgattagttagttgttgcacagtgcaggatcgctcgtcggtgtggtacgtacgtgtttgttaatgttctataataggtcgttggactctttccctttccagtgtcgttcagctttatttgcatatagatcatctaggggttcggttttttttatattaataattggctattatatgtgcatggcttattacttgtagtgtggttctattgtttttttctcaattttttaaattcatagaaatttttttatttttattttttaaactatgataattatt

SEQ ID NO: 50379 - DNA, 258 bp, Zea mays
  unsure (1)..(258): unsure at all n locations
  Clone ID: MRT4577_145941C.1
cctccttgctctctggcgcggccgctgggtccttcttncccnctttcggtcgttgtccccctggtcctgctcggggntgcccttttctttttttctttgcgcnggtcttgttgggggggggttttctgtttcntgcntgggcgccggtgctccggggggggctgtttttctgctcgctcggccgtcngctgccctggccgncctcctcttctctggtgcntgcgctcctctcgggcttggtgcccttccttgttctct

SEQ ID NO: 50380 - DNA, 284 bp, Zea mays
  Clone ID: MRT4577_145942C.1
gggcggaccacaggcgtccgttccgatctgggtggaggcggccatcggggtttattacccaacgggttacctacttggataggagcaatgcaacgataactaaacctattcttacttaatggaccaaccagggaaaaatgttttcaacgttaggacgacaggttgttaagggtgggcaaacttgaactggacgggcgcacggatttcaatggtgccaacagaaaaggtgcggatttgagagaaattcgaccttttggatttttagagaggattttgataccgtt

SEQ ID NO: 50381 - DNA, 427 bp, Zea mays
  unsure (1)..(427): unsure at all n locations
  Clone ID: MRT4577_145943C.1
aaaaaaaatacatgcatttcaatactaggacatccttccactttgaaaaacgattgtctgggatcttattggattaaattcagtttctagtagtaaaagtattatggaggccattgtactaggagttagattgcattttgctctcgaaaaacagaaaaattaatctctgtatgttagatcaaaaagcaaataggtcttttttgttaaaaatttcatctatttctactattaaaaattagtatgccttgtaaaataacacaacaattacacgtggctgtcatgtgttaatataaagagattagttcttaattgtagaaattgatgaattttttaacagaatcatcaatttgcgttttaatttaacgtacaagagttaatntgtttttgttcatttttctaataaaggggagtaaatgtaacttaactc

SEQ ID NO: 50382 - DNA, 850 bp, Zea mays
  Clone ID: MRT4577_145944C.1
attttgattggtacctcgagccggattaccaaaccagccctgactccctgaggtttgacggaggttgggttggatgggtggcccttcctctccccgtcgggagaacgacggcgaggggagtggcgggagatctccggctccggcgacatggaaggagcgcccgaggtccttcgacgagaagaccaggacggcgtgttggcgtaaggcagcggtgctggcgggacggcacccggaacgctggcggcaggacgccgtgggcaacgtggtctgccgccgtttctggggctgccacggatgcctctgctacgagtacgaccacatcgtccctttctccaaaggaggagaatccactgttgagaactgccagatcctccagactagggtgaaccgttccaaatctgataaagcatgggtagcgcaagcagagatgcagggtttttcctgcgatattatgtttactgataaggagctagatataattgagatggctgtgtacggggacgtcattcgtccagggaagcaatgtcgctgcagaacagtagccgaggtgctcgggcaggtgaagccaacgaatcgcatggctgcatgtgagttaccagacaaaggtgcctcttaaaatgtataattcgaataaattggtttcgaccctcacctgtcagaatacaaccttttgtagcgcagttgattccattcaacagaggaacttgagttctttctcacaagtcataatcttgggaaatggatgcagttgatctgcagcctgtgctcattcatgatatctgtgttcaaaaaaaaaaaaaagaaaaaatataccaacccgcgtccctcccccccagctttttgttccttt

SEQ ID NO: 50383 - DNA, 295 bp, Zea mays
  Clone ID: MRT4577_145945C.1
ccggatcatgcagcatcacagtcgcatctgattaacacagactgctcaccggaatctaataccttacgcgcaccagcgacctaaataattagcttgatacagctgagtgataacgcttcgcgcatgcagggcgatcacggagtcatgagggactgggacacctctcgcagtttcatgcaaaggcacgcatgggacgagatcggctatacatccatgatgcgaaggtgcacaaccttgctgtcgtcgagacgacgtgcatggcagtggacgagcgcttcggcacctaacttcgagg

SEQ ID NO: 50384 - DNA, 236 bp, Zea mays
  Clone ID: MRT4577_145946C.1
ctacaacaagctccacttcctttttgtagctagctggccacattgtagtagtatttgctgctggatataagcagaggtgttcagtgtggtcaattggtcagctagctacgacaagccccacttcctttttgaaacaacaacaattgcttccgttctaccagcagtttgtggatagccccgcagccctcttacaactgcagcagttgatgccctttgtccaacttgctttgacatac

SEQ ID NO: 50385 - DNA, 506 bp, Zea mays
  Clone ID: MRT4577_145947C.1
ggccgcttttttttttttttttttctttttttttttttttttttttttttttttttttttttttttttttttttttttgttttttttttttgtttctttttttttttttcaccacaacaaaaacatgcaggatgctaatatatgcaaaaaaaaaaactcacaaggaccaagaaacaaggtccggacgggaaaccgaaaaaccagggggggcgacaacacggggatggcccacacgaggagcaacgaaacacgggggggagaagttgccccaaatctaaacccaatcgcggaagaaaaagccaggctggtccacccctttgcaggggggccccccaaaaaggcccctttgggcctgccccatgctgaagaggaggccccccccgaggggccgggggaaaaagaagccggctcccacccattcccggggggtgccccccatttttgagggcgaggaaaaccaccccggcccaacctccgggccggtgaaaaaccgctggcagaaaaag

SEQ ID NO: 50386 - DNA, 349 bp, Zea mays
  Clone ID: MRT4577_145948C.1
ggaagacgaacggccacatgcaaggcttattaaaaatcactcactggaccaacaaagactacaacgtacaggctcctctgagttttttagcgccctggacacattacatagctatggcaccattattacaagactgaaaaaaacaaacaaccatgggcccttatctgcccgaaaacatgtgagctgcctaaaaccactttatgcccgattgggttactacattgacctgaaaccccaatctactaacgccgtgggactacagaacacacttggggcaaaaatcacctataactttctgcctaaggattaaaatgatcaagaaagaccctaaaaacacctgccttctgct

SEQ ID NO: 50387 - DNA, 455 bp, Zea mays
  Clone ID: MRT4577_145949C.1
acttatgtcacatgatgccatgcgcataaatattcagtgactacaacagactgagggcatatgttgagatgatcagagccttggacgccacgaaataaacatgttatggccggccctagctacccaaattccaagcgcaacagaagacaaagtagctatgacgcccattgatcagcgcttatctaagcacgctgattcaatctggctagggtgaaacttgaaaacagtggagctcaacacgctacaccatctgcttaaccaaccgcacggggcaggccagagggttaacagtatacgtgctgacgcttcccatgagagccatcttgagacgacttaggcctgtggtgccgacgaccatgctttttatcggaaccacagacgatgcttctgagagcttttttgctgtggcgacgaagaacaccttattaaagacttttatccctctatggtttgcc

SEQ ID NO: 50388 - DNA, 1620 bp, Zea mays
  Clone ID: MRT4577_14594C.1
cctcgaggcccggacgcgtgggccaccaggccggcgcctgttgcgttcgcccctccttttaccttctcccattcacgccccgtctctttcgtggccttccttttccggcggccacaagtgggcgagcggcggcgcccttcaccaggtcttcgtcgggcccttcaccggcgacgagcatccaccagaaacgtggagctcagagcattggtgcctctttcctctttcaccaaggattccggtgccttatttcacaagacaaaaaaagtctcaagggtcttgattcttgtatgaactcaagatttatggtggatcttggagctgtgggatgctaagcctggtctagctactagattatgaactctctgctgatctaatagcatttctacaagaattcttttgctggaaggtttattagttatttgcaacaatgaaggaacatctaatgcttaatattgatgacctaagcattcttgagcctaacgaggtcattgggacagtcaagaataaatcatctggggaaaccattgcacatccaccctccatggctcatgccattttagcaagtgggagaaagcatgggttctgaagcggaacctcttctgcaagtggtggagtgtcgcatttgtcaggaggaagatagtatcaaaaatttagagagtccatgtgcttgcactggcagtctaaagtatgctcataggacttgtgtacaacgatggtgcaatgagaaaggagatgtaacatgtgaaatatgtcatgagccttatgaacatgggtacactgcacctcccagaggccatcctgatgaaactaccattgatataagtggtgggtggacaattaccggtaccgcatttgacttgcgtgatcctaggatacttgcagtggcacaaaaccacatcatggaagctgaatatgatgattattctgccacaaatgcgagcactgctgccttctgccgctctgctgctcttgttttaatggctctcttattgttgagacacgcactgactctaactgatgaagatgacgacgacacttcagcgatgttttcactttttctgttgcgtgctgctggtttcctgcttccgttctacatcatggcttgggcaatcagtatcttgcagcgccgcagacagagacaggaggcagctgctctagctgcagcggaggtggcattcatcctgcagtcaggccaaggaaggggagtgcatttcaccatcgcaccggactccccggccacaccacagcatgaaccaccacaaccataattacatctatctaggagtggctgtggccgccgccgatcgattatttccatgggttacccaaggatttatggctgtctagtgcagaagcagataatttctgcccaagtttcctgtcattaatgtacttgcgtgttcgtgcgagttggctagtgcattttgcatgtcgtcccgggactaacgggatgtgtatataatatattttgtaacagagacatctgggttctatgatctccacaatgtcaaaaattgaactatcgcctgaattgtcagtcatcaacaacaaaaccttttagtccggaatatattagagttgaattctgatccaaatctatataatggacaaaaataaaaa

SEQ ID NO: 50389 - DNA, 711 bp, Zea mays
  Clone ID: MRT4577_145950C.1
gtttcttccctttccattttgaacggcgagatcttggaggcagagaggagagggccatggcgatttgagtggttagctctgccgctgatctccgaagagcgagcctgtggttggcgtccttcccctacccctgttgcttctcctgcaagcgcgtcgaggaagaggggaagtcgacacatggtgatttcgcggcggtatctcatctgctactgttaatttcgcgctgctgctcctattgctgtggtgttctccgagccctgtgtctcccttcttcccccaacgagccatgaatgtggtgtcttcacatttaagtatatggagatattcacaccaagaactcagatggcaaactttttctccagtgcagacattccaaatcttaggatcagatatgcgaatgacatgttttgcagccccatgaacagttgtgacaagtctttcgtaactggtttctatcgtgatggagaagcaatgccgggtgaggttaaacatgtgtgcggtcctagcacaaatggtggctgagttctttttttagtagcatgtaatctgaacaaagtagcatgcaatctgagcatatcagtatttttgatttagtagtggtctgtatgttttttcattttgattgtagtgtcatgtctttatgcctgtaactctgcagtacgtattttgagcagatttttgattctatatcaagggtccttttttttgtag

SEQ ID NO: 50390 - DNA, 300 bp, Zea mays
  Clone ID: MRT4577_145951C.1
aagcaggggcagagagagcaaacctataccggggcttgggagcagatgtcagcatccgttctattgacatgctataagattccacaggctgagacataaggtgtacccaaggctacttgtcgttgctggtagccacacaaggcttactgctgtatgcgtatgaagcggaaagggaaatgctggcgctgatgacgatccttggatggaatctttgaagaaagctatggctggtgcatacaagcccagcatcatacaagacttggtgcaggagcatgtggcttatctcagagaacaagcatc

SEQ ID NO: 50391 - DNA, 206 bp, Zea mays
  unsure (1)..(206): unsure at all n locations
  Clone ID: MRT4577_145952C.1
cggacgcgtggcctcgctcgagatcgcgatcggccccccctttttcatctctcggggtncccatgcgcatcaacggcgaggccgccctctcttttaacgtcttcagcgcccacagctccattgtatccgcggagcgtgctgagtcaccaatctcatctagggcccaagcatttttaacccttgcgcgatgcatagcggacggtgcg

SEQ ID NO: 50392 - DNA, 436 bp, Zea mays
  unsure (1)..(436): unsure at all n locations
  Clone ID: MRT4577_145953C.1
gcgtccgcgcctgtttcggttgttcctaacttagtggctttgcaaaaaacgcggncaccatacacagttattggtactacgaggggttctagtgcaacagcaactgctgcggacttaagcctggatgaagacagaaatattcactaatggaaatgtttgcaaggatgacaatagacatcattcttttcgacaaactggcctcgagcaaccaggtggactacaagagtttgataagccttcatgttccgaggagaatggccatggaagacattgtcttgttaacattcctatcgctgttgctgaatatcctatgatgcatcaagtccgtgagggtccagtgagtgttagcacgtgcaatgactccatttgtttgtcaggttccntggatttacgtncacatgcctttnnagntgaagtaactagatacgtaggatgt

SEQ ID NO: 50393 - DNA, 720 bp, Zea mays
  unsure (1)..(720): unsure at all n locations
  Clone ID: MRT4577_145954C.1
gttccatcactgtcccccgtcattctcgctgctccaatggcgatggtctcgttccatcccccgggtcttcctcctccgtctcctaatttttggaaaggccatagtttcccaccgcgagacctgtatccccatggatccatgagagaaaggcggaggagatcaggcgacgtacgcgcgtgggggtctcctcctgcacgctctcagctgaaccgccccgtgctcccctgggcgcgccgcgcgcaatggcccgacgacggcgccccctaccgccgccgctgctcgtctggttggccgtcctcttctctgcggtggcgcccgctgtcgccaagaccgacaagtctgacgttgctgcgctcaatgtgatgttcaatagcatgaacaagccatcgcaattgtccggttggaaatcgagcggcggtgatccctgcgatgacgatgacgagtggaaagggatagagtgcagcggctcatctgtcacagaaattaacttgtcagggcttgaactcagtggctcgctaggatatcagctatcaagcttgaaatcagtaaccaaatttgatctcagcaataacaatctcaacggcgatcttccatatcagcttccaccaaacgtggntgaattaaatctttacggaaactctttaactggaggagttccttattcgatatctcagatgggtgatctggaaacactaaatttgggcaagaaccacctaagcg

SEQ ID NO: 50394 - DNA, 288 bp, Zea mays
  Clone ID: MRT4577_145955C.1
ggggggaatctaaataactgggaatatttattgcaccagagcctttacagattagctatccatatgatagaaaaaaatctctactggaggggctgggcggagtaaacgactgggaaaaattcgggggaagggtttcaaacaatacggggtccaggggaaaaaacaaggaatttgaacatggaaagaagttccccattggcagcggcgctcgaagagctacatccctgtttgcatcaaaaccactgccgccggcggggaagaggcccctcccctggcaaggccggatgg

SEQ ID NO: 50395 - DNA, 492 bp, Zea mays
  Clone ID: MRT4577_145956C.1
cattgggtacctcgaggccggccgggcagccgcctctcccgacgccatccccacgagcgccttctccgccgccgtctccgctccgccgcattctccgacgccgtctccgctccgccgtcttctccgacgtcgtcaccttcccctcgacaagagtgcaaagtggaagcaacacatgaagtcgacatggagaaggaaaatgcaatgacagtccacatgaaacttgtgaaaaaagaattaaatcccaaagttcctaatgaagagacttgtattacagttttatgttatattgtctatctatttgtgtgaatggagatgaccttgctggatggattagcttcgttaatgctttagtttgctgctgctgcttcagtttgctactgatgatgcttctactgtaatttactactttattttgctcgacaaactattgtgatgatggataaagtgtgatgtgattatggatgaacctaaaaaaaaaaaaaaaaagcggcc

SEQ ID NO: 50396 - DNA, 678 bp, Zea mays
  unsure (1)..(678): unsure at all n locations
  Clone ID: MRT4577_145957C.1
cgaggccggccgggccgggtacaccgacacactacatccagcactgtcacagtgtcaccttatttagctagcctgtcctagcagctagccaccagcccaccacccagcagcatggcgagcatcactgtgacaaagaaatcccagtccttcgttgtgccatcgtccacggcaacgacgactccgactaccgatacgctcgagctgtcggccatcgaccgcgttccgggcctgctccacatggtgcgctccctgcacgtgttccgcggcaaggacgccaccgcccgcagcgatgctgctgctgctgccagcagcaggccggccgatgtgatccgcgcggcgctgtcccgcgcactggtggactaccgcccgttcgccggccgtttcgttggctccctgtacaccggggaggcgagtgtcgagtgcaccgacgacggtgcgtggttcgtggacgctgtcacggactgcagcctcgacgacgtgaacggcctcgactacccgctcatgatctccaaggaagagctgcttccggctgcagaggaaggtgttgacccaaccagtatcccgatgatgatgcaggtcacagaatttgcttgtgactagatgcacctgctgacctacgagcaagccaccgtgggaaactgaggttcaacaagtagagatagctgagcagnagctcgt

SEQ ID NO: 50397 - DNA, 1195 bp, Zea mays
  Clone ID: MRT4577_145958C.1
cctcgaggccggccggggaagtcttctccttcccctcgtcaagatatgagttcttggggagaagcaagttagacaatttttgttagatatgaattgaaaggaatggatggattaacaaccgaggacaaatcatacgctttggtgctttttgaatctacgataaatatagaggttttcttaacaacaacgaagcatgatgttagagaaatttggctcaagcgcaaaattaggttgcttagaagcagtgtacagtgatgcgaggcatggatgcgagagtgcaaagtggaagcaacacatgaagtcgacatggagaagaaaaatacaacgacagtccacatgaaacttgtgaaaaaagaattaaatcccaaagttcctaatgaagatacttggattacaggtttatggtatattggctatctatttgtgggaatggagatgaccttgatggatggattaacttcgctaatggtttaatttgctgctccggccgggaggccaggagattctcctggagagctcctcctcccggatgccatccccgtgacgctcccagccgcctctcccgacgccatccccacgagcgccttctccgacgccgtctccgctccgccgcattctccgacgccgtctccgctccgccgtcttctccgacgtcgtcaccttcccctcgacaaggttgcttagaagcagtgtgcagtgatgcgaggcatggatgcgagagtgcaaagtggaagcaacacatgaagtcgacatggagaaggaaaatgcaatgacagtccacatgaaacttgtgaaaaaagaattaaatcccaaagttcctaatgaagagacttgtattacagttttatgttatattgtctatctatttgtgtgaatggagatgaccttgctggatggattagcttcgttaatgctttagtttgctgctgctgcttcagtttgctactgatgatgcttctactgtaatttactactttattttgctcgacaaactattgtgatgatggataaagtgtgatgtgatgatggatgaaccagtttattatgctccaaaaaaaaaaaaaaaaaaaaaaaagaaaaaaaaaaaaaaaaaagcggccgcttttttttttttttttttccttaagcaaaaaaaaaaaggcccctagggccttctaaattttttccaatctcatccaatccatgtataatggga

SEQ ID NO: 50398 - DNA, 876 bp, Zea mays
  unsure (1)..(876): unsure at all n locations
  Clone ID: MRT4577_145959C.1
aattcggcacgaggccccttacccagtcaccgtccctcagctgcaaccctcaccctgtagctgccttagagggagggaggaggggaggtcgcgcgccaggagccaacaggggacctcgccggcgcaggggaggaggcaccgtcgccaggagccaagagccagcagccaggaaccagagccgccaccacttctagagctcaatcgatcagcggctcagttgcattggttaatgttagtttattgacaaatatggctgataatggtgatgccaaagggggatctggcgcctatgcaattaatatagagaattttagtaagcggctgaaggtattctatgaccattggaaggagcacaagtctgatctttggggctcgtctgatgctattgcaattgctaccccacctccttctgatgatctccgttatttgaaatcatcagccctggatatttggttacttggatatgaatttccagaaacaataattgttttcatgcacaagcaaatacatgttttaagcagtcagaagaaaggaaatcttattgggaccctcaagaaggctgcaaacgaggctgttggtgttgacattgtgttgcatgtgaaaaccaagaatagtgatggtgctgacttgatggatgacatagtgcatgctgctcgtaatcaatcaaaatcagataagccagttgttggacacatagccaaagaggcacctgagggtaagcttcttgaaacatggataaaaaaattatctggatcaggcctacgactcgttgatgtaacaaacggcttctctgagctctntgctgtgaaggacaccacagagatcacatgtgtgaaagaagctgcttacttaacttcatccgttctgaaaaatttt

SEQ ID NO: 50399 - DNA, 284 bp, Zea mays
  Clone ID: MRT4577_14595C.1
gccccctgattttcttgtgtgccctgaaaatgatgggttttttgcttggatgattcccaacagcaagaccttgtgacacacaaaaatctcatttgtttggcccccttttgcactggctgtctgcttatttcctgttttcggattccatttcaagattgctgggctgccctcatgagctgaagctctactgaagattggccccatgcggttggtgggagctgccttctccgctctcctatggggtcttcgcgtgcttcgcgtgtggttccccccctgtgtttttg

SEQ ID NO: 50400 - DNA, 2540 bp, Zea mays
  Clone ID: MRT4577_145960C.1
aagcttaaaccgtgcttttttatttttgattatcgacggcctagcctgaagaacagtagaactcagactcgagcgctccaaagcgagccaccgccgatctgctcctccctcttgaccctcctccgtgcgctgcgcaggcatgaggcgcctcctcggcggcgccctcgtcctttgtatcgccgcggtggtggagtccaagccgcctctcgactctctgggcatacccccgcaagatgaggcgtactacataggcggcgtgatcaaatgcagggacggatcgggcaggttttccagggaccagctcaacgacgacttctgcgactgccccgacggcaccgacgagcccgggacatctgcatgccctgaggcgaaattctactgcaagaatgcaggccacactccagtcacgatcttctcgtcacgagtgaatgacggcatttgtgattgctgtgatgggagtgatgaatatgacagcaatgtcacctgtaagaacacttgctgggaggctggaaaggtggcaagggagaaattgaagaagaaaattgctacatacaaaaatggtgttgttattcggaaacaggaagttgaaagggcaaaagaggcttttgctaaagatgaagcagatttagcaaaattgaagggcgaagagaaaatgctccaaggacttgttgataaactcaaagagcaaaagaaattaatagagaatgcagaggaagaagagcgtttaagaaaagagaaggaagaaaagagaacaaaagaagaagctgaaaagcaagctgctgttgaaaagggagcgcttgatgcctctcgggatgtagattctaaggaaattcatgatcatctgcaagaaggtgaaaacaagcatgatggacatgcaacaggccatgataatcatgtaacagaaagcagggcatctattgagcagcatggttctgtaaggaaagatggtattagcgttgaaggtggaactgtagatgaattgccgcaggagtctgcagcacctaccatagagaaggattctagccctgacaatcctgagggtttatctagggaagagttaggtcgtatggtggcttctcgttggactggggaaagtgtaactgaggttagtaaagatgataagaaggggcatgaagatcagcaagaaataccagaacctgcagaagaagcacttgaagatgagttagaaattccagaacctgccgaagaaaattatggtggttatcattcagaagttgaggatgataggcgtaaatatgaagatgaagagttttatcatgagtcagaagatgaatatgttgacgactatgatgagcatgttgagtcctacaaatctgatgatgaccaaaaagatttaactgagccaggacatgcatcgtggttggacaaagttcagcagactgtacaaaatgttttccaaaaattcaacttttttaagacccctgtagatttgtcagaggcttctcatgttcgtaaggagtatgatgatgctagctcaaagctttcaaaaattcagtctaagatatccagtctagctgagaagctaaaacatgattttggtaatgacaaggagttctattccttttatgatcagtgttttgagaccaaggaagggaagtatacttacaaggtctgtgcatataagaaagcatcacaggctgaagggcacagttctaccaacctggggcggtgggacaaatttgaagattcgtacagagtgatgcacttttcaagtggagacaaatgctggaatggtcctgaccgaagcctaaaggttaggcttagatgtgggctgagcaatgagcttaatgatgtagatgagcctagcagatgcgagtatgtggctgtattgtcgacccctgcagtttgcgtagaggagaagctgaaggagctgcaaaacaaactggacgccatgtctttgaagcagcccgggcatgatgaactttaaaaactttagaatattccagcgtgaacataaagaagatgtcaccaggaagcatagctctgacagttacatccataacatataggcgtggaagtcaatgaggtatatggacagaaacgggccaagcgggagaaatgagaatgtagagtttaggtcgcctaccaggctatattagctcgcatagaacactttttttagctgaaatttgatgttgcaattttccagactcatcgcgatggaatatatagtagaaacagtacaccttgaatcagcatatttgtttggtggaggcgactgcaaccgtgcttttctttgtggtttaacattgctctatttaattagggagagacgctaggcttttgcgtctccagcttcattgccagccattacacatttgatggaatatatagtaagaaacagtacactctgaaccatcataaattaaaaatcaaagccatctaaaatacacccccggtggatccgttcagcgctattttttatcatgtaacaacccggggttaactagcatcttcaaattatgatggttcagagtgtactgtttcttactatataaccccgggttgttacatgagac

SEQ ID NO: 50401 - DNA, 267 bp, Zea mays
  Clone ID: MRT4577_145961C.1
actactttactcaaagtatacacctgcctttttgcttagctgaggagaaaccccaatacaggcgttggcgatcatggccgagaactgctcattgaagacataatacgctgctacttgaacatggttgtgccagcgtcagcgtccccaatggccagcccccttcaccacggcgctgacgtacgtcgtggaggagcggatcaccatcggcaaagacatgtggatcatcaccaaccatgtaaaggacctgagacccctagctaacaccgc

SEQ ID NO: 50402 - DNA, 498 bp, Zea mays
  Clone ID: MRT4577_145962C.1
ggacaggaaacagtccatcacatagctagaaaactggcgaatccaaatacccgtctgagcgatgaccaccacaatagaggttacacaacagagccaacatggaaatcattttaaaactgaccagatgcataggcaggaagactagcggctttttatacaagtgtgcggcgcgcactgcgatgcccaacaacaagatggtcgcaccaaacatggatacagaatggcgcggggggcaaggaagcagctccgcatgacgagtaaccgcgggtatacaatctacctgatacccaaccggggggaacccgccctagatcttggtgaggttgtttgccttcagcaccgggttagcctggggaatggcgagcctggcggaagtccaggagaagaacctgcagtcgggcttgttcgagtaacggtggagtgcgcaatacaagtttccacaccaatagttgaatcccgtatgtccaaccgtattgctgcaggcgctgcaccgtttcg

SEQ ID NO: 50403 - DNA, 995 bp, Zea mays
  Clone ID: MRT4577_145963C.1
agcttccaggtgaagggccagtctaccacctggggggtgggacaatttgaagattcgtacagagtgatgcccttttcaagggagacaaatgctggaatggtcctgaccgaagcctaaaggttaggcttagatgtgggctgagcaatgagcttaatgatgtagatgagcctagcagatgcgagtatgtggctgtattgtcgacccctgcagtttgcgtagaggagaagctgaaggagctgcaaaacaaactggacgccatgtctttgaagcagcccgggcatgacgaactttaaaaactttagaatattccagcgtgaacataaagaagatgtcaccaggaggcatagctctgacagttacatccataacatgataggcatggaagtcaatgaggtatatggacagaaacgggccaagcgcgagaaatgagaatgtagagtttaggtcgcctaccaggctatattagctcgcatagaacattttttttagctgaaatttgatgttgcaattttccagactcatctgatggaatatatagtaagaaacagtacaccttgaatcagcatatactttacccagggtttttacatgaaactatgttcagaacggtcatttggaactgaaggaattccccctggaacaaaaaaaaaaaaaaaaaaaaaaaaaaaaaaaaaaaaaactcgccacctggcaatgttagctggcataaagctgtttttttagctgaatttgattggatgttgcaatttttccaggctcatcccgagttgtttggtgaaggcgactgcaaccgtgcttttctttgtggtttaacattgctctatttaattagggagagacgctaggcttttgcgtctccagcttcattgccagccattacacatttggtggaggcgactgcaaccgtgcttttttttatcatgtaacaacccggggttaactagcatcttcaaattatgatggttcagagtgtactgtttaatactatatattcc

SEQ ID NO: 50404 - DNA, 3647 bp, Zea mays
  Clone ID: MRT4577_145964C.1
tcgaggccggccgggccgggtagtacacactcgacttgcatatacaacacgcttgtggcctgaagaacggaagaactcggactcgagcaccccgaagcgagccaccgccgatctgctcctcctgagtcctgaccctcctccgtgcgctgcgcaggcatgaggctcctcctcgtcggcgccctactcctatgtgccaccgcggcggtggagtccaagccgcccctcgacaccctgggcatacccccgcaagatgaggcgtactacagaggcggcgtgattaaatgcagggacggatcaggcaggttctcccgggagcagctcaacgacgacttctgcgactgccccgacggcaccgacgagcccgggacatctgcgtgccctgaggcgaagttctactgcaagaatgcaggccacactccagtcacgatcttctcatcacgagtgaatgacggcatttgtgattgctgtgatgggagtgatgaatatgacagcaatatcacctgtaagaacacttgctgggaggctggcaaagcggcaagggagaaattgaagaagaaagtcgctacatacaaaagtggtgtagttattcggaatcaggaagttgagagggcaaaagaggcttatgctaaagacgaagcagagttagcaaaattgaagggcgaagagaaaatactccaaggacttgttgacaaactcaaagagcaaaagagacttatagagaaggcagaggaagaagaacgtttaagaaaagagaaggaagagaagagaataaaagaagctgaaaagcaagctgctgatgaaaagggaacacctgatgcctctccggatgtagattctaaggaaactcatgaccatgtgcaagaagatgaaaacaaggtagccgaagagcatgatgtacatgcaacggaccatgataatcatgcaacagaccatgataatcatgcagcagaaagcggagcatctgttgagcagggttctgtaaacaaagatgacattagcgttgaagctggaactttagatgaattgctgcacaaggagtctgcagtacctacattagagaaggatcatagctctgacaatcctgagggtttatcaagagaagagttaggtcgcatggtagcttcacgttggactggagaaagtgtaagtgaggttagtaaagatgataagaagggacatgaagatgagcaagaaataccagaacctgcaaaagaagcacttgaagacgaattagaaattccagaacctgctgaagaaaattatgatggttatcattcagaagttgaggatgacaggcataaatatgaagatgaagagtttgatcatgagtcagaagatgaatatgttgatgaccatgatgagcatgttgagtcctataaatctgatgatgaccagaaagatttaactgagccaggacatgcatcgtggttggacaaaattcagcagactgtacagaatgttttccaaaaattcaacttttttaggacccctgtagatttgtcaggtaatttgtatatagtggtttctaatcagtcgattcttcatgagtcatgagggtatgttataacattcacatatcaacttttttagaggcttctcgcgttcgtaaggagtatgacgatgccaactcaaagctttcaaaaattcagtctaagatatccaatttagctgagaagctaaaacatgattttggcaaagacaaggagttctattccttttatgatcagtgctttgagaccaaggaaggaaagtatacttacaaggtctgtgcatataagaaagcatcacaggctgaagggcacagttccaccaacctggggtatgcttctcgttcttctttctttgctgaaatctcataatttttctatttgtaagttaatcatactttttgtatgttgctgctgtgtttttttttctaataatgattgagcctactgtttactgaaagggttatagtgatattttgtggacctgcatgggcaaaaattctcattatccttatcttagtagggtatttttttaaattgttgtgaaagggcctcttgctgagttggttaggtggtctgagtagcactccttaggtattgacttggactttctgtgggagtgaatttcaagcctgggttaaaaaatctgtcccatgacaaagcacaggtctaaggcctggtcctggtcgcggtcgttctcacatgggctacggtgccgctatgtatgggtgtggcagggattcggggggttttctctcaatataataccggtgattgtcttaccctccgcaggtcgagtttttttccttttaaattgttaaatactctcaagtggatggtaatagtgctctttaagacaatgcactacatagaccaccagtaatgtttcagatagcatgcacttttgttcattgttagttcacttatccgcgggacaaaaataacctcaaaggtatgaactgtccttccttcactgggaaaaatgggtgagtttgaacgtagtcattagccaatgatcatctataaatgcaacatgtagttttcctactatgccagttgatggtgcttttcagattacagcttcatatgttgctgtcaaatacaattatgttaattaaaatgtctaatttatgaatgttgtttaggtaatgtcatttgaggaatatgttcaggggatcaactagcgagggcccattctgtctttagactatatatgtttctattgttttacatgactttgaatatcaggtggtttctgaatatttttttagtggatttaagaaatactgctctttaggtaatgatagcccttacccattttgctgtatatacaagtgtgtttcatcttgtttactggtgcttagctttaaaatgtctttctagaatacttagaaactgcattcagtgatagaatgacctgcttgaatgcttggcatgttttttttttccacatgtcctgacgccttaaaatgaattttctatcatcaggagatgggacaaatttgaagaatcgtacagagtaatgcacttttcaggtggagacaaatgctggaatggtcctgaccgaagcctaaaggttaggcttagatgtgggctgagcaatgagcttaatgatgtcgatgagcctagcagatgcgagtatgtggctgtattgtcgacgcccgcactctgcgttgaggagaagctgaaggagctgcaaaacaaactggatgccatgtcttcgaagcagcccgggcatgatgaactttaaacggttccggcgtggacaaagaaaatgtcaccaggaagcatagattgacagttacactcataaccttaagggtggaagtcaatggggcatatggacaggaaagggccaagctgaagaaatgggaatgtagggttcaggtcgcctacctggcaatgttagctggcatagagctgtttttttagctgaatttgattggatgctgcaatttttccaggctcatcccgagttgtttggtggaggcgactgcaaccgtgcttttctttgtggtttaacattgctctatttaattagggagagacgctaggcttttgcgtctccagcttcattgccagccattacacatttgatggaatatatagtaagaaacagtacactctgaaccatcataatttgaagatgccagttaaccc

SEQ ID NO: 50405 - DNA, 365 bp, Zea mays
  Clone ID: MRT4577_145965C.1
atatttttttttttttttttttttttttttttttgttttttttttgttttttttttttttttttttttttttttaaccccaaaaaaaaaccgaaattgcaagggccccgggtttaggtttaacggcccgttccccccccaaatgggccccttttggaaaaaaactttctaccccccccgattaaaaccttccccccccttcctaagggccaaaaataacccgagcatctgttagccctggtcttcggggcccccgggcccagagggggggaatatcccccaagaccccccctccccgggcccccggggtcaccccgggaaatccggcccgggccccgggggggacccactcttccccataggggg

SEQ ID NO: 50406 - DNA, 190 bp, Zea mays
  unsure (1)..(190): unsure at all n locations
  Clone ID: MRT4577_145966C.1
cattgggtacctcgaggccggccggggtcggccttccctcagtgtcaacccccnttctcaaaacttgtattnntgcacctcagtccctggccggtctgggcccggtcgccgcctttcgccggaaggaaagcccctcgtctcccttgcccntgcggcgggttcattgggggttctcgctggtaccccatga

SEQ ID NO: 50407 - DNA, 277 bp, Zea mays
  unsure (1)..(277): unsure at all n locations
  Clone ID: MRT4577_145967C.1
taaaacgaacacacacctggaggcaccatttaaggctcttttgcgggacaaatntacataagattcatcagatgagcagcaaatgcttcaataaattaaacattgagccatgcggcacaccaagccatacagaatgactagtaagaaacaacttctgaataaaagctaaccccagtatcaaaacaaccgaatcgcaaatccagcacacagttacatgcaatgcttatataagaacaaccaaggcatggtgccatgactaagacatacaacaaccgcc

SEQ ID NO: 50408 - DNA, 290 bp, Zea mays
  unsure (1)..(290): unsure at all n locations
  Clone ID: MRT4577_145968C.1
gagcnctccagtcggcggccgcccgtcaagggccggtgggccaatcggtgctcggaggactaccacacgctggagcacgaggaagcggcgagcttctcgcccgcggggtcggcgtccgaaacggcggacggggacaacccatccttgtgttgaggagagagaccgctgaccgaagacaacaacttgtgtactcaggtttctgccagcttctgccactctgaacttgagcaaccatctgatctcgtatgatctgaaattctgaacgcgagctacacggtccatgaataacg

SEQ ID NO: 50409 - DNA, 335 bp, Zea mays
  Clone ID: MRT4577_145969C.1
gcaatcattggggtggggttgactcttattggaaacaatcggaaggacccgtgcacctccctgacaacactcctttggccaaggaactcaccaaaaacaacgcttaaagggtgaggcttgttctaggcatcccttcaaacgtaaacgtacttggacaccagacaaacgacgggacgttagcactgtctcacagggggggactcgccccatcaatgaaggcttgagcgatctggacacactttattcttagaaggcgcacttaccatcgttggaacatactcatatgaatgaaacgctacggactttgggcttcactcatgctgacacagaacacc

SEQ ID NO: 50410 - DNA, 553 bp, Zea mays
  unsure (1)..(553): unsure at all n locations
  Clone ID: MRT4577_14596C.1
gaaaaggaaattgtgaagcaagtatatagtagtagtatctacctacagctacaggtcaagaaaacaaaaagtttttttttaagagtcgaagaagttgaattcatggggacaatgccgcccaattcagagcggcaggacggcatttcgggatcccctgctctggctgaacgagaagaaagaccggcgcaacctcctcgacgatggtgggccaatgtcggcggcggcattgctgctctccgctttgccgtcacctcctgcggtgacagcctgggaggcgccgccgccggaactctgccgcagaatggtctgcagcgcgaggtaaaagcgtttgtcggtgctggagtccatggacagcgaccggcgcacgggcaagaagcagccgtttcctcctcctcctcctccccccatgctacagctgcggcagctactgttccggtgcgcggtctcatgagaaggcacggcctcttgttcgccggcggcttctgcggaggtaggagtaggactactactaacaacatttacggcgacgtcgnccgggcggcgcgcgggagcg

SEQ ID NO: 50411 - DNA, 739 bp, Zea mays
  unsure (1)..(739): unsure at all n locations
  Clone ID: MRT4577_145970C.1
gtacgcctgcaggttccggtccggaattcccgggtcgacccacgcgtccgctacattgttcaggagtatatggagacagacttggcgaatgtgctggagcagggccctttactggaagagcatgccaggcttttcatgtatcagctgctacgtgggctcaaatatatccattctgcaaacgtactgcacagagatctcaagccagctaatcttttcattaacactgaagacttggtgctgaagataggtgactttggcctggcacggatcatggatcctcattattcccataagggtcatctttctgaaggattggttaccaaatggtacagatctccacggcttttactttctcctaataattacactaaagccattgacatgtgggctgcaggctgcatctttgctgagatgctgactggtaaaaccctctttgcaggtgcacatgaacttgaacagatgcagctgatcctcgactccatccctgttgtgcacgaggaggatcggcaggagcttctcagcgtgattccagtttacattagaaacgacatgactgagccacacagaccgctcactcagctgctgccggggatcagccgagaagcactggatttcctggagcagattctgactttcagccccatggaccggctgacagctgangaagccctttcccatccttacatgagcatctactccttcccgacggatgagcccatctcaagccaccctttcccat

SEQ ID NO: 50412 - DNA, 421 bp, Zea mays
  unsure (1)..(421): unsure at all n locations
  Clone ID: MRT4577_145971C.1
ccggcaatggcaacggctcctttattttttcatatttttaaaaacaacaacctnnatatgcgctgagaccgaattatatcaccttttttttatatcctaaaaacttcgattccataagacccatttggtaaaatgttctataacacattaattcctacaaacataaataaaaaaaactcttatgcatgtgtaaacgtaaaaaaatatgccctcctttaaaaaatgcatcatcgtcattccgatgtctgaaatgccaaccaatctatatatttgcatgtatataactatatgagatcatattaaagaaagagatcttctttttttaaatataaacacttctacgaataactcctaacgtaaacgataacaccaacataaattatttttatctacctacttttgaaacacataaaaggaaagt

SEQ ID NO: 50413 - DNA, 1005 bp, Zea mays
  Clone ID: MRT4577_145972C.1
ggggggacgcgtccggccgactgttccatccgcgaagcgccacacatcaaagtattccaagggctctaaacacgagcgcgagcagacagagttactcctctcggcgaacgatccagcatacggtgtttatgactttagacccgatggcgagggctacacgcaagatcagcaagcagagttgagatccagggaattccatcgcgccgacgatgccttcgcagactcggttagcgcggacttctcggaggccacgtcaagcgaatggtcgctgtttaccagctcggacgagtcctcattcaccaccgagagcacgagggactcgttcagcgttgtggactacggcgacaacgctggcctggacccaatctcctcgatatttgggccaagctatgctccggagcatcatcccggtccacctggcagtttcgccgcgtgcacgaggctctcgccttccaacccacagacgaggtacttctcggagagcacagggttcgtctcggactactcttccagcggcattgtacatagaggaagggatccaggtagggcatacacctgttcagcggaaccgctcgcttcggctgcggcggcgcaccagcaccagcggtacgcccttagcggccgagacggtttggtccagacatctgggttctgccaaatgtaaccggctttacgatttcgtagctatagctgtagctggtgctcgggcagctgcggtttagcactgccactgatgctgctgcctctatgttctttttatttcaggtgaggcgtattaaattttggctgcatgtcattcctaggctagctcgattcaatgtagcgagagagagaaaggaacaaatttagattgtgtctatatgcaggtgaaattttagagcgcggtggagctgctccggttctgcggcgcaccagcaccaggaacacgcacttagcggccgagacggtttggtccaggcccttgggttctgccaaatgtaaccggctttacgatttcgtagctat

SEQ ID NO: 50414 - DNA, 208 bp, Zea mays
  Clone ID: MRT4577_145973C.1
tttcttccacacatccgctcaacctccaatggagggttatattgcatggagggggagaacacgacctacatcaaatgtgttcctatgggtcccaacgattacctcatttctttgtgagaactagtaatcgataattttctcactatctctatctagggacacgcttgtttatgttccaacgttaatattctagagaccatgatatatt

SEQ ID NO: 50415 - DNA, 531 bp, Zea mays
  Clone ID: MRT4577_145974C.1
atgataaaaagtcacgccatatgaattcctatcttctcctgacatgatcggttgcctacatacatatacgtctgagcaaagatatgttcacacttttggtccataactacataaaacatcagggactcccgcagatgactctgagcacaccagctaccgaactcgttcactctgtgggatcaacggaactcctaatcgagccacctttcctgaaagcgcttccagcgcagattcctcgccaagtactgctaacacccgttaattggtggggctaggccctcaacagaaacgggcgggatgggttgcagatgtaggctgcacactgggactcgccccagaataaccatagatcgtccaaaatcttgaccttgtagaagatgaccggaggtcccagactcctcaacgagctgatggaggcggcggagataggaagggaggccactcctccatgaacacggcgaccccaattgcgagaggagctacccctgcaacgtgatgagcccgcggactgcatttggggtctgtggccac

SEQ ID NO: 50416 - DNA, 828 bp, Zea mays
  unsure (1)..(828): unsure at all n locations
  Clone ID: MRT4577_145975C.1
cccctccctgttttggttgctggggccccgcggccttcattgcccccggtgcccttgggggtggggcgccctcgcggcgggcgggggggcctcggcgcccggggggccccggtccctggggatcgccgcgtgcttcgtgccggccggcgtgtgcttggtgtcctggcccagcgcccccttccgggatgcggcatggtgcatgcattgatctcgataattgtgtccattgcatctgaggacgcgatcgatcgatcgactgggtatttgcagaacttacaaaggtgcccacgacaatgttcagaacagtgaagaacaaacaagaagagatcaatttctatggtcagtaattcattttaagcattcgtcttttgaagatttggtgaataatgaatgtctactgagatttgtggtaggatcgatgccaccatgccatagcgagatatcttccgatccgatggtagcttgccatcatgtcatcgctagtgaaaatatctagccaaagagagatgaaggttaggtagcaaattcgtccagctgttgacgacacatctagctagcaaggctatcaggctatggtagactatacaacatgcatcttactgccttggcttcaatgatatggacatctgggagctaagctagccaaatagtcgctgctgctgccagtggcttgttccactcgttctttttgtctttaggtattttttattctgttatccactcctctattattacatagacccatagttaacctgttaacttctcttctataaaatgcttggctacgattgttagatacttgatccaccagcacantgcgttgtcatt

SEQ ID NO: 50417 - DNA, 1056 bp, Zea mays
  Clone ID: MRT4577_145976C.1
ggccgcttttttttttttttttttgcagcggaaataaattttttattacaaaatgattacaagtttatcaagatattattatacctcatcggagtgattacaaaagattacaaaagaaagtgattcaaaagaattacaatttgaaatgttataaagtattcgtaaatttgaaaatacatgctagcttaagtgacaatcctcattaaagaaactatagaagggatatacttatataagaaggccgagcccaccggcacttagcaccatccacaacagaacaaaattacaacctggataacactacgttagtgttgttagacgtcgatcacttgatgaccatcttttgttctaatacttgttcaagtcatccatccttaagttcgtccatcagcatcaccttgcgaagaagcccacgcttaacagcagcttgtggtcgactcagctctggtccttcatatcaagtgctcaactagcgcaccatgtctaaatcgacttggagccgtgatttcgatgaggctatccagtttgaaccattcactgaacaccatgtgtgcgtcgttctccccaaaatcaaacaatcaacaccccgacaagaacatcggtgtcgatcttcccaacacgcgatgagcacccgtccattcattttgccgaacagggagctacaggggcgtacggccagtgagcacggtgaagcgacgacaacggggtcgagctcgtagcgcggcacggcgtccatggacgcgatgaggagcagagcgagtggtctaccgagggcgatgcaagggaggcgaggagttagacgccggacgcggagatgaaggctcaacagcgcacgacaaggtcaatgatgtgcggtggatatggaggagtctgcaggggttcatgaccggactggcgattggccgacgaactctggtcgtggcacggcttggacaaggtcgacaacaagctgaaactccaggaagatgtgtgcgcgagcgaagccaaaggtcgacggtggtgtagcaatggccaggacaagctctgctagctagctcccggccagcctcgagggtc

SEQ ID NO: 50418 - DNA, 229 bp, Zea mays
  Clone ID: MRT4577_145977C.1
ctcgaggccggccggggaagaggaagaaaaactagctcttttgcactacgtacatagtgcatgataccgacgatggcgaagcaccttgccgctgtcgtcctcgccatcctgctggctctcgcggctggcgccaccggcatgcgcgcgtccgagatcgacgacggcatgccgctgatccacatgctgcgcccgctgctgcattccggcggcgacctcggccggcgcggcc

SEQ ID NO: 50419 - DNA, 1117 bp, Zea mays
  Clone ID: MRT4577_145978C.1
gccggccgggaggaagagaacgtgggaggatttttttgccgcagcgtccccatggcggcgggaagagaaaccgacgaacagctgaccgagtacgagaagcagcggctgtcgcggatacgcgagaacgaggcccgactcgaggccctgggcctccgcagcctcgcagcgtcccctcttctccgcagctcgtcgccggggacggccaaggggaagcagaagaagaggtccgtcgacgaggacgaggagtacgtcccgtccgatagcggcggtgaggagaaggacgagagctcgtcggagagcgcgcaagacgaagaggtggatggagaggggaaatcagcttctatgtcacgcgccaagggaaagaaaaagaaattgtcaaaatctggtaaatctacaaagaacacgcctactaagggtagtgcttcttttgctgaggtggtggatgatgatacagccttacagcaggctattgctctctccctggcggaatattcagaaaagcctgtgacttcattgggtgcagaaacatcaagcacagtaacaagagcgagtgaaagtactccccagaagaacagcaaagcatccattcaggactcagctaagaacaagaagattaaaaagctgggtaagagcaggattcagctgacagaagatgatgtggttcaattcttcttctcatttgacgaagttggtaaaggatatattacaccatgggatcttgaaagaatggctacaataaatgatttcatctggacagattctgagatatctaagatgatccgttgctttgatagtgacggtgatgggaagataaacctcgaggatttccgcagcattgtatctcaatgcaacatgttgcaggagcatgagaagtgaggatgacgagtgttgctggtctgcagatgcttgtactctagttttgcatggcctaacctgtgacattgcatcaacactgttgggatagtagcggacataaagccattgaacataacctttgtaacatggtgcagccaaaaaaaaaaaaaaaaaagcggcctctactgacttggttgggagaaggggattggagggaattgagtgactaaaaatcccttactattcaaaattgaatagaaaa

SEQ ID NO: 50420 - DNA, 859 bp, Zea mays
  Clone ID: MRT4577_145979C.1
cgaggcctggtccgggaaaaaaaaacacggctgtagcggtcccattgatgatccaaggtgggtgagatgttagagaccgttgcacactccgcgacagatatctagtgctagaactagattgcattgcttcttctgcccttgcttgctgagctagccgtcgtctctcctttcagtcctttctgagaactggagtatgttgaaccaaaacagcaagcatagtctcggcatagcatgcggttcaacggactcgaagcagggcatggctctgtgcctctgttagaatgttgcaatttacaacatgttttccttccgactattacgagtggagttagcggtgtttcgttattatcgatgtcatcatttgggggatctaattagatattttcaatcaaggatccatttacacaaacaggttagcaaaacagtagctgctgtgaatagtgatgatatagcaggtccaatcgaacatacgtcgaagttgctccactccatggccttaaatgcactaaattgcaaaacgttccctattcaaaactgatgccggtttcttgcgccccaggtcatgatttacatgatcaaaccgggggcgcgtaactccaatggattacttcacctatttacgggggtcttcttttccctatttgaaaaatagcttagtcactacccactaggggtacgttgcaaaacaagatcgcaagcagaaacccaactatattcatcatcatttggtttccttgggcgccacatgtggctcggtcccatttagaaaaacggggtggttctattttcttatacctgagagtccggcgttttcttcttacaattgggacgagcctttatacttttgagaacacttttt

SEQ ID NO: 50421 - DNA, 229 bp, Zea mays
  Clone ID: MRT4577_14597C.1
ctatccaacgcaaacagccatccatgggggttctgttttgagaaccgacgcggatgatcttctagcttcatttccattacagtgacgcgatcggagtacgcgagacaagctcgccttatctgtttacacctagctcgattgagattacagattcagctttctgaatcctgacaaaaacctaaaacccaggtacactctatataactgttttttcttaccgaaaggtacc

SEQ ID NO: 50422 - DNA, 996 bp, Zea mays
  Clone ID: MRT4577_145980C.1
ttgggtaccccctccgaggccgtgccggaaaaaaaaaaaaaaaaaaaaaaaaaaaaaaaaaaaaaaattcattgatgtggtctagctgtctaggcgtcgcccttataagtgggaaagaaaaagaaattgtcaaaatctggtaaatctacaaagaacacgcctactaagtgcagtgcttcttttgctgagatggtggatgatgatacagccttacagcaggctattgctctctcaatggcggaatattcagaaaagcctgtgacttcattgggtgcagaaacatcaagcacagtaacaagagcgagtggaagtaccccccagaagaacagcaaagcatccattcaggactcagctaagaacaagaagattaaaaagctgggtaagagcaggattcagctgacagaagatgatgtggttcaattcttcttctcatttgacgaagttggtaaaggatatattacaccatgggatcttgaaagaatggctacaataaatgatttcatctggacagattctgagatatctaagatgatccgttgctttgatagtgacagtgatgggaagataaacctcgaggatttccgcagcattgtatctcaatgcaacatgttgcaggagcatgagaagtgaggatgacgagtgttgctggtctgcagatgcttgtactctagttttgcatggcctaacctgtgacattgcatcaacactgttgggatagtagcggacataaagccattgaacataacctttgtagttgcagcttgtcaagtccagttgaccggggattttatgattctactgacttgtttgggaaaaggggattggagggaattgagtgggttaaaatcccttactatttaaaattgaatagaaaagttatatttttctgtgggcccaacagattctaaaatcgatagttgctaatcttagctttgaaagttttgtataacaagagggatgtgtgaaagcacgggaactaatagttaactgcaaaaa

SEQ ID NO: 50423 - DNA, 857 bp, Zea mays
  Clone ID: MRT4577_145981C.1
cattggtacctcgagccggccgggaactcgtcttcggacgggaaaacccgtacacaccacagcaccgtcgccaatgtccgccgccgcagccgactggcttccgtcagcgtccgtgacggcatccggccgcccggtgctttccgcgggcgaggtggagcggaatctcctcccgctcgtcgacctcgagcccgaggaaaatccgcgccttgctcccctccgcgcctgcctcctcgcgctgacttcccaccgcctcatcttcctccacgagccctcccgctccgcgcgcggcctgccgctcgccaccgtcgtccatgcgtaccctccccaccgcaggcacagccacaaccccctccgctccctcttctccgccccgtcctcatcttcctcgtctcagcatcaccgcatccgcctccagatctccatgccacccgtgcgatcagaggtcatcgccatcgtcgtgacctgcaaggctgacgttgatgtgttcttcgggaggctgctcgaggcgatccgtgcaagggcttgggaggtgacccctgcagctgctccgtcgagtggcacgtcggtggcagagggggccgcgcctacggaggacatcgcgatacggatgccggttgttggggtctcggggatactgcggatggagcaggagtcatgggagaacgccgggcagaacttgcaagatgcgttccaggatctcaatgccctcatgagcaaagctaaggaaatgatgcagttagcagaaaaaatgaggctcaagctattaatgaactcatccactgaatcaaattccaatgatgaagagatgggttctaagcaagacatgcaggatttgctgttgagtgttggcattgtgt

SEQ ID NO: 50424 - DNA, 608 bp, Zea mays
  Clone ID: MRT4577_145982C.1
aaaaacgaatcccgcctcagaccacgcgagtgcgcaaggggaagcaggaatacatccgttcccggcctccgcgagtgcgcaaggggaagcaggaatacatccgttcccggcctccgctcagccgtcgatcgatcgttcgtctggtccaggggcgtctcagttggccggggcgatggaggaggacccgctcatccagctggtgcacgtctggagcaacgccgcctgcgacaacgccgccgcctcatcctccgtgtgtcacgcccattccccggcgcccgcgagcgcccgcgagggcgagggggacaaggagaacctccggcccgagcccgacgttgaggcggagatcggccacatcgaggcggagatcctgcgcttgtcctcccgcctccaccacctccgcacctcccagcagctgcagccgcctaagtgcgcagaggtcgcacccgcgcccgaaacgaaggcggcggcagcgcgcccgacggccgcggggggcgcagcctggggaccgctcgacatcttcgctgccgtcaacccccacctgcttcccactgacaagccacagccgccgcgcgccgcgccagggtttgaagccgatcaagagggtcccg

SEQ ID NO: 50425 - DNA, 678 bp, Zea mays
  Clone ID: MRT4577_145983C.1
ccctccctcgagttttttttttttttttttttttttttttttttttttttttttttttttttttttttttttttttttttggaaaaaaacccggcctggatttggaaaaaaaaaggggggccggcctacaggaccaaaaaccctttcttttttggtaggaccagaaaaaaggctaaggccaggccaatttttggcccatacaaaaaaccgattagcgcaggggggggggggaggtctttcccttggaaacccccggggaaaaaaaaacaaaaccccgaggccggggggctcgccggttattaacgggacccagggccaaaaaggaccataggcccaagcggggggacaaccccggggggaataaaccttttgaaaaaggccccccgggcggacccgttcacgtaaaacggcccagggtaaacgaccgggtttttcccggaggacggggccccgttccccgacttggaacaatggaagcccgcccaccccaggcccaggttggccaagccaaacccaaatattttatccttaaaaacaaaacccccgagaaaagttatttttgggcccgggttccttggccacccaaggccccacaatacacgggggtaaaaaaaacccggttgaaaaaaatagttttttggtttccccgacttggaacccccccccataaaataaggg

SEQ ID NO: 50426 - DNA, 243 bp, Zea mays
  unsure (1)..(243): unsure at all n locations
  Clone ID: MRT4577_145984C.1
tttttgtcgcgtgggcacaaccacaggtggtggcggtctaacaacacgcttgggctaacgcttgcacccttttacaactgcaacaaatggtggcattcaaacaaattggtttggccaaaccaagaggattttaaccacaacccaataatggggggggccttttttagaattcttatgaggtataggtcaataaataaggtttttggcttgaaaaaaaaaaaaataaanaaaaaaaaggggggg

SEQ ID NO: 50427 - DNA, 250 bp, Zea mays
  Clone ID: MRT4577_145985C.1
gggcgacgaggggcttggcatctctgcggccatgttcgacatcgacgtgggcggcgtccagacgttgcacacccacccggcgggcagagagctccgcttgcgggcccagggcaccgccgccggcggctgcatcagctccggctccaacagcgctctacaacgggacggagcacgcgggcgacatcatggaggtcccgcaggagctgcgccactaccaggacggcggcggcacggcccaatgccgcgggcc

SEQ ID NO: 50428 - DNA, 287 bp, Zea mays
  Clone ID: MRT4577_145986C.1
catcaatcaacatcaaacgtttatttctatagcaacaacaaaccaacagcggcggctaatataaaagcccgcctcacccacctcaatctattttcatgaaacactaacaatacaattattattcaatactcacaacctcctataaattccattattacaccataccttccatcaattactgcaatagactatgaaaacccaccttttcaaccctataggctccaacatgcaatctcagaaagcatcatacaattaccacccttcgtaatacaataaccatccttatc

SEQ ID NO: 50429 - DNA, 544 bp, Zea mays
  Clone ID: MRT4577_145987C.1
ctagcaccatcttgactgaatgactgcaattgcatcaaagctgacgaggccactgagatccagttcaactttcacagcataaatggggagaacgcgcactatggcacgccgactaatccgggcgctcctgatagagtccctggaggatcctccagtggatcagctgttgcagttgctgcaaaactcgtcgacttcgctctgggtcagcagtccctgcaccggctcttctcctggttcctcaatattcctgctgcctattggggcatatttggactcaggccttcccatggattggtttcgacagaaaatgtcattccaatgtcacagatgtttgacactgttggtgggtaaatatttctctcctttgttttccttgtagcttcatcgacttaaactttgattccctattgctggctgctcctgtatggattatgaaattgagtcacacctattggtctactttttacttacttgcaaaataagaactttgtatctgttaagactgatactggtatttacattacattggacaggatggtttgct

SEQ ID NO: 50430 - DNA, 287 bp, Zea mays
  Clone ID: MRT4577_145988C.1
tggcgccaacgggggggttctataggacgaccctcttccttgcttcccagaacctcctgctcctgctgaccctgcaggtcgccgtgcccgctgtcgcggtcatggaccccgtcgagcgggagacgctgctccgcgtcatggaatccgtctccgtcgaccgtgactggtgcgaggccgccggcgccgacccctgcagtgcgccttggccggggctcgagtgcaggcccgggaccgcggcggtgcggatgcacgttccgcgccttgtcttttgtgttgcccccaaccct

SEQ ID NO: 50431 - DNA, 117 bp, Zea mays
  Clone ID: MRT4577_145989C.1
cttctctgcctcgccttgtcgcttcgggaccggatatttcattctctcctgtccgtctccgctttggtggatcggccgaaatacgtaccaggtttgaagagctcccctgtccaccaa

SEQ ID NO: 50432 - DNA, 347 bp, Zea mays
  Clone ID: MRT4577_14598C.1
attgctctgatagcttgctccaggacgtacgtacgtacgtagatcgatccatcgatcgctagctaacctgaacgaacaaggggttcctcccctccggcggcaataacggcccctcctttaagggcggccccggtcgcgcaattggcaacaagaagtccttcaacgttcgtggctctcttcggaagggcaatggcaacggcgccgttggcgtttgccgcaagcgtcgtgcttgccggcggcggcgccatggcccagaaggtgctgctgggcgcaggcgacggcgggctcgtcttcgagcacagccatttcaccgtcagcgccggagacaccatcactttcaagaacaa

SEQ ID NO: 50433 - DNA, 270 bp, Zea mays
  Clone ID: MRT4577_145990C.1
gtgacgccaccggtgctttttctgttacagacccatcggcaacatcgggcgtaacctggcactgggcgcgggggaggaaggcctgtactgttaaatccgcttcaaggctgtgaccattatgtacccctactttcccgggccagaacgattctgcactgagtcgctgaacccctcatacctaaagtgaagctggcggacgtcataggcttatctcggcgcgctggtacgcagactgacccacctacggctgcccgctactgttaacctgct

SEQ ID NO: 50434 - DNA, 326 bp, Zea mays
  Clone ID: MRT4577_145991C.1
acgctttttgtcttttcaagccatggagcctcatgatcatgagcagtcgcactccctcgaggaccaccaccgcctttcctacggagactgcgcagggcacgctggtgtacgatctcgtgcacggggggacggactcatatggcccttcctagacagcctcgtgccccactcccatgaactaatgtactcccgcggtgagttcataccacgctcgccgtcactcttcccacacgacttgagttgcctcgccatctgcgtctgcctgggcccgctgggaagcactgtaaagaacagccctattgctaccgttgcacagattaccaccc

SEQ ID NO: 50435 - DNA, 493 bp, Zea mays
  Clone ID: MRT4577_145992C.1
cgagaaaaatttaaatcaatttttggattttttttaggaaacacatgtgggtttgagggcccctttgccaagtccatttaatttgtaatttaaaaaaggcccctccaacgatgggttgttgcagggcagggttaataaaagagaactggttgtttggcaccaattgttgttgctgttgcaggaaggtagcaaccaaggggttacccactgccaagggtttaagtaactgtggccgttgttgtaggtccccaccaaatttggccacacccagttggttgaatggaaccaactgttgtaagtaggcagcagggtttgccacagttagctgagtcaaagctggtccaattggttgcaccacctgttgttgtaggtccttaggtgcattgcccaccgcaagcggcttaaataaaagtagttgtaggtaaacggcagggttaaccatggttagttgactgaccactggcttaaactgttgcacttgttgttgttgctg

SEQ ID NO: 50436 - DNA, 648 bp, Zea mays
  unsure (1)..(648): unsure at all n locations
  Clone ID: MRT4577_145993C.1
ggcaggtgcctcggggggcagcctccctcccagctcagccgccgggtggtgtccactgctcgtcgcgcccagctacaggtcgccgtgccctcgccgctcccttctcctcctctgtgtgcccatctccatgggtgccgtggaaggcgcgaagcttcctgggacgctcgttgtgctctggtccgaggaggagttgcggcgcgcccaaatcttcttcctcccattcccagctccctctgctcgcgacgtgcgcccagcgatggagtctcgcggggctcctgtgccctgtgtatcgcgccatcgatcccggctgagccccttcgcgtgcgtggaagctccctgccgtggctcagctcaccggggtgcgtgctgctccttatgcgcccagcgccgtgcgccggaaagtgcctgcgcgcaagctatatgttggccgcgcgcgaagctatctgttcgtcgtcatgggtcggtcgcgcgacaggtggactgtgtgttgtgtgtgncacatnctagggccttgtagtcgtgtcgtacgtgcaacagtcgcggatctgtgccgncttgggcttgttgtggacatngttcgccgtgggatagtcgtggaacttcttggggccccgcacgtcagatcgttggggcccgtcttgctccgct

SEQ ID NO: 50437 - DNA, 1839 bp, Zea mays
  Clone ID: MRT4577_145994C.1
cccccccacagccccgtctccctcgctcgcctcgcgcggcgtgttgcctttccgtgtgatctcttctcgccccaggcttctccaccccccaccaccatccacacctccttcgctcgcccgctccttctctccttccctcccctccgctccccacccagacgagcgcgcgcggcgacccggacccagtcagccggactcccatcccctcctccccaagcgagccgagctgcgagcgctgctcgcgcggtcggcccatggcgagcggcggcggcgggggcctgggtgcggctggcgcgggaggccggatgcccacgtggagggagcgcgagaacaacaagcgccgggagcgccgccgccgcgcgatcgccgccaagatcttcgccggcctccgcgcgcacggcggctacaagctgcccaagcactgcgacaacaacgaggtgctcaaggcgctctgcaacgaggccggctgggtcgtcgagcccgacggcaccacctaccgccagggaagcaagcccatggaacgcatggatcccatcggttgctccgtgtcaccaagcccatgttcctcgtaccaaccaagtccgcgggcatcatacaatgcaagccctacctcgtcctcattccccagcggcgcatcctcccccttcctccctcccaacgaaatgcccaacggtatcgacggcaatccaatcctaccatggctcaagacattctccaacggcactccactcaaagaaacacccgttcctcccaccgctgctgatccacggcggctcaatcagcgctccggtaatccccctcctctaagctcgccgtctgcccggaaccgccccggatgaagacggactgggacgaagcggccgtccagcctccatggcacggcgcaagcagccccacgatagtgaactccacgccgcccagcccccgggcggcccatcgcgcctgacccggcatggcttgccggcatccagatctcgtccaccagtccaaactccccgaccttcagcctcgtctccaccaacccgttcggcgtcttcaaggagtccatcccggtcggcggcggcgactcgtcgatgaggatgtgcacgccggggcagagcggcgcctgctcccccgcgatcccgggcatgccacggcactcggacgtccacatgatggatgtggtctcggacgagttcgcgttcgggagcagcaccaacggcgcgcagcaggccgccgggctggtgagggcctgggagggcgagcggatccacgaggactctgggtccgacgacctggagctgaccctgaagctctagggcaggcgtccgggtgctgatggttaacgtagctaacgtgaggagttgctggtggtgttgtttttttagtgtacctgttattgttctctagttgctgatggaaagccggatcatgtggcctcggttcggttagattcacatctgtggttgggtaattgtggtgttattttaactactcgaattgtagcccggcggagctgtgttcggctagctgttggactccacttggctggtgcattaagctccttgtttgctgttgttgtgacaagtgtaaattaatgtcagaaaaccattcggaaaaaaaaaaaaaaaaaaaaaaaaaagctgcggtccactgctaaaaaaaaaaaaaaaaaaaaaaaaaaaaaaaaaaaaaaaaaaaaaaaaaaaaaaaaaaaaaaaaaaaaaagggggggcccccttttttttttttttttttatggaagaaaacttttaaattcttggggtaccttcccaaaaaaggtaatttttttgccaaatttttggctttcgaccaaatttttaataacctttttttagg

SEQ ID NO: 50438 - DNA, 407 bp, Zea mays
  Clone ID: MRT4577_145995C.1
ggacgcttttttttttttttttttcttgtgtttttttttttttctttttttttttttttgttgagcattttttaaccacccattcacaagtttgttatatgaacaccaaacggacaggcagaaaaaagcaaaaaaagcagaaacgaaaaagcaattaaaacaaggaggctagccaaacaggcatgcaagagggggggggggcatacaggaaccaaggacgcgcggacacaaacagataacagccagaagggaggaggacgaatgaagcagcggggggagaaaggaggaaaggagggcgggatagataaagctagtgagtgtagacgtacaccagggcaggaaggaacagcgagggcgggagggattggacccactcggaaaggacgaagggggagcgggcggggacg

SEQ ID NO: 50439 - DNA, 279 bp, Zea mays
  Clone ID: MRT4577_145996C.1
ggggacaaagaacacaattttgccttgaaacttgacacaagatttacgtaagggtacaaaccgaaaaccagagttccctgacatgcgtacggaccccttaaggtgaccgggggtgcctccctcacttgacggggacaaaattggaggcgtaggcccaagccatgttcatgacggaggcaacattgtggccagagaggtttttcaccgggcccttcccggagactgaaggcctgcaccaaaaattctaacatggagaacatggataggcggccgtttttg

SEQ ID NO: 50440 - DNA, 679 bp, Zea mays
  Clone ID: MRT4577_145997C.1
tccaaatacgccgcaccagtcacatttgtcgcccgactgaaacaccgacagacaacatgaccgcctccgcctccaccgcttccggcctcgacgtcgcctctctggccattcgcacggcgttgtccaccagcttaacgcactgacatccggggcgctggctgaagcccctgcatgagcaggaacctgcagaggaaagctaggatcacctgtatgacgtatccccaagactgtctgcggaaggacctgacagacatctgattctccatcatcaaatgtatggggacgcccagagtcccggacatcaatgttaacagcctcaagtcgttcttcttctccagcatcgaacatgagatggcccacttccccacgtccccgaccgtacacctcacagagtctaggtctgtcgtgtagtgtacgtcgttcacctagggcgcatggtcatcgatgctcaccttgcggtcacatctgaattcagagactaggatgcgacaactactgtcaaaaagtgaatgagggtatgatcctatgcatcattcctggtgctgcctagcgtgcgtgcctgtctaaatctaacctttgctgcatacggttccgatttcatctaatgcatagcatgatgctacttctgaacttcaatgcaaaatctatgtcgcccgtacccaaagcgctcttgcttaat

SEQ ID NO: 50441 - DNA, 212 bp, Zea mays
  Clone ID: MRT4577_145998C.1
gcccgacgggtacgcggggggagagcagcatcttaacgatatctaagaaccgggcgtggatgcagtgacaagggcatcaagcgatgaagaactgggtcatgagaacattcgccgaaatatctttgggggaggacaaccataatgttatgctaacagtgtgcaggagggtagcgaaaagtccagcttactagacgcgagggcaatatgtgcct

SEQ ID NO: 50442 - DNA, 274 bp, Zea mays
  Clone ID: MRT4577_145999C.1
gcattcaaaaaccccctaatgaaacgcaattaccaccaactaaccaccatgggttcccagaaaataatccttttttgggctcttggcctttttgggaaccccaccaaaggcgtcaatatttcacacaggttaattggttctataggccatatttcacaagttctctcttcacagtacactaagtggctttaacacacacatgtgcaagactatacggtataaaaagcgctcttggcgagcgcgtttcaacaacccaatgtgcaaattcaacaac

SEQ ID NO: 50443 - DNA, 1991 bp, Zea mays
  Clone ID: MRT4577_14599C.1
gccaactccggcgacgggacgcctccgtcgccgcgcgagctctacaccatcccggcatcatccggttggttccggtgggacgggatccacgagacggagcggcgggcgctgccggagttcttcggaggggcaggcggcgctgggttcgggacggcgacgcggaacccgcggatctaccgcgagtaccgcgacttcatcatcgccaaataccgggaggacccggcgcgccgcctcactttcaccgaggtccgcagggcgcttgtcggggacgtcacgctcctccggaagctctttgccttcctcgactcctccggcctcatcaacttctcggcctcctcgtcctcggtccccgcgtcgcggcagcaggaggtgggggtcgtcgtggaggcgcccgtgggtctgcaggtgacgccgcgtcctccagcgtcctacttcgccgaagagaagcgtgtagcggcgggcggggagaaggagaacgaattccggttgccgccgctgacctcctacagtgatgtgttcggggaatgggcacctgggaaggcgcctatatgcggtttttgcggtgaggagtgcaatggtgcggatgttgagacgctgcaggatggttttaaagtatgttcaaaatgttccaaaagcaataatgataatatcaaggaagaggcgaataaatgtcctggtgacaaaaaagagaatatggaaaatcatgcttccagtgcatggacagacactgagacgttactccttttagaaggagtcctaaaacatggagatgattgggatcttatcgctcagcatgtccgcacaaagaataaatcagaatgcatagcaatgcttattcaattaccttttggcgaacatatgctgggcacaataaatggtaaattcgttagcaggctccacataaaccagacagatgatggaaaaacgaaccagcacattatggagtcttcaagtcactcaaccgaaatggctgatggcatgcagattgatggaagtgaagatagtgctgataaatcagttgaagaatatcctacaaaacgcagacgattgtttttttcaatggatgctaccacttcattgatggagcagttagctatcctgaccacagcagctagcccagatgttgctgctgctgctgctgatgccgcaattaaagcatttggcaatgaaaacccgcaagcaaggaaagcctttcgcctcaacgagcaagaatataagactaaggcttttgcttctaatcatgtccaacagattgaccacaaagttagcaataaggatacggcgatgcatggccagagtggttctgataagcaggaaaagaagttcattgctagcgcatatcaattgagggcagctgttgctactgctgttggtgtagctgctgcccgtgctaaaatgcttgcagaccaggaggagcgagaaatggagctcctaatggcgtctgtaattgaaactcagctaagaaagatgcaatacaagatcaaacactttgaggagctagattcactcatggatcaagagtacaccgctatacagcaaatgaagggatccctcatgaatgaatggataaaggtccttgagcatgcattccgggctggagtgtctctaccgagagatgaattgctcaccaaactgttgctgaactagccgcccatcccatgaggacctggctgtagtcgagtagttctctgatatgcgtcacccccttgactgttgctggtagatagcttcctgcgtgggtgcgtctgtaaaggtgccgattgtgctttcgatttctcagaattttggggatcagaacaacccttcgtaactctttgccctgttgtaccaaactaggttagatggcaaaattgctgaaattttcttgtagctgttgacatgtatggtttcgttcgtatggatgtgaaaatggtacctcagttttggagtttcagaaaaaaaaaaaaaaaaaaagaacccacgcgtccgcccacgcgtccgcccaccgtccg

SEQ ID NO: 50444 - DNA, 333 bp, Zea mays
  Clone ID: MRT4577_1459C.1
cccacgcctcagcatcaacatacgcctagtttaccatcttcaaaaaccacccaataactaagaacatctacaagagcgcgacgaacttacaaccactatacatatcagccacgaactcatccatccatcagccatttacataaagaagtttctctcccatgcactcttccccagctactcgttcacccacctacttgcctcagtaatctcctaagcacattcctattctctcaactgcacactcacacctgcaaatagccataccacactccacgccctctatgtcctcacaccctacaatatatcacctgacgactcatacatcacccacta

SEQ ID NO: 50445 - DNA, 1454 bp, Zea mays
  Clone ID: MRT4577_145C.1
cgggatctctcaccacctcacctgccgccatgacaccaccccgcgcgcacgctgccgcagcggcaccggcgcgctcacacgcccacacctgacaccccctccgtctatatattgcgacccccgcccgccgcggccgggaggcttatagccaccacatcccggccagccgcagcaagtgcccagaaggccagaaccagaaccaagcagcccgtgcaacctcatatcatcccctgccacgcacctccgtccgccgcgccatggaatcgaggaggagggccgtgcccaccgtgacggcggttgcggtggcgacgctgctgctgacgatgatgacgtcgtcgggcgtgggcggcgacttcgcggcggaccgggcggagtgctcggagcagctggcggggctggcgacgtgcctgacgtacgtgcaggagcaggcgacggcgacggcgccgacgcccgactgctgcgcgggcctgaaggcggtgctgcagagcagccgcaagtgcctgtgcgtgctggtcaaggaccgggacgaccccaacctaggcctcaagctcaacgtcgacaaggcgctcggcctccccgccgtctgccacgcgcccgccaacatctccgactgccccaggctgctggacctgccggccggctccaaggacgcgcaggtgttcgagcagtacgcgaagcagcaggctgcggcggcggcgcagggcggcgcacccaccagtggacgcagcagcgcggcggcgagcacgaccgcgggcgcgcagaagagcggagcctcagccgccggtcggtggttgggagtggggagggtcggtggtgctggtggcggcgcacgcgcggtggcgccgctcgccgtgcctttcctgctcctgctcgggtagataataatcactttacgcgcggccaacggcccgagtcccggcggtttggttggcgccgcgcgttgccgacttgtggtgtgcttcgggtgcgtgcgtgtgtggtggggtacttttcacactatattggaaaaagaagctattatctttggatgaaaaaaagtgtcgttgtataattatctttttttcgtgtccgtgtatgcaacccctcctctcatagacccatagcgccaaatagtcatccaatgaatattctatctgactctttgtatacctctctcttagtttaaacgggctatctattctttactcaaacaaaaaaaaaaaatggacgtcggcaccacctactcgtgcgtcggcgtgtggcagcacgaccgggtggagatcatcgccaacgaccaggggaaccgcaccacgccgtcctatgtcggcttcaccgacaccgagcggctcatcggcgacgctgccaagaaccaggtcgccatgaaccccaccaacaccgtcttcgatgccaagcggttgatcggcacgaggttctctgactcgtcagtgcagagtgacatgaagctatggccgttc

SEQ ID NO: 50446 - DNA, 135 bp, Zea mays
  Clone ID: MRT4577_146000C.1
ggcggacgcgtgggcggacgcggggtcggaaccaccatccaatgagacggggggccgtattagatgaggggcgcgaccacatggagaaagcagacaccactaaccctaatcccagactttgctttctcgcttccc

SEQ ID NO: 50447 - DNA, 209 bp, Zea mays
  Clone ID: MRT4577_146001C.1
aacgaatggaggtccaactggccttggtttttttgcctcgggggctctaagggacaaaggccacaagggacgcccacttgggaaaagctatggcaccaacacgtgcaagtccacccacgaaaagtatgggggggccccactggatgtctaggaaacactgcccttgaagctgaagcctccaaaggtttagggagttcacttttggatta

SEQ ID NO: 50448 - DNA, 358 bp, Zea mays
  Clone ID: MRT4577_146002C.1
aatcatgagcatgaggaccacctggccagaggctcctcgttctgatctcctattaatggaaaaggacaggaagattagacagatggaacttgaaatacaggaactcaggagacagtttattaatgcacagagcagagctcgagaaactgaggaagaagaaggatttcctccagccagggtggaatccctatgactcgcctcaaaaggcgcgatagtgccttacattttcaggatcgctagagccaagttacaaatatcacatgatgatgagctcgattaggcacccttctactgccacatatatgtataagcatgaagcccgcaagctggagcagctacaacaacagcttgaagttag

SEQ ID NO: 50449 - DNA, 707 bp, Zea mays
  Clone ID: MRT4577_146003C.1
ctctcccgagtccgcgcagacgccgccagaagctgagctaaaggtcgacaaacactaaccctagtcagacgtagcttacccttccttcctctcgatctatctacaggcatggcgccgaccacgggcgaggggtcggccactcggcatctgacctgtgcaccacctactcgtgcgacagagttgcgtcaatgcgtaccgcgctcgagatcatcgccaacgaccagggcaaccgcaccacgccctcgatacgacgccttcaccgactcgtagcgactcatcggcgatggcgccaagaaccaggtacgtcactgaaccccatgcaacacgcgactttcgagagccaaccagtacttagttggaagaaggattagctgatgcccctgtccagagcgatattaatatgcggacgtacaaggatattcctggtcccgcatagcaagcactatgattgaaatgcagtacaagggcgaggacaagcagatctcagcgtgaagaaatgttcttccatggccctcatcaagatgcatgagatggctgaggcttacctatgagtaactattaagaatgctgttgtgaccgggactggttactgcaatgattgccagaggcaggcaaccaaggatgccgtggccatagctggccttaacgtgaggagtatcatcaaatagccaacagtggctgcaattgcttatggtactgacaagaag

SEQ ID NO: 50450 - DNA, 593 bp, Zea mays
  unsure (1)..(593): unsure at all n locations
  Clone ID: MRT4577_146004C.1
ctcctgcatccccgccagcttctgggggtgcttcctccgagtggtaagatacttttaccacacattattccgaattgttatattggttcgttgcatggtaagatacttgttatattgatacttacttngaaaatgcccatggacggtcacaaccatttgcagtgccattacatttacaaagtggggaatcacctcacttcttatttccagaaggacccaaacaagccaatttaagattaatgctttgtgaatccaaaatgacctcttctatttaccatgaaaccctgactgttataaattcatggatgagattttattctagctttagttacatgggtctcttaagttatttccaccagtacttatcatttgtatgcaccgattagttcagtgctcggatctttgtgctttaatatgctcatatcaaactggccctacttagtagttttattagtcagtatttgttttcatctttgcaatatgcaacagtaattaagctatataatccattcttacaaagcaagaaccgccactttttttttgcattaagtcatgcttaatcttaacactttccctttgaaaagtgggatatt

SEQ ID NO: 50451 - DNA, 287 bp, Zea mays
  Clone ID: MRT4577_146005C.1
acgcgacgcgcccgcccctcgccattcgacccacaagaattttatttttcaaccaccaccaacagctccgagagaggagggtactacatataccgcaaattcctcacccaaaatgagagcacgcactgctactcggatcccagatcacctacggtgataccaataaacttttcacgatcaagaatcagcgcacacaccgaccactcctgctaacccttatctcgcaaaaacaaaaacaggctatggctgacgctgcaaagacgaagaagatcaacccggtgcacctt

SEQ ID NO: 50452 - DNA, 374 bp, Zea mays
  Clone ID: MRT4577_146006C.1
gcggtctgtagtttacaacatcgtcgcctttcccctggagaccgttggctctgatgtggagccaggaggccctctacacttggctaggcatacactctccgcaccacttagcggtatggttatgcatgaggtgcaggtctattgccatgtccacctgactggactgaaggatagttgtagcattctccccatccaacaaccggtggcactggctatgccaaacttcactatgctgacattgcagtctacgagataaacgtatatatatacatgctccggagatgaccatgagcaatggcactgcatagtgatacgactgctggcatgacatatgtgcttttctcggactgtacacgaaggctccaaacagacga

SEQ ID NO: 50453 - DNA, 106 bp, Zea mays
  Clone ID: MRT4577_146007C.1
accacacgtaacgcgacgcgtgtagccaaagaaaaacctaacctaggcgtagacgacgatacgaatttcctgagaggggccgggaccgacgattggccgagactct

SEQ ID NO: 50454 - DNA, 205 bp, Zea mays
  Clone ID: MRT4577_146008C.1
aaaagtataacgacagcaaagaaaaaaaaatataatgacctgaccaaaagaaaaaaaactaccgctaggtttttcaaaggattatcaactacgcgcgtcagacacaatggaccgaattgtcgtctgctagcatactatcttgctgattttaaatcgagcgtcttctcacatactaccatgctggttactgaatggtcaaccctga

SEQ ID NO: 50455 - DNA, 304 bp, Zea mays
  Clone ID: MRT4577_146009C.1
gggtggaagctggccattttattccgtttgggggattcatcagatcattacattattacattccagtgttttataagggcaagaagaaaaatacaataatccttttatatattaggggataaacccggaggaaaaaaatggatgtggatgggaagcctaattattagctgctgctgatgtaggggttaaacttgggggagtacctataccagaacatgaggccaccctcgttgggcgccttttgggctaactgcaaaacgttgtatgagaggcccttttggaacatgtacccgttctttgtccg

SEQ ID NO: 50456 - DNA, 412 bp, Zea mays
  Clone ID: MRT4577_14600C.1
attattgatcaataactcataagaaatctaaaagagggcaccaccaatgatgggttgttggtagaaagctgctgggttgggggggggggggggctgaatgggagcaattgttgcagctgtaaggagggggccagcgttaggcgcagcgggctggtagaacggcaacaacggcgggtgggtcaagaagggagcagggctcacaccaacgagctggctgaatgggagaaggtggtgctgccggaaataagcggggagttcaatgctgtcagctggtcgaacggaagaaaaggcctgggggcaggcaggaaaaagctggctggatgggagaggtggctgacgcaaataagaagcagaggtcaatgcagccagctgggcgaatggaaaaaactgctgtcgctgagagtaggcagaa

SEQ ID NO: 50457 - DNA, 411 bp, Zea mays
  Clone ID: MRT4577_146010C.1
cccacgcgtccgttaatatatgcttgtttttttataaaaaaattgtggcaccaacgttgggcatggcttaaaagtagatgctcccaaggccatgggttgtacaacacctgcttgcttaccgaaaatatgcatggcttctttcttcttcagtggatgttctactatatagatcaacaaacccccgattgtactttatcacaaacaaaattttgaatcaatcgctggtgaagttctacgtggtgattttcattggtacctgactattgtgggcttttaaatgaacccttggcttggaacgtttatctttttcgataaatttcttggttggtctttgttttgattgaaattttgggacctatcgtcttattgtactgggtaaagatgttctctattgttctggaggcttatctt

SEQ ID NO: 50458 - DNA, 407 bp, Zea mays
  Clone ID: MRT4577_146011C.1
attcggctcgagctcgagccgcaagtgcaaggtgaaccaggagacgcgcggtagatacatagtagctgcaagtacattaattcgcactgaagattaccaaaaccaatggctgcgcggtgcagcggcggctgcgacgggcgcgaggacagcgccgtggaggcgctggtgcagtggcagaaggtgagcgacttcctgatcggggcgtcctacatgtccatcccgctggaactgctgcacttcgccacctgcgccgacctcgcgccgctgcggtgggtgctcctccagttcggcgccttcatcgtgctctgcggcctcgtccacctcgtcgccatcttcacctacgcccggccggactcgcgccggcttctgctggccatcaccgccgcagggcggctgcacggcgtcgc

SEQ ID NO: 50459 - DNA, 580 bp, Zea mays
  Clone ID: MRT4577_146012C.1
ggaaaagcgggaaagcaggagtcttttttagccaaaaaaacgatcttttcagctcccgaaacatacggacatcgcattttatttcggggggaccaggggaacccaactggtggccgaggggcctggaaaaaaaaaaaaccccggcccctaggaaatcaaaaggggattcccctccggcccaatatacaaaatagggcccaggcgactaactaacttacttaagaaagggatcccccaagctaaaaggacggggggccaaaaacacccaaaacttcaaagggcatatgggggaacccaaatttaatccgggggtccgggacatcgccttccctgaaaaaggggaatcaccggggcattggcattcacagctcccttttaactaccccagtttaaaaaatctgggggggcagtaaaaaaacctgctggggggtaaccctgaaaatggccacaaaaaggggaggttggctagtctggaaaacacatatgctcttgaaaacatcatccgggtttttaggcgaggggccactgggggatccaaaatattcccctggattccggctctaaaacgggggggcaaaat

SEQ ID NO: 50460 - DNA, 395 bp, Zea mays
  Clone ID: MRT4577_146013C.1
ttttgatggaacctctagtaattcatctcgttatggagatttcttcgaagactattctagcatgaatggaggtcgccaagatggcaagcttcatggtggataccagagacgtacacagagtagaaactctcctcttgcagcttctccaggctcagcaaagtcattgtcgcaaggtgttgctagggacagcttctattcaacgtttcacactaccccagagaggaggaaattctccaaagaggaatacgaagcattcacgagagaggagacaaagaaagctatgaaccaactgttgtcctcaccagatttcaacaggtgggcgttggctaacgcggacagaatatctgtggctccacccagaggaaactacagcagcagcaacagcaaccagcagc

SEQ ID NO: 50461 - DNA, 1000 bp, Zea mays
  Clone ID: MRT4577_146014C.1
tcgagccggccgggaaaagccttcggggatatttgtaggtcacgattcacgacggaaacagtagtgctgtcacctgtcagtagagctctcccctgggccaagaactcgatccgagcaaaaaaatgtcggaggccgccgtgcgagtgatcggcctatggccgagcccgttcgtgatccgcgtcctgatcgcgctgaagctgaagcatgtggagtacgagttcgtggaggaggtggtgggcagcaagagcgagctgctgctcgcgtcgaacccggtgcacaagaagatccccgtcctgctccaccacggcaagcccctctccgagtccctaatcatcgttcagtacatcgacgaggtctggtcctccggcgcgccggcggccatcctccccgccgacccttacgcgcgcgctgtccagcggttctgggcgcagtacgtcgacgacaagatgcacccggcgatccgcgtactgaagggaacgtacgacggggacaaggagcaggcggcggggcagctgtccgcggccctgcagctcctggaggaggctttcgcgcagctcggccaggggaagcactacttcggcggggacagcgtcgggtacctggacatcgccctggtgtcgcacgtcggctgggtgaaggcggtggagaagatcgcgggggtcactctgctggacgaggcgaaggttcccaacctggtggcgtgggctgaccggctgtgcgcccacccggccgtggtggacgcgatccctgacgccgacaagttcgttgagttcagcgtgacctatgggtcgttctcttaagcctatcaatgctcccaaagtgagcaaaatggctccgcattgcgctttgtgattttcactgcgcatgtgccggtgcatgtcaccgtcaatagcatgtagtttgtatacatgtccttctgtgaaaataaagctttgctgcccgtcaaagggaaatcgacatataaaaaaaaaaaaaaaaaaaaaaaaaaaaaaggccccta

SEQ ID NO: 50462 - DNA, 2139 bp, Zea mays
  Clone ID: MRT4577_146015C.1
actgtgttctcatcagatcagccgaatcgtttctgctgaaactatggagtggcgcttcctcttactccctcgtcacctctcctccgttgccccgtccagcgccgctgtcgtcgccggcgagatctctgtcctcctcagcgcccggaatttcctggcttctgttaactgtgcggaacaattcataagctccgaggccgtcacatcctcgggcgtccttgagctctaccgcgcggtggccgccgcagccccaagtgggaaggcccgttacttagtcgacgcggcctcggcgctagtcgaggcatccgcgcgcgcggacctccccgacggcgcgctgcggctgctcgagttcctcatcgacacgcctgcggcgcggctgccgatgggatcgtcctgcggccacctcatggtgaaactcctctcgctcggacgccgcgcggatgcgcgccacgtgtttgagatcctcgcggatgccggtgagcgccggcgcaaaaaggcgatgaacgagctttgggcagccggtaggggggccgacgccttcaaggtgttcggcgaaatggcggatgtgcccgtggtttcatatcgtaaaaggtacgatttcatgatgtatggctacttgaagaatggagacctgcagtctgcatccgagatacggacccggatgatgcaggggggcatcaagctatccactcaacagagacgaatgcttcggatgctggcagaagccagggcttgcccagagaacatgctgcggatcaaggtggaaatttgcattatggcacaggacatcgatgaggccatccgtttgctccggcatatgagccacggtgataagtcacctccaaacgctcactcctacaatttggtaatcgccggtctctggaaggcagggagaggtgacgaagctgtcaagctgtttggcgagatgacagacatatccctggcgccgaatcacttcacatacactgtcatgataaatggccacttgaaaagactgggtaatggtctgaccccgaggaagaatgggaatggagatctggaggctgcactccagttgaaggctcagatggagcaggcaggcttcaagtcagatgaacccacctaccatttgctgatggcagaactctgctcggctgaacggctgggagatgttacagctttattcgacgagatgatgacacaagagacgacattacataagatcgtccatagcagcatgttgcagttcctctgtagaatcaatgaaggtcagctactgcgcatcatcgaagaatctgcaaagaacggcgtttctgcagcggataatggttgcattaccttgttgttgaaggagctttgcaggatcgacaaggtttcaagcgcagaaaaggcgttgcagacgtttgccaaaacagggctggtcccgacaacagagatgtacaacattcttattgacggctatagcaagatcagggagctccaagcggcattcttgctgtatcgccagatgaaatcgcatgatcagcttgtacctaatgaagccacccatgaggcactactgctggctgtgcgcaacaacacaagcatcgtctactgggaggacgtggaggagttgtttgagaagaatggagttggtatagatgcgatgaacaacgccttttctgatatatatggattcaagtaggtatatcctaatacctagaatgctcaaaagggaacattctagcaagctgtttttagcatctgtagaatggacatattcattgtagatctcggctcctaccttaaacagatgattgatgacgcagcatgtattctctctaagtatctgaatatgcgcatctttgttttgtacagagatctctctcctagacagctcatctgatatcagcacagtttagacgcccttagaaaaaaaatgaaacatcagagagtagcttctgtccgtcaaatatggtttctccaaacaaaaatgacgagctgaacatggatcaaaatgtttagtaaggaaataatgttttctgtccgtcagaaaggttgatgctttgtttggaacctcttgctaacttactgacacaattagggtgagacaaactttagactcactaacctgtatcctatatgcttgcattactactgtctgtcaacctcaaactttttcag

SEQ ID NO: 50463 - DNA, 648 bp, Zea mays
  Clone ID: MRT4577_146016C.1
caggccggccgggaaaaaattcaaaaaaaaaacgactcaccacgacgtacacagagtgctgccagtagagagctctccgaactcggaaccaaaacaaaaacaaaaatgtcagaggccgccgtgcgcgtgatcggcctatggccgagcccgttcgtgatccgcgtcctgatcgccctgaagctgaagggcgtcgagttcgagttcgtggaggaggtggtgggcaggaagagcgagctgctgctgacgtcgaacccggtgcacaagaagatccccgtcctgctccaccacggcaagcccatctccgagtctctaatcatcgtccagtacatcgacgaggtctggtcctccggcgcgccggccttcctccccgtcgacgctcacgcccgcgccgtccagcggttctgggcgcagtacgtcgacgacaaggtagagcaagaactagctagctagtcgaccgagacctcttcctcttacgcatacgcatgcatgcagctgccttgggcgatccgcatactgaagggaacggacgacgacgggggcaaggagcaggcggcggggcagctgtccgcggccctgcagctcctagaggaggctttcgcgcagctcagccaggggaagcgctacttcggcggggacagcgtcgggtac

SEQ ID NO: 50464 - DNA, 229 bp, Zea mays
  unsure (1)..(229): unsure at all n locations
  Clone ID: MRT4577_146017C.1
tcgtgcacgcgtctcggattaactcttgaaacaacaacgtattaattatctcttgctataaaacaggtctggggttttatcgtttcttaccatttgcgtaactatgagtaatcgagaagcatatttcaagtcccaggcaantttcaataanttatctggtctctagacaccagaataataatagacatttattcctcatattatacacatataagttcaaattctcaat

SEQ ID NO: 50465 - DNA, 329 bp, Zea mays
  Clone ID: MRT4577_146018C.1
cgacccacacgtccgacagtatgctatcgcatggagttacggtttgacatcactcatatcgagtgtaagggatgggtggacttggagtcgacgattgtcaagtaccgagtataatgaccagatatatccgaaggtgaacgccttgttggctaggcataccacatctcttatgacagtgggccctgttgcaagtgctctgctacatactacatccaagatgggctacataggcccaagtttcaggtgctgatatcttaaacaaaatcaatgctatggtcgagtgaaactctctaatctattccatcatgaaactgtgttggataatatac

SEQ ID NO: 50466 - DNA, 349 bp, Zea mays
  Clone ID: MRT4577_146019C.1
aaaactaaaaaaaaaaaaaaaaaaaaaaaaaatttaaaatttttaaaaaaaaaaaaaaaaaaaaaaaaaataaaaaaaataaataaaaaatttaagaaaaataaaaaattttttttttgggcccaatcccccctgtggggggttttttaataattcaccggactggggggggcaaattttttgactttggaaaacccctgacccccccaatttaaagcgctttaaaaacatctccctttggtttgttggcttaatttctggaaaaaccccgccggatctccctttaaaactcttgatcaacctctaatctttaagggtccgaccttttgctttaaaaattcctcccccc

SEQ ID NO: 50467 - DNA, 487 bp, Zea mays
  Clone ID: MRT4577_14601C.1
gtgacactatataagagctatgatcgcacgctgcacgcgtccgggagcctgtatactgtagcagcgcgtcgccctttttttttttttttttttttttttttaaagcagctccattttatctgaaatcaatccaaacaacaataaattaggagtgaaacagcttcagcccaccgtactctggaaccaaacactaccttaaccacaccagacgctaagtggttacatgtggaggaccaaagaataatcgacattatcatctctttgaacaaggtactacaaacaatgagacaaacaaaacaagggagactgacaaagatgtgattgctcacggaccccgattacactcgattattcagcagtttctgcagcattgctaagctcttagaaaccggcaatttattgtcatacctaacagaatgtaacacatcctactcatcagtgacgcatcctctagacgctggagccacaagcttgatgtacttccaaa

SEQ ID NO: 50468 - DNA, 346 bp, Zea mays
  Clone ID: MRT4577_146020C.1
ttctctagttctttctactgtaacatttgttaagggcatggttggagtgattggggggaggtcagggatgaacttcgagacatcaattttcaaaatagagaatgcattccagttggtccttgtaactactttattggtgggcgttttcattatctgctccctcatttggtgcttcaagcaccaagagactgatgcctttgtagagtgtatatattcccttctgcttcttcttcttcttccatatagttcctatgatatcattacaccgagtgtaccttctacccttgtgaagaactttgtcagatccctgattttttgcccgatgtgaaataccattcttatagag

SEQ ID NO: 50469 - DNA, 778 bp, Zea mays
  Clone ID: MRT4577_146021C.1
aagaattacacgagcccccctctccctcccgtcccgtcgctgttcccagctcgctcctttcgagagtgtactgtttagtccgcgcgcattgctcggaccgagccaccgagttcttgccgcgcgccgcagcagtagagccattgccgcgttcgctcgcgccgcgcggttcatgcgccaggagtctgaggcggctacctagttaacggcgggggcatgcgtttcatcacaggcggcggcggcggcggagtaggaggaggagtaggaggaggcggaagctcggcggcgcggtcgtacgagcccatggccacggccgacaccacgagcctgcactactggctgcactggcgggtggggctctgtggcctgtgggtgctggcctgcatggccgtcgcgggctacctaatctggcgtcacgagggccccagcgccgaccggcgtcccggcggcgcgggcgcgggcctgtcgtccccgggcgctgcggctgacggcggcaaggagaggtgtcacggggtgctgtacgacgacgaggcgtggcggccgtgcctccgggacatccacccggcgtggctgctcgcctacaggctcatctccttcttcgtcctcctcagcctcctcgtcgtcattgtcatctccgatggcggcagcatcttctactactacactcagtggaccttcattctggtgacgatttacttcgggctcggcacggccctgtccatctacggctgcagcaggttcgccgaggagaacgtcgccgcggcggcggcggcggcagaca

SEQ ID NO: 50470 - DNA, 492 bp, Zea mays
  Clone ID: MRT4577_146022C.1
gggacccccccacccccccctggaaaattttttaccccagaaaaaggtttgggaaaaaaccccggaaaacataggggggaaagggggggggcccccctaccaaggggggcccaaaaccccagggggaaataataaccgggctttccccaataaaaaaaaccattaaaacaggggaaaacggccccccccggggaaagggggccccccaaaaacgggggttaggcccccccccctgggttttttaaatgggcaaacaaaggtgggaaaatctcccccaacgagggggggcccgggagccccccttaaaattttggttccgggggggcccaggacccctttttggggggttgggccccggggaaaaaattttaaaggcccctatttggggggggaaaaacctgaccgggttaaaaaaggggtaatctgaatccccggtgttgtcgccttttcccccggaacccgggggggaaaaccccccaaaaattccccccc

SEQ ID NO: 50471 - DNA, 1952 bp, Zea mays
  Clone ID: MRT4577_146024C.1
acgggtactatcggatcgggtgaattagagaatagacagaggtccgttggcatttcagcttctcttctcctttcagggcctgcctatccgaaagagaatccaggacctcttggtcctgaatatcagaataggacgaacgaaccggcctccgcggatatctttgcttcggaacaaaacaattagcattaggctcggtcaactggaatgtgtattatccatatgggagattttccaatcgagaagatccatcgatctgagacgaagagaaagggcccattttctttacttattcagttaccaaggattcgttatggaaacagatagcaacaaccatttcatcagacatgcgtatttttgattatccggtggatttacacagtttcattaatgcaaattgtttgatgtagttagtactcaggttattcgacgctcaagaattctttttaggcagttcatatcatcccatacatagtgttttgatctaagattgcaattcttccatgtttccgcagtagcatattgttccatggagctagggtccaaaataggaatcaacaagtgtttccacgactctaccgcccggccaatcctgttccactgaatcccctccctttttcatggccacatatctttacggctaaggagtgggaaatctttctcctgttacacaaatgaaatgtttcatttcatccgggaaaagccacctctttctccacaaacaatgtctttgtcatttgatccaggagccttccgttagataggaacagctttgctaaatactgagaactctcggatagagtattagaatgaaaagaccattaattatataaggaagagcccagggttctagcccattcccattcctaaatcaataattcgtagtgcttttgcctttcttgcgtactcctggtgaaccagttgctagccatatgtttaggaggcttttttctccaggtactggtactaagccgctttgccatctcttcatcttcatctgcaaagaattctcgacgtgaaaacacagagacaaaggccttatctttgaataggaaaaagaatggatccgaaggtcccaaatcaattggcttattcgaaaaaagccttcttctttgaaagatatatctcgtgtctggtactgcattgttccactctgcaagaagtccgaatcagtctcttgcacctccccctttttatgataaatataccataaataattcgaataaatagcagtctctgacaactcatcctctttaatctgcttggacccgctccaatacccataggaaaatccccagtcatattcagcgtacctgtccctgcaatcaaatagattgtcccaagggccccatattctaggagcccaagttatgctattgaaaattcgttcctctagcagttccggtttgaccattccgttccctttttcaaactccacttcttttcatatagcatccctaataaaagagagaacaatatccatttcaaaacatttctaacggattcctttccttggttcggaccgacgaagtaatggcactcgattattatcaacccgactgcaatctttttctgtcggtaaggattgcaccagagcaccttcaacttcaaatagaacaggaacaggacttctttgtcacagcgtgctcatgcttgcttctgagctgactaacgaacctatgactgcggcagcaatggatctcgactccatccataccgctcttcctcagcgcacgcgcctgtgctatggaatcgattcatcccaatggcttggagcagagagactcatccacaagattgatgagggacaagccgcctttgtagaacaacctacactacagcttctcataggccaaggtagaggtactccacccgctattttgtgagggatcccctcctatctgatagaaaagggtcccatgatcccgagccggtcttatcttggctcgcaaacc

SEQ ID NO: 50472 - DNA, 224 bp, Zea mays
  Clone ID: MRT4577_146025C.1
tatgggcgcgttctgtcgcactgtacagcggaaaccgacggggctaacctgggcggagctgcccggcggctacatgacgacagcgaaagatccgggctctcaaacgccggatgtgtccaatctgagccccgcctctacgatgcagattaacgacatacacagctagcacttgtcggccggcagcgattagattgcaccttgcccggactaggcgatgaatggac

SEQ ID NO: 50473 - DNA, 122 bp, Zea mays
  Clone ID: MRT4577_146026C.1
tagcgataagaacagcaggctacatcaattcacataaaaaccagaagccccctgagacgggttcagggtatccatagcgattctgtgaacaccaagtagcattgagtactgagattgaccct

SEQ ID NO: 50474 - DNA, 362 bp, Zea mays
  Clone ID: MRT4577_146027C.1
ctaactgctgcacctgtgcttgtttatcactgctggcgagttgggcagtcttggggcgtggaaaacatggcttgtgatgtaggaggaaggaatggaagtggtctgttgtacttaaagaaactagatgaataatgcttgaattactgaaacttcacccttctttagtgtataaagtattcacctatgtgttgaaaattcttgtaaaccatatgcatcttgcataaaacctggacctgctaactggtgctgtaagaggcggttcctctaaaggatctcaacgtacgtacgcgtacatactacgtctacgttactttatagtgccatctatattgatatcaatggccaacggtttacaacttcat

SEQ ID NO: 50475 - DNA, 221 bp, Zea mays
  Clone ID: MRT4577_146028C.1
ctcccgttggaccgacgctaggggggacttgttatgaaaatgcagcacattcaccgtcggctgaatcacccatgctcgatcttgtgtccagggagggggcagttgtataggcaataggcacgatcccttatgcaaaggtctgaccgtgcagatgattggcttgcagacctgtatcttttaagttgggcatgcttttctcatgcgacatggaccaatgacct

SEQ ID NO: 50476 - DNA, 365 bp, Zea mays
  unsure (1)..(365): unsure at all n locations
  Clone ID: MRT4577_146029C.1
gcggtgtntgggtgaggcggacgcgcgcagggctcatggcagctatcgctctgcctnctcccggcacgcaaccacctcacgcctctgcctcttcttaatcttaaagtcagtcagtccccgggccttgctctccctccacttcgccgcgncgatctcctccgccccgtggcccggcggcgncggggctggccgggcccggccccgcatgcggggggggggggctgccgcggccgccgccgcctgtccttcgccgttcggcctcgcccgctctgggggcggcgtcgcggtccccccgcggggccgccgtcgcgcttcgcncggccccccccccccccggcccctggcggcgggcccccccccccccc

SEQ ID NO: 50477 - DNA, 162 bp, Zea mays
  Clone ID: MRT4577_14602C.1
accacgcgttcggaaaagtaaacaagcgactcaaaaaatgacatgtgtacactcaactggatcgtgcggtggctacgacagatgaaaaatataaaagcgacctgtggacgtccagcgcgttagctacaagaaatgaataatcatgcgccacacgttatgata

SEQ ID NO: 50478 - DNA, 311 bp, Zea mays
  Clone ID: MRT4577_146030C.1
ctctgttgctggtcctggaacgaatgattatgtgcatgtgcgcatccagcatctcatcggcagaaagagtctgactacagtccagggtctgaagaaggagttcagctataacatgatccttatggatctgaagaaggtattctgctgttatggttctagtatttcttgacccatgagctaggtcaggtcattttacttcatatgtgaccagcgcatgtatggtgtttcttttctagttcattgctggtatttttattgtattagaacattatagatttattgtgttttttaaggggtccttgtaaattttt

SEQ ID NO: 50479 - DNA, 379 bp, Zea mays
  Clone ID: MRT4577_146031C.1
cggctcgagcacaactgggacaagctcaacagtcacggggcccgtcattgtcgacgcccatccgccgcactaccaccatggacacgagcttgtgcacgcaccgccgcacgagattgtgctcccacaccgcagccggagtcggcaccacagccacagccgacatgcgagccgtgacctggtgcgcgctgagcgtctgtcgacaggggagctggtactctacgaggaggaggtggagcacgtcgaaccgacgaggaacggggtgcggatcgagaaggataagagaggtaggatgtctattagcgtcccgaggaatcgatgatgaccgccgccttcattaatgagggccatgctggctacgcttacttgagcttttgacatt

SEQ ID NO: 50480 - DNA, 408 bp, Zea mays
  Clone ID: MRT4577_146032C.1
aattcggcacgaggccgaaaagcacccctatgccccactatctttatgactccctcccacacgcactggcacgcgcgtccgtttggctgcccctgcccgctcggcttcaacgggttaggcggtgtcggtggcgacgaaggtgttggagcagcccagagccaagggcgcggaccgagagaaggagctcctcggggggccgttctgggcggcggaccttctagagctggtgctgagctaggactcgttctcgtactgagctattgctcacgacagcgtcgacttcctcgccgacgacgcgctaccgctattcttcacgcaactacctatgcaatagataactcaccgtcagtctcggcgccgctatcgcgttcaccgccgacgagatgatcaccgagaaggaggaggacg

SEQ ID NO: 50481 - DNA, 362 bp, Zea mays
  Clone ID: MRT4577_146033C.1
gccggccgggtccgggtctcccagatgcgcatgcggcggtagctagcttccgtcaccgctcccccagtatgcagtagcaccaaatcggccgcccgcaaccgtgtcccggggttgaggatctgcgcggggccgtcctcgcgcgcgccgccgcatccccgccgtcccactccggcgaggctggctgcgtcccgtcgtcgtcccccgcaccgccgctgactcctggtatagccgcagtccccgcccacctatcgctcctagaatccttcgttctccggtggggttgcgacgcggcgcgtctccccgccttttttccttatggtatcataccgccgagaaaattgaggtcgctttccccccccccc

SEQ ID NO: 50482 - DNA, 314 bp, Zea mays
  Clone ID: MRT4577_146034C.1
ggaaaaaacatgtccagttttttcttgttataacagtttattcttcagccaatttgacgcaagcgcaaacaacacaactaacgggaaaaaattgggcgacatctcgtgatttccatttctttttgagccccaacctgtgaaagaacatgtcttacatccttcattaaaaaaaaccattttaacactagctatgactgtcccccaaaaaatacctttattttttcgcctgagctccagtgccggttgaatcctatcacacgccacaggctttgctaaacacagtgcctaaaatgcctgccttccacaggggcaga

SEQ ID NO: 50483 - DNA, 1488 bp, Zea mays
  Clone ID: MRT4577_146035C.1
ccctcgggtcggccgggaactcctcgaggccggcctgtggcggggacagttgtccaaaccaaatacattgaggatagcacgagaaaggggcgccaagcaaaccgggtcggccagcagacactgccatgaggactctactacctgtggccgccggccgcgggaccgtcgcctgcgcggccacgcccgtcccccggaggtcgctgctcctctccaccgctgccgcaggtgcggcgctgcagccggagcaggtggctgggacgaggccgttgaggctgaccaggagcgtggccagcgccgtggcaaagcccaggacctcggccgacgaggccatctcgtgggcgaagaaggacaaccgccggctcctccacgtcgtctaccgggtcggcgacctcgacaagacgatcaagttctacaccgagtgcctggggatgaagctgctcaggaagagagacataccagaggagaagtacagcaacgcgttcctcgggtacgggcccgaggaatcgcatttcgtcgtcgagctcacttacaattacggggttgacaaatatgacataggcgaagggttcggccatttcggcatcgcagtcgaggacgtggccaagacggtagagctcataagagcaaaggctggaaaggtcatcagggaagccggtcctgtgaagggcggcgagaccgtcatcgccttcgtggaggaccccgacggctacaagtttgagatcatcgagaggcctggaactccggaacccttgtgccaggtgatgctccgcgtcggcgaccttgaccgtgccataagcttctatgagaaggcctgcggcatggaactgctccggaagcgagatagccctgagtacaagtacacagtggcaatgatgggtttcggccctgaagacaaggacgcggtgctggagctgacctacaactatggtgtcaccgagtatgccaaggggaatgcatatgcccagatcgccattggcaccgacgatgtctacaggaccgcggaggcggcgaagctgtccggaggccaggtggtgcgggagccggggcccttgccagggatcaacaccaagatcacagccatcctggaccctgatggctggaaattggtcttcgtcgacaacatggacttcgccaaggaactggagtagccacgccaacgacctcagacgccctgcaacaggattaactcgcactgctgttggtccgtaattaaaatgaaagctactagtgaaaccgcgaggtctgtttcgtgctcaattagcagtgcgcttttttttccgctcccggtcggtcgggccggcgtcctcgttcacgtgaacgatgacgatcagcctatggttgggagcgtttgcagcactttttctgggggcgctagagaacggggatgaatactgccgcgcctttgtaatctcgctttttgctcgatgcaacttaaaatcctgtccctgtctgtctatcacggaattaagaagcacgtgcgggagccgc

SEQ ID NO: 50484 - DNA, 200 bp, Zea mays
  Clone ID: MRT4577_146036C.1
acgcgtagggaccttagcactcatgcaagccgactttcgatttaccaccgtgccaacccgagagagggatggtgatgatcaagaggatcctcatcgccgcgctcctcgtagacggcgtcttggccaccgcattgctggccttcaccgaggccttcgccgtcggatccccatgcggcttcgagtcgtctgcgttcggctaa

SEQ ID NO: 50485 - DNA, 413 bp, Zea mays
  Clone ID: MRT4577_146037C.1
gggaacccaaaaaagcaaattttttttaaaattttgcccggggcccgcaatttaagattttattttaagggcccggtcgggtaaaaaggggttgaaaaggtttgggggggataaaagcccctttttttgtttagaaggaaatttaatcccctttttttcccttggggacaaacacaaccgaaaaagccctaaaggggggggaattttaaaaaattacccaggggggcgggggtttttattttgaaactttgttttgagcttcaggctcccacatgggaaagggaaaatccttaggggctagcccccttttaaaaagggttgaattcccgcagctccttgaaattttcccaggggttttcccaaaccttaacttggaagaggtttttaacttcgccatcctttactttaaaagg

SEQ ID NO: 50486 - DNA, 223 bp, Zea mays
  Clone ID: MRT4577_146038C.1
gccgaccaaagaaccaagggtcgcattttttaaagtacaacctcctagacaggggcataaagcttcaatggcaagtcttgagcttaggtcttctttattaaagaatccaaaacccggcctatctaatgggccctccatcactgggaaggaagacccattttattaatggggcactggggcgccctttttctgaccggagatggaaaaactgcaatattgatcg

SEQ ID NO: 50487 - DNA, 499 bp, Zea mays
  Clone ID: MRT4577_146039C.1
atttcggcacgaggaacacgcgagccttctctcttcaacttcccagtgcccagggcgatcattaaccacaccccttcactgatacctgcgctccagacatacaaaggacggccgtcttgggaaaggacaaaaggggggtcttttctgacgacttcggaattttggacaacaagaaggaggggggcgtcctcgcccgttctctgtccatcgtgcttaagggcgactggctctgctcctgctattgctaaccttctcagaggggcatcagagagctgctataaacagtggtgactacaggcatagcctccacatgtcttattactgaggctggcagaaccaaacataacataacaagggagcacctggagcgcattgaggccagggaaaagaatacaccacagattgcctcccccggcatgcggcttacctgatttgaaccgagaacccgattacctattgcgacagctatcatacggcaggcccaccctttgtatataag

SEQ ID NO: 50488 - DNA, 1070 bp, Zea mays
  unsure (1)..(1070): unsure at all n locations
  Clone ID: MRT4577_14603C.1
ccgtccggtccatgnattacanngctatctcagnaaaacccagcaaatttcaaggtaatatgtgcagtgcaagtattttctgcatttgctactgccgctattgaatgccatttcttcctttttttgtagattgccttttcttctctctgatagtggaatatattgtttcagagcaagttttgcattcttatgacaaatcattttattgctctgatggtttcaacagggaaaggtagtagtgatccgaggagaaggaccaaaaggcgggccagggatgcccgaaatgttgactccaacaagcgcaataatgggtgctggtcttggaaaggagtgcgccctgctgacagatggtagattttctggagggtcacatggatttgttgtcggccacatatgccctgaagcacaggaaggtggcccaattggccttgtccatagtggtgatgtaatcaccatcgatgtaagtaagagggtaatcgacgttgaccttaccgagcagcagctcgaagaaagacggaggaaatggaccccaccgccatacaagtcgacctgtggagctctttggaagtacatcaagcttgtggctccagcgtctagaggatgcgtcactgatgagtaggatgtgttacattctgttaggttgtgcacatgatgtgtttgtcaatcaaaagctgttgccaggaacaatttccctgttagagtgattcattgtagttcggttttgcatgtggcaggtatgacaataaattgccggtttctaagagcttagcaatgctgcagaaactgctgaataatcgagtgtaatcggggtccgtgagcaatcacatctttgtcagtctcccttgttttgtttgtctcattgtttgtagtaccttgttcaatgagatgataatgtcgattattctttggtcctcctgtaaccacttagcgtctggtgtgtttaaggtagtgttcggttccggagtatagtgggctgaagccgtttcattcctaatttgttattgtttagattgatttcagatagaacagaacagaaaattatgtttaaacgttgaaccattcagttctcc

SEQ ID NO: 50489 - DNA, 269 bp, Zea mays
  Clone ID: MRT4577_146040C.1
caaaaacgcaccccaaatttgaccaaacgggactaaaatggttctgtccgactaaatccatacaggttttggttttttttaacataagcagcccttttaaaaagcgggggggggggggtggcccctacattgttcataaaatttggcaaaacttgtcttgcacttaaagcttgacgaagtttttaaatacaatttcggtgggataactcccataattccccgtccacctttcaccccccccttaaataattttggcaaatttttgcccg

SEQ ID NO: 50490 - DNA, 349 bp, Zea mays
  Clone ID: MRT4577_146041C.1
ggcacaaaactaaactatgaggatactctaacacacagtaatgccttggcaaatatgcactgtgaagggatggatcaaacaatacgcttcaccatatcactagtaaaaaaacataaacgccatggtgtgagctatgtgagggcaacttctatctccactataatttatggctgaagccatggcacattcaatagaatgtttgcggatcccaaaatacccagagcttcgctctgattacgctgagaccatgatgcgtgcaattgctagggtgctgattccagtcatagtcgattatggcccatacacctgaattggaacgcctagttctgcaccaagcttacgcatttta

SEQ ID NO: 50491 - DNA, 210 bp, Zea mays
  Clone ID: MRT4577_146042C.1
attcggctcgagccgggtcgaagttttcactagacgcccaccgcccttgtttaatggatgttttttaacaagccaagcatggaaccagactggattgaactagcggtggcgggactcaacacgaaaaaacgcctgcacttgacagaacaacccgagaaattcttcggaaagaacaggtttcctgtataacacccactgagttaccagaag

SEQ ID NO: 50492 - DNA, 392 bp, Zea mays
  Clone ID: MRT4577_146043C.1
gcggcatccactcctccgtgcctacttcggtcggcgccgctacagatgctacactcctgggtcgcctcacccgcctcctcctcctccaccgtttctctgccgtcgctcgcctcctctcctcctcggcccccctcacccctgcactcctccacgcggcgctgcgccgggtccgcctcgacgccgacgccgcggtgcacctcttccgcctcgcccctttccccccttccctcctcgcgcacgcccagctgctccacatcctcgcccgcgcccggcgctccgccgacgcccgcgcgatcctggcatccctcctctccgcacggcccccggctccgcctctctttccgcacctcgtcgaggtatataaggagttctccttctccgcagcctcattc

SEQ ID NO: 50493 - DNA, 382 bp, Zea mays
  Clone ID: MRT4577_146044C.1
aatacatgttgtgtcatttttttttttttttttttttattttcttttttttttttttggggcaaaccttttaaggctatattttgttttggaacaaaatgatacacccatgggaggaaaaacgaaacaggtacaaaaacacccctgtttaagaataaaccgacaccaaaaaccacttggtcctgaagtaaacggtctgagtactccagaaaggataatataccaaggaccggaaaggggcccattatttggaaccaataaatgctccccccggcacgacaaaattaaacaggatcttgacctgtttgcaccggatttagctaaccgggatctgccccgtcaggttctaggttaaaccaaaaaggagtgggatcttttacccc

SEQ ID NO: 50494 - DNA, 295 bp, Zea mays
  Clone ID: MRT4577_146045C.1
cacgcgtccggatacgcatcggcttacgagtctgcccacacatctcatgggtcgtgataaacaatgttatgttaccttgggtgctcgcacaactgctttacaggcgcctccagctgccagtagcagcagacgtaagaaagcatttcgagaactgggcgagaacgtgattcagtctctccagagctgagcctaggttcatgtgaaccatacatatgagatactgaagttattggctgaagtccttccagctaacatatatatcatgatatagtgccactctgagactgtcatgttc

SEQ ID NO: 50495 - DNA, 399 bp, Zea mays
  unsure (1)..(399): unsure at all n locations
  Clone ID: MRT4577_146046C.1
gggtggggggtttttttttttaatttttttttttttggtttttttttttttttttttttttttttttttttttttttttttttttttttttttttttttttttttttgagcaaatcccaaaccttactggcacaaaacccaacccctttgggggggggggggggtattatttcaacanggggnaaaacaaaccccccacattttattaccccccacccaagctttcctacatcctaacccaacccctgggtatccccacccttcaagggagctccttgagaaaatcggtgttttaaaccaaaaccactttccatccctttggataaacaaaaaaagcgatcttaggtttcaccccacgtaaaggccctggctcccccaaaatctttccacccatttttt

SEQ ID NO: 50496 - DNA, 432 bp, Zea mays
  unsure (1)..(432): unsure at all n locations
  Clone ID: MRT4577_146047C.1
agaacatcaccaagcgaacnaccgaggggggacgaaacaacaacggctaccaagcaaanagcccgccttgcgcttcttgccctttttgngagcgcaacaaatgcgtccatattccacaatgctcacttgctcctagagccatataccacagntcctccgaccagatacttcaatgggctggggggagtagctgcgcaagcctacaagctacaacaagcgctgcggagagcgactacaacaaccaataaccaacgcacaacaatcctggcacatctaaccatacaaaccatggacacaacagaaacaacagggtctaccagggctgagccaactagatgcggggaaccctgacgcctactggcaacagccggcgcccacacgcaaccaactcgctgctgccaaacggaaccggcataccaacaacaacaacaa

SEQ ID NO: 50497 - DNA, 1806 bp, Zea mays
  Clone ID: MRT4577_146048C.1
ttgggaccctcgaggccggccggggcacgtatgctctccactccaactcacgcccgcatcgtcttcgttttgtttcgtttcgtatcggatcgtgccgctcttcccttctcgtctagtcttgtttttctttcctcctctgttactccacctacagacctactactgccatcgggagggtaagctcttcggagccggagccgggtccacgttaacgccatcgagtgctgcgatgggcagcttaggagggagcgccggtgctggggacggcggcaaggtcgggctgccggcgcttgacgtgacgctcgcgttcccgcaggccacgcccgcatcgctcttcccgccagccgtttcggactactaccaatttgatgatttgctgactgatgaagagaaggcactcaggaagaaggtccgaggtatcatggaaaaggaaatcgcgcccattatgactgagtactgggagaaggctgaattcccattccatgccattcccagccttgccagtcttggtttagctggtggtacaataaaggggtatgggtgccctggactctcgcttacagctagtgctatttcgatagcagaggttgcacgggtcgatgcgagctgctccacatttattctagtgcactcctcgttggctatgtccactattgccctttgtggatctgaggctcaaaagcagaaatacttaccatctcttacccagttcaaaactattggttgctgggcattgacagagccagattatggaagtgatgcaagctccctaaggactgcagcaaccaaggtacctggtggttggcatttagatggacaaaaacgctggataggtaacagcacttttgcagatgtcctcatcattttggctaggaatgcagatacaaaccaactaaatggatttattgtaaagaaaggagctcctggtctaaaagccacaaaaattgaaaataaaattggactcagaatggttcaaaatggagacataattctaaataaagtatttgtccctgaggaagacagattaacaggcatcaattcatttcaggatataaacaaggtcctcgctatgtctcgaattatggtggcatggcaaccaataggcatatcaatgggagtttatgacatctgccatcggtatttgaaagaaagaaagcaatttggagctccactggcagcttttcagctcaatcaagaaaagcttgtccgcatgcttggcaacattcaggctatgcttctcgttggatggcgactgtgcaagctgtatgagtcaggcaaaatgacaccaggccggtctagtttaggcaaggcatggacgtccaagaaggccagggaggtggtttctcttgggcgagagctactgggtggcaatggcattttggttgattttcttgtcgccaaggcattttgtgacgtggaacccattttctcgtacgagggcacctatgacattaatagcctggtggctggcagagagatcaccgggatcgcgagcttcaagcctgctgtgtcagcaaaatcacgcctgtgaaagttgtttttttctttgttcccgaagacagtagaaatcaaccttgtacattcagatgattgggaataagaacggtaggaaagctgtaaaactcgacgtgcttcctcgtatgtactgttctgtttcaaattattcgacgttttgtcggaacggaacggaggacctgtatggctgtatatgatactcatcctatatatcacgcagcttttgaagattttgtaaaaaaaaaaaaaaaaaaaaaaaaaaaaaaaaaaaaaaaaaaaaaagggggcccc

SEQ ID NO: 50498 - DNA, 282 bp, Zea mays
  Clone ID: MRT4577_146049C.1
tcttattcctctgatatgatcctatttgggagcccttctcaacttgcgattgatttacaacagcctcctctcagtcgatatccctgcctaaaggctcgcagcttcagtccagtgtgaagacctctgccacataatcttagatcactgtgatgtccttgtctgacaaagagggtttggatatcagtaggatgactaacatcccagtggacagaatgagcggagaacatgaaagcagagtttctagaacatcaatgtctagcaggcttatgatagtggccatcg

SEQ ID NO: 50499 - DNA, 2537 bp, Zea mays
  Clone ID: MRT4577_14604C.1
tagaattccgctccagtggggccggcgggggtccagttctcaacccggctgtgctgtctcgtcgccttcctcccctcctgccggctgctgccgccgccagccgctgcaggcacgcttgccctctgctccctgtccatccactcatcattccccgtcatccaccaattcacaacccaaaaccctaaacccatttacctcaacgccaccgccgccgccgcgatgcagtccatggcgcccacctctccctcactcccggtggcaggccccgttccccgccgccgcctccagcgcgtccgcgccgccgcggtctccgacgagcccaaactcaacaagtacagcgcgcgcatcacggagcccaagtcgcagggcgcctcgcaggccgtgctctacggggttggcctcaccgacgccgacctccgcaagccgcaggtcggcgtctcttcggtgtggtacgaagggaacacctgcaacatgcacctgctccgcctcgccgaggccgtccgcgacggcgtccgtgaggccggcatggtcggcttccgattcaacaccgtcggtgtcagcgacgccatctccatgggcacccggggcatgtgctacagcctccagtcccgcgacctcatcgccgacagcatcgagaccgtcatgggcgcgcagcactacgacgccaacatctccatacctgggtgcgacaagaacatgccaggtacaataatggcaatgggacggcttaatcgacctagcatcatgatatatggtggaactattaagcctggtcactttcagggcaattcctatgatatagtttctgctttccagtgctatggagaatatgttagtggttcaatcactgatgagcaaagaaagaacgtcctccgcaattcatgtccaggggcaggtgcctgtggtggtatgtacacagcaaacactatggcatctgctattgaaacattgggcatgagccttccatacagttcttcgacacctgctgaagacccactaaaactagaagagtgccgtcttgctgggaagtatcttttagagttgctaaagatggatttgaagcctaaggacattatcactgagaagtcattgcgaaatgcaatggttattgttatggcacttggtggttcgactaatgctgttctgcatttgattgccattgctcggtccgtaggtttgcatttgactcttgatgatttccagaaggtcagtgaccaagttcctttccttgcagacctcaagcccagtggcaaatatgtcatggaagatctacataagattggtgggacaccggcagtcattcattatcttctggagcaaggtcttcttgatggtgattgcatgactgttactgcaaaaactctagctgagaatgccaaaattttccctcctttgtctgaagggcagcaaataattcgaccacttgacaatcctatcaaaccaactggccatattcaaatactttatggcaatcttgcaccagaaggttctgtagcaaaaataactggcaaagagggactatacttctcaggtccctgcattagtttttgagggtgaagagtccatgattacagccttctcagaaaacccagcaaatttcaagggaaaggtagtagtgatccgaggagaaggaccaaaaggcgggccagggatgcccgaaatgttgactccaacaagcgcaataatgggtgctggtcttggaaaggagtgcgccctgctgacagatggtagattttctggagggtcacatggatttgttgtcggtcacatatgccctgaagcacaggaaggtggtccaattggccttgtccagagtggtgatataatcaccatcgatgtaagtaagagggtaatcgatgttgaccttaccgaacagcagctcgaagaaaggcggaggaaatggaccccaccgccatacaagtcgaccagtggagctctttggaagtacatcaagcttgtggccccagcgtccagaggatgcgtcactgatgagtaggctgtgttacattctgttaggttgtgcacatgatgtgtttgtcaatcaaaggctgtttgccaggaacaaccatcctgttagagtgattcatgatagtgcggttttgcatgtggcaggtatgacaataaattgccggtttctaagagcttagcaatgctgcagaaactgctgaataatcgagtgtaatcggggtccgtgagcaatcacatctttgtcagtaaaagaaaaaaaaaacctctactactgcgttgtaccttgttcaaagagatgataatgtcggaaaaaaaaaaaaaaaaaaaaaaagtgtccaggggtgtggatataatatcagtgggctcccttgttttgtttgtatcaatgtttgtagtaccttgttcaaaaagatgataatgtcgattattctttggtcctccacatgtaaccacttagcgtctggtgtggttaaggtagtgtttggttccagagtacggtgggctgaagctgtttcactcctaattaattgttgtttggattgatttcagataaaatgccccccctttgg

SEQ ID NO: 50500 - DNA, 436 bp, Zea mays
  Clone ID: MRT4577_146050C.1
gggcccaaaaggccgggggcggctggggcgggggttaattggaaaaaagggaaaccccgggtccaatttccccgcaaacggggccccccccgatccagaaaacaaacgggggcccccttgcccaaaacgggggcaggggggttcataggggcggctccccacaggggtttttatggcaaggggggggggcccccccttttgggattcccggcccccccccggacccccattttaggggtcccccccccccttggccccccatgggttgggtcccccccccttatccccgggggggaaccgcttttttgggaaaccccttatcggcgattttagccctttataaccaactacaggcccaagttttttcactagttcacccggggttattttcttgccctaaaacccttaaaagcacccaaaaatcccgcccattttt

SEQ ID NO: 50501 - DNA, 333 bp, Zea mays
  unsure (1)..(333): unsure at all n locations
  Clone ID: MRT4577_146051C.1
tcctaccccttttccaaccctctttttctacccctttgaaaaaacccaaaggtngggctcttatcctaaaccggcccgcganaacctcctcccttaaaataaccacccttcaaatcaaaaccacccatccaccccaaatccaacccttgcctctctatttccttttaacaccaccaccaccaaaattttttagacctttacctaacatttcctccttttaaaaatcaacctttaattaacccccaaaataattattaactccttccaattttccaatttttaattttaatccctcaaaagtttactntaaaaaatcctccaccctttttattt

SEQ ID NO: 50502 - DNA, 787 bp, Zea mays
  Clone ID: MRT4577_146052C.1
attcctaagaagaacttgaaaagtttatggcacggtgtaatgatgctgcagcacaaaaggctaccaaagaagccgctgagaaggctaagattcaggcggacaatattgggcacaaacttttatctaagatgggttggagggaaggtttgtccaaatacttaataccattaagccttgttcggttattcccatcccacatggattggaggagattggaaaaatttaagaaggattttgacttgctatggatttaaacccacccagtccagtccaatccacatggattggcactaaaacgaacaagcccttacaataatctctagtaaaactgtcacatttttctcttcataaataaattgcttaacatcattcagtttgcttctaaaaaaattataaccacttaagtggtgaaggatcaatctcaagattttgtggtatttgtgaggctgagtagctgattgatatttaagtttatgataacagtacaacacccataggtgataggaacctgattatcattgcttttatttgttggtgtatatttggtatttctatatatgatagatacctgtctacgcaaaaaatgtcgtctaaaaagggaaatattgaatgaataaattgtaaaatttgaaactctgcacgctcgcctgtatccatctctttctgtgttcttggcatgctacccagcaaaccttcaatattgtaaaattatgctgtgaacaaagcatacaatcccaacaccagaaaagactatctatgatagattctgcattgtggtgcatgcact

SEQ ID NO: 50503 - DNA, 431 bp, Zea mays
  Clone ID: MRT4577_146053C.1
attcggctcgagggtaattggaacttattttttcatctggtgcctgagcttggaaaattggagcatcttcagtatttgttatgatcaccgcaggcaggttttctccacacagatgggtttgagcaaccaggacattgttgcactttttggtggtcacaccctagttggtggaatcagggaagatgccacaagaacaggtttgggtttgagggagcttagacgtccaaccctttgatctttgacaactcttcaaggagcttctgagtggagagaaggaaggccttttgcagctaccaagggacaaagctctcctctcttatccatacttctgcccacttattgacaaatatgtagcagtatatatatctttgatccttgccatttgttcggggacaggttatgttaacctgggtggctgtaataaatatttg

SEQ ID NO: 50504 - DNA, 1228 bp, Zea mays
  Clone ID: MRT4577_146054C.1
gctgcgggacctgcgcctgggcctgccggacgagagcgtcgagccgctcgtgcccaagaagaaggccggcgtcatgtccgtgcaggtgaccaagttcaagtgcggcggcgccgtggttgggtgcaccttcgaccaccgcgtgtgcgacgcctactcgttcaacatgttcctcgtcgcgtgggccgcagccgccagcggcagctcagcgcctccggccccgtgcttccaccgctcgttcctcgcgccgcgtgaaccagctgcggcaccgctccgcaccgccggcagcctcgcggaccgcctcttcgtccccgtgagccgcgcgccggccttgccggacacagccaccgccaaccgcatctaccgcgtgtccgccgccgacgtcgcggcgcttcaagcctcggcgggggccgggcgcacgaagctggaggcgttcacggcccacctgtgggggctccacgccaaggccgcagcggcctcgcggcgccagcagccgcgttcgtgctgcatgggcgtggtggtggacgggcgcagtcgcctccgccgcgacggcgccatgggggcctacttcggcaacgtgctgaccatcccctacggcgtcatgggcaccggcgccctgggcgaaatggcgctcgcggacgtggccggcgacgtgcaccggtgggtggcggaggccgcgaccggcgagcacttccgcgagctcgtcgactgggtggaggcgcagcggccggagcccacggtggcgagagcgtacctgggccgcggccacggcggcgaggacgcgatggcctgcgtggtgtcgtcggggatgcggcttcccctcggcgaggtggacttcgggtggggccggccggcgttcgcgtcgtatcagttcccctggcccggcggcgccgggtacgtgatgccgatgccgagcgcgcgcggggacggtgactgggtggtgtacgtgcacgcggcgctggaggtggtggaggtgatggaggcggagccgacggtgttcagagcgctggagagtagctacgtgttcgatcgatcgggtgagttgaattaagcgcgcgcctggtcggctgctgctggaacgtgatggcgccatcgtgacatcatcgtccgtgcatatatcgtgtgtgtgtacgtgtctgattcgtggtttaccttgtgttgtgggttccatccatgttatcgtgcacgtgtgtgccgtgtaacacgtacgaaatactaccgatatacccat

SEQ ID NO: 50505 - DNA, 728 bp, Zea mays
  Clone ID: MRT4577_146055C.1
gatgcctccttttttgttgcttctgcttctcatcctcactcttcttgtccataatatgaacttgaccctgtgcagttgtgtttgatgtggtgcggactgactgcaggaaacacctgactcccaatgggaatacaaagttctgtgctctagaaccataagtaggaagagaaacctcacaagctggatgccatgcgaaaccgctactgagatgacaaagctttcgcttatttaaagtacaatgtgccatagcatgattagaatctgctaaactttcctttgaaaagtaacatacagatctttgatgatcaacctcacaatcaaattgtccttgcccaattgtgctagtgaatgaaggggacaaaataggcacatgagtgtgccgtagaatgtcattcctcctcctgatgatagcccttgaggccatccttgagcacttactccctttctcaaggaaactccagaatcatgcccttccaggtagaacacgtggcgctggtggaggcgggagatcggccgggagtcggaccccgtcgcggcggctgcgctggttgcggggacgggttggatcggagcgaggtgggattttccgggaggcagtggactgccgcggaagaggggtgggatggttgcttgcgcgcagcctgcgtgggaaaccaccaaattgctccgaatgtcgccgattggggaatgagatcatgagaggactgagactgagggtggaaagcccg

SEQ ID NO: 50506 - DNA, 328 bp, Zea mays
  Clone ID: MRT4577_146056C.1
aaaaaaaaaaaaaaaaaaaaaaataaaataaaaaaaaaaaaaaaaaaaaaaaaaaggaaagaaaaagtacccacataacgtggtgacgatatctagcaaaaagatgaaactaaaatggaactaccgttcccgcccgatgcaaagctaaggtgcggggagatcgggcccttgggtacgaccaagccttgacctgcatcgcgcccatcaatctctgcagcttgcgctgatggtgggtaccagacgcgtttaggaatgttgggggtacccctaattatggcacccggcacacagatactagtgtctacactatttgggtctattcggttga

SEQ ID NO: 50507 - DNA, 224 bp, Zea mays
  Clone ID: MRT4577_146057C.1
cgtcgtccgcttttgcacctaggccgcagctgttgtcggtgcgggagaccaaccaaccaatcgcaatcacatacatgaccgtgtcgtgtcgcctacctcgctctgctctctcctatcgttgccgcgttctgcgccttcgactcggtgatgggggttttcgcgcggctgtttgcgctgttcacccgggtcgtggggctggttggcgctctcctcgtctttctggg

SEQ ID NO: 50508 - DNA, 708 bp, Zea mays
  Clone ID: MRT4577_146058C.1
aattcggcacgaggataaaaaaaactcaacctattggaggtaagacaaccatcggacattctattaagaagaagacttcacacaggtcgagaaaaaccctgaacccctgcctcacccatacacaacgacatcgtagcccatgtgagaacgaccacgatcgggaccaggctttagacctgtgctttggcgtgggacagacgaggggatttttttaaccacatcctgaaatttgctcccacagggagtagaacctaggatctgaggggtgctactcagaccgcctaaccaactcagctagaggccctttcgccttgcatgaaaatagggacatggatatctcatatctttccacccttgcttggttcatgaacataccatgtgaccacgtgggcattcgcatactcatattgcttgtgaagctcagaggacatggttgtaagcatgagacaactaacatccagggagtcattcgtgtgctactcataagcacttcagccatcataacttttattctcctttgactcattaggatagggagtctcaagaatatatttctttttcccttatttgaaaacaactctcaagttacggtaccaatcaataaaaattgttctagtgatttttttgtcaacgatcgatcacaaatttaaaccgtaaagcataggtgccatcactatataaataaaagcaagtttagcactatgttta

SEQ ID NO: 50509 - DNA, 464 bp, Zea mays
  Clone ID: MRT4577_146059C.1
ccggccgggctagtcgtcgccagccttggagctatcgtacgcggtggctcctcctccactccccatcgactcctcctccatccccgacgcggcggcgccagcctgcaggcactggtgggagaagctgcaaacaatcttcaggagtacttcagaacaatgtacaagaaagtcacggaggctgacattgaagaatttgaagctaaatatagagggtcagattctgagaaaacagacttgaaggaactctacacaaaatataagggcaacatgaacatgaataattatctcttatatcatattgtaaaatctgaaacagttctcctatagatggttagcttgcattttacgctacaattacctcagatcacttcttgttgtatcttacaccaatttacgaaatttcttgatgtgttttatgacaacctcatgcgctgagagataaaaaaaaaaaaaaaaaagcggcc

SEQ ID NO: 50510 - DNA, 638 bp, Zea mays
  Clone ID: MRT4577_14605C.1
acatcaagcttgtggctccagcgtctagaggatgcgtcactgatgaataggatgtgttacattctgttaggttgtgcacacgatgtgtttgtcaatcaaaagctgttgccaggaacaattgccctgttagagtgattcattgtagtgcggttttgcatgtggcaggtatgacaataaattgccggtttctaagagcttagcaatgctgcagaaactgctgaataatcgagtgtaatcgtggtccgtgagcaatcacatctttgtcagtttcccttaaaaaaaaaaaaaaaaaaaaaaaaaaaaaagagaaaaaaaaaaaaaaaaaaaaaaagtgcctctggcgcgacaccactctgggggaattttgtggatatatatatcactgtggggggctctagaatatgtatataggggccccaattccctctatagagaggcgtttcacaatactgtgcccgtttttatacaacgtcgagagtgaaaaaactgtggttatcccaaattttaatcgttttgcaacatatccctttttccacatgtggtattatagaaaagagccccacacatatcgcttttcaaaagatttgcacactctatatggaaagtgcacgccctctgtagcggcattttaagcgcgg

SEQ ID NO: 50511 - DNA, 891 bp, Zea mays
  Clone ID: MRT4577_146060C.1
ccgccgagccggccgggccggcgaggttttcgtgcggccgctgcggtgacaagcaggtcctccctcaagctcgcggcggatcagcgaccgatcgacccgtcttcctcggttcctcatccaacccgggcatccggattccggtgagcggaggaaggcgccatgaaagctgcggaggacgccacgcgctgccctcagatcccccggcgttgccaccactgtgccgggccactctccaaggacatggaaacgagcagctggacagtacctccgttggttcgagatagcttctccatgattggttcggctcttgggggtatagcaggagcgttttatggtttcaaccatgttatgcctgttgttcgacgtcacataaagggcccaatgtggatgcatttttttgttggtgcaccaccagttattgtgttctcttctgcatgtgctggattagcaggtggtacaataccagccaccgcacagctggtttcatcatcctgtcatgccgtgtcatcgcactcctttgcccgctcttcgcgtgtaccaacacatgcaccctccttcgcccccgctgcatctcatgacgacatgcgcaagacaagaagctcctcaccgttgtaagttatcgggtacaacagttcctctacataactccgcctgccttgagaaactaccctattatttaactatgcaagactcatcccatcctactctatcaaacacgaatgttttatcgctccttgccctgtttaatcagggatgccactgtacatggtaaatttctctctctcgtggacagatgctacacgtgccctgtttataaattttggatatatcttgatgtatagctagcattgggcaatgtttcgtggttcaataaaacttcgtgacgtgacc

SEQ ID NO: 50512 - DNA, 147 bp, Zea mays
  Clone ID: MRT4577_146061C.1
aggggggggggatcctcgatggcgggaagcaaatatcatggcaggacttaccgtgcttaagttcaaccagggttgtaaacagacgcatgaacaaactgattttggacatcccataacgaaccgatcaggcctcctatctggataaaa

SEQ ID NO: 50513 - DNA, 938 bp, Zea mays
  Clone ID: MRT4577_146062C.1
ttgggtacctcgaggccgggtctcgcgccgcacacactgaccaacagctagctcagctgcacgcactgcacctcccgggccagccgccagccgccggccagcatggaggcggtggtagagtgcgccaagtgcgagtgctgcggcctggtggaggactgcacccgggactacatcctgggcgtgcgcgcggccttcggcgggcggtggctctgcggcctctgctccgaggcggtgcgggacgaggcggccaggggcacgacggcgagaggccccgccgccgccgccgcggggctggaggacgcgctccgggaccacatggccttctgcggcaagtgcaggcggagccccgcgttccgggtcgccgacggcatgcgccagatgctgcgcaggtgctccaagtgactgctggcgccggccgcgtcgtcgtcggcgtcggcgttgcacggcgaaaaatcggcagtgcgacccacccgcgtcgtctagcgagcctttgggcatggacaagcaagacaagacaaaggcgagcacgccggccattggccattgctgtgtcgtctccgcgcagtgagctgctggcaacatcatgtatgtgcaaggaaatggctcggcacggcagtcggcagtattattagggtgtttagtttggtgatctctgagaacccagggactcgtaggtgctgtaaaggtgaagctagaactagaacgccgctacatcagtcagtgccattaggcttggtacattcttcaggctacagctgtttcgtcaataaggaaactacgtgtatgatctgcggacggcaggcgaaaatagcacgtagtacaattccattcctacatatccggtctgtccatgctctgcatatttctttctctagcggggatgttatgtaacgcaatgcaacacccctacctggcgtgggtgtgggtgtttggagggg

SEQ ID NO: 50514 - DNA, 888 bp, Zea mays
  Clone ID: MRT4577_146063C.1
ttccctcgtggataagggacgatgaaagagcctgaatctttttacccggccgggatttttttttctattctctgccccaaacgcacaagccctagccgccgaccaccatggcggcggcgccacctccggacccgacggttctaattgaagacctcgtcgaggagttcctcctccgcattcccccggatgaccccgccagcctcgctcgcgccgccctcgtcagtaggcactggcaccgcgtcatcaccggccccgtcttccgccgtagattccgtgagttccaccgctcgccacctttgcagggctacatctccaacatccacaattccatccacttcgtccctatatcgtcgttccgcccgcgccatgctgacctcgacgacgtgatagcgatccactcaagccctggtcgcgtccttctctgtcgccgccccgggaagggtctggatgtcttccccgggaagggtctggatgtcttcctctccgtgtgggatcccatcaccgatgagctgcgggatttgcccgcgctgccgctgccggtggtcccaggcccgtgcacatgtaactgggacgcggccgtcatctgcgccgtaggcgagggctgcaaccatatccattgcggcttcaaggtcgtctgcgtgggaacttctcaaaggagggacttctcctgtgtctattcacccgaggctggtagctgctggagtgatctcatctttgctgcttcaggggaacacaccaactcctttgacatggggacctgtgtccacgctgggagctccctctacttcctgagtcgattcaaccatgaaatcgtcaaatatgacttgctgacggatcgaatgtctaccatttgcttcagagtagaccctgacgcccaaataaacggca

SEQ ID NO: 50515 - DNA, 1436 bp, Zea mays
  Clone ID: MRT4577_146064C.1
ggcgcacgggcacaggcacaggcacgggcgaacaaattgacccgggagccgggacggcgacttccgtggtcagtcggtcctccacgtcgctcgttcgcgccgaagacccgcccgggccgccccacacggccacagctcaaatcatgagcagggtgcgaaagcttggcggagaatcgcttcgtcccgacagccactactaggaattgccgagcgagcgagcttgcgccgtgcgcgatggagggtgacgagaagtcggcgggcggggcccctgcttactggggcctgggcgcgcggccctgcgacgcgtgcggcgccgaggcggcgcgcctctactgccgcgcggacgcggcgttcctgtgcgccgggtgcgatgcgcgggcgcacggcgccgggtcgcgccacgcgcgggtctggctctgcgaggtctgcgagcacgcgccggcggcggtcacgtgccgcgcggacgctgccgcgctctgcgcctcctgcgacgccgacatccactcggcgaacccgctcgcgcgccgccacgagcgcctccacgtggcacccttcttcggcgcgctggccgacgcgcccaagcccttcgcctcggcggcgccgcccaaagcaaccgacgacgacgggagcaacgaggacgaggcggcgtcgtggctcctccccgagcccgaccacgggcagaaagaaggcgccacgacggaggtgttcttcgcggactccgacccgtacctcgacctcgacttcgcgcgttccatggacgacatcaagaccatcggcgtccagcagagcgggtcaccagagctcgacctcgccggcaccaagctcttctactccgatcactccgtgaaccacagtgtgtcatcgtcggaggcagcggttgtgcccgacgcggcgtctggcatggcgcccatggtggcagtggtcagcaggggcctggagcgggaggcgcggctgatgcggtaccgggagaagcgcaagagcaggcggttcgagaagacgatccggtacgcgtcccgcaaggcgtacgcggagacgcggccgcgcatcaagggccggttcgccaagcgcacgcccggggctggggaggacacgctggaggagcacgaggagatgtactcctccgccgctgccgccgtggctgcgctcatggcccccggcggagccgatgcggactacggcgtcgtgcccacatattgatctatgcaattgcaacgccgacatgtacactagttagcctcgtgctctggggctgtaatttttgctgcatgcattgcatgcaaagctcttattgattgcctgtatgattaacggaagccattacaagcaaggacttcctccctccttttcaattcctatgtatattactatcatcatttttgttaacattgatacccgattacacagttctgtttccattttgaagatattaatattgc

SEQ ID NO: 50516 - DNA, 794 bp, Zea mays
  Clone ID: MRT4577_146065C.1
ttaaattttagttcaaaatacataccaaactagcaaaagtgttcaaaagtaaaattgtaatgaatagttctatcagtcaacaaggaccagatatttagttaaaaaaattgataggacccacttgtcagcctcttcacaacgccacataggatgccacctaggcgaaactgcctgcaaaatcgtctgagggatcaaaatcagacggtttagaaagttaaaaaactagtagttgtacctggttttgtgcagcagacacaaaaatagattcgcacaacacttaagaggaccaatagagtaccttttcccatagaactagttgtgagcctgtgcgttgcaacaggaaaatagatattgaacgaaaaggttcatcaaacatgtataatattagaataataagatacataattttaatattaaataatattttaacacattatgtaaatattatagtataatataatataaaatcaatcattgggcaaaaataaagcaatatttcttctatattaattgcctttgaaaacataaactctttgtgtattaaaatttattcaatcataatctattagcaaattaacccacttaagtagtgtttttgttaaatacacatatctataatatagaacggcaaatagcgtacttgaaggacctctacgagcaaattttgccttcgtacaatattattgaccagcaataattaattaatgttgaaaattagttaacactaatttatttatattttatgaaagttaaagaaagattaagcatgtttcaacccaatgattaatgcacat

SEQ ID NO: 50517 - DNA, 339 bp, Zea mays
  Clone ID: MRT4577_146066C.1
tttttcctttcaccgggttttaaaaaaaaaaacaactttgtgcggctgggcccacttttttttttttaaaagtaaattttgagaacttcggccccaaaaaaacaaaaacatttttgttcgcatcgccaaattaaaacaaaaatggttgtggcccccctcccgggggggttaaatgccttaccccaaattctgtccccccgaaaagaaacccctttttgggggggcccaaattttatttggcctcccaatggggagaaattgccccccccggggggttgtgtttggcgaccctttaaatgggacgggccttcctttggtgggatgtaaattttttggggg

SEQ ID NO: 50518 - DNA, 791 bp, Zea mays
  Clone ID: MRT4577_146067C.1
tccgtgctcatgaccttcatggtccgccacctcgccggcgatcccgcgaccctcgccgccatggttcaagagcacgacgagattgccaagaacaaggcccacggcgaggcgctgacctgggaggacctgcaccgcatgaggttcacatggcgcgtggccctggagacgctgcgaatgatccctcccatcttcggcagcttccggcgggcgctggaggacatcgagttcgacggctactgcatccccaaggggtggcaggtgttctgggcgtccagcgtgacgcacatggaccccagcatcttcacggacccggacaagttcgagccgtcccggttcgagagccaggcgccgccctactcgttcgtggcgttcggcggcgggcagaggctgtgcgcggggatcgagttcgccagggtggagacgctggtgaccatgcaccacctggtgagacgcttcaggtggaggctctgctgcggggacaaggacaacacgttcgtcagggaccccatgccgtcgccgctgaacggactgcccgtcgagctcgagcgcagagacatggctccaagcaagagcgcctgctcagtaccttgattccaactaaggccctgtttctttacctctaggttatataatctagcttaaataagttgagttaaacaaagaacaaagattattatgtggattatgtaacatagatgtctagattacaataatccataagcaggtcaatagatgcttatataatccataagggcctgttcgtttttgctggaacagaattaatttcaatt

SEQ ID NO: 50519 - DNA, 297 bp, Zea mays
  Clone ID: MRT4577_146068C.1
agccggccagggccggcggcgaccacttgtggcgatccatccctcacgcatgtcgtcggagaaggaggcgttgttcctcctgggcctcttctgcatcgtgcatggtgagaaggaatagtcaaaggggatagatgttatagtgtccgttattggggcgacaaggcactggatttcacggacataaaccgtcaatctccaacacacattctcataatccgcgaactcccctatggactatctgacctgtctaatgctgacgtagaagcagctagaaatacttgctgtatcccctccatg

SEQ ID NO: 50520 - DNA, 204 bp, Zea mays
  unsure (1)..(204): unsure at all n locations
  Clone ID: MRT4577_146069C.1
ggaattcccgggtcgacccacgcgntccgaaacacatacgaacacgcgtataaaattttaacggaagaagctaaaaaaaaccacaggggcggtaacgcatccaggttaagtaaccagggctgccgctttaaaggatccaaattaagtcagccatacttacgacgttagacctctgttatacgagcgcacctaaaattgaaataa

SEQ ID NO: 50521 - DNA, 843 bp, Zea mays
  unsure (1)..(843): unsure at all n locations
  Clone ID: MRT4577_14606C.1
gttctggcgttggcgttcctcccctttgttcggccccccttccgcctcccccctcgcccttccaaagccacaaaccaaaccctagaatcccacggtaccaggaaggaaccttccgatccccaaaacagagcgcggagaccggaacctacgcaggttgggcatgattcattgaactatgggtcgtctcaaggcaagggcgcgggaagcctctgaaagcaatcaaaagaatgaacatcgctccatatgcttacactctttttctgatctgtcacatgtttctgcagctacttttatgtatcttctgaaggactgctacttctatggaacccacaaagcaaccgcaaagttcaggatccttcagcagcaggttaaaagggcattaaataatgctcctcagccaggcccattcacatacattgtccaatgcatgtacattatacctttgttgggccaaagtcatgctgaagggttcagccatatgttgatatcttctctaaggcatttgaaatccgtggagtcagtacagaaggattttattgatgcaaagtgtcttgctgcacggcttgttctcgatatccttgcttctgttgtaccccatgaagaacgcatactggtaaagctccttgagacattcgatatcgagttgaaagatatggcccatgctttctgtggttcagagttgggtgatgaagatctagcggcagcaagagaacatcttaaacagcatgtacagtactttatgaaatcagaatcatatgtgagtgctgtggccctgatgacacgcttttccatccaatgctgtgatgagtcatttctcataanactgattgggagtaagcaata

SEQ ID NO: 50522 - DNA, 384 bp, Zea mays
  Clone ID: MRT4577_146070C.1
ctctcttgctcacttacttaaactttgattctctaaagcgtatcgcccttttttataatttatttaatattactttttgggggtattgtagtgtattgaccagaggaagggtaataatggagcaccaaaagttttactactacaagaaacttagccaatgtactcagggtgctgtttatgagaaaacaccggtcagaatctcagataatgatggggttatgccatggggatcgtgcaagcttcaagccctaatgccactgtcgtagcggctgccacccatagaataggcgtcgccattatacatgcctttcaaacccatcccaggagtcgaaaactaggctctataacttccatggctgttgaaactaggaagtgtgtttcttt

SEQ ID NO: 50523 - DNA, 119 bp, Zea mays
  Clone ID: MRT4577_146071C.1
gggcaacaaggaagcattgttggccaatcaaagcatcaacgaaagcgtagcaaacttgtcacatcacattatacgaatggttatttgttacctacacaatacatggataactcgggctt

SEQ ID NO: 50524 - DNA, 365 bp, Zea mays
  Clone ID: MRT4577_146072C.1
acgagaggtacagccggcgagcgagggaggggccactcggtgaagggcagctccctaactgcacaggtcgccacaccaccatgaccggaccctggcaaagaatgagccaccgctcgggaatgcccccgcgcgctgaggcatattacttgcctatgcctgcatacgcggcgtgccagcaccaaccgtcgatgatgttgccgtgggacatagcgagcattatgggacggaacgccagcggatggttcaggctgctggcgcaggccgatctcaacgaggagctgataacgccaaatgtggaggggaaactaaaagagccgcacaacctgtacatgctgctgctgaccgatgaggacaggatactgctg

SEQ ID NO: 50525 - DNA, 176 bp, Zea mays
  Clone ID: MRT4577_146073C.1
gggactcgtgggcggacgcatgcgtggttttgctgccgatgagctcatctgcgggggcgcgaaggctatcctcatgccgagcaacatgtatatcgattgcgtacgggcatacctgaccaggtgcagcatcctcatacgtgcggacgacgataagcaagcgtgtctcattgggttca

SEQ ID NO: 50526 - DNA, 1412 bp, Zea mays
  unsure (1)..(1412): unsure at all n locations
  Clone ID: MRT4577_146074C.1
ccggccgggttgtccatttccgtttatccctgagcgcgcagcacgggcttgcctgctagtcccacaagccgccggcatcggcgcacggggagcagaggcagagcagcgcttgccgcagcaatctggacgacgctccagcggcagacggcagcaggtccggccaccttccgcgcctcgccccggccagtggcgttcacgccttcggccttccgccatgaaggccgccgcggtcctctccgtcccgacgccgtcccccgtgacacttgtgtcagtggtggcgcggcgcgcgctggtgccggcggccctgcgcggcaacgcgcggcgctagtactccggcctgcccgtggtcgacgacgacggcaggtgcgttggcgtgatctccaacaaggacaaggccaaggcgcccaatgggatggagtcaactgtagctgaagtaatgacatctcctgcgataacgctgacactctacaagactgtcttggaagctgcagcgctgatgctcaaggagaaagttcacaggataccggttgtgaatgagcagcagcacgtgatcggaatcgtgactcgctccgacgtgttccaggctcttgaggccaccaacaaagcatgagagtgagtcagtgccagatgttaccccctttgtgtagtgatctcagcagagagtatagttatgctaccaatatgccgaagatggacagaaaaggctaggtatttatatactggaatcgctgcaatacaagacaaaatattggtgtaaatttatagagttactgaaactgattacctcgaattcggccgggatgacgaactgttcgtaactaaaaaaaaaaaaaaaaaatagtaaggaacggtaggcttgttctcgccagatgttaccccctttatttgtgtagtgatctcagcagagagtatagttatgctaccaatatggcgagaagaggacagaaaaagctaggtgtttatactggaatcgctgcaatacaagacaaataatggtgtaaatttatggagttactgaaacttatacgggctgattggttcgccggccgcgctaagccgggcgggtgcgagcctggccagccaggtaaccaaacatgtgattgcataaagtcaatgcatacgatggctcaggattaaatggtgcgggtaaccaatcacatggataaagaaggtatttatgaaggatgacgaactgttcgtcactacatgtaacccccaatagatagaatagattgtatgtcctttaggatttagacatgtacaagatacatcactatcggaattcggctctttgccgagtgtcaaatgttttatcgagtgttttttataaacaaaaaccccnnnaaaaaaaaaaaaaacccccaaaaaaacaaaacaccccaccccggaaaaaccaaaaaaaaaaagcggcc

SEQ ID NO: 50527 - DNA, 836 bp, Zea mays
  Clone ID: MRT4577_146075C.1
cattgggtacctcgaggccggccgggtatgccatcctctccgacttttcctcgccgctcgcaccccaagacgaacagtcggtccgggaaacgctcgaatccctcgccgcctcagccgaaatcgagggcgacgcagcagatcgacaagcctcggccagcgtcgacgacgagaggaacgccaacgtgagcgagttgagcagcgcgctcgaggggtcaagcctgagcgatcctcgcggcgaaaacgatgacatcgcgcccggcgcatccagatcgaggcctgccgggcagaggttttgggaagagagcgctgcgagtagcacgagcgaggaaggaggaggaggtaccgcttcgagggacaggccctcgccaaaaccgctcgcgatcgacccgttcgatttcgacgacacgatcgacggattcgacgaccctctcgccttcttggcctctgtctttcccgacatcgatgtcacgacccttgaatccaagatctcgaccgcacgcgagcaatcgtctcgatcggaaccgtttgcgacccaagacctcgagtctcttattgaagacctactctcgcaagaccttatcacctctctcatcgacgacgactcgactgccgctcaactcgcaaatcctcctcccgactttgaggccgaggcgcatatggtcctttcaaagggtcagaagcgtcgactcaagcaggcccaaaaatcgaagaactcgttctctctcacggcgtcttccggaagttcgtcaccggcacctcgaaacgtcgatccgttagtcgccgcggctcgaggcgtgtcaactctgctctctctacggctcaatcgaccacgaacg

SEQ ID NO: 50528 - DNA, 1287 bp, Zea mays
  Clone ID: MRT4577_146076C.1
ctggccgggatcttttttgcccgactcttttatatacgtgctggtttttttttttcccgcgcgcagcacgggcttgcctgctagtcccacaagccgccggcaccggcgcacggggagcagaggcagagcagcgctcgccgcagcaagcgtgccctgcacacaacagaccagccaacgctccagcggcagacgacggcagcaggtccggccaccttccgcgcctcgccccggccagtggcgttcacgccttccgccatgaaggccgccgcggtccactccgtcccgccgccgtccgccgtgacacttgtgtcagtggtggcgcggcgcgcgctggtgccggcggccctgcgcggcaacgcgcggcgtggcgcggcgctggtggcgtccgccgcgcccgatggccagatgaggaggagcccgggcccggcagtggcgaagttgaccgacgtgatgtcgcgccccgtgcaggtggccacgccggggcagcggctctcggaggtggacgacgccttcttcgccgcgcggcagtactccggcctgctgcccgtggtcgacgacgacggcaggtgcgttggcgtgatctccaacaaggacaaggccaaggcgcccaatgggatggagtcaactgtagctgaagtcatgacatctcctgcgataacgctgacactctacaagactgtcttggaagctgcagcgctgatgctcaaggagaaggttcacaggataccggttgtgaatgagcagcagcacgtgatcggaatcgtgactcgctccgacgtgttccaggctcttgaggccaccagcaaagcatgggagtgagtcagtgaggtacggtaggcttgttctcgccagatgttaccccctttatttgtgtagtgatctcagcagagagtatagttatgctaccaatatggcgagaagaggacagaaaaagctaggtgtttatactggaatcgctgcaatacaagacaaataatggtgtaaatttatggagttactgaaacttatacgggctgattggttcgccggccgcgctaagccgggcgggtgcgagcctggccagccaggtaaccaaacatgtgattgcataaagtcaatgcatacgatggctcaggattaaatggtgcgggtaaccaatcacatggataaagaaggtatttatgaaggatgacgaactgttcgtcactacatgtaacacacaatagatagaatagattgtatgtcctttaggatttagacatgtacaagatacatcactatcggaattcggctctttgccgagtgtca

SEQ ID NO: 50529 - DNA, 357 bp, Zea mays
  Clone ID: MRT4577_146077C.1
gggggttaaaacaaaggaaatattaagaccacccaccaagaaaggaaacacggaagcccacaaccggatcaacgggccacaagccagctaaatgaaaggaagataccaccacaaaggccataaggaaaagcaccaaaaccatgatagacacaccaagcccctcctccgaaggcttcaagagacaagagctggcccggggaccgggggccctgaatcctaagcacccaggtttgatttcccacgaggcaaaattgggcgaaactaacaggcgggaacacaggatcccggcagaggttaaaaaacacgggcgctcggtcagatgggcaggaccagatcctgggactggcataaccgaac

SEQ ID NO: 50530 - DNA, 821 bp, Zea mays
  Clone ID: MRT4577_146078C.1
ggttggcataatacggaaggcaactctgtccaatggctttgcatagcctgtgttgaccgaaaagggatgatggcggaggttacatcggctcttacagcttgtggaattaccatatggtcttgtgtggcagaagtcaataaaaggaggggaatgggtgtgatgctgttccattttgagggaagctatgagaacgtggtcagtgcgtgttcaagtgttgacatgattcttggtgttcttggttggtctgtgggatgtagctggtgtccattgggtgttcttgagtgctaatcggtaccaagagacgtgtaccacaatagttcaccactgtcttctccaagatggagttaattttggaagcactaagacatcggtggctcaaaattttgttggtcagatcatggttggtgactggtgagcgagtggaaccctttacttctctgtcaaatcagaaagtgggggtgatcgaagtagaaccagatgtcattctgaaagtgagtgtacatagcagagcgagtagggtactgttagtgcagggattgatttgattgtacagaaggccttacaaaagattgttaagggcagttcgttcttctccccactttgtggttcgcatatactagtttgcttaaatgtgcagctagaattttgacctggacactgatcccaaattttgcctgtttaattttctcactccgcctgtaaatgttattgtacagcttcaattttgccagtgaaaatttgaacaaagttaactggtaaaaaaaaaaaaaaaaaaaaaaaaaaaaaaaaaaaaaaaaaaaaaaaaaaaaaaaaagggggcg

SEQ ID NO: 50531 - DNA, 497 bp, Zea mays
  Clone ID: MRT4577_146079C.1
gcctgttgtaaaatcttgacgctaatttttctctctctagatttagccgtaggtacttctgattggtcctaaccaaagaaacagttaggatcaccactctgattgttcagcttttgtagtagaattacgcccagctcatcctttacactgtaaaaaaaaaaaaaagaaaactgaaaataactggaaacaaaaataaaaaaaagggggcccacaatctaataatcatgtacatacctgaaatcaatcaaaaacccatacctgggggcggccccctttttttaattttggtaccccggaatttaattccgacccgggacctggagggttcccatttttccttataagggggggaaaaaaacctgcgcgtaaaaaagggaaatgttttttcctgggaaaaatggtttttccctacaaattccacacaaattaaaagccggaaggataaaggggaaaccctggggggccaaacgggggggccacccccaattaatgggggg

SEQ ID NO: 50532 - DNA, 405 bp, Zea mays
  unsure (1)..(405): unsure at all n locations
  Clone ID: MRT4577_14607C.1
gcttcggcttgcttctggtctttttttttgttgtttctaaaaaaactcggatgcgcttaatgcccggtgtgatcagagcatctgatccgaactagcgcacctaggggaccatctgcccggggggggggggggcantggggaacgggaggcgccaagcgtggaacaagggtgcctggggtactggctgtggccgcagtgcgcatccagcgccggactggcgccccgtcaccccaggggggcaggatcgcctggtttgggggttgccttggctagggccgcgcccggtttgcgctcttcgccctccacggaggggggcggctggcccaccttccctcggcctgcggtgatctggggggacgggagccctgtgggcttttgtttctagtgcctgtccgacttcctcgg

SEQ ID NO: 50533 - DNA, 476 bp, Zea mays
  Clone ID: MRT4577_146080C.1
atgaacctaataaccccttaacaatcagaggagagagagagagagagagaggcaggaaagaaagttgaaaccaaaagaggtgttcaacaagaagccccccccacaatcgagggctgaatctcccccggttgaccttcctatacgtcatattaaattttgtggtgttcaatcggcgccaccactttgaaagggttgcattgcacctcatagttctttgtaacactagagatatgtaacgatttggctgaagaaaaaaaaaaaaaaaaaaaaaaaaaaaaaaaaaaaaaaaaaaaaaaaaaaaaaaaaaaaaaaaaaaaaaaaaaaaaaaaagggggggggggttttaaggaaaaagcgaaaggaaagtagtatgaaatggggaaactaaatacatttaatgtaaaaagaaaaaaaatattacacgaggtaaaaaaaataaaattgggaggtaaaaaaaatagaatagccgtaataaa

SEQ ID NO: 50534 - DNA, 521 bp, Zea mays
  Clone ID: MRT4577_146081C.1
ccaccccatataatttttttttcatcagagcattgaacaaccctaaggtatttcctggcaaacataagtcaggcaaatggaatttcatgggtcaaaatcatgaaaatttaacaccgggcatttttacagggggggcttttaattaataaaaaaaaattcccgtttccccaaaaacggtttcctttctgataaaacccaaaataaatttttttttgtccgacctaaacatttaaacgggggaataattggggaagtccttcctgggccccgtgggggagcaccttggccaacactggaatttcgtcctggaagagccgttcccactccggattcggggggatgcccctttcctggacctcaaaaaacccaagtgattagggcgtcccaaaaagcatggacccggggtggaccttttccttgagtccatcgaaaaggcagccccccggtttggtgtacagaaccagaatccgttttaaggaatccccggccgaatttgcggcccaaaaagcccgaaagggagg

SEQ ID NO: 50535 - DNA, 228 bp, Zea mays
  Clone ID: MRT4577_146082C.1
acatagagctagttcacacatacatccagttcacacatacattcagttcacacatacatccagttcacacatacattcaatttttcttcttcggcgtcaatttctttcctactgctctttttttgggccttgggggggtaaagggcccaacatgaccaactgaatctggggcgcctaacaatagccttgggggggttaagtgcccaacatcaactccctggaactcct

SEQ ID NO: 50536 - DNA, 410 bp, Zea mays
  Clone ID: MRT4577_146084C.1
ttcgtagatcgcgagcggccgtccttcgtctgcaccttactgggaggcctacttctccaacgactcactagctatgcacagactagtgggcacgaccgcctaagctagacctaaccccaggcaaatgccactcgaagacggaagctagggcagctagtattcacagcgaacgacggggagcgcaccatgatcatgtgcacggcttgagcttgcgagggcttcgacatggatcccgtacgagtcgcgcctggacagtgtgaacttggacatcactgagcgagaaggagcaaggagggatcgaagcaacggtcgagagcatgcccatgtccccatgaagcgcgacatcacgcccggcccatccgcagcccgatgacgatgattgccttccaggatacgcaggagtacatcag

SEQ ID NO: 50537 - DNA, 430 bp, Zea mays
  Clone ID: MRT4577_146085C.1
aaggactgccttacctctgactcgaccctctgagttatcacttctgcgatcataacaaagactaaccagccgcagcactagtcagcggaaacaacagggtggagatgcagactacgatctcatgggatgaaaatgcccctttctcttcgtgcctttgcgcctcagctgcgatcgtattctcatgcatgacggcggcgtacggcacagccaacagtggggttggcgtgagcgtccatgggtgtcatgcgcccagagctcgtcatgaagtccatcgtgcccgtggtcatggctggtgtgctcggtatctacggcctcatcatcgccgtcatcatcagcactgggatcaaccccaaggccaagccatactacctttttgacggctatgcccacctgtcgtatggccttgactgaggacttgctggtgttggtg

SEQ ID NO: 50538 - DNA, 369 bp, Zea mays
  Clone ID: MRT4577_146086C.1
gtgcatcctgaggatgctgcccatctggctgtgcacgatcgtgtactcggtggtgttcacccagatggcgtcgctgttcgtggagcagggcgccaccatggacaccaacatcgggtcgttccacttccccgccgcgagcatgtcgctgttcgacgtcctcagcgtgctggcgttcatcgccatctaccggcgggtgctggtgcccgtcatggcgcggctgtcaggcaacccgcagggcctgaccgagctgcagcgcatgggcgtcgggctcgtgatcggcatggcggcgatggtggtggcgggcgtggtggaggtggagcggctgaagcgcgtggcggccccggaccagccgagctccctgagcgtgct

SEQ ID NO: 50539 - DNA, 596 bp, Zea mays
  Clone ID: MRT4577_146087C.1
gttctttatttctttttggaaccatgaaaaaatcatgccacgggctgaaggtggcttatgatttggatagctggaggactctacctggccaccagaaatctcccctgggggtaagcgcacagctgccagagcttgctgtacatggtggtggaaggtccagcactaacacggcacaactgcgaaaagtggatggttagactttaaaaaggacacttaaaaaactgcggctgcagaaagaatggaatctagtgtgaactgcatggtatctgcgggggaacaggcacactggttgatgatcagatccttacaggatggaccgacgccatgttcatttgcaagtcttgaaccgcgtctaaatggctaagcccgctgatcagctgaaaagaaaccacccagagttatgaccttgagcttcccatctacctcaaatacgacttcctatggtattctttgaacagtattgtaatatttgaggaaaagtctgggctcagagcggggtttagctgtcaacattcttgagaaagctcacaaagcattgaataactatgtttaggaattgcacgtccttatcccttgtgcaccacgccaacaactga

SEQ ID NO: 50540 - DNA, 456 bp, Zea mays
  unsure (1)..(456): unsure at all n locations
  Clone ID: MRT4577_146088C.1
gcgcccttttttttttttttttttttttttgagtatccaagctttttttttcgngcatgcgacgttatantttttggagggtttcaaaaaaaaaggggggcgtcgttactcaaaacaacggcgggtctgacatacctttttctaaccgagaggcaatttacaaaacctcctggcttcatcccaaagttttcttgtttcacaagccccagtcctccttttgcattttaaaaaacttaaccaaaagttttgggaaactcacattcttttaaaatttccacccttttcaccaagatgttttgctttttttcccccccataacttaagacgattgtgggggacctttttctaggtttaaatccccccccattttttttataaattccatatcaccttttgtttatagggtgtgaatcccccagctttttgtatccctattttgaacttcaaaaatttttt

SEQ ID NO: 50541 - DNA, 440 bp, Zea mays
  Clone ID: MRT4577_146089C.1
gggctgatttagtgcttggaaagaaacagtccctaagaagtaaaacgcgtcggaagacactcatgtcggcgtctacaccgcaacagatatagtcgtcgtctacgagaaaacaccggtatcgaccgaggtaggcaatacagaattactagaatcaaccgtagacacggacgtttagacagtaaaagtaaaggaagaagtaccgagcagaaaagacacttccgacaaagcagaaagacggacgctcgtgcgcgaagaagagagtcggtccgaagaccacaattgggacgataataggcacaatctcagttgaggcgtttattcgaactcgaagtgcgtagaaaaagtctgcacttccgccaataagaccttagtatccgccgaaatctcagcggtaaagattaaggtacgggaggagaaattgcgctcgctccccacgcacg

SEQ ID NO: 50542 - DNA, 288 bp, Zea mays
  unsure (1)..(288): unsure at all n locations
  Clone ID: MRT4577_14608C.1
ctctttctcttcatccatagcatacgttgaatcatgtcgggaagtcgggataatatcgatgaattgctggattagggtattatacatacgttatatgtcaaactctctcacatctctacttatcgatcttcattgacttactcctactnntgtattttatagatgggtattagtattaaaatatactagctacgtactgtgtcagtgtctttttttttacaatagcatatccgcatgtccgatagttattgtatatcctatcttggcaatatagctcagagcctcatc

SEQ ID NO: 50543 - DNA, 1858 bp, Zea mays
  Clone ID: MRT4577_146090C.1
cagtcgtgagtttcgcgatggcacttctcatcaccaccttgtatgcagtttccctagcaacagtgatagtcctcctcctttggtttcacaagcccgcagtcgtggggaaagccactgccgttcccggcgacgagaagccacggcgacgactgccgcctgggccatggacccttccggtcatcggcagcatccaccacgtggtgcgcggcctaggacaccgcaccatgatggagctgtcccgtcggcacggccccctcatgttcctccgccttggcgaggtcccgacgctggtggtgtccagcgccgaggcagcggagctggtgatgaagacccacgacctcgccttctgctcccgcccgaccaccagcgtcaccatcgacatcgtcggctgcaagggcaaaggggctcggcttcgccccctacggcgaccggtggcgtcagatgaagaagatcaccgtcgtggagcttctcagcgccacgcaggtcaagcgcatcgagtccatcagagcccacgaggtgggacgcctcctccagtccgtcgccgcccgccgccgcccgtggagccgtcaacgtcagcgccgaggtgaaggcgctcgcgccggacctcgtggcgagggccatgttcggtggcaactgcgccgagaaggccgacttcatctgccggtacaacgaggtcagccagctggtgtcgggcttcttcctggtggacctgttcccgtcgtcgaggctggtacggtggctgagcatcggcgagcgccgtctcctgaggagctacggcggtatccagcgcatcatcgcgtccatcatcgagagccgcaaagctgccagcaccagcgacgatggggacaactgcagcttgcacgaccatcctgcagaggatcttctcggcgtgctgctcaggctgcagaaggagggctcgctagctttccctctcacctccgagattataggcgccgtcatgtttgacatattcggaggtgccaccacaaccctagggtccacgatggagtgggctatgtcagagctaataaagaaatcagagacgatgagaaagacacaagaggacattcgtcgcgtgctaggtgggtcacgacgaggtgtcatcacgaacactgacctcgttggcctcacctacctaccaatggttatcaaggaggttcttcggctgcatcctccaaaccctctgttggtcccgcgtgagtcgagagaggattgccaagtcatgggctaccacattcccaaaggcaccaaggtgctcgtgaacgcatttgcgatctccagggattcaaggtactggaacaaccctgaagattttagcccagagaggtttcagaataacaatgtcgactacaaagggaccgattttgagttcacccccttcggtgctggtcgtcgacgctgccctgcaatcatgtttgccacttctactctagagattgcattggcaaaccttctctaccacttcgactgggctcttccggatggagtgagcccaaagatggtggaaatgtctgagcaatacgggatgggtgtcaccaaaaagttagacctgcatttgagagccatcccatatgtatactctactatggcataggtatggggggtggttaaagctacctgcaccttaacttgaggtcctttgatgatcgatcattgcatcttcctatttctgaataagggtgaacttttctatgcccatcttgtaggccactagtttgttttacatagagcaacttcaggagcttcctaaaaaaaaaaaaaaaattgttttttgccaaaaagagaaaaagtacccttctaagggtttgaaaaacaactcccttaaaagtaagaaattggatgcaaccttctatggtgg

SEQ ID NO: 50544 - DNA, 450 bp, Zea mays
  Clone ID: MRT4577_146091C.1
aagcccaaggggagggatttttaaaagctgttttggtgtttaatttgaaatttttatattgccccgggtcttctggggtttaaaaaatcccaacacattagagggggtgaatttcccgaaaggttcccaaaagaaattttttgggcctatccaagggttgaatgaccctaaggttgggccaattttcaaattttttgtggctttggcctggttaaaaaagaaatgggggggtctttgggggggattttgtggcaaatttttttaaatgggttttttccacctggagaaaccccttttaaaattgtgggggggcctaaaaaagttatgggggggaaactttccaaaataccaaagtggggtattttttttaaatgggggggttgggtccttgtggcctattaaaactggcctttaataaagggggggggtgagtttttttcctttttccca

SEQ ID NO: 50545 - DNA, 166 bp, Zea mays
  Clone ID: MRT4577_146092C.1
cctcacataattaccttctcctaccttactagcaatccttaacccttcaagactccaccaccgatcttttctactactgctccttccacatgctctcattcgacgagctcaccctgcaacttgatacctcccatctacagttcctgatggagatcgccaaccccct

SEQ ID NO: 50546 - DNA, 1000 bp, Zea mays
  Clone ID: MRT4577_146093C.1
ggtccctgagccgccggacgagcgggccgacccagcagccaacagtctctctcgagtgatccccctgtagtccccggccccgtctttccgccgcctcctgcaaccgcttcacgtgcccctcgcaggtcccctttccgaccccaaatggagccgaagaagtcctccgcccagcgccagccccacgccatggagcccaacaagtcctctctatgcggcgccaccgctcctgccgccaccgccgaagccgagtccccgttgtgcagcttgttctacccgccggcgcggcgccgaccgcggcaaatgggaaagattcggacttgtacagcattctttacaaagggcagagcgggagcgcacaagctggcgtcacagatggtaaaccgcaatgggctccttcttccagaagtcgtagccgcgaatgcaaaggatggtaaacattcaccgccttatgattcagttgatacgtcgtgttttggatcgtctgtggattatggtggtcgagattatttctacggcagctctacacccaagaaagtgacagaatcctccactgactacaaagggaacaagaaagatccagccgcagattctcatggcgactggtggcaaggctcattttattactaagagaacccggtggcctctccttggacaacaaggaacagaaggagatcctattgacagttcttctggaacagaaatgggaaatagtattgtctgtgtcatagtggacccgctttcgttcagtggtggtgccattatttagaagcatcatctcagatgtgcaagcaatgaagctgtaggacagtatgaattaggtcgcataggggtccttgtccattgtacgccagtaatatgaaccataaaatgtctaattactagtcaaatgtctgtacaattggatcgtcactccaaagcaaaaaaaaaagtgctggagaagcggcggtggcttcacattgtacacttttatcggatgggatttgttggaagtttggagact

SEQ ID NO: 50547 - DNA, 188 bp, Zea mays
  Clone ID: MRT4577_146095C.1
gcatgcgcgggcttggagcttgtaagcggtcgccctttctttttttttttttttttctttttttttttttcggccaaacgggtgaatttaaatgtaaaggggtacccctgtgagcttaagcccgaaactaacagaaattgttttgttcaccttgcaaaacctaaaacaaaatatgcctatccgcagtt

SEQ ID NO: 50548 - DNA, 324 bp, Zea mays
  unsure (1)..(324): unsure at all n locations
  Clone ID: MRT4577_146096C.1
acgatgcgtccacgcatccgncccatgcatcccagaagcttccagtgttattacattgcgctgaagctgctgatctgtcctgtgttcgcctgcaggacaaacacatagtgcctgtgcatgaagagctcgtgatttaaagggaacacgttctatcctacttcataaagacaatcaacaagctgcatggttacctctataacaacgaagggaaaaaaatgcaaacaaccttacctcgactgaaagagattgaaatgcccgctcttagcacaaacatcgatgacgaccttgcgaaagcactcaaggaagtagacgaacacagaatag

SEQ ID NO: 50549 - DNA, 262 bp, Zea mays
  Clone ID: MRT4577_146097C.1
attcggctcgagctaggacgtttagatcacttctatctttttgggctgtggctgttgtgtcctgagagcctatggctgcggctctacagtggggtgatcctcattgccagtctacatgtgtgcgaaacacaggacaagatgcggagcttatcgaaactcgcctgaatttgcaacagatcacttgctgtgaggtgcagaggcactgccaaggatctacccgttcatgaggttatatatgcaggccatgaagttggacatgctc

SEQ ID NO: 50550 - DNA, 558 bp, Zea mays
  Clone ID: MRT4577_146098C.1
ttgggaccctcgaggccggccggaatcacaacgcacacttctcctcgtatttcgtctcatcccccttcatcacccgaaccccacactcatccctgatttatggcgcccaaggcccaaaacaatgccgcggacataatgcgacagatagatgaaccgcgaacgagattgatcccgcccgaaagaacctaacgatatcaaagtgccccgctgactgatacgctgccaaagaagcctgataggccaaaagctgctgaatctgcctaactaggagcgtagcccacctactagatctacgtctacttggtgatgaagcgacagctcccggacattggcgtctcctcctaggtcctggcgatcatgaactccttcattacacgaatccatcgagatgatcgatgctgaatgcgtcaagctctccacactataacaagaggtctaacatctcctcgtcgtgatatccagacctccgtgcgtgctcgtccttcccggttatgtcgcctctactccattctccgaagttgccttgggcataaccaactgctcctcgtcgtattgctg

SEQ ID NO: 50551 - DNA, 434 bp, Zea mays
  Clone ID: MRT4577_146099C.1
cggacgcgtggggattagtgctgcaaatgatatctcttaacgtagtgcattagtgtcagggtccacactacttagagtttgtagataaactacatgttgtatctcggagtcaatgaattgatgggaaggatcttccctgacaaagggaacttctggtgaaggcggtagagactagagaatcttaaccgatatgcttacatctgggctcgaaaatcaatgaaagtgtgaactttgtgtgcctgctgttaattaggatagctctatgttggttgtctgggttctcacatcctatgataaccagttgtccatcagcccctcacaaacgtgcagctgtgcaagtatattaatatcgtccttttctggcgctcatatatgcccaagtaattcataaatagtacacacatatctcttacagattgtttagtttttcattg

SEQ ID NO: 50552 - DNA, 243 bp, Zea mays
  Clone ID: MRT4577_14609C.1
aaaaaaaaaaaaaaaaaaaaaaaaaaataaaaaaaaaaaaaaaaaaaaaaaaaaaaaagagaaaaaaaaaaaaaaaaatataaaaaaaaaaaaaaaaaaaaaataggaaatacggtgggatggttttaaggttcctgctgataaaattcggtgcactggctttagaattctattatggtgactggaaaaactgtggatttgcctaaattattgggcttggaaaattgttaaatttttgcagtt

SEQ ID NO: 50553 - DNA, 575 bp, Zea mays
  Clone ID: MRT4577_1460C.1
acaagcaaatgaaattgtcattaggggtaatccaaacagtacaacatacggtccaggttattgaaacggggaattacacggacggtttctccgccggggaattgaaatggcagtacaacaaacatgtaaaaagatacaacaacgcaacaataaggatcgaacacggcagtaaacaaactggacgaacgccccttcttcatgcgttttttttttcgacgacgagcctgctagctgctgtgtcaacggaacctggccaggtccagggtgacctcgtcctccgacggcgtcaggaactccctggaggccatctggacgacgtcgacgtcgtccgccggaacggcgacgacgttgctcgggccggcacctgccgcgtcggcgccaccgccgtaggcggcgctgccatgggcggcgtacggcgcctgctgccacatgacgctgttgtcgatgaaggggtacgtgagcagctggttggcggtggcgtaggaagcctgctggtgctggtagtgatcgtgctccatcatctgcggcacaggcgccgccattccccccatcggagccataagccgcatcttcgc

SEQ ID NO: 50554 - DNA, 306 bp, Zea mays
  Clone ID: MRT4577_146100C.1
tggacgaccgcggtcatagcccatacacccctcttgatggcggggactgctacagtgaacaaataaaccttataggagcaagcgctgcatgttctatcatgacaaagcaggctcctgccagggagcaccgaaatgtggcgcgccttgaaacgccagtcactttacagaccgtattactcatgtacaacccctatatagaagttgataatgaaaactccatgctgaaacactgatagctcttttttgctgaaccttcgaggactactccatgaccacgaacgcactaaacttgccagtgacacgccg

SEQ ID NO: 50555 - DNA, 324 bp, Zea mays
  Clone ID: MRT4577_146101C.1
ggtgcactatgagagcttgacgcgatgccgcgcgtagtggattcggtgaggattcactcgcgggagttattgacccggctgagaccgggctaagcgtgaacgcctggccggggagcaggagcgctattacctgcgccgccgactccgtgtcacctccgcgcgcgtccgctctgcactgagcgggggatcagtctcgctagacctagtcgcgcgctggtggctgaccgtcgcgtggcttctcgctgcggctccgactcgctcgtttccgacacacgtatgtctcggccactcaacagcggtgtcggctcatgccagttgcactgt

SEQ ID NO: 50556 - DNA, 502 bp, Zea mays
  Clone ID: MRT4577_146102C.1
ataggcgctgaaatgcgaccgttggctcgactcaagttttagattttttgaggtcgaagcataaaatccgggccccgggattattactcagaatgcactgctacctgctataagttaaacctgaacaagcggagcacataggtgatgaccgtacgaacgactcatagggagcgagggatccatgctgcaaggcctggctgtggagcattgaccgtcactccttcaaggagattacggacaggatcgcatttgaggtgtagcaggttgctagaccttgatctgcgccacttagacccgggcagtgtgtacatatctccaagagaactaacagaagtccatcagtttattctgtgtgcgagtgagccaggcccattgaagcaaacaccggacgggatttccacgctctcgtgtatcaaatactgaacgtgcaggagctctgtccggattgcattcacagagaaaagggttccataaaggaccactgatatggatgcccagaaac

SEQ ID NO: 50557 - DNA, 357 bp, Zea mays
  Clone ID: MRT4577_146103C.1
gggggcaaacacaaatttgatcatgggggggggtctggtacaaccccaatagggaaagggaggatacatttttttgggtcaaaaattcctcctggtgggacaaagccttgaaattttaactgggggaattagaagcctccaaaagggcaataaagttggaattattttttggggagatttttttaaaaaaaaaaattttttaaaaaaaaaaactgaaactttttatggaacatagggttactagctaaaaagccggccgtttccaagcttttggggattttagggcccgcccactggtggctagcacgtgacttggcccatggataaaaagggaccttttgaggaggggggggggtt

SEQ ID NO: 50558 - DNA, 273 bp, Zea mays
  Clone ID: MRT4577_146104C.1
tcctgcattctacttcatacctcttctatattgttacctaaattcatttatcttccttcttttacaacatctttacttttataacccttacattacccaacttaatcttctttctttacattttccttttatctgtttttataatatctaataatttcgtactgatctccctttctaacattttctcatactttaatttccatattaactctctctctttatcttttcaattaatccttatctttttttttctatattcatacatttattttc

SEQ ID NO: 50559 - DNA, 688 bp, Zea mays
  Clone ID: MRT4577_146105C.1
ccggccgggacgatggcagcagcactgaaagatgcattcgtaaggaagcctgtgctggcaacgatccgcctcgtcctaccagccggcgcagcccgcacgggaccggcctccagtgagcccagcgctgggcccctaccgggtgaacctgatggcgctctgcaaggagatcaacgccaggacgcagaggtacaagcccgacaccccgatacgggtcaccgtgaccgtctacagggacagcaccttccagctcgtggtgaagccgccctcggtgtcgtggctcctcaagaaggccgccgggatccagaccgccagccggttccccggccacgtcaccgccgcgtccctcaccgtccgccacgtgtacgagatcgcgaggctgaagctgggtgacgacccctcctgcaagtacgcgtcgcttggggccatgtgcaagtccgtcgtcgccacggcccgctccatggggatcgccatcgtcagagatctgtgctcgatcgagcagcgcgtttgtctagttggtgctgtagcggctaatagtgttagtgtctcttctttaaaaaaaccagccatggcaggggcaggcgcggtggccttcatagccacagtctggcggcgctgggaaacaattgtttaagatatggtatatactgcaacgtcaaatcgtcgttcaaaaaaaaaaaaaaaagcggcc

SEQ ID NO: 50560 - DNA, 383 bp, Zea mays
  Clone ID: MRT4577_146106C.1
agctgccaacaaaaacctaggtcattcttatctcgtctggttacatcagcgggagcaaccaatacgaacaacagggtaccaacacctaatccaaaggtggaacggacactaacacagggacagacgcgaacgggcacgcgacactatggatggataagataactcggccatagccagaatgggcccacacattattcgctccagccttcgccgagaatgatgacatgagccgccaacggcagatctgtcaacgagcaacggcaacgaaacggactacctacagaagaaggttgttatcagaaaaacgatggcaggtgtgactatacattaaccatcgttatatggaaagtacgaagacctgccatggttatgaagagctgaaa

SEQ ID NO: 50561 - DNA, 1168 bp, Zea mays
  Clone ID: MRT4577_146107C.1
cgtcatgttcgagtcgaccggcgcgcgcctccccgcctgcagcctggctgctgcactgctgcctatatattgtctccgcacctggcggtgctgcgacacgcatccgaccgacaccgtcgacgacgcttgcgatcgagcgttccggtcgagagccagaggggggatatattacttagagagagagaggctagtgtctgcgtgtggtggcgcgcggtcggcggcggccatggcggcgtggaaggacggctacttggacatggtgctcatcccgctcgccgtcctcttccccgccgtgtaccacctctggctgtaccgcgccgtccgccgcagcccgctcagctccaccgtcggcatcagcgccgccgcgcgccgcatctgggtcttctccatgatgaagaacaacgagaagcaggcgatcatcgtagtgcagtcgatcaggaacgtgctaatggcctccacgctggtgggcacgacgtcgatcctcttctgcacgggcgtggcggccgtgctgagcagcacctacgccgtgaagaagccgctcagcgacgccgtcttcggcgcgcacggcgcgcacatgatggcgctcaagtacctgctcatcctcgccgtcttcctcctcgccttcctctgccacagcctggccatctgcacgctcaacacggcctccttcctggtcaacgcgctctcgccgtcgccgcacctgcacctccccggcgtcacggccgaatacgtcgccgacgtcatggagaggggcttcctgctcagcctcgccggcaaccggctcttcttcgccggcgcgcccctcctgctctggatctccgggcccgtgttcccctgcgtatgctccatggccatgatctctgtactctacaacatggacgtggtcgatgacgccgacgatggccggagcagcagcggcggtggagccaatgccgccgtcgtcatggatggcgacagtgacgatcagagcatggaagtcgtctgatgatgaactgatgacgggacaaatgcagaaacgaattggaaaaaaaaaacaagaggcatcggcatggaatatgctgcgctttacatacaataactagtttgtgctcctgcaactgactagtgggttgggtcggtgaatttttttttatcaacccgtgtaaggaaatatatatcgcattttttt

SEQ ID NO: 50562 - DNA, 561 bp, Zea mays
  unsure (1)..(561): unsure at all n locations
  Clone ID: MRT4577_146108C.1
aaaaaaaaaaaaaagggggggaacctatttaaacccggcgaccataggcccaccggaaaaccgaggaagcggggccaaaaaccacccaagggttaccacagccaacaaatttcccaaacccctaaacccaaacccccctaaaagggaggggacaaccccttccggaccccggaaaaatgggggtttttttgggtaacccgaaaaaaaacccctggcggaaccccccaccctttggcctaaggggcccgggcggaaaccccctttttttttgggaaaatttaatcgccccccccctcatcccgaaaaaggggggactgaacaaaaacaaaaacaactcgggccccccccctttttccccccccgccgaacatgggaaagccaaaaaaacccaactggcggcgggcgccnccnccgcccaaaaagaactaaaaccctcggccccccggggggggcgccccgggggaaaccttcccccccccgaggaaaacactcggccccgaacccgaagagggggcctggggtctccccgcggagacctccccggtgggggggcccggccaa

SEQ ID NO: 50563 - DNA, 975 bp, Zea mays
  Clone ID: MRT4577_146109C.1
ccctactaagggaacaaagcgggctcacggggccggccgggagattgggaccctcggggccggccggccacacattcaagaacctcctcgcctcctccattgaccaacaattaagcctccccgaccgccacatctattaggtgcagccatgggtgcctgtgcaacgaagcctaagacgcttgaggggaaagccccagctgaggccaccatctccacacccaaggttgcacctgagaccactaccatccacattgaggttgcggcaaaacatgcagtagttgagaaggtggaggaggacaaggaggaggcactaacagtggcggcgaaacaagagccagcagccaccattgagcctcagcagattgctagtgaggtgaccacttcggaagtggcggtcgtcgttgtcgagcctgagaacaaagaggaggaggaagttgtggagaagaccgtcatcgagaaggagaagccatcagcagtccatgcagaggaaaatattgccaccaacaaggtggcagccgagcccacgacagaattgaagaaagacaccgaggaggagatatagatggagaaggagaagccatcgctaagctaattgactgcatgtcaattggctgatgcctgatgatcaatgtgcaagaaagagatcgaccactaattggcatacatgtttaagtcgggagagagactcggtcaccttgtaaacaaaacaaacctttgatgtctcccgttttccctccatggggttctgataatacaacatcctggggcttattgaatgaaaaaaaaaaaaaaaaaaaaaaaaaaaaaaaaaaaaataaaaaactaaaaaataactaataaaaataaaaaaaaaaaaaaaaaaaaaaaaaaaaaggggcggcccttttaaaggttccaactttactacccccttcttgcaacttaatacctcttttttggggtcccctaaattcaattccatgcccgtctttttaa

SEQ ID NO: 50564 - DNA, 397 bp, Zea mays
  Clone ID: MRT4577_14610C.1
tctctccatctggcctttgtgactgcttttcattttctttctgactgtaatggctgcaacctaagggccggttcaactcccttgaccgagagtgtcaaatccggagagcttggacaagatttgagatcttctaggatggatctcgccaccagcttctaatcacatgtatccgacaacctttccaccatgcaccccttaggaggagttgggcaagtacatcattctctattttcaggttgcggtgggcgtaaactttactctttcctatttatttcatcggatctttgactactatggcctctaggttgtgcatatcacgtccaacattatgcttgccctattgaccttacaaattcgtgtgaagccttcatcaatgtgtggccatgtgctagatctc

SEQ ID NO: 50565 - DNA, 434 bp, Zea mays
  Clone ID: MRT4577_146110C.1
gcacaaagacccgccggctgattctagactttttttttgacaaaatcatcagcgacccaatcttagattattcggccctctagaagaaaacaaccgataaaaaccggggaatagagaccccttttttcacattatatagtctaaaagaagtctgcaagaacgaaatagtaactttagtaagcgttgacagggaaatgttttgtccacaccttatttgcaggtgggacaacagatgcaacactggtcctgtaaaagttttgaagcctggaaaatattttgagagctcacagggttgttgtcccaccttctggcggcggaggcagggcccacttccggccgggccccctttatggggccggcttcttcggcggcggcgttaccggcgatggggaaacccttcgccttcaccggattcggccaccgccacccacggg

SEQ ID NO: 50566 - DNA, 406 bp, Zea mays
  Clone ID: MRT4577_146111C.1
gttttgtgctttagggcttgttcggttattcctatcccatatggattggatgggattggaaaaaattatgaaagattttgacttgtttaggattgaaacccacccaatccacatagattgagagcaaaacgaacatgtccttagttggaaccaaactgaaatcagctcacgacattctgatacctgagttatatttcagctacagtttgatcaccatctatgccttagctattcatgccagagatgaccactcctgtattttttttttttttgttcctgcgtgccaaaacacttcagcgcctgcatgttttccacacaggaattcactgaatacacaaatctggacgagtgcatttcatatctatgtgattacatggtgaaaaatgggccttttgatggcctgctc

SEQ ID NO: 50567 - DNA, 843 bp, Zea mays
  unsure (1)..(843): unsure at all n locations
  Clone ID: MRT4577_146112C.1
ttgggaccctccgagccggccgccacccngttgggcggcggcatgcaactggagccagggaagtcttgggtgcttcaagtgcctggtaacacccaaagtggcctcgtgtgggcgcgcacgggctgttcattcgacggccacggcaacatgtcctgtgagacgggtgactgcggcggcgtgctggcatgcgcgagcagcggccagccgcccttcacgcgtgcagaattcagcctgggtggcctaaacaacacggatttcttcgacatgaacctcatcggtggcttcaatgtgcccatggacttcctgccggtgccatccaatggatcgtcagggtgcagcagggggcctcgctgcccagccgacatcacgtcgcagtgccccggtgagctcaaggtgccagggggttgccgcggcgcctgccagcactgcaacggcagcacggtaaacagtaacacggtgttctatgtgcggatgtgccccgatgcctacagctactcgctggatcaagggcccatcatgtatgtgtgtccgtcaggaacagactaccagatcattttctgccccccagtcgaccttgtgtcattgtctccccctccaattacaccattgtctccccctccaacaccaacttcacctactgcgaatggaacaagcagcatcacatcctcatcaaaatccaagaaccgaagcttatttggttttgttctaggtggttctttagctggcttcatttttatcgcatcattggcccttttctttatcttgcatagacgacgattgcagcgacgccaagagatgcaggaaagagaggaagcagagttttgggaggctaccagggatgcc

SEQ ID NO: 50568 - DNA, 582 bp, Zea mays
  Clone ID: MRT4577_146113C.1
ggtggcgtgcatgacggtaccgtgatcgtgctctggaagtggtgcaagggcgacaaccagagctggaagatcctgccttggtgaacgagacgacagatactgccgcgtgccacgctgaaagcccgtacgctgggcgcgtgttatgcaagacggagaggaggactacagacctatcggtgcgcatcgggactgtgtacttgtggctcaccaacacagggaaccagtgccaggattgggttaaagccatgctccacatgatcgcgctacgaaacgaggaggactaactgaacatagcgctctgcaacaaggctactgtctaaggactcaatcactatatgttatatgtgcactctgactagattatgcactacatcccatactatcagtactagtgcatgctctggacctatagccgtaacataaaaaacaagttccgctgcctccgcattgtcaagaacatctacttcaagtgttacagctttcactgtgacaaggctcattgcagcttgcattactagtcgtcatatcgtgcttactgtgtgaaatcgctatcctctcacaattctacacaatatacgatcc

SEQ ID NO: 50569 - DNA, 257 bp, Zea mays
  unsure (1)..(257): unsure at all n locations
  Clone ID: MRT4577_146114C.1
gcgggatcttgtcttgatcctctggtccgtggccatggcgtcgtccatgctctccgctaccaccgtgccattccagcaggggggnggcctgtccgagccgtccggtttcttcacaacagtggcgacccctcatggggagccgccgcgctccggccttcttcgtttcgtcggcctccctccgcgccgctccggcgcctaccgccgtggcgctgcttccggccaaggtgggcatcatgggccctagcgccatcagcaag

SEQ ID NO: 50570 - DNA, 312 bp, Zea mays
  Clone ID: MRT4577_146115C.1
gtccctcaacgcgctgcgcacgctggacatctcgggtaatgccgtcaccggcgacctgccgatcggtatcagcaggatgtttaaccttcgggagcttaacctgcgaggcaaccgtctcactggtagcctcccggacgacattggggactgcccgctgctcaggtcagtggatcttgggtccaactcgctgtccggcaacttacctgagtccctgaggaggctctccacctgcacataccttgatttgagctcaaatgagttcactgggagtgtcccgacatggtttggagaaatgacaagcctggaaatgct

SEQ ID NO: 50571 - DNA, 571 bp, Zea mays
  Clone ID: MRT4577_146116C.1
gtgcggcgctcaggcggcgggctgatcacctaaccgaagaacacacaatcctacagaagacctcaaaaaaccccaatatatcctcatacactactgacctcgctgtgttgtatctccactcatgaccgtggctctttccacccagcttgttcttctgatacgatggggcttgaccgatccatggacacctacttctgatccgtgaacgaggaggagacgaaccacaagggtgggtggccggagtacaacaactccggtgccacgatgggcgttccttcggcggatgcacgaccgcggacgaccctagacggcgatcggaggcgtcgcctggggtgccacctcgtcatgaagcctgcagaacgtcgtcgacaacgatgtattcacgattccggaggacttcttcctcaccctgctctgccacttgatcatcgagtcctccctgcgcctcttcgaatgctgcaaggaaatcaacgacaggaacggcgacgaatcataaacacccacattgcggaatcagctgtctgcttcgatcagtgtcacatccactgtagcttgctgtgctcaagcacca

SEQ ID NO: 50572 - DNA, 350 bp, Zea mays
  Clone ID: MRT4577_146117C.1
tgaattcaggcaccgagggctatcttgaatgccagaacactttcctaccgctcaacagaactccactcgctcgtctcgctctccctgatatgtgtcgggaccgaagcaccggccgagcactaccgtagacaatcggccttctttgcctgattccggtgcctgctctgtctggtgcgggtgaacgcgagaaacgggagagatcgggaccgggtcaggcgctcgagctcgggaatgacggcgtttcacacataggctccgggcatccagacccgtgtactaagaggggctaagggccgcctaaaatgctagcagaggcgatgtattatggatgaagctccccttggctgcaa

SEQ ID NO: 50573 - DNA, 300 bp, Zea mays
  unsure (1)..(300): unsure at all n locations
  Clone ID: MRT4577_146118C.1
cgtgggnaaaaaaaaaaaaaaaggggggaaagaggggcaaaaaaaaaataaaagatggggggtcactctacatacccaagcttacataccccttctttcgactcactaaattttatataactgcacctaaattcacaacactggccctggtaaaacaacgtcgtaacccaaaaggggcgcgggggaccaaatttaatttcctccaactacattcctctttaacaagctcgcaccatacccaatagcccacaaccgatcacccttaataacaaatgcgacgccccatttaccaatgcaaca

SEQ ID NO: 50574 - DNA, 383 bp, Zea mays
  Clone ID: MRT4577_146119C.1
cccagcgtccgcccacgcgtccgcccacgctgtccgcggaacgctgtggtgcgtgatcgcgttgcgctggacagctgtgcggtctgatcgcggtgtgttaagattgcaggaattataaggtaccgtaagacactgtaggtcgttttatcttcgatggaatatcatgctaggaatattattctaatgaatacagaccgtggaagcatgtaaacgtcgtattacaggtttaacggataatataaaacattttgggcaataaaaacatacaggaggctgttggtgagattgacgagtacggtatatttggtgggaaggaaatggagaagaggaggacacttgatgactacagcatgtacaaggagagaaaactccacttggaactg

SEQ ID NO: 50575 - DNA, 588 bp, Zea mays
  unsure (1)..(588): unsure at all n locations
  Clone ID: MRT4577_14611C.1
cgaagcccaaaattttgatttcagaaaagttggattatttctcttaagaacggagacatgaatcaacgtacagaactggactcagagccccgcaaaagaattttggctggtgtcagcgaaagacaaccaaccacttgacaacacaactgagattcttattcgtcggcatcctcgtcgtggaagcgcaggtgcctcccctccggcaccagcaggcccctgagcatcaatgcgcgaagctccgccgtcgcctcagctgcatccgcctcctccacccgctcgatctcgtcgtcactgttgtagatgaacctggtgtgcttcccctcgaactgcggcagcacnnnnnnnnnnnnnnnnnnnnnnnnnnnnnnnntcatcctgctcatctcctcgcacagatcatcgtagcagtcgtcatcgctgtcttcnnnnnnnnnnnnnnnnnnnnnnnnnnnnnnngtgtactctgctgccagctcctccacgcccannnnnnnnnnnnnnnnnnnnnnagannnnncatggacctgatggaccaggcagaggagctgctcctcaggtgatgatgactgtccagtagctgccggtgct

SEQ ID NO: 50576 - DNA, 1215 bp, Zea mays
  Clone ID: MRT4577_146120C.1
cgggattgcacggcacgattgctgaggtgacatgtaaatgaatgcataacctagtcgtcaatttctcaatagcctggtcgtcctcaccagacctcgtacaatatagacctttcttcagcacaccagaacttgttgagttccctacatccaagtctggccagaaagcttatgcctatttctacccaccatcaaatcccaattttcaaggtttgcctgatgaaaagcctcctttgcttgtcaaaacacatggaggaccaactgctgaaacacgtgcaattctggacctcagtgtccagtattggacaagtagagggtgggcatatgtcgatgtcaactatggaggaagcactggttatggaagagagtatcgggagagactattgaacaaatggggtattgttgatgttgatgattgctgcggctgtgcgagattcctggtggagagtgggaaagtagatgggcagcgcctttgtattactggtagatcagcaggtggatacactactttagcttcacttgcattcagagacacgttcaaggctggagcttctctctatggtgttggggacttgactctgttgagagcggagacgcacaaatttgagtctcattatatggacaatcttgtaggaaatgaaagagcttactacgagagatcaccaatcaactttgtcaaccagtttacttgtccagtcattttgtttcaagggttggaggataaggttgtgccaccagatcaggcacgcaaaatatacagtgccttgaaagagaaaggtttgcctgttgctttggttgaatatgaaggagagcagcatgggttccgtaaggcggagaacatcaagttcaccttggagcagcagatgttgttctttgcaagattagttgggaagtttgaggtggcagatgatataactccaatcaagattgagaacttcgattgatctcttggagagtggtgtccggttcgaagttttgttcacgtaacccgattatatgttcagtacattagccgttgcagtaccttttaggaatacgacttcatcttatttttgagggttgatggaaatctcttttttgcgctgtaacgatgaagtcaccttgttttctgttcggttctagaatgaaatagaacggaatgacactatcctttatttggttgatgagtgaaaatagataatttcataactatagtacattcatacaaccatatatata

SEQ ID NO: 50577 - DNA, 2370 bp, Zea mays
  Clone ID: MRT4577_146121C.1
ttgggtacctcgaggccggccgggcccggaccttcggcttttgctccgacgccggcgagcgagaccgagaggcgaggcgagccaccgcggcggcggttgcagcgatggggtccatgacgatcggtgccaagtacaagaccacgatcaaggaccccggcaccccgggcatcctccgcatgaacggtgataggttcaccttcacccctaatgatccacgatcggcaatgaagttcaatgttgatttccgaaccatcaaaggtcacaagttcaataaagtagagggtaacaaagcagcattattgaacctttcaaaagaagacaaggctggaggctacatatttgagtttgacaatgttggtaaccgtgaccaatgtcgagactttgtagctagggttttaggcaaacatcaagggatagtgcctcctagaccaactgtggctcctgaaaactcagttgcttctgctgctctggaacaactcagtgccgcagaagtggagagacgggttaaactgttgcgagaagacagcgaattgcagaaattacataagaagtttgttcttggaaatattctgcaagaatctgaattttgggcaacaagaaagaatttacttgatgatgaagcaaataagagatcaaaacaaaagccaggtttcaagagtgcacttgtagatattaggccaacaactgatggtcggacaaacaaggttactttccagatcacacctgagatgatacatcagatttttgcagaaaagcctgctgtccgtagagcatatttagattttgttccaaaaaagatgtcagaaacccgattttgggaaaaatactgtagagctgagtatctagtcaggacaaaaaacactgcagcagcaacagctgaggcagctggagatgaggaattagctatcttcctgaagaatgatgatatactggccaaggaggcaaagttgaagataaaacgagtcgatccaacattagacatggaggcagacactggagatgattacattcatcttccggaccatgggattcaccgtgatggtagcaaagagacagtcgatgctgacagtgagttggcgaggaggacgctgtctcaggacctgaaccgtcatgcagctgttgttcttgaagggagatctcttgatgttgagtcaactgatccaaagactttagctgaagcccttgcaagatccaagaaagaaccaccttctacttctaatgttgatgatgataatcatgagagactaatgaaggtggctagaatgacagagatagaggatctgcaagctccacgaagtcttctgtatgcaccactttgtataaaggatcctagagaatattttgattcccaacaagcaaatgctctgagatctctaggtggcagcaatggtggaagaaaagcccatagtgcagcttgagcactgaagaagtgttccatcatttaatggatcaaatgtcttctgttaaagttaataggcttaactgtccgattgttcagtctgatatggctcttaaggttcttaatgaattaaacgaagggatttctcgttcaaggagacttaacctcaagaatcctcaagaaggtctccttggtcagctgcctcaacatacacgggacgagcttatggatcattggacggctatccaggaattgctacgccatttttggtcatcgtatccaataacaagtgcagtactttataacaaggttcaaagagttaaagaagctatgacacagatatatcaaaagctgcagcttataaaggaattggcacagcctgatgtaagacatgaaatatctcggctagtaaagcccatgactcaggccttggatgccgccttcaaccatgatttggaacagcagcagaaatcgtccaaggccggaaacaggcacaacgggttttgagcctaggagattggtttgaccaacacatgaagcgagacggacggacgggctgtgcccgaatacacaagagctgctgcagaattcttgaggcttgtacgattttgttcttttccccctcgcttattaatagctgccggaggagcctgctgtttgcagccccggaatcttgatctatgcatcaattgtttgtaactgactgaatagtgaagactcgcaacgcatgatgctgccgacgcgttgtacttgtacatggcagtaatggctattcgagatagaaccaaagctttaccaaaaaaaaaaaaaaaaaaggttcatggccgccgggcagaattatacacatgtatgtcatctacagcgttacaaacataccattatatatcacagtaccgatgacatctgtcagctcccacccaggagttgctgtaaactatatggatcccggtgtcgtgttttgattggttcat

SEQ ID NO: 50578 - DNA, 280 bp, Zea mays
  Clone ID: MRT4577_146122C.1
tacgcaggtacgggagtgcacgtacacagcggagggagatctcgggctctcagagctgcatcatgtacccatcgcgtagaagtggagatgagtcgagctgtacgagtcgctctctctcgatcagtacgtttgacgatctgggccgaacttcttgcaccgacatatgggcatgtgacatgcacctcactaagatgcgaactaagagttgtgcaagatgatacacagttgctactgtggcactgtccaatggcatactatatgggtatcattctaaagtctg

SEQ ID NO: 50579 - DNA, 424 bp, Zea mays
  unsure (1)..(424): unsure at all n locations
  Clone ID: MRT4577_146123C.1
gacnctagagatgcatatatgctatgcctccttcatgatcttgacgcatgttactgtgtgtcctcgatcatccgatcactaagccctctagtgcctttgttaaattgaacatttgttttgcctaatccatcattttaattgtatttaattataagtataactgttaaatcgtaattgagcacaaaattgccaatttaatatatatagtttatatattaagagccctgggctttcaataatagaggaagcccatgctagccaatatgggcattttggttgaaccacaccgagtcaacaggtcccagtcacggcgccgttacaccgttttctccgtcagccagccacctctcccacgttttctgtttctaaaaccgtagtcacgcaatcaacagagacagaccagcgccgattggaagaaaacccc

SEQ ID NO: 50580 - DNA, 769 bp, Zea mays
  Clone ID: MRT4577_146124C.1
ccatcctcgtcgtctcacgctaccgcctcctcccccccaaactcccaactacccgctctgctcctgagttccgagcccgctcgatctccgccgacgccgcctccgtcaactcgcacggggaacctcgccatggccgccgcgtcctccgccacctccgtccacgacttcaccgtcaaggatgcaagcggcaaggacgtcgacctgagcgtctacaaggggaaggttcttctcattgttaacgtcgcttcccagtgtggcttgaccaactccaactacaccgagctgagccagctgtacccgaagtacaaggaccaaggctttgagatcttggctttcccatgcaatcagtttggtgggcaggagcctggcaccaatgatgagatcgttcagtttgcctgcactcgcttcaaggccgagtaccccattttcgacaaggttgatgtcaatggcagcaatgtttctcccctatacaagttcctgaagtctagcaaaggtggccttttcggcgacagcatcaagtggaacttctccaagttcttggttgacaaggagggtcgcgttgtagaccgctatgccccgaccacttcccccctgagcattgagaaggatatcaagaagctgcttgggagctcttagacccgccgctggctggagcgtctggagaaatcggcactctgtattctagaaacaagaataatgtcgtgttgaaataaaatctgtacccagcatttcagaggatgcatctgctatattttcagcatcctgctct

SEQ ID NO: 50581 - DNA, 535 bp, Zea mays
  Clone ID: MRT4577_146125C.1
gatgggaagcacgcaccccaccccctacctgcccaccctcatcctctgtccttctacgtcccatccctacagggggcgaggcttggaagccattgaccatggctgccctggaggctgcgagggggacgaccgactgcctgatacacgacgacgcccaccaccagcaggaggggtgcacccggtcgccacactggcgagcacacagccttctctcatacccaacactgtgttatctatcgcgtaggctactgtccaatgcgccaacgccgagcacgaccagcacagatccggtgcggcacacccgaggaggcccaccaagcagcatgcgcgccacgccctgctcctgctcctgacggggcggaccgcctcaccatgactttcggcccaccatgctccaccacctaggcgaccggctactccacgccggctacgacagacgccctctgccaatacaagtcggactcactcggcggatatctccttcactctagctcagctgcactagaagtacgcaggacaaactaagaacggaaac

SEQ ID NO: 50582 - DNA, 342 bp, Zea mays
  Clone ID: MRT4577_146126C.1
aaaaccaaaagccatttgttttattaaacgtacttaaatgtgcatatgccatgcacttttgatatacgtacacaacaagggggcagatgctttttaatccaaacaaaaggaaaaaaaaaatggtgctacatgcttgtcccttttgccacccctgaagcagcttgctaagggtggggactttagacgtagcactcgtagagcttggttttcatttgcagcctgaagtagtacaagccctggaaggggtccgtgcccaagggggccattcccccccccattaaaaaattccccggggccgccaccaccgggattgtccctttttttcgggggatggggtctggg

SEQ ID NO: 50583 - DNA, 169 bp, Zea mays
  unsure (1)..(169): unsure at all n locations
  Clone ID: MRT4577_146127C.1
ctggccgtcgcgctcctgcagcccctacggcagctgcggcgcctacggctactgcgacaacacgctggccgtggcgacgtgcagatgcctcgacggcttcgagccggcgagcccggcggggcctnctggggggggngggccggcgcttgtcttgtcncgggtggttccc

SEQ ID NO: 50584 - DNA, 317 bp, Zea mays
  Clone ID: MRT4577_146128C.1
ggcagcctcacaccctggtgggaaattaatataaccgaaccatacaaggaaacaacgggcacacaaacagtgaagggcagggcagcgatgtgacgtatgaacaaaaaacaggggatactctgagaaatcctggagggagaccgggttctttaatcaaatgaggatatgcataaggggggcaccaaattcatgcacaccaaacaccaaagtggttttaacgaaccaaggagggggaaagctacaaagccacgttaaaaagggaagccaaagaagaactgtagggacaaaaaacaggagatcaggctcaaatgacaaac

SEQ ID NO: 50585 - DNA, 151 bp, Zea mays
  Clone ID: MRT4577_146129C.1
tatcaggaggcgctcaaaggatctgatgtggcatcaaaagtacgtaaaaaacatcactgctagtcatcaggtatggcacaggccgccactaaaaactccgcggccgcactgggaggggagcagcaaccaccacgggaacgggtttattatc

SEQ ID NO: 50586 - DNA, 236 bp, Zea mays
  Clone ID: MRT4577_14612C.1
ggcgcccatctccctggccctggcttggatcccgctaggcgccctgtactcctgctccccttgccgcattagacctgccgatttacctacacggcaaactcccctgcgagcaacagcttggttaatcatccccttgccactcggctactagcctatttcctctgtgcgctctacccacggataacgtgattaagctttgctatggcgaattgtgaggttctgagtggcgctgcatg

SEQ ID NO: 50587 - DNA, 248 bp, Zea mays
  Clone ID: MRT4577_146130C.1
aacaaagggaacaaacagttgcttaattattctttcagggcaaacaaaggggctcaccccagtcgttttattattattattacaaagattattattactgcatgctaactaactcgaactaaaaaaaaaacttttggtttacttttggcgagggggcgacgccgagcatttatgggggacaagctagcactaagaggagccatgggaacaacggggacgccggcgcctaaaaagagagggggggccct

SEQ ID NO: 50588 - DNA, 705 bp, Zea mays
  Clone ID: MRT4577_146131C.1
accaagtttatcaagagttttttagtctttattaatttgtattgcataaaatatggggcactagcactacaagaaatatttgatggtatacaaccaaaaatgtttggaatggttttggaaaaaattattattcctgaaattcagaaggtatctggaaatgtagagaaaaagatctgtgcggttggcataaccaaattactaacagaatgtcccccaatgatggacactgagtataccaaactgtggactccattattacagtctttgattggtctttttgagttacccgaagatgataccattcctgatgaggaacattttattgacatagaagatacaccaggatatcagactgccttctcacagttggcatttgctgggaaaaaagagcatgatcctgtaggtcaaatggtgaataaccccaaaattcacctggcacagtcacttcacaagttgtctaccgcctgtccaggaagggttccatcaatggtgagcaccagcctgaatgcagaagcgctccagtatctccaagggtaccttcatgcagccagtgtgacactgctttaaactgcatttttctaatgggctaaacccagatggtttcctaggaaatcacaggcttctgagcacagctgcattaatacagaggaagttctccttttgaacttgtcacgaattccatcttgtaaaggatattaaatgttg

SEQ ID NO: 50589 - DNA, 422 bp, Zea mays
  Clone ID: MRT4577_146132C.1
tgtttttaataccgagaataacgaagccgaactagtggttcatatacaccaatctttgatcggctgcatgacaagcacacgctcactgatgccttaacagttcatgctggtcaaccagtcaaaactggttggggttgacttccttgctcgaagactgcaggatttattaatgaaccgaagtggacgaacgagtctcaggcagggacgacgagcagggtttcgcacactaagaggttggactttgattgtggcgcaaactgtttggagcgacatcacatgcatggtcactgtgtgtgggctttaaacgcagctgcttggtgggctagaactgatcgctggtagtggaataaaactacgctgtcaacaaagagtgacacggccgggctcaggctgtgcaccaaggccttgatgaaatgacaaag

SEQ ID NO: 50590 - DNA, 638 bp, Zea mays
  Clone ID: MRT4577_146133C.1
cggccgggcttcgatatctacaccctagtcgcctgctctattctcagccgccggcaatcccttcccgtgctccgcaaccgctgagtgagaagaatagatggccggcaagggcgatgccccggctatcgacatcgatctcggtacgacgtactcttgcgtccgcgttgtggcagcaccaccgcgtcgagatcgttgccaacgaccagggtaaccgcaccacgccctcgcacgtcgccttcaccgactccgagctcctcatcggacatgcgcgcaaaaaccaaggcgccatgaaccccatcaacaccgtctttgatgcccagcgtctcatcggcaggaggctcagtgatttttctgtccacagtgatatcaagctgtgagccttcaaggtcatttctgtccctgctgagaagccaatgattgttgtccagcaccatggtgagaagcaagcagtttgaagctgaagagatctcctctatggttcttatcaagatagggtgagattgctgaagcttaccttggtagcaccatcaagaatgctggggtcaaagctccctgcctacttccatgactcacagagggcaagccacaaaagatgctgaggtggatgactgaccttaatgggctgcttatcatcaacg

SEQ ID NO: 50591 - DNA, 317 bp, Zea mays
  Clone ID: MRT4577_146134C.1
atcagctgccacatagacatcatagagcggtcctccttgtgagtctgagctgaagaggacgaggaggaggagtataagcagcagcgcattcggattatggagagccaatattctccgtttcgcgctgttgctcgtctccgcctgtgtgcacactgtctgctccggctgccgtggactttactgtcgttcttctttcgaacggcatcttttatgatatcaatcttctatttcggtcttgttacttctctatttctattctttttttttataacattttcttcttttcttctcatgtcgtcctgctttttcttttataa

SEQ ID NO: 50592 - DNA, 292 bp, Zea mays
  Clone ID: MRT4577_146135C.1
ctaacacagggcggaacggagaaccagcccaagcccatccactatcttaaagcactgctccttgctgcagacagagctaacacagctttagctcataatggccacaacatgcctgaggctcgctaccacagctcaagttttgctgcaacaagcattaagcaggccaattccagaagaaatcctttaaccaaaccattgtacctgaattatcagtcaccacaatgaaaacatatcggttgtacatttctgcacagactctaatgcacacatagaacttctcagggagcttaac

SEQ ID NO: 50593 - DNA, 423 bp, Zea mays
  Clone ID: MRT4577_146136C.1
ggaaaaaaacacgccctttgggcctaattggggggggcattttttttccatgggcctgaaccggccaaattttttttatatttataggggggggaccccccgctccatcaccggggtcctttttcacctggggtcacgtcccgtcccccaagcaacggaattaattttttgaaacaaagaaaaaaccccccctcgtgccccggtgataaaattaaaacagggcccctccgtccggggaacgaaatgcgggggcgaaaattagatttccctttccctttttcccggccttgggggcaaccttttgcgggggggggaaggaaacacccaaacctcttggacaccaaaggggtctttttaggggggcgcctaaagggggggccctccgggggggacgggacccccggaacaaccggaaccccggac

SEQ ID NO: 50594 - DNA, 425 bp, Zea mays
  Clone ID: MRT4577_146137C.1
ttttgattatttttctgacagcagaacataagcttgggaaattttacatttgaacatgaacaaattaacccatctggtgggatactacagctttcaactttaagcagaatgtcggcttccctatattatctttcactgagaaaagtctgtatagacttatagggagaggaaatgaggaaaattggtgattgcctgataagagacgcctctttccactattgctttaaatggcgtacgttacattcgcaagattggtaccatgcaaccatttagcctaccaggagtcttggggccttatctttacaaaaactaaatgtattatttctccgcttgagactcaaagtcaatttccttttgaagcacgttcatgtgactccgcacttgccgcacgtataacatcattgtttaaacttatatttgggaaa

SEQ ID NO: 50595 - DNA, 583 bp, Zea mays
  Clone ID: MRT4577_146138C.1
gcccatcctatagtccatcctacaaactagcgaaagacttgtctgagatattcagtactttgtgtatcacacatagcaaggatcacttgaactgttactagtacatgttcgatgagagcttctctgagtggtgcagtcggtcacgaatccaggaatgactactgcaattaatagtgttgattattttgtcactgatgtccttacatgcacacataactgtacacagaaatgacaccagtaactaatcttttgcctgttcaaaaaactgttaaaaaaaaaaaaaaaaaaaaaaaaaaaaaaaaaaaaaaaaaaaaaaaaaaaaaaaaaaaaaaaaaaaaaaaaaaaaaaaaaaaaaaaaaaaaaaaaaaaaaaaaaaaaaaaaaaaaaaaaaaaaaaagggggggccaatttgggggggccccttttatgatcccggttttcccaaacaatagcttttttttaaaggcccctaaaaataaaaacatgggccgaatattaaaaacggctgtaatagaaaaaacccctgggaaaccacattaaaaccccctaaaaaaaatcccctattaaaaaccgggttttaaag

SEQ ID NO: 50596 - DNA, 246 bp, Zea mays
  Clone ID: MRT4577_146139C.1
cctggcatatgggccgacatttattatggtttgacacccaatttagctgcaataccataacatacccgaacaatacacgtgttgtggttaaacctataggacgaacactctagtaaataaaacggcggggacggcaaaaaacaggccgggagcagggagctctgcgttattgtatattggatcgactaaaggggacgggtggcagtacaaaaagaggagggtactgagtcggcgaactggggcctt

SEQ ID NO: 50597 - DNA, 523 bp, Zea mays
  unsure (1)..(523): unsure at all n locations
  Clone ID: MRT4577_14613C.1
tgctcgtactcggtctcggaanttnncccgggtcgactccacgtcgnntccgagcagtgcaacaagggcaagatttaacctgcttcanntcgatcatatcgtcaactggggtccggcaggtgtcgcgaacaccatnngagctccacggagtggcggcgnngcggcggcnggcggcgccaagacagtcgtggccctgaggggtggtcgggcttganngcgtggaggggacgccaagaagggtggatcctcaaggggacaagccgnngacgccgacatcgtggtgggctgcccgtcggcttccgtggtggaccgcggattnatcgcccttaaccgtnngtccgcatcttcgtcgacatttcgtcgcccagacccgccccacatcggcttgagtaatatanntaagctagccgctttatttcctttcctttgcnncccagaactttggaaatannaatatattataccgnnatgaaatataccgcgggcattgcnncgaataatggganntgtgtgannattctca

SEQ ID NO: 50598 - DNA, 735 bp, Zea mays
  Clone ID: MRT4577_146140C.1
gagactaccaaccacatacttttttatagctgttttgcttacaatgaactactactctcaaaatccaactcacgtagcaaaattctgttttctcaatcataaccaccatatatacaaaagaccttcatcatcatagtacattgcagactttttcaaccagaatgtagggatggtaatagatcacgatccaaatgcttcttcataaaatggtatggctctaaataaattttacttcaaaaataaatacaaatatgacctaatcctaattcgatctccttaaatattatagtgtaaaatttagagtccgttgtcacccctaagcacatgtattcctagccacagacagcatcaacattaactttgattgtggcagtgcctgtagtcagagttcaggtatcagaagtattgactagttttggacgacctgtttccttgtctatctccaccttgagacctatgttagcaatctctggagttataacaggtttttgcatctcaagttcagaaacctccttctgattttcttcattttcttcaagcaagttcttaacagctagaagaccccactccctcaagtatggattatcttcatcgatgacgcactgctgcagcagcaacatgatcccatctaactgcctaatctcatcctgcaccttcttccttctgtgtaagcaattagcaatgactgcaaccaaatctctcctgtaaccaatgtatgggcagacctttgcattt

SEQ ID NO: 50599 - DNA, 565 bp, Zea mays
  Clone ID: MRT4577_146141C.1
gcggccggcccgacggaccccttgggatctatgaaccttccgcatcttactcaccgctgaaatatcaaacactggactagggtacacattcattcttctgtataaattcaccggatccctcaggaattctagtgatacgatacattgccgtcctcagttctcctttgaagattaggagagagtgaatcaattgctcgcgcttagaagatttgctttacttttggaacaccttgctttatatcactgcatctccatttttcactatatacgcgaaccctactctatctgctttgcaaaggattgttccataatgaccatgaacaggtgctcctatcctggccagataaggcttagctactcttagaacactggagtacatattaacactgaaaatttgaccagattcttttatgcgtaattcatatagacataaatcttcacagattaattggccgaggtgaattattgacaatggctcttcccatgagtcatgatggagaaagtgccccttgaaatgccatggcttcacatgatgttactggcaaaattcagaggccttttattt

SEQ ID NO: 50600 - DNA, 538 bp, Zea mays
  Clone ID: MRT4577_146142C.1
gccggccgggctgcgctttcccattactactcccagagccactgcccccgccagatcgcggcgccccatcaaatctcacgcacagataactgaaatgcccaaagggcccaactcgccacctcccgatggagaaaggagagcaaagcctcacctcccccacggccgccgccgagacgaaggcgatcaaaagaggcgtcactccaagaggagcacgaacacattgcctcacccagcgaagacctataccacgactctgctgacacacaacccgcgctcctaacggcaggcgcataaatgaggaggatggcggagacacccaccgcaaacatgtaacctgatgacccctccgaccaagatcgacgacctctccacatgcccatctcgactctgcaggagacaatcgatgatggccgacgtgagaataagcgcctactcgagtacacgcaccgcagctaggactatcttcacgacaggcccgatcagtgaggcatgcatatcacgagttcgcaactaccactgacgacaacgatgtctcctc

SEQ ID NO: 50601 - DNA, 2727 bp, Zea mays
  Clone ID: MRT4577_146143C.1
ccggccgggaagtgccggagtttcgcattggcccctattgaaaatagaggtttgaccttcatctctggctggagagccttcttgcatatgcataaatgggcagtccctggccagcttcatcacgacgcagcgaagcaggcctccttcttacaagcgcttctgctaacagccgtcgtacgtccatcccaccgggagcaccggcgacgatgccgccgcgaacggtgtccgatgggggagacgacaacggcaccgacgttgctagccggacgtcgtcgcaccgccgcacggagcacgggcatgggtacaaagtcggcgtcccaccggagaagaacctcctcgccgagatctctgacgcggtgaaggagacgttcttcgccgacgacccgctgcggcagtacaaggaccagcccaggtccaagaagatctggctcggcctgcagcacatcttcccggtgctcgaatggagcaggcattactccctcggcaagttcaagggtgacttcatcgctgggctcaccattgccagcctctgcataccccaggacatcgggtattctaagcttgctaacttgccagcagaggtgggactatacagtagcttcgtgccgcctctgatatacgcagtgatgggcagctccagggacatagccatcggtccagtggccgtggtgtcgctgctgctcggtactctccttcagaatgagatcgaccccaagacacacccgctcgagtacaggcgcctagccttcacagcaacctttttcgcaggggtcactcaggcagccctcggattcttcaggctagggtttatcatagagttcttgtctcatgctgccattgtcggattcatggccggcgctgccatcaccattgcgcttcagcagctgaaaggattccttggaattgcaaacttcaccaagaaatccgatattgtatctgttatgaaatcagtttggggaaatgttcaccatgggtggaattggcagacaatactgataggagcgaccttcctggcattccttctggttgccaagtacattgggaaaaggaataaaaagctcttctgggtgtccgcaatcgcacctctcacttcggtgatcatatccacattttttgtgtacatcactcgtgcagataagcatggcgttgcaattgtcaagaacataaggaaaggcatcaacccaccttcagctagtctaatatacttcaccggcccatacttggcgacaggattcaaaattgggatagtagctggaatgataggcctaacggaagcgattgcaattggaagaacatttgcagccctcaaggattaccggatagatgggaacaaagaaatgatggctctagggaccatgaacattgttggttcactgacttcttgctacgtagccacaggttctttctcgcggtcagcagttaattacatggctggctgcaaaacagcagtgtcaaacgttgttatgtcaattgtcgtaatgcttactttgctactgatcaccccattgttcaagtacactccaaatgccatcctttcctcgatcatcatatcagcagtgcttggtttaattgactatgaatcggcttaccttatctggaaagttgacaaactggactttctagcatgcatgggagcattttttggagtcatattttcatcggtggagtatggcttgctcattgcggttgcaatatctcttgctaaaattcttctccaagtaacacggccaagaacagttttacttggaaaccttccacgaacaactatatacaggaatgtagaacagtatcctgatgctaccaaggttccaggggtgctgattgttagagtggactcagctatatacttcacaaactctaactatgttaaagagagaatcctgaggtggctaagagatgaggaggagcaacaacaggaccagaagttaacaaaaactgagtttctaattgttgacctgtctcctgtaattgatatcgacacaagtggaatccatgctttggaggagttggcgaaagctcttgaaaaacgcaaaattcagctggttcttaccaatcccgggccggcggtgatccagaagctccgctcagcgaaattcacggacatgattggtgaagacaacatattcctcacggtcggcgacgctgtgaagaaatttgctcctaagatggtcgataatgtctgatggagtttctgggtcatgacagtacgagcgagaagtctatctattttgtggcaaagttcagtggcaattatggatttatagagcagaaacaaaacagaacagaacgggagtaaataacatggttcgcggaatggtaaataaagaagatgctccggagttggagtgcatcacgtttgcgaggtgtggttggatagaaaacagatggtggcctagttgggcgtctatgtcagtccttgtggttgtggagtctgttccgcgttggcaagcactcagtgatggagatcaaatgcttcatggatcagcagatatgggtgcctgatgattaacatatcatcattgatcgtgaaagaagagttacctcgttggggtttcaggctttgtgtatatcttacagtacttagcccctttccttgtagtttatgtttttatgacgagcttttacatttggcttatatatgtatattctgtaatgttgatgcattgttaactgttaagtgttcctgaccaaaaaaaagggatgcaaaaacgtaaaaaaaaaaaaaaa

SEQ ID NO: 50602 - DNA, 807 bp, Zea mays
  Clone ID: MRT4577_146144C.1
gcgggttctatttcacttcttagcacttcctatcatttaatatccattcctttggtcttattgacataagagatgtcatttatagtctatctctttctatatatggaaagtcaagaaattctcatcgaaacatcgagaaattgtgcatatagaaaactctaaagaaagaaaaaaaggagacccatgccatgattttcaaatcttttctacttaagtagtctaaagtagtctaagtttctcgatgaggataattaattcggtcgttgtggtcggactctattatggatttctgaccacattctccataggtccctcttagatcttctttctccaatcttgggttagggaagaaggagatattcgcgactactagcggtttcattatggggcagctcatgatcttcatatcgatctattatccacctctgcatctattctttcttagctaaacgggtggaagatccatccaatttggttatatcatggactcgaaaaacggatctgaatgtgactgaaatgcacgatcttcacaggtatcacttttcacgatacctaaacctaaaaggtggaatagcgattttcgaaccatttcctataagagaatggtttccattactttgagaaatggattctatatcaaactatagctattgcattaaagaagaaaagaaactaataggagtcgaagacgcggaatggtagtgaatagagaaaaagattcttctgattttcttgttcctgaaaatattcgatccatctcctagacgccgtagagaattgagaattttcatgtccttcaattatcgt

SEQ ID NO: 50603 - DNA, 606 bp, Zea mays
  Clone ID: MRT4577_146145C.1
caggccgcgtgccggcgcgccattgcactgcaccaccagcctgcctgtgcagagagacggaggaggagacacacagggcagcgaccagcgaaggaccgagaagctagcaacggcaacgagcagaggcccgagcccgacacttgcgctccgcttcccccgccccctccgcctctcccgtctctccaggccgccaccaacaccacaccaccacccgttgccacgctgccggccgcccacgcctcgcatccagccgatcctttcattccatcctccctccctccgcccccgcctcccaattttagccgcacggccgccgccgccgccggccggccggagagcaggagcagctaggccgccatggaggcgaagagcgtggtcatgtcggcgctcgggatcgggatcggcgtcggcgtcggcctgggcctcgcgtccgcgccctgggccgccggcgcctcggcctcctccagggccgcgggggtcaccgtcgaccgggtggagcaggacctccgccgcctcctcgtcgacggcgccgacaccaaggtcaccttcgacgagttcccgtactacctcagtgagcaaacacgtgttgtgctgacgagcgctgcg

SEQ ID NO: 50604 - DNA, 290 bp, Zea mays
  Clone ID: MRT4577_146146C.1
aaaaccggcccgacgcacgcgtccgcaaggaaatactcacaattaactacacatcctaacgcatttctaccaccaacccgatactgcgctaatggaaaaagctggacagggttcatgttctcccctccactaatctggcgctactccaacgtctgctgcaattcctcgtcatatatgtcttgttcaccacccaaaagtcacatctcggaggaggagctaaaaacgcatcagcactcaaaaactacctgctgttcgacagtatatctcacgaggaccacatgaaccacacc

SEQ ID NO: 50605 - DNA, 391 bp, Zea mays
  Clone ID: MRT4577_146147C.1
gaaaacccctccgatgaaattgccctcatatctacagaaaacttggggtgtgacctaaagctcatacagtgtaattggttttttttgccgttgccctggtcatcccttaattaaacattaaaattgtccattcaaggtcaaaaccgttggttcgagcccaaccgggctaacatgttatcacaagtttcttccctttttttaccccccaatcagtgatcaaaagcccctttagtttccggcaccaataggaatggcggttggtttcaaatcctcggccttctcgggctccttgtttaacattttattgcggattaaattgtgaagccccaatgacctttcggttcagaaaagaatggttttttaccaactttttgtgttttgtttttactgg

SEQ ID NO: 50606 - DNA, 272 bp, Zea mays
  unsure (1)..(272): unsure at all n locations
  Clone ID: MRT4577_146148C.1
cccgggctctattccaaagcaagnngcttgttcctttgaaccagcagctgaagcgggctcgtctcatcatcnaaaccagtaagcggatggcggctaatctcaagtgggctcctgttctagccctcgtcgtcgtcgttgctgccatggttggcaccacgagcgccggcaacatcgcantgtactttttccanaacgggaagtaagggnancctnnncttactcctncaactacaaaactctacncctacnnnaacatnnnnntncctcacaac

SEQ ID NO: 50607 - DNA, 193 bp, Zea mays
  unsure (1)..(193): unsure at all n locations
  Clone ID: MRT4577_146149C.1
cttgttcagtgagacgggggatgacaagcatgtgccccgggcagtgtttgtagacttggaacccacagtcattgatgaagttcgcactggcacctaccgccagctcttgcacactgagtaagataggaacangcaaggaagatgctgccaataactatgcccgagggcactacaccattggcaaggagatcat

SEQ ID NO: 50608 - DNA, 724 bp, Zea mays
  Clone ID: MRT4577_14614C.1
acgccacagaacgctccgggcctctctctgtttgctctcgcgtccgccgcgcccgtcccgtcccgcctgcgcccgcgcgtgtgctcgctcgccgcctccgatccaccggcccaccaccgcgccggcggcatggcggatcagctcaccgacgaccagatcgccgagttcaaggaggccttcagcctcttcgacaaggacggagatggttgcatcaccaccaaggagctgggaacagtcatgcgttcgctggggcagaacccaacggaggctgagctccaggacatgatcaatgaagtcgacgctgatggcaacggcaccattgacttcccagagttcctcaacctgatggcccgcaagatgaaggacactgactcagaggaggagctcaaggaggccttcagggtgtttgacaaggaccaaaacggcttcatctctgctgctgagctccgccacgtcatgacgaacctcggcgagaagctcaccgacgaggaggtggacgagatgatccgtgaagccgacgtcgacggtgatggccagatcaactacgaggagttcgtcaaggtcatgatggccaaatgagcaccgtgctccgtgctcccaagcaggaggagaattgtgcattgcatattagtttaagatgcaactcttatttgatcgatttccagttaagcatcctacctagctgtagctgctaaagcggatcggacgacgcaattcctgctat

SEQ ID NO: 50609 - DNA, 144 bp, Zea mays
  Clone ID: MRT4577_146150C.1
ccggatgataaatacataatgctttcttctatccaccgcccatattcctacattgtaccttgtgggaggtttccaaagaaagttgagttgtggactgtagatggaaagtttattagggaactttgtgatttgcccctggctgag

SEQ ID NO: 50610 - DNA, 434 bp, Zea mays
  unsure (1)..(434): unsure at all n locations
  Clone ID: MRT4577_146151C.1
cgaagtttaggtgnntaacacaaactgcccttttgcctacctgattgacttgcatgtcacacaatcagaagatgtaccattcacatggatacatggggacaaacaaatattttgcagaacaattgccaaagaagggggtgctacaatcttccttcgggaggggttgtgaccccacccccaatctcagcgtaactcaccacactctaggttgggggtgaccgagggaacaaattatgccaaaacacccgggcccgaaacgccacacaacataaagtgcccccacaaagatggcctgtctctcaccttctcggggcacaatctatcacgggcgtcgacgatggccttgcggaatgcatcgttggggaggaagaaagaggagacatggccccctgccacccaccggacctttgagccgggccatgcgttctgggagc

SEQ ID NO: 50611 - DNA, 250 bp, Zea mays
  Clone ID: MRT4577_146152C.1
ttcccacgcgtccgcgctcatgcttgtttaattaccaaggtgcctgtgtggttgtaggtaggtaggtagctagccgccatatcaagctaggtcgaagcagaggagtgatggccaaggtccaccctaacgccgcgtagtccagtcgtccgcccaacagtagcacctgtaggctgcgcccaggcagaggccgagggagagctctccaccgtgctcacggtgtgacacaagtgggtggtctataactgctgac

SEQ ID NO: 50612 - DNA, 811 bp, Zea mays
  unsure (1)..(811): unsure at all n locations
  Clone ID: MRT4577_146153C.1
tcttgaaaatactatatcaagtaaagcaattgaagagttttgcttcattgggatgcttcattggaaaatacattaacacgcctcttattgaagaacacagctgcggcgagctgggatggatcaagcacttgggtgagagttcttcgcgcagggctggagtgctacttccagtattgcttgcagctcgaggagttgatgagatgcaacggcggaatgccaaggaatcataaaagcatacggaggaactatgtataagctacaaagaagcactacaaagaagcataaaaagaatttttatagcataagccaagtgttctgatgattttgttttttcaattgtattttctgttattggttcagcatgcacatatattgacatgatttatggcatggcatctgtcatctttgttatatttatgacatcattcttgattgatgtgtgcgacatgaatgatggatctttttaacatcctgaccatcattgtgtcgctcattatcgtattttgtatatcatttataggttcacagatatgaaacgatagatttctttccaatcgatcgttgatcgctgtttttccatatcttccacaacaacgagggcgccgagcatattgacttcgtgttggacatcgtgtgcaaggaggcccaggattgtgtttacctcgtgtaggggagataggtatacgtgaatcaaaatcttgattctgagcttcctggtaccataagtagcccacctttcttttcttggtgaaattatttgttgtggagagtaattccacatggaanaatatatattattgaggttagcttc

SEQ ID NO: 50613 - DNA, 544 bp, Zea mays
  unsure (1)..(544): unsure at all n locations
  Clone ID: MRT4577_146154C.1
ggaaaaaaaaaaaaaaaataaaaaaaaaaaaaaaaaaaaaaaattctcatggttatctttttctagcaacgagtgtgaagttgtgtgctaaagtacttttttgggggtgtgtttgtttctcaaagagcaatattccttttggtattctgtttatggagactaaaccctgctaagccatcatcatggttacagtgtttctggttgattgtttgaaaactttagatgagtagctcaaagcctaccattacatcaaattgaccacattcaaaaaactgactgtaggtttgtggctcatcttacctaccttgtagcgaaagggtctctagcgtaatggttaaggcttccgagtagcaccttcaagtctcgggtccgattctcccgagggacgaatttcgggtttggttaaaaaaatcctctcaatgtgccccgtccgcccgctcttgggtntcgntatcatgcgcgccacccttcagctgggccgttgcagagtggacagttgatcggcccgttggtgntgggatctaggctttgggggttttccccc

SEQ ID NO: 50614 - DNA, 271 bp, Zea mays
  unsure (1)..(271): unsure at all n locations
  Clone ID: MRT4577_146155C.1
gttggatttcaccactaactgtggtattatctggttctactgctgggataccgcagggcaagataagttttttggcctcaaacaccnatactatatccanggccagtgtgcgatcatcatgtttgatgtaacctcaaggcttacttacaagaattttctnaccttgcataaggaccttttcaggttcttttaaaacatcttcattttctctttctttttttattgtttaatttttttttattttatatttttttaattttttttctttttt

SEQ ID NO: 50615 - DNA, 663 bp, Zea mays
  Clone ID: MRT4577_146156C.1
ccacgcgtccggtaattctcattttgttatccttgtgcagctttggaatgtttgccaccggagggtgtgatagatttgtgaatgtgtgggatgacattaataagaaaatactatatcaaaacacagctgcggcgagctgggatggatcaagcacttgggtgagagttcttcgcgcagggctggagtgctacttccagtattgcttgcagctcgaggagttgatgagatgcaacggcggaatgccaagttggggtgagggctatgctggtcaggaacatgatgcaaattagggtgtcccttcattctataaggaatcataaaagcatacggaggaactatgtataagctacaaagaagcactacaaagaagcataaaaagaatttttatagcataagccaagtgttctgatgattttgttttttcaattgtattttctgttattggttcagcatgcacatatattgacatgatttatggcatggcatctgtcatctttgttatatttatgacatcattcttgattgatgtgtgcgacatgaatgatggatctttttaacatcctgaccatcattgtgtcgctcattatcgtattttgtatatcatttataggttcacagatatgaaacgatagatttctgaaaaaaaaaaaaaaaaaagcggcc

SEQ ID NO: 50616 - DNA, 943 bp, Zea mays
  unsure (1)..(943): unsure at all n locations
  Clone ID: MRT4577_146157C.1
ggtcgccacgcccgccacaagaagcagcagccttacccgaaccgaagacgaaccctaccgcgccttcataccatatcgtctccgtgtcgttctcgcagcgagcgagcgagccacgcgctcctgcgcagtagcgtaatggcggtgcaaggcggcgaggagagggagagcgggaaggccgccgccccggcggcggtgtcaggcggcgaggcgggcccgccgggccggaggacggcgaggggccacccgctcctgcgcggcgggtggaggcgcgaccggtacacgcacgggatgcggccggcgcagatggaggcgctccgcgccatgtgcggcgcgctcatcccctcgctgcccgccgacgccgacgccggccgcggcgacccgcccggcggcaaggacctcgagcgcttctacctcgcctccgcggccgactccaccatccccgacgaggtcgcggagctgatggtgacgcggtgcagccgcgaggcggtggcgctggcgtgggtggtgctttgggcgctgagcacgcgggcgggcacgctgctgctgtgcggccggctcagcctcggcgccggcttcccctacgtgcgcaggttcgccgacatggcgccggagcggcgggaggcggccctgcggcgctggaaccgggtgcgctggctcttcccgctccgcatcgccttcgccatcgtcaagatcctctgccactacgtcttctacgccatggtgaacgagaactccgagaatccatactggaaagcgatagngatacagcgtggacgagcacggggaggatcgggggcttcggacgggacaaccgtcgccgtcccggnccctcgacgtccgnggtcgtggagaccaggctgctggacgacaacagctgctcagatcgctccggggggaggggctcacgggaaagccggcgtcgtcggacgcgaccaccacacag

SEQ ID NO: 50617 - DNA, 225 bp, Zea mays
  Clone ID: MRT4577_146158C.1
aaaatgaacttacttaagctactaataatacaaggggacgggagatatagagggcatcttcggctagtcggggggaaaaaaaacaatcttgaaacgctgttttgagccgctatactttggtttttccttctttgggcggagcaggggcgtgcagctaaactgagctaaaaaaaggggcaggggcgcgccgttccactccttggggcactcaagcagggggtcgat

SEQ ID NO: 50618 - DNA, 551 bp, Zea mays
  Clone ID: MRT4577_146159C.1
gttccccagtccagatcaattcggcacgaggctcctctccctttccctctcctctcccgagcctgcctctcatggcgtctccaagcggaaaccctaaccctaatcccaatacaccattcgagatcggaaagctcttcaggccaccgaatcctatgaccaccgcgacccccaaccccatcttccccggcgtcgccggaggcccgacgggctcgccgccgccgtccggtccctactcctaccctccggtgaccccgcccttccaccgcggaccctacatccactaccagcaggatccccacgccatggcccgtcccgttgtctccttccccatgccaaacccaaacctcaaccccaatcccaacccgaacgctaaccccaacgccgcctccccgggccccaaccctggcgcgcgcctcatgcagctgctcgggaactccgggccgacccagctcgaaaccggcgtgtgcatgcccccggccacgtggggagttggcgcaactgcagcagctaccagcgatgccatacgcgccggcggccaggatgctgagcag

SEQ ID NO: 50619 - DNA, 406 bp, Zea mays
  Clone ID: MRT4577_14615C.1
ctgggccggggaatttggttaaatttcccataaaatcccccccaccccgaaaaatgggggggaattcaaaaacctgccaccatttcttctttcaataaaaagggcccccccctccccccagggttttctcacctttcttttaaatgggggccctcctttttttttagaactttcttaggcccccttattttttaacctttcttgttttcccccaagtttttgggggggtactaaaacccaaccttttttacccccaaaatttaaatgtttgcaaaaattttttttgcccggcttaaaacccgggttttttaaaaaaggcccccgattggcctttttccttccaaaggaaccccccccttccgggaaccctgggtgccccccggaatttccgacccggtccttgggg

SEQ ID NO: 50620 - DNA, 324 bp, Zea mays
  Clone ID: MRT4577_146160C.1
gcgttcgcaacaaaggaacaaaactcctcctcctcctcctcctcctcctaacaaaactaacgcctggtccccctcgcctgtgattaagtcctgcaacaaccgcaaattccaatgttggtccagccggtcctggcggaactcaatcaactgcaagtccctaacgttgagaccgcggcgccagcagcatcaagacacggtcctcgccgcgccgaacaccaagccagcgccggcggcttcgaggcggccaacgaagggcggcggctgcgactgcaacacctgcaactgcggcaacagctgccgctgctcctgctgcagctgcaactg

SEQ ID NO: 50621 - DNA, 493 bp, Zea mays
  Clone ID: MRT4577_146161C.1
ttttttttttttttttttttttttttcagttgttttcctttgctcggccttggggagactcttattcatttctcttctaatacattgaagaggcaagccttttgccgcttcctttaaaaaaacactgtctgctaggctgggagaaatgacatatattagcaaccaaatcgaacatagcataataattaaatcagtctccagaagttcccttaaaaaaactccctaaactcagatttaggaagttgctaaatgcatattgggaacaaaaataatcttagcctccaatagttcataattcttatgttgggaaatattttgaaattatgctaactcattggtaaatttattatttccgtagcttaaatcatttaaagggtatcacttgtacacgagtgtagactcgatggcagacaagtgatttcatggtgtgatgatgaacaaaataggctattgggagtgggaaataactccccaaacttggggactaaatagg

SEQ ID NO: 50622 - DNA, 268 bp, Zea mays
  Clone ID: MRT4577_146162C.1
ggggattgatgggacttataatttctgttgtttctaattaaagtccctgaagatcatataccaaagtgtttgagaacttcatccaaacctactttaaagcattatgtgcaattaagttgttatgacataattatattgcctaattgttgggtcttttttcttgagcttataatgtacctggaaaataaacctcttgagaaaaagaaaagttcatactgattattggaaaaggactatatatgtgagcaagattgtgttttaagaggaa

SEQ ID NO: 50623 - DNA, 315 bp, Zea mays
  Clone ID: MRT4577_146163C.1
tcgcttttttttaccaaccaaacgacactgccttcaacggtccatcgtgtatgatacgcctctactgcaggacgaccaaagggttccaagaagttcttcgtgggaggcaactgcaaatgcaacggctctggagaggacgagaagaagatcgttaccgtgctcaaccaagccgaggcgccctgtgaagacggccttaaggtggaggggagaccggctttcatttttctgcagcacgcaaaggggctgatgcggatggacttcgccgacgcagagcagaactgctgagagcgcatgggcagcacctatacaagctag

SEQ ID NO: 50624 - DNA, 268 bp, Zea mays
  unsure (1)..(268): unsure at all n locations
  Clone ID: MRT4577_146164C.1
aaaagcccacaatttgaaattgganaataaagcttctgagccttttaggttaacgtggtatagactgcnggggcccggtacaaagaattcttccaattcctacagtggatatatctgccttaatcagggtgtgccaggcgacagggatgggcccgttctatggttcgtggccgacttggcaaccaggcgcggctaactaggtagcctcttcctcgtaacaactgcnccnggtacacgggaagtagcaacaaatcttacttttatacta

SEQ ID NO: 50625 - DNA, 401 bp, Zea mays
  Clone ID: MRT4577_146165C.1
ctcctgttgtagatatatttgttcttgctggtggctgacgtcctgcaaactctcataaagcgtgatggtcgtgtcaaacaccccctagcccctgcagaatcctgtgctgtgctacaatatgcggatgatactatgattgtgatggaagggaacccagcccatgtgtgtgtactgaaacagctcctggacagcttcagcaaggcaactgggttgtgtataaattttcagaaaagtgtgctggttccaattcacatgaatgagactgctgtccaacaatgtgtatccctgctcggttgtcggcgcgaaggtttcccacagacatacctagggctctctctttccctaacaaagactaggctttcaacctttgttccatacatggcgaaaacagacaagtactt

SEQ ID NO: 50626 - DNA, 503 bp, Zea mays
  Clone ID: MRT4577_146166C.1
gtgttttttttttttttttttttttttttttttttttttttttttttttttttttttttttttttttcgccctcgggggcccaaagcagctatgggcttataataacacatataccagtcattaagcatgtaggttttgggtttttttttacgacgggggccggttttttttttggggcttgctgggggtgcaatccggctgggggtggggcttttacagtatttttctttttatggattgcagctgcagcagtccaaacagttgcaacagtgtcggtttgcaacctgccgaacacccccgacgatactttgatttcgccctggggggcccaaagcagtttttggctaataataacacacactaaaggtttggttttttaaaaaacttgggcaggggcatttcaatgggtatacatatagggctgttcccagcattatattgtaccttttgtttttgttgaaaaccccctgtccaaactgaggacccattgatggcccatggg

SEQ ID NO: 50627 - DNA, 191 bp, Zea mays
  Clone ID: MRT4577_146167C.1
ggagcgcacacacacacaggcagatctacctcgaacttattattccttactactgcattcaaagatcggtgttgctctaaaccgactgaaccatgactgtgacaatggcagtgacgacgattgtgaccatgagcaaggagagctgctcgttattgcacgtgcaggccgtggcattccattagaagccacta

SEQ ID NO: 50628 - DNA, 930 bp, Zea mays
  Clone ID: MRT4577_146168C.1
ggaccctcgaggccggccgggccggggaaaaggaggcatttggaacacttgtgagcatattggagcctttcctctccctctctctcactcatattggttgggattacattctagtgagattgagagccatctagtgcattgcatcaagttgttgatctttgaggcactagggagaacatcaagtgaggtcgttggcttgttactcttggaggttgccgcctcctagacggcttggtggtggttccccgtgagctcttcaaaggagactgtgaagaggtcgcggtggtgattgtgagaggcgttgtgcttgcctcgccggagcggtgaaaagcaactctagtggaatcgaggtttgagggttcattgaccaatccggctcaagagatcaagtggagacttgatagaggagcggttgggagctttgaatctacctcaacgtggactaggggtgactggcaagtcatcgacaccacgggaaaaaatcattgtgccacgtgtcatcatcttccagtggtattaatggagaaagatcagaaatagctgaaattgaagcagcatcaacaagtgaagctgctcggcttagagctgctctccggcgtgctccacccggcgctgttcgggaacctcaccagtcttttgaacggcttacacagacctgttttgataagagccgagcagcgattcttcaatttcggaccacgacctagctaaaggctaatggttccaaatgtttccaaatgtctgaagtaccgaagactgggctagctccttgtttttttgtcatgtcaaataaatcgtgtatgattgcaacaatattggcaaaatatcgttgtgctttatattttgatgtactgtgaacaaaacaagtgccctatgagaccatcatgatttatgcattttcaaactaaattttacgacacttcttgttgt

SEQ ID NO: 50629 - DNA, 453 bp, Zea mays
  Clone ID: MRT4577_146169C.1
aaaaagtccaggagtttcagcacaagcggttttatggatctgacatgtccttaaaaggacgagttagtgaacttggaaaaaaggaagacgtgagtgaagatgggggtgatgagtatcctccaccagattcagatcatgaatcaacagaatctgatgaggacttctatatgtgtcagatttgcaacactgaagaggagaaaaactcattgttttgttgctgtatttgtgcttcacgggttcaccctggttgcctcactccaccttcgactgacatcgtgaatgatgattggtcatgttatggttgcaaggagaaagttaaaagctacttaaaagaaagagatgcttacttgactgaactctcaaagaggtatgatgctgcattggacagaaagtcaaaaattcttgacataatcccgtccttggatttacctagtaatcctttagatgatatca

SEQ ID NO: 50630 - DNA, 219 bp, Zea mays
  unsure (1)..(219): unsure at all n locations
  Clone ID: MRT4577_14616C.1
cggacgcgtggggccgtgctgcccagaatancatctctcacccatggccgcggccaccgccgggcgccccatgcagagccgaacccccaactagcatcagcgaccgcccagcagacagcagaggaggagcgcggcaaatcctcggcgccccaccaccactcacatcacaaggcggactacacgcaccacaccatacgccgagccgaggagcgcccgcac

SEQ ID NO: 50631 - DNA, 131 bp, Zea mays
  Clone ID: MRT4577_146170C.1
acctcaagcaaagcataacattgcgtgcttgggccccaaaaatattatatactgtctgtacttactgacggtgcccgaacttgaaacactcaaattgtatctttccccatatgtgactcaagctacctcat

SEQ ID NO: 50632 - DNA, 365 bp, Zea mays
  Clone ID: MRT4577_146171C.1
cacttcatatagttggcattgtccagtgatcaaggttgactttctccctcttggagctgttctttgaagcgacacgtgctacctgtagctgtgtgcctcgacattccctatgatcagcacctggttacatgcgtgatctcgagatcacgcctgctggataacctcggagcaataaaagtgtcttccatggcattttttctttctttttgctcttttgtgtccttcaatgttgtacggtagaatgttgtagcgcaaacgatacttacatgctgtttcgatcttggaggcctggatctgtggatacatcatgctgtaaactgcttagtttaattaccataccgtgctgctctctgcgcctttccatc

SEQ ID NO: 50633 - DNA, 367 bp, Zea mays
  Clone ID: MRT4577_146172C.1
ggttctcttataactttatattttttggggtttttatttgttgtttggggggaattatgctgtttttccaagggtttaatggcatgcccatttttaacccacccgggcccaaacagggaggggaccaacaaaaccccactgggcggaacacgcagggggaacaaagggaaacgggaaacacctcgggaccccggcacggggagccgcgaacaacaagggcccgaaggggagcgagggaaacgaaggggttcgccggcgcaaaaccccccaacaaaaaaaaatagcatagggggggaggctaaccgcaccaatcccctctataaaaaacactcccggacaaaaacttaagggacaggaaataccccac

SEQ ID NO: 50634 - DNA, 395 bp, Zea mays
  Clone ID: MRT4577_146173C.1
ctaattccctcctcgagccacgcatgcgtcctaacagctaatgcttcactactagcacctccagttcctgcactcgatcccacatggggcaaatttcctactatgctatacaatatcccatctgtacctatcaccatctaggaccatctcgcacacacctgctgaccccttaaatagctagatttttactgacccatttgatacggccaccatgctccttacactcttctcaacttatatgaacctcgatagtcttctctaagttcaccaatctccattaaggaccatttatcattgctgttggaaccaagcactcacaatgtacatcagtgttttctttaaccatcgcgctttgcaagtactcaacttgtacacattcttctaaaacgtccata

SEQ ID NO: 50635 - DNA, 351 bp, Zea mays
  unsure (1)..(351): unsure at all n locations
  Clone ID: MRT4577_146174C.1
accacgcgtccgatgctttgtctnctgtctcgggcttctccgcgtgtctacggcctttctgtacgccgccctatacactcatcgacatagccatcgagagggccgtcaacagaaaccagagcggcaaacaccatggcgagctcgaggaccatcgtggcgctcctcgtgctcctactcgtgcttctcctggtgactttcgcggccaccgtcgacgcccacgttgttcgcgagctgctatgccaggaccaattccagcagacatgctaccaggtgcacttcaagaagatgtgccagatcttgacgaggctaacgagggtgacaacgccgctcgaactgatgctagcgtcgatg

SEQ ID NO: 50636 - DNA, 923 bp, Zea mays
  Clone ID: MRT4577_146175C.1
aagcccctctcgcccgtctcgatcccacaggatccgagagacctcacaagccgccacgccagttccccatcccatcgcggcgcctaccccacccgccctgctcccgcccggtagtagtagcagagcctcgccgccgctgccgagaatagatggggttcgtgtccttcgtcgggcgggtgctcttcgtcgccgctttcctcctctccgcctaccaggagtttaatgaatttggcgctgatggtgggccagcagctaaggcccttcagcccaagttcaatgtgtttgtaaaaaatatctctgcacatctgggagtagctgtcccgcacattgagttgaagcatgtgattgctgctacaattgctcttaagggacttggaagtctcctttttattttgagcagctccctcggtgcttatctcctgctgctgtacctcgctctgatcactcctatcgttcacgacttctacaactacgacacggagaaggaagaattcgcgcggctgtttgcgaagttcacccaggacgtggcgctggttggagctctcctcgtcttcctgggcatgaagaactccatcccgaagcggcagggcaagaagaaggctcacaaggcgaagacgaactagtaggaggctgctcgctctttctttagatggttgcgcgccggcctcaggcgggtgtcaggagacgaataggcccactagtgcgaagcagtcgtcgatgcgcatcgagctgccggctgcgcttttacatgtatcggatattcaaattcccttttgcggggcgcggcccgaacaaaggtgtgactagtgggcggcgggttagccaacacgacccggccatgtatgtgattgcaattggttggttggtttcttgaactgggctggcgggggttaatcttttcgatttgattatcttttgccctc

SEQ ID NO: 50637 - DNA, 971 bp, Zea mays
  unsure (1)..(971): unsure at all n locations
  Clone ID: MRT4577_146176C.1
ccggccgggaagtccctctcggccgtctcgatcccacaggatccgagagacctacacaagccgccacgcccaggtccccatcccatcgcggcgcctgccacaccccacctgctcccgcccggtagtagtagcagagcctcgccgccgttgccgagaatagatggggttcgtgtccttcgtcgggcgggtgctcttcgtcgccgctttcctcctctccgcctaccaggagtttaatgaatttggcgctgatggtgggccagcagctaaggcccttcagcccaagttcaatgtgtttgtaaaaaatatctctgcgcatctgggagtagttgtgccgcacattgagttgaagcatgtgattgctgctacaattgctcttaagggacttggaagtctcctttttattttgagcagctccctcggtgcttatctcctgctgctgtacctcgctctgatcactcctatcgttcacgacttctacaactacgacacggagaaggaagaattcgcgcggctgtttgcgaagttcacccaggacgtggcgctggttggagctctcctcgtcttcctgggcatgaagaactccatcccgaagcggcagggcaagaagaaggctcacaaggcgaagacgaactagtaagaggctgctcgctctttagatagttgcgcgccgggctcaggcgggtgtcaggagacgaataggcccagtgcgaagcagtcgtcgatgcgcatcgagctgttggctgcgcttttacatgtatcggatattcagattccattccattttgcgtggcgcggcccgaacgaaggtgtgactagtgagcggcgggttaggcgacacggtcgtgtatgtgattgcgattggttggttggtttcttgaactgngctgacagtggttaatcttttcgatttgattatcttttgcactgngccgcagctgattcgatcaggaaaagtcaacactgtccgaaaa

SEQ ID NO: 50638 - DNA, 859 bp, Zea mays
  Clone ID: MRT4577_146177C.1
gggtacctcgaggccggccgggccctctcggccgtctcgatcccacaggatccgagagacctcacaagccgccacgccacgccaggtccccatcccatcgcggcgcctgccacaccccacctgctcccgcccggtagtagtagcagagcctcgccgccgctgccgagaatagatggggttcgtgtccttcgtcgggcgggtgctcttcgtcgccgctttcctcctctccgcctaccaggagtttaatgaatttggcgctgatggtgggccagcagctaaggcccttcagcccaagttcaatgtgtttgtaaaaaatatctctgcacatctgggagtagctgtcccgcacattgagttgaagcatgtgattgctgctacaattgctcttaagggacttggaagtctcctttttattttgagcagctccctcggtgcttatctcctgctgctgtacctcgctttgatcactcctatcgttcacgacttctacaactacgacacggagaaggaagaattcgcgcggctgtttgcgaagttcacccaggacgtggcgctggttggagctctcctcgtcttcctgggcatgaagaactccatcccgaagcggcagggcaagaagaaggctcacaaggcgaagacgaactagtaagaggctgctcgctctttagatagttgcgcgccgggctcaggcgggtgtcaggagacgaataggcccagtgcgaagcagtcgtcgatgcgcatcgagctgtcggctgcgcttttacatgtatcggatattcagattccattccattttgcggggcgcggccccgaacgaaggtgtgactagtgagcggcgggttaggcgacacgacagcaa

SEQ ID NO: 50639 - DNA, 1259 bp, Zea mays
  Clone ID: MRT4577_146178C.1
cgaacgaaggtgtcactagtgagcggcggtcatgtatgtgattgcgattggttggttggtttcttgaactgggctggcagtggttaatcttttcgatttgattaaaaaaaaaaaaaaaaaaaaaaaaaaaaaaaaaaaaaaaaaaaaaaaaaaaaaaaaaaaaaaaaaagtccctctcggccgtctcgatcccacaggatccgagagacctcacaagccgccacgccacgccaggtccccatcccatcgcggcgcctgccacaccccacctgctcccgcccggtagtagtagcagagcctcgccgccgctgccgagaatagatggggttcgtgtccttcgtcgggcgggtgctcttcgtcgccgctttcctcctctccgcctaccaggagtttaatgaatttggcgctgatggtgggccagcagctaaggcccttcagcccaagttcaatgtgtttgtaaaaaatatctctgcacatctgggagtagctgtgccgcacattgagttgaagcatgtgattgctgctacaattgctcttaagggacttggaagtctcctttttattttgagcagctccctcggtgcttatctcctgctgctgtacctcgctctgatcactcctatcgttcacgacttctacaactacgacacggagaaggaagaattcgcgcggctgtttgcgaagttcacccaggacgtggcgctggttggagctctcctcgtcttcctgggcatgaagaactccatcccgaagcggcagggcaagaagaaggctcacaaggcgaagacgaactagtaggaggctgctcgctctttctttagatggttgcgcgccggcctcaggcgggtgtcaggagacgaataggcccactagtgcgaagcagtcgtcgatgcgcatcgagctgccggctgcgcttttacatgtatcggatattcagattccattttgcggggcgcggcccgaacgaaggtgtgactagtgagcggcccgaacgaaggtgtgactagtgagcggcggtcatgtatgtgattgcgattggttggttggtttcttgaactgggctggcagtggttaatcttttcgatttgattatcttttgcactggcccgcaactgattcgatcaggaaaagtcatcactgtccgaaaaacttacttgtaaaggtagggcatgtttggttgaaggcccaaaaattgctacacattttctcccatgtttgcccaaaaaaaaaaaaaaaaaaaaaaaaaaaaaaaaggtgac

SEQ ID NO: 50640 - DNA, 240 bp, Zea mays
  Clone ID: MRT4577_146179C.1
cggacgcgtggcgagacgcgtgggcaggactgcgagcaaggtgtagtgcacagggacatcaagccgagcaccgtcatgctggatgcctccttcaacgccaagctcggcgactttgggctcgcgaggctggtcgaccacgcccgtggagcgcacaccacggagctcgccgggacgatggggtacatggaccctgcatgcatcagcacaggcaggttcagcacccagtcggccatgtacagc

SEQ ID NO: 50641 - DNA, 259 bp, Zea mays
  Clone ID: MRT4577_14617C.1
ggggcttgataccacaaaatttttgggaataagagaaactctggttactaaaaagaataccgagctaaaatctatttcgcttgcaacaaactgaaacatctatccatgggggggtgtatctttacccagactgtaaatccagggatagaaatccttgtgcccctgtagcccttttgttgaaaaaaagattaaacggaatgggctggttaagctcggaaggtccccagatgccaaatctgggccgcttcatcacccaact

SEQ ID NO: 50642 - DNA, 593 bp, Zea mays
  Clone ID: MRT4577_146180C.1
cctcgaagccggccgggaagacgtcgactgcttccttcttctcctgagagactaggtgctgtctatctctcccgttcgctattcctctgccttcctatatcaatccgcgcagttggacgtccccggcttatctcacggactctgtccaaatggaggactctccgcctctaggtactaataaggtgtactcactcaccaaagcccctgctgtctcatgctccgcaggaaagatagcccgggccgccgctgctacaaggatctgctgttcgtaatggacgccaccttggaatccgctctgccaatcgcgtacctgttccccttcgtctactatatgatattggacctgctggtcgctgagaggaaggaatacattgcattctacgctgggttcctcggctcacatacatgatctggagaggcgtcacgacggccttctgcggcaaggcgtcttgctccgctacttcggatatgcggcatcgcggtgtcccacatctcgtgctgagccgctcacttctctgtgctccgctgaccggatggtactggatgcgtatctctactacgaatctcctgcgagatcgcgatggattccttgc

SEQ ID NO: 50643 - DNA, 882 bp, Zea mays
  Clone ID: MRT4577_146181C.1
aaaaaaaaaaaaaaaagtccctctcggccgtctcgatcccacaggatccgagagacctcacacaagccgccacgcccaggtccccatcccatcgcggcgcctgccacaccccacctgctcccgcccggtagtactagcagagcctcgccgccgttgccgagaatagatggggttcgtgtccttcgtcgggcgggtgctcttcgtcgccgctttcctcctctccgcctaccaggagtttaatgaatttggcgctgatggtggggccagcagctaaggcccttcagcccaagttcaatgtgtttgtaaaaaatatctctgcacatctgggagtagctgtcccgcacattgagttgaagcatgtgattgctgctacaattgctcttaagggacttggaagtctcctttttattttgaccagctccctcggtgcttatctcctgctgctgtacctcgctctgatcagtcctatcgttcacgacttctacaactacgacacggagaaggaagaattcgcgcggctgtttgcgaagttcacccaggacgtggcgctagttggagctctcctcgtcttcctgggcatgaagaactccaccccgaagcggcagggcaagaagaaggctcacaaggcgaagacgaactagtaagaggttgctcgctcggcctcaggcgggtgtcaggagacgaatagtggcccagtgcgaagcagtcgatgcgcatcgagctgtcggctgcgcttttacatgtatcggatattcagattccattttgcgggggcgcggcccgaacgaaggtgtgattagtgggcggcgggttaggcgacacgacacggtcatggcgcagctgattcgatcagaaaaagtcacactgtccgaaaaacttact

SEQ ID NO: 50644 - DNA, 323 bp, Zea mays
  Clone ID: MRT4577_146182C.1
aggggccgggccgacgggcacttcttcttttactggttatttttattagcattttatgcaactgattattaactcgaacctaaactatgctactgtgcagactgataatcgtaagatcacaaggagagccgtgaaggtttgcaccaaggttctgaatctagatttccacgagttaactctgtctacaggacggtgcgagcttacattcaaattgctgagctagaactagcataggcggatatcatagagacattggacatctatactgacatcacggctggcaaatagtaagtataagatcctcaacgagaacataacggagc

SEQ ID NO: 50645 - DNA, 411 bp, Zea mays
  Clone ID: MRT4577_146183C.1
agagccagcacgtgtgcgctgctgtgctaatcggagcgatcctaatgtttccacatggcgacatcgaccttgcccagtcctaccatcacgtcgatgtgccagtgatcgagcacacgcagaaagtgatagagagactcaccgcgccccacaccggccatggcaacacggccccgctcgacatcgtggttgtccaggacatcagcgtgagcatgcttgccacgaacctcgagcatatgaatgacgccttgaccaggttcataatccagaagctcgaaatccgcggtgaccggctcgccatcatcacattcgaatcgaaagcacataaagagcgcgacctgtcgtccatgactcccggaccaagtgaagaaagcgccgaccgattgagtaaggtcagaaagccggtggagacac

SEQ ID NO: 50646 - DNA, 447 bp, Zea mays
  Clone ID: MRT4577_146184C.1
ccagcggcggggcgggcggggcctgcatcaagcaacgagggggtgtcaaattaactaacgtgttcaaccctactgctgcaacaagtgatggcctcaccgatttaacctagccaaatgctcaatgactacgccaaggatgatgcctacacagacaatgacctcctgggggcgatatggtgccataacatgatggcgccgactatgacgcaaccaatgactatcgcatcatgcgaggccactgttgaagacgccagaacatggtcatcaccacacgatgatgccaaggtaatgccttctaaatgacaccgcgtctgatgccatcgatactgatggctaggttgataccaccagagatgatgccctgcatggcgctatcaatgataatgctctacaggataacagcgccacaatgatactctagaattcatctcgcacattatgcgagag

SEQ ID NO: 50647 - DNA, 566 bp, Zea mays
  Clone ID: MRT4577_146185C.1
tgggtacctcgaggccggccgggtatctgtttattgcttagacaggcgtcttcgccgctcgcatatttccgcgaatcaaagttttccctagttatcagcgtagtccaggtcgtagcccggcggcggttacccacgaatccacagagagagacgaagcggatgtcgatacgagtgccgtcactgttgtattcaactgccaagctcctgctgcgaagtggactgtatcgatcatgggataaccggtggcggacagaggccaggcggcgagatcattgcgggatgtgatgatggttctccctccttctgaagtgaaactggctctggtaatcactctccctgtattatatttcgggaacctgaggcgactgggatcaatgatgcgaggtctgctccccaccgccggcgcttgcgttcatgggggatcatcagtgcgaaggaggcactcagaggactactacgtccgcagtgatctagaccggtgtgccaagagaatgccggcctgactacttgaccacatcttgaaaatttgcggagaaatgcgctgggggctatgcattgccatcgtc

SEQ ID NO: 50648 - DNA, 384 bp, Zea mays
  Clone ID: MRT4577_146186C.1
taggggccttttttttttttttttttgatatgaatattgtatgtctagatattcattaggtcgggtacgattatggcaagtagaggttgtggcaagggtataataaggaaagacttcggggttgtttggtttgctacctaagacgccacagcgtgcctaacttttctgcctaaccttagttcttcaattcgagcgactaaggttaggcagattggggcgccttagggaggaaaccaaacaggcccttcatcctaaactatggatcttgattccgctgacgattccacttgatctttgaagccttgagttgatgcttatccccttctgacatgcctatccgccgccccactccccccctacccacaccttctcaaacccccgctc

SEQ ID NO: 50649 - DNA, 664 bp, Zea mays
  Clone ID: MRT4577_146187C.1
cctcgaggccggccgggactacttcgatagtgtgcgttattattcgtctcgtctctcctctcctctcctttttcaccctcactgcaccgtgccgctgatcgtcatcggaccatccagcgatcgatggatgaggtactccctgcagtgcaccgtggagtatgttggacgacctttgcccacgcatcggtggtgcgttagaacgacctcataggtcactctagctcgcgcgcttctcgggcttcgagtacagacaacacagaccaacgcagatgatagtaattcacagaggactcggtgtacatgacgtacgcaccaggacatgggcgtaaccctgcagcatcgtatcaccgctcgaggtgaaggaggtcactagtctttctgataatcgtgcacaaggacatatgagcgggataaagcgagcaagaactgtcatagcagatgcttgagcttcaagctcgtcatagacgccagcgatagactgtaggagcacaagcttttcgcatggaagctgctacacaactacgaaagaatgtaactgtcatgccactggaaaactatgatataatgaatacaccgctgtcttacactcgtgcaatggaccctagagagatatttgctcactgctgtagaatgatatgtgctcaagaatatgatcgtcttctaa

SEQ ID NO: 50650 - DNA, 495 bp, Zea mays
  Clone ID: MRT4577_146188C.1
ggccttctgattgtcgtgaggcaaaccacactctagcggaaatgtgtaagaatacatcgcgtgctcttggtcattgcatgactggaaaaaacaggcccgctgctgttgttgcagctcttcttgtagaagtctagaggggggagacttgcatcagtcttttcaatgggagacaagaccgaagaccctggttcaactgacagatgcttcttagactgatcttttttagtatgaactgaagcttttcatgacccgtactcaaaccttggctgccactgaatcattctgttactcttgcatttggttatacaaaaccatcaggtgacatgctaatctcctctgttcaacataacgaccatgcctttcatattcagagacgattctacccatatgaccaccccgccaattgaactactggctctgtgatgaaagcagaaactaaccctcacgaaaccatagtgatggcagaataaacccaacttcaacggtatacctgat

SEQ ID NO: 50651 - DNA, 311 bp, Zea mays
  Clone ID: MRT4577_146189C.1
cactcaccgtagtatcaatctcaccgagatctcctcgatagctactttcatgctgatctcaagtcgattctccgtgcaaagcatgcactgctgaggaagtccaccggcggcaaggcgccgaggaagcagttggcgactaatgcggaccgcaagtctgcccctgcgaccggcggagttactaagccccaccgtttccgtcccggtactgtccctcttcagcttattcttatatattggaattcttcatggctacgtctgcttagacttgcggaataagtcccgcgattgatatcccctccccgcttctggcc

SEQ ID NO: 50652 - DNA, 264 bp, Zea mays
  unsure (1)..(264): unsure at all n locations
  Clone ID: MRT4577_14618C.1
gaacagaaagaaaagagcggggggggggggggggcaggaannccgcggggggcgacnanncanggaacgngagaagcagnnagaaaaacancngcnnccgcaagaaagcgaagaaggncgggggaagccagcaagagcaacacgaacaannaacacggacgaggggggcggagcgncaacngagaacgaaaccaaccgagaggacnacnagagagcagaaagnggggaagaaagaacaaaagaaacaacaggaacanaccaggc

SEQ ID NO: 50653 - DNA, 1885 bp, Zea mays
  Clone ID: MRT4577_146190C.1
agctcgtcccggtttactggacagcaagcgcatttacacagcacgctgaaaggcgggacgcggagcaccttttgcgccttgtcccctcctgctcgtcgcttccctcactctcacagccacgccacgccacgagagaagaatgccgccgacgctgggcctgctcctcgcggcggcggcggcggtcctgctgctgctgctgccgccgccaccatcggcgggggcgcaggagacgtgctggtcggggccggcgccgcggcgcggggcgtggatgtccgtggccagcttcggggcgcgcggggacgggcagacgctcaacacgggcgcgttcgcgcgcgccgtggcgcgcatcgcgcgtcgccggggcgcgcggggcggcacgctgctgtacgtgccgcccggggtgtggctcacgggccccttcaacctcacctcccacatgacgctcttcctcgcccgcggcgccatcgtccgcgccacccaggacacgtcgagctggccgctcatcgacccgctgccgtcgtacgggagagggcgcgagctgcctggcgggagatacatgagcttgatccacggccacggtctgcaggacgtcttcatcacaggtgagaacggcaccatcgacggccaaggcggcgtgtggtgggacatgtggaagaagcgcacgctgcccttcacgaggccgcacctgctggagctcatgtactccaccgacgtcgtcgtctccaacctcgtcttccaggactcgccgttctggaacatccacccggtttactgcagcaacgtagtgatagcaaacctgactgtgttggcgccgcacgactcccccaacaccgacgggatcgatctagattcaagcagcaacgtgtgcgtcgaggactgctacatctccgccggcgacgacctgatctccatcaagagcgggtgggacgagtacggcgtggccttcggccgcccaagctccggcatcacggtccggaggataaccgggtcgggcccgttcgccggcttcgcggtcgggagcgagacctcgggcggcgtggaggacgtcgtggccgagcacctgagcttctccggcgtgggcgtcggggttcacgtgaagacaaactcgggcaggggcggcttcatccggaacgtcaccgtctcccaggtgaccctggacggcgcccgctacggcctgaggatcgccggcgacgttgggggccaccccggcgcgtcctacaacgcgagcctgctccccgtcatcgacggcgtggcggtcaggaacgtctggggccggaacgtccggcaggccgggctcatacggggcatcagggactcggtcttcagtaacatttgcctctccaacgtgaagctctatggcattggcagcgactccatcgggccgtggagatgccgagccgtcagtggcagcgcactcgacgtgcaaccgtcgccatgtgcggagctggctagtacgtccgggacaggtttctgtacctgaatcagtttttccgcctcctatagcagcaataaagacgtcagcatttctccattttgttcatcacctacagggccctttgtttctttggcaaactcttctgcgattcagctgtcactgttgaattctgctgttggcagaggataatctatttttaccagcagccattgcaagagaattatttttacgtccgtgaaatggtgagaccgatcagcattgcacatcctggtgttggtgtaaccagatcccccactgccgtgtgggcgcgggacactgccggccccacacgcagtgaccggcactcacgggtaccatggacttgtttggaagcaaagagaataaaaaaaatgagttgtatagtgtttaatgttccagaagaagagaaagagaagcttcttgtaacaccca

SEQ ID NO: 50654 - DNA, 258 bp, Zea mays
  Clone ID: MRT4577_146191C.1
aagtgtcacaaatgtacatgtaaaccaaccggatcatgagggggtacaagcgttacacactgcattcagagacacactcccgagggataaagacggtggccacccggagcgaggcatacaatacaaacatgtctgcctgcgcggtacgaacacaccacgacaggcaagctatagggcggcacttaatcagtcgatgagcacacacgcgggatcgatgctagccggactaggtggagcgaaacgcagtcgacgttaccg

SEQ ID NO: 50655 - DNA, 519 bp, Zea mays
  Clone ID: MRT4577_146192C.1
tataattgttccacggaataactataaaaaaaaaatggaaggacggaccatcgtaaacaaaggcctaatcataatatctatctttacaagcattcaatacaaagacagccggcggaactgtctgattgtcttgtccggcaaagagaggactaaaagctcattcgttcgtaacaaccagaagttaaaaatgctgtggataggtgatcctatcaaaacatctttcgaggaatgggccacacccgggcatttatcaacaacaataactaagggcccccatactaccacttggatctggaacctacatgcttacgctcactacttgaatagccataccggtcatttagaagacatctcccaaaaagtctttagttctcatttccgtcaactctcacattatctctgtttggttgagcacatatgtactttcacggctgcccttttttccaattatgaagcatgtctaaacgatcctactcacattggacccagcgctcaagtagtttgcccaatagtaggaca

SEQ ID NO: 50656 - DNA, 200 bp, Zea mays
  unsure (1)..(200): unsure at all n locations
  Clone ID: MRT4577_146193C.1
cctcgaggtcccggccgggaaaaaaaaaaaaaaaaaaaaaaaaagaaaggttgtccccgnccgcgcgcctccaatgtcgcccccggcgagtccagtctttccggcgaatgttcgacatgcaccaatgcatggcgggacatcgaagggcgtcatcccgcggtgatcgctccgcatcgcgcatagttcattgaccataccgc

SEQ ID NO: 50657 - DNA, 468 bp, Zea mays
  Clone ID: MRT4577_146194C.1
cggcccccctggttttttttttttttttttttttttttttttttttttttttttttccaaggcccccgcatttaaccacacccccccccccaaaaaaaattgccggaagggggcaaaatacctttcgtggggggaaaaaaaaatggtagggggcccggaaaaagcaaaggcaaaacactttcctttggaaattcttttctgttcccaaagtaattttggggcttgaccaaaactaacaaaagggtcatggggccctggccattttttttgggcgggtttcctgcttcccgatggctttctggacttcttaacccttcctccttttgggaaacttttttcctttaaacttgccttcccgtttgaaaaaaaccttgctttccggtttaggggccttttacaccattttgggaggggggtaaaaacgaacattccccggggtttgtttaaaatccaattccgttgtttttt

SEQ ID NO: 50658 - DNA, 354 bp, Zea mays
  Clone ID: MRT4577_146195C.1
aaaaaggggagcgggcgttttagaggatcaaagttaacttacccgggcatgcgacagaaaagctctcttatgggggcaccaaaattaaattaactggccgccgtttaacaacgtcgggactggaaaaaccctggctttaccaaacttaaaggcctgtgagaaaatccccttttcccaagggggccgaaaaacaaaaaggcccgaaacgattggccttccaaaaaattgcccaaccctaatgggaaatgggaccccccctttaacgggctataaagcgggcgggttgtggggtaaccccaaagtaaccggtcattttgcagccccttaaccccggttcttttgtttttttccttc

SEQ ID NO: 50659 - DNA, 730 bp, Zea mays
  Clone ID: MRT4577_146196C.1
ccggccgggaaaaaaaaaagaaaaagaaaaaacataaaataaaaaaaaaaaaccgaaccggccgggaacaactcggtcgtcaatacacgtggtggagcttccagcgacggtgatccgccggacggacggcgaccggccggtggcatcgcttgacgtcacccgggggcccccccgcgggcatctctgcttcctttcgcgtgctagccagaatgcggattgtcggcagtccgatggcgtcctcgcgatccgtcgaagaatccggccaggacgaagcggtatcgcctgacgccgaccggcggctacgtttcgcgctcctggaggccgcgggagggccatcgatgggcgatggcgagaggtctcgtttggagcaggtggcgccgggcagggcacgcgccgcgcgtggatgttcacgtgcacgcgaagatgcgctcgggcccgcgcagcaccatgtcaccaccccggtcggcggtcgcttgggtgggggcgcggaccaggcctatggcgcccgacggcgacatccaccggagatggaaacgcttgccaggaattgatgctgccagccgtctacgttcccgtcaagccggcaggcgcctgtgcagtgtgggcaaataaatgaacgaccgcgcacgcaggtaggaaacggctcgcacgccggtaggaaacggctcatgctataagaattacaaagtttacaggctcaatgaaaaggttatacatttggagaggcatc

SEQ ID NO: 50660 - DNA, 189 bp, Zea mays
  Clone ID: MRT4577_146197C.1
attcgttggtgaaaagctatgtggttcatatacaccatactcgcccaaccagagtcctcagaagtccagctggtttttgcttataggctaggagaatgcatataaacaaggtgttctctgatcaggtacaaagaggagagggtgcactgggctatcagaaccatgttcgactactgaagcgaccaatca

SEQ ID NO: 50661 - DNA, 433 bp, Zea mays
  Clone ID: MRT4577_146198C.1
ttgatctcagcgatacacacaagactttgtggtggctgtctcagatgttgatcctaactttcacagtgacgacaatgtcatgggagaggccgggcttgatgacccatacctgtgaagtcgcaagcagatgtagccatcaagtgcttttgatgaggatgagtagttccggatggaagacgatgccggagatgatgatgaagaggaatattcattgagtaccagtgaggatctaggggagccacaacggcataaaaagcttgaaactaggcgccggtgaggtacgatgctaagatcagctggctaaatccaatcaggtcttaaacgctgaaagtgctgttctactgctcgcatgaactattggcaatatgatttttcggacatgtatacagagcctcgaaaggcaaggaaatctgacgcatcagatactgatgct

SEQ ID NO: 50662 - DNA, 662 bp, Zea mays
  Clone ID: MRT4577_146199C.1
ctcgaggccggccgggccatagaaatcgaccgagcgaatccctcgcatcgcattcgcagcctttgctgcatcacaccaccgcgaaaccccagcagccgcatcgatggcgcccaaggcggagaagaagccggctgcgaagaagccagcggaggaggagcccgctgccgcgaaggccccggcggggaagaagcccaaggccgagaagcgcctcccggcggccaagtcgtccggcaaagaaggcggcgacaagaagggtaagaagaaggcgaagaagtcggtggagacctacaagatctacatcttcaaggtgctgaagcaggtccaccccgacatcggcatctcttccaaggccatgtccatcatgaactccttcatcaacgacatcttcgagaagctcgccggcgaggctgccaagcttgcgcgctacaacaagaagcccaagcacgcggtctccgagggcaccaaggccgtcactaagttcacatcatcttagatttgaggtagtagctattgggtggcgttggtagttgtgtctcaatttgtctgctactaatagtggtaggagtatccatgtgtagttgggttgtggtaagaattgtgttaaactggtaatacgtttgaaattgctttttatggatgtggaatagttgtgttgcttgtct

SEQ ID NO: 50663 - DNA, 339 bp, Zea mays
  Clone ID: MRT4577_14619C.1
ggggggaggaacctgggtgaattggccattggcatttccggggtcccttcttgttttccaaagaggggcaagctgccccagcaactgaaaataccgggggggggggaccccatttaacattaccaggcgtttttttagcttcccacatcttgaacattaaaagcctccccaattttggcaatgcccgcgagaaatcgaatgggcataaccttaataaaacagagggccctgacttaaagcaggggtcccgattttgttcccctgtttttgggggaacagaatagaacaggcgacgaacaacccagacaattgaagcatgaacccttcaactggatagac

SEQ ID NO: 50664 - DNA, 3616 bp, Zea mays
  Clone ID: MRT4577_1461C.1
ctcgaggccggccggatgttactgtgccttggacttgagaggaagtatcatgcttgcatttagcatttagcaatcagttccaactggagctacttgaatacctaattgtccagtagccttctttttttctatcttattcactatagcacatttgaaattgctgaatgattcattggctcaactatatcctttaacagttagtatttggacgaagcttcctttgtaatgggatgttgaactgaggatagagcgtggacataatgtttggtttcgatgaggctaagtactccaaactttcatttggcagtggtcgttctgggttcatgatatatggtaccaaattccagttttgaatttttaatctcatatgcaggtatttgcttaatgctcaccttcttaaccatctatctatcgagcaggatggtccctcctttcttatggaggggcctccataatcagctaatggagtaatctgtgtgaacttctctttttttgtcaataccatatccttactatcattatttaccccctttatttcctcacatgcacaagatttctgatgttatgctaaactgttttcagccaattcctctcctttccatccacgccgctgcgctcccgatgcaaccctaaccacctcatcgccggcgcgatcttccccgcccccactccccggctattgcctctgattggcggctctccgggattcacgttggtccggggtacggctcctgcgattttcacgcaatggagcaagatcagagcgtggttgtcggcagcgcggactctggtgctgcggcttttggttttgcgactggcaacccccctagcttggctgtgaccggcggaagcgccgtggcccccgacggtggagctcaggcagttgatgcctctgcgtaccaggccgagcacacggcgttgaatgggactgtcggcgatatgggtaattacccatctacaggagttgcagagaacggcgaagccgtccccaacgagacgggcgagccggttcctgagctatcgtacgaagaagctgtgctttcagcagaagaggctaggttatggagtgttgttaccgcgaattccttagattttaatgcctggaccgcacttattgaggaaacagagaaaaatgctgagaacaatattttgaagatacggaaagtgtatgattcgtttcttgcggaattccctctttgctttgggtattggaagaaatatgctgaccatgaagcgagacttgatggtgtgagtaaagttatagaggtgtatgaacgagcagttctcgcagttacttattcagtggacatttggtataactattgtcagtttgcaatttcaacatatgatgattcagatatcatacgaagactgtttgaacgtggcttggcatatgttggaacagattatcattccaatattttgtgggatgagtatattaagtatgaagagtcactggaggcttggagtcatctagctgatatatatacaagagtattggaacatcccatccagcagcttgatcgctattttaattgcctcaaggaattggcttcaaagcacagtttttcagaaatacttactgcggaagaagcctcggtgtatgttgtcacgtctgagaccagtgctcaagcgcctgatggtgacacacatcctgatgatgttgataagcctggtcaaccagaactttcatctctggcagatgcagaaaaccttgcaaagtatgtctccatgagagaagagatgtacaagaaggctaaagagtacgaatctgagatcattggttttgagctagctattagaaggccatattttcatgtcaagcctcttgacaatccagagcttgaaaattggcatagctaccttgactttatcgagaaggaagaagacattaataaggttatcaaattgtatgaaaggtgtgtgattgcatgtgctagttattcagaattctggatccgctatgtgcaatgtatggaggataaagggagtctagacctagcaaacaatgccctggctcgtgctactcatgtgtttgtcaagaagcagccggagatccatctgtttagtgctcgctttaaggagcttaatggggatatttctggagcacgtgcagagtatcagcatctttactcagatttatgtcctggctttctagaggccatcgtgaagcattctaatatggaacaccgactgggagataaagaattatcttgttcagtttatgaaaaggccatcgctgctgagaagggaaaggaacagagccagctcttgccgacattgcttattcagtactcccgtttcttatttttggccatccgagacttggagaaggcaagggaaatattaactgtgctgcatgagcagttaaatgtaacaaaaccagtgcttgaggctgtcattcatctagagtcgatttttccatgcgaaaagcgtattgattttttagactcacttgtggagaagtttgttacacctgaatcatctcagggagagttggcaagtctagttgacaaagaagaaatatcttccatatttttagagtttttggatctctttggtgatgcaaagtcaatcaagaaggctttaactcggcatacaactcttttttcatgtaagagaagcattctgccatcaaagaaacggaaagctgatgatgctgttgtgtcagacagggacaagtttgctaaaactgggtctgttcagtcagccacaggaactgatccaaatgcttccaatcctcctgtttggcctgcgacttctgaaacatctggacatcaatggggagcttcttatgctcagcaggctgcatatcctgcatatggaacttatgactacagccatcaaatgccacagcctgctcctcaaacagctgcctatggtgcttatcctccaacatactctgttcaggcctatacacaacaaagctacacacaacctgcagcaattccggcagcaccagtgccagcagtggtaccagcacctacaccggcgtcagcttaccctcagcaacctgcggcagctcctcaaccttattatggaacaacctactactgacaagtagagtaatcttcgatggcgatctgacgagcctgttaatcagcaggtttgtcgatacgaggtcaaaggcatcgcaaaaccctctgtactgccattgtttagccccccttcagacagatgccgtcgacgagatgatcgcttgagaacaaatttgagattggtatagtctgcatttttgtcgttagcatgtgtcgctagggattgctattgtttttcttgtaatagcataatctttactgtagaagaggcagcgggtgctaaccaatcctatgaacatataattaacattattcactgtttcatgccacctttcggagtgcttttttttttcaaccactgatgatagcgggattcctgtcaagcacgctcactggtgaagtcctcggaacaaaattgtcaagatctgcgactacacagttcactgatttctactgtcactgtaggtcaaactatcttgatttgactaatttggaagggagattcggtaacttagtaacaatatatgaccaaatgactattttctgaaaatgcattttgtttagaatttatcaaattt

SEQ ID NO: 50665 - DNA, 732 bp, Zea mays
  Clone ID: MRT4577_146200C.1
tggacggccatagaaatcgaccgagcgaatccctcgcatcgcattcgcagcctttgctgcatcacaccaccgcgaaaccccagcagccgcatcgatggcgcccaaggcggagaagaagccggctgcgaagaagccagcggaggaggagcccgctgccgcgaaggccccggcggccaagtcgtccggcaaagaaggcggcgacaagaagggtaagaagaaggcgaagaagtcggtggagacctacaagatctacatcttcaaggtgctgaagcaggtccaccccgacatcggcatctcttccaaggccatgtccatcatgaactccttcatcaacgacatcttcgagaagctcgccggcgaggctgccaagcttgcgcgctacaacaagaagcccaccatcacctctcgggagattcaaacctctgtccgccttgtccttcccggcgagctcgccaagcacgcggtctccgagggcaccaaggccgtcactaagttcacatcatcttagatttgaggtagtagctattgggtggcgttggtagttgtgtctcaatttgtctgctactaatagtggtagcagtatccatgtgtagttgggttgtggtaagaattgtgttaaactggtaatacgtttgaaattgcttttttcaaaaaaaaaaaaaaaaaaaaaaaaagtactctgcgttgttacactgcttaaggacatattccagcacacggcggccgtactag

SEQ ID NO: 50666 - DNA, 770 bp, Zea mays
  Clone ID: MRT4577_146201C.1
actccatagggcgattgggttcctcgaggccggccacggccatagaaatcgaccgagcgaatcctcgcttcgcagtcgcagcctttcctgcatcacaccaccgcgaaaccccagcagccgcatcgatggcgcccaaggcggagaagaagcccgctgcgaagaagccagcggaggaggagcccgctgccgcgaaggccccggcggggaagaagcccaaggccgagaagcgcctcccggcggccaagtcgtccggcaaagaaggcggcgacaagaagggcaagaagaaggcgaagaagtcggtggagacctacaagatctacatcttcaaggtgctgaagcaggtccaccccgacatcggcatctcttccaaggccatgtccatcatgaactccttcatcaacgacatcttcgagaagctcgccggcgaggctgccaagcttgcgcgctacaacaagaagcccaccatcacctctcgggagattcaaacctctgttcgccttgtccttcccggcgagctcgccaagcacgctgtctctgagggcaccaaggccgtcactaagttcacatcatcttagatttgaggtagtagctattgggtggcgttggtagttgtgtctcaatttgtctgctactaatagtggtaggagtatccatgtgtagttgggttgcggtaagaattgtgttaaactggtaatatgtttgaaattgctttttgtggatgtggaaaaaaaaaaaaaaaaaaatgaagaaaaaaaaaaaagggggggccc

SEQ ID NO: 50667 - DNA, 853 bp, Zea mays
  Clone ID: MRT4577_146202C.1
gcgattgggttcctcgaggccggccaggatatagaaatcgaccgagcgaatcctcgcttcgcagtcgcagcctttcctgcatcacaccaccgcgaaaccccagcagccgcatcgatggcgcccaaggcggagaagaagcccgctgcgaagaagccagcggaggaggagcccgctgccgcgaaggccccggcggggaagaagcccaaggccgagaagcgcctcccggcggccaagtcgtccggcaaagaaggcggcgacaagaagggcaagaagaaggcgaagaagtcggtggagacctacaagatctacatcttcaaggtgctgaagcaggtccaccccgacatcggcatctcttccaaggccatgtccatcatgaactccttcatcaacgacatcttcgagaagctggccggcgaggccgccaagctcgcgcgctacaacaagaagcccaccatcacctcccgcgagatccagacctccgtgcgcctcgtgctccccggcgagctcgccaagcacgccgtctctgagggcaccaaggccgtcaccaagttcacctcctcctaggcttgcacgctcgccctttgtaggcttctcttgtgttgatgttcgccttgtgttgtagttagatgttgctggtttctctgtcggcgctgctctgcttctgtaggaactgcgtcatgtaacccagcaaggacttgtttatttgtgaatcatcaacactttgttgttgatcacttatgttccaaattctgagtttgacgctaaaaaaaaaaaaaaaaaaaaaaaaaaaaaaaaaaaaaaaaaaaaaaaaaaaaaaaaaaaaaaaaaaaaaaaaaggggcgggcggttttaa

SEQ ID NO: 50668 - DNA, 266 bp, Zea mays
  Clone ID: MRT4577_146203C.1
tcctgtggaaaaccgttttggcaaataatattatccgagatcgacaaaactttagtagaggggaaaactttgttgctactggaaaacatgtgtttataaaaagggttgccctgagccttgttgaggatgacacccttgtacttgacctggaaccacttaataaaatcctccttggaaaccctgggctggatcccaaaacgggacttgcacctttggggtggggcgaaacggtacccagggcgctaaggacgacgtaaaaatccatt

SEQ ID NO: 50669 - DNA, 991 bp, Zea mays
  Clone ID: MRT4577_146204C.1
accgtcgccttccccgtttcgtcttccggtcctcgttttatcccctcgcccttgcactcctccgccgcacccctttcctccttccgccctccgccgcgcctggctttctcccttcccgagaggccacgctccatccccgcccgcgctgcctcccctggcgatcggcggcgaccgcggcccaacgaaagcgtcgtggtcggccgctgtcacgcttcttgcagacgctgggcggactgggaacaaaccccagcagccgcatcgatggcgcccaaggcggagaagaagccggctgcgaagaagccagcggaggaggagcccgctgccgcgaaggccccggcggggaagaagcccaaggccgagaagcgcctcccggcggccaagtcgtccggcaaagaaggcggcgacaagaagggtaagaagaaggcgaagaagtcggtggagacctacaagatctacatcttcaaggtgctgaagcaggtccaccccgacatcggcatctcttccaaggccatgtccatcatgaactccttcatcaacgacatcttcgagaagctcgccggcgaggctgccaagcttgcgcgctacaacaagaagcccaccatcacctctcgggagattcaaacctctgtccgccttgtccttcccggcgagctcgccaagcacgcggtctccgagggcaccaaggccgtcactaagttcaccagcaactgagcgcgctgcgggatccgcggatctgttagaagggttctttgctgtgtcctttccccagtcccccaccctacccgcctagtagctagcttgcctgctctataaatccggcgcgccggattgtaatggtcctcttagatttgatgtccctgttggggaatatagttgtatctctccgcctgctatttttctcattctttaggaaaatggaaatctggtcattttaaaagggagattactaggctcgtcgcaaattcgcggttaaaaaaaaaaaaaaaaaaac

SEQ ID NO: 50670 - DNA, 611 bp, Zea mays
  Clone ID: MRT4577_146205C.1
tcgaggccggccgggtttcacactacataaactggttagcttctcatgatgtaatgcaaaaaatgtctctgtctcattctttggttactgctgctttggtccgtacaaccagttagctccatagtttggtaatgttgttttggtctataaaagccttttgtcactttatactacagttttggtactgctaaagaatatctacttaacatgccattaatttggatctccatcccaaaccgcaaggaccattctgtttgttcaaccgacatgctctgcgcagttagcaactttagtcttgaatgtttcagatttgcttttcgtgatcttcatgcctattaattagaaatggtcagttgtgtaattatttacgaatttgtttgtctaacttgtttgcgaaagaaatggtttttcctcttgtcccaaacgcattgttcctctagcggagttcttggggaattcgtgtggatcgaggaagggattttatttgtgttggggtttggaaaggggggtggtgttgctcctgctgttcttggcatgagccgtggagatggggacatactactacaatgtgctcaaggtgagccgaaacgccacggggtgacataggagga

SEQ ID NO: 50671 - DNA, 1032 bp, Zea mays
  Clone ID: MRT4577_146206C.1
ttgggtacctcgaggccggccgggacaaatgtaagtgagagccaacaaattctcattggtaattaaattattatgtatgtaccatgccattgtaattttgtatgcttactactactactaccactacaacacttgttgcttcatttttcttttaaacttgtactgagaaacagaaccatcaattttctctgccttctcattgtgcaataaaattcttaccttgaaaaaaaaaaaaaaaatagaaatcgaccgagcgaatccctcgcatcgcattcgcagcctttgctgcatcacaccaccgcgaaaccccagcagccgcatcgatggcgcctaaggcggagaagaagccggctgcgaagaagccagcggaggaggagcccgctgccgcgaaggccccggcggggaagaagcccaaggccgagaagcgcctcccggcggccaagtcgtccggcaaagaaggcggcgacaagaagggtaagaagaaggcgaagaagtcggtggagacctacaagatctacatcttcaaggtgctgaagcaggtccacccggacatcggcatctcttccaaggccatgtccatcatgaactccttcatcaacgacatcttcgagaagctcgccggcgaggctgccaagcttgcgcgctacaacaagaagcccaccatcacctctcgggagattcaaacctctgtccgccttgtccttcccggcgagctcgccaagcacgcggtctccgagggcaccaaggccgtcactaagttcacatcatcttagatttgaggtagtagctattgggtggcgttggtagctgtgtctcaatttgtctgctactaatagtggtaggagtatccatgtgtagttgggttgcggtaagaattgtgttaaactggcaatatgtttgaagttgctttttatggatgtggaatagttgtgttgcttgttctacgttcggtttctgtctggatgcgattctcttatcttggaactgtcattgttgataatgaactgacaaaaaaaaaaaaaaaaagcggcc

SEQ ID NO: 50672 - DNA, 256 bp, Zea mays
  Clone ID: MRT4577_146207C.1
gtccggcgctcgctgctagcgcctcctcttgttctatttgcggctgaggctgccagacaccaggggttttatttaccgcctccgtactatatgccgcctccgttctatctgccgccgtagttagcagcctcagttcatggcaataccccacttaaccacccgtagtatacctttgccatctagttcgtatccttcggcttttgcagcttctagtagactgttcctggttcagtgctgtccagtctcttgtggtacc

SEQ ID NO: 50673 - DNA, 500 bp, Zea mays
  unsure (1)..(500): unsure at all n locations
  Clone ID: MRT4577_146208C.1
ggggggggggggggcgctgagaacccagtgtgggaagcgccgggatcctggccctgggctgctagcgctcctgtgcgctgccgcggcccggccgcggcagaactgcggctgtcttctacttctnctcacattttgggggggggggcttattctttcctctgcgggacnggtgccagtcggcccgtgccgctcggcggcggcggcggcggcgcggcggcggggcggcggaggcgtggcggtgcgaantggcgaatgtggtcccgcgcgttcttcacggcgtcaagaaccaggccgggagcgggtgcgagggcaagaacttctacacccggagcgcgttcctgagcgccggcaacgcgtgcccgggcttcgcccntggcgggacgggggtggggggcatgcgcgagatcgccgccttcttcgcgcacggtccgcgcgagaccgggcatttctggtacctccgcgnggtcaccaagagcaacgcctactgggacgcgagcaac

SEQ ID NO: 50674 - DNA, 1149 bp, Zea mays
  Clone ID: MRT4577_146209C.1
ttgcttgcctcctcctcccctctcccgcgggtctcctccatcctccgcctctcttccccacgccgccacagcttcccgcactccaaggcgcggcaccaaccaaccgcacccccgcgggagctggcgtgagcaggtctgcgtgcgtgtcgctatcttccccccatggcgtgggtgatgcaccggtcgagctcggacggcgggtcgagcagcgggtggtcggacgccgcggcggccgtggtggcggcggcggaggagcgggccgggtgggaggtgcggccgagcgggatggtcgtgcaggcgcgggacgacgcggcggggtccggcggcgccccgccgaggccgccgccgccgccggagatcaaggtgcgcgtcaagtacggcggcgcgcggcacgaggtgtccgtgtcccccattgccacgttcgggcagctgaagaagctgctggcgccgaggacggggctgcagccggcggaccagcagctgagctaccggggcagggcgcggggcaacgccgagtacctggacgcatgcggcgtcaagaacaagtccaaggtggcgctcgccgaggaccccgccagcgtcgagcgccgctacatcgagcgccagaggaacgccacggccgagagcgccaaccgcgccatcggcgccgtcgcgctcgaggtggacaagctcgccgatcaggtaactagcatcgagaaatcgatttccagagggaacaaggtgccggaggtgcagatcacgacgctgatcgagctgctgatgcggcacgcggtgaagctggagagcatacctgcggccggggactcctcttcgcagaagaacattcaggcgaagcgggtgcagaagtgcgtggagacgctggacgtgctcaaggtgtccaacgcgcggctgcaggcggtggtggtgacgaccaaatgggagacgttcgacgcggcggccaccacgacgaagtgggagctcttcgactgagatctgtgcagtgcagcagggcactgcagccaagaggatacgtgtatacgtgcatggtgttttatttccttgtctctcccggttttatttggtgcacattattgaattcgcgcgttgtaatcaatcatgtacggtgagacgacgacgctaggttagaacatgctataagggccgatcgaa

SEQ ID NO: 50675 - DNA, 177 bp, Zea mays
  Clone ID: MRT4577_14620C.1
atcattgctgttattttttaatgttttaccgagtccctaccagaaggggtcaattgtgcaaaaggggtaacacaacacccattcttaataggtgttacttcaaaagtcgacaacaaattggaactttcaaatcttgaagccaattgggtatccctctgacggtaaacgcttttcaga

SEQ ID NO: 50676 - DNA, 185 bp, Zea mays
  Clone ID: MRT4577_146210C.1
acctgaaagcgtcttccgcgttactctggaaggctttttcaagtgttctctgacccgactgcggagaacaggtttggtcgggccggggtgcaacgccccggttgtccgccagcggctggtagtggccagccaccaagcttcaggcgcaaggcctggtgccagtcgtcccgattttcggccgaacg

SEQ ID NO: 50677 - DNA, 475 bp, Zea mays
  Clone ID: MRT4577_146211C.1
gctaggcgtcgggcgagacagcacgagaccactatcgcgactagcttagagggagcgttcatcggctacatcaggtgcggatgtctctgaggacacacgacgcgaggcgctagacaatggtatgcggagggtgacagagggtacaccaagttcgacggattcgggggctaagaaggtagccattgatccgtggtatcgctggattcctttgggttgggaaagatggagggaccgttgtcagggcatcccttgtgaatacgtccagttcttcaccaacctgtttagtgggtccatgacgacgatgatgatgatccaggaggaaaagaagctgagcctggggaagaaaaagaagctactgaggcacttaatatgaaggggatggactaccttgtgactacgtttgactgcccattgttcaccctcggcagtactgtggactgccgaatcgacatgaacaatctgattgtcgaaatat

SEQ ID NO: 50678 - DNA, 376 bp, Zea mays
  Clone ID: MRT4577_146212C.1
gtgagcgggaccaacttcagagtcatgctgccgaggccgtgagccgggctgtgagcgggaccaacttcagagtcatgctgccgaggccgtgagccgggctgtctgctcgggccggggccctggaggaaaccctggctgcgatggcccaagcgcggtgctaacgtctcccttcgaggtggaaatccttccgcccgtgtcgccgtccgaggctgggccagattccgccgaaggtggaaacaacgccaagggtgctgctgctccctctgttgatgtctgaacctgcaggaacagtttgtttgtagtatgcgtatgttttttgcggccgccgaggcccaaacatattattgtcgtgttataaggttgtgtttcatttcct

SEQ ID NO: 50679 - DNA, 278 bp, Zea mays
  Clone ID: MRT4577_146213C.1
ggggaagcacgtcattggccttcaaatgggcagcaacagaggggcctcacaggctggcatgacaggctatgggcgaccccggcagatcatcagttagaaagggaaggccagctctgagctgcagcatcctgcttagcctgcctcacccacgcctatataggttcttagcccggacagctttgaggtatcactgggcaaagatgactgcacatgggcagctcacactatcctcagcctcagcacgcttcttaccccagagccaccactgtcctggcccc

SEQ ID NO: 50680 - DNA, 210 bp, Zea mays
  Clone ID: MRT4577_146214C.1
atgagttttgccaacagtaagatagctgagttctcaagtgggtatcaacaagactgcgcgcgtgccggagaacgaggacgactgaaatcacatagaggaaactcgaatacaatagtggctcttgctgggaacaaggctgatgtgttagatacgaggcaggtgtcagcagattttaaacatatcctatacgatctcgaagatgatgagtag

SEQ ID NO: 50681 - DNA, 343 bp, Zea mays
  Clone ID: MRT4577_146215C.1
ctgccccccatcagcatatcatatatatgggcgggtaaaacaattcattggagcttgaaattgagaatttaatagaataagatataggggataagatgagtaagccggtgtaaacagaaagtcccccatttgcccgtagcaccggaggaaacaagttcaaaaggggctgcatgtaccacaaaccgttatgcccccttgggtctggcaactagctttaaggagagacagcatactgctaaacatcagaggaattgtaatggggacatgtagctcgaaacgggttttcccaataaaacggattacaaaaggcctgtttaatcaaccagccgttgactttggtgac

SEQ ID NO: 50682 - DNA, 453 bp, Zea mays
  Clone ID: MRT4577_146216C.1
gggaaatcgggaacaattccatatcaaacaaaaacttggaagaggggcccttccactgggcacagggccaaaggtgaaaatttggtattatctccttggaaggtaaaaataaggcctgcacatttgggaaccaaaaaaaaagtttatttgacgggtagttcataagggttaaactagaaaccccccctcaaagcaaggacaaaaggggggacaaaccccccctcgagggtggagtcctttgggggcttgtaataaaaaagctgtttaccaaaaaaaaaaaacctttgctgcacgggaggaaagcctttttttttttaaaaaccctccttgatcctgtaaaacgagtcaggggggtaaaagggaaactcaaactttttcccaaggaaaggtttgaccttgataatgggtccccccctaaacctgaggaccaaaagaaaaggggaccccttttgg

SEQ ID NO: 50683 - DNA, 199 bp, Zea mays
  unsure (1)..(199): unsure at all n locations
  Clone ID: MRT4577_146217C.1
aacctatcccatactgttattcagccgngttgtttcataaccggcatatcagacactgggctacatcatacagccgatggggctacacaatacaagactctacaactacatcatcagttcctacctatcccaataagatgaaccctaacccccgaccgatcacccactctggaaattcaataaaaaatgggctttccta

SEQ ID NO: 50684 - DNA, 1219 bp, Zea mays
  unsure (1)..(1219): unsure at all n locations
  Clone ID: MRT4577_146218C.1
gccaggaattcggcacgaggccagacgagatccgagcggagaaggggagctccggccgggagccaggaacaaaggaaagcaatcacagccagacgatccgagcagagaaggggaggtacctgctacgactagctagattccacgcgcgcgatggcgcccaccaggatccgcgtggccttgctgagcttggcgctggtggggctgctcatctgccacctcgccaccaccgcctccgccggcaagaacagaatccgcatcctcgacagcgtcgacgactcggccggggacaacaacagctccgacgcctcggccggggacaacagcaccgactccgagtcggaaggccgcgtcgtctattccgacatgaagctggctgatgagacgggatctgcgccggctccggcaccggcgccggggccgacgaccagttgaagcgaggaaggtggccaaaactgagggcccggctactatcttttgctataactaaagatagggcgaagtttaatttctccgataaattctgtccgagcaaaaagtatgatggggtttttagtcgagatggtaaataatgtatgacgcgcgtgtggaccaagaccaagagtcatggcttgctgtacttgtggtttctgagctgcaacactcaatcgactactaaactaaggtaataactaggttagtgcccgtgcgttgcaacggaaacatataatatcatgataatttaaagagaacccagagaacaatcctgattgtactattgtatatattggcaaccttggacatgaggtagaaccaaattactgcataacaaagttcatcgttccaatttgttctagctctccgtggagcacattgtcccttcgtatcggaggacggagaaccggctgattctcaaagaacgccggtggggcagaggaaaaaggacggagggagaactcacctcgacgaaaaccaatgtgacgagggcggacgcgaggtgacggtggagtagatgaacagtcagggtgcgagcacgcctcatttacaaatctctcattaccgatttgggatcctacaggccttaaattctctcccggcaggtagattcccgtactttgggatttttgtttggaagatacatggtagctgcatgctggcgcttatatgacaaccattcaatgtttttggtatcaaccttggtagtggtttaggcaacgacaaaagcaccggngctagcggtcat

SEQ ID NO: 50685 - DNA, 295 bp, Zea mays
  Clone ID: MRT4577_146219C.1
ggctggcgtcatacggtcccacggttcttgtggagccgcggaccgatggtcatcgtggggcatcatctgcaggcaggaccacgccacggccagcatcgcgcgcgactcaggacgcactatgagactggaaggcggagacccgtgaggagcactggaggtgcaccgagcggatcctagactggagcgagacgagcgggcgcgcactacatggacgaagcgggagacaagccacgctgctcaccacaagggaggcaaggactaggacgactacgagaagaccgtcaagatgcccgag

SEQ ID NO: 50686 - DNA, 389 bp, Zea mays
  Clone ID: MRT4577_14621C.1
gcccatgcacggcaactgcagcacttccgcttccgcgacatcacgctccagcgggggctggggttgataccacttgcgccaccaccaccagcagcgcctgcacagccctcgcatggccggctcaggctccatgacgctccgggccagctcgttcaagcgcggctccggcggcaagatcgagctacatatcggctctacgcgctcgccaaggtgcgaccgcttgtggagcactttctcggactccgcggagtcgtacgttagcggactgctactgcaacatatccagcagaaccagctcctacggctacgactcttcaagccgccagtctccagcatcagcaccataggacttggtctggagatcctgcacaggagcaaactcggcaaca

SEQ ID NO: 50687 - DNA, 558 bp, Zea mays
  unsure (1)..(558): unsure at all n locations
  Clone ID: MRT4577_146220C.1
ccggccaattatattgtatggctgagctcaccctaccattaatttgggccgattaatgaaggagttaatggtggattgacgtatgagattagggttctagacgcgaagatcggtaaactcgagctgcagctcaacgacgagatggagaagatctcctcctgctcgggcttgctgaaggagatcatagccaagccacaaggctcgacttgttcttggctgcgggcagagctggacagggcccgcgccaaacgggagagggcataccacaagttccagcgccaggagatgcagatccaggggggcgacgaggatggcggcgcccctaatcctcgtgacgccagcaactagctaccttagaattccattgattgccctttcgtgtatgcgagagctatcacacatatcngctgtttgttctcttcattccccatcgcgtcttgttttaattaattttctctaggtgttgtatgctaaatcgtcgatcggatgccatcagatctcagaaagttcctgcaattttatacttgagccaaaaaaaaaaaaaaaaaatttgcgggc

SEQ ID NO: 50688 - DNA, 365 bp, Zea mays
  Clone ID: MRT4577_146221C.1
ctcttatcatggctcgcgaccggacgggtcatttccatttttttgggcacaaacaaacattgattcgctgacgttcaacgccacatttttgtcggcacaaaactaaaaccagggagctttaaactccccttcaagggggtctccacaccatgggcttcttaatcaccttctaccccggcctctaaacgcacatgctcaacgtcaaactaacccccatctccagcaaaagctcaaatactagccccacaaagtacccaagtacctctggactaagaacgacgcccagcaatatatttctctcgaaaccaacaacatgggtagtgcccttaactatcggcacatagcacactataacaccccaaacc

SEQ ID NO: 50689 - DNA, 359 bp, Zea mays
  unsure (1)..(359): unsure at all n locations
  Clone ID: MRT4577_146222C.1
gggcccccacccaagccaaagaattaacggccaacaaagggaaggatggatccccatgcggggggaaaaaaactaaaacaacgggaccccattcaggaacgaaggaaaaaacaaanattacgttcctataacccccaaaaggcaattgcaaaaaaaccaaaaaaaaaagggcccaccctaggacaccaaccaacccctccaaaaaatttccggtcgaggattaaatagggaaaaaaaaaggggccaggcaaaagttaccgaaatccagggggacaacaaaacatttaaaggccgaaaacatttggaggcccaaaaacaaaaaggccacaacttggctgcccacaatggggggggggggg

SEQ ID NO: 50690 - DNA, 174 bp, Zea mays
  Clone ID: MRT4577_146223C.1
aactaactttaaataaaaaaacaaccaatctaaaaagtaaacaatacttacttgcgcaatcgggcaacaacataaactcttatatagcctcacctacttacaattcactgttctgtgctttacaatcccttgtcttagctatcttatggcgtcacctaacttaatttccttgcc

SEQ ID NO: 50691 - DNA, 2323 bp, Zea mays
  Clone ID: MRT4577_146224C.1
gggtacctcgaggccggccgggccgggtcagtcctctggttctccgtcctctcgcctcgcgcggccgcgcctgcgcctcgtcagcaagataaggctgcagcctgcaggccacagtgcaggcccggatgcttccagaatcttccggaaccttgcgccgagcctgaactccccggcggcgcctggccctgtgaaggctgcatgagtagtcccgccgccgccgccgcagcggagccatggggatgctcgccgccgccgttgcccccgctctcctcgcctcgccacaggcatccctcgtccgccgccgcctctccggtgcgtggacgctgcgcctgaagcccgctgctgcctcccacggcgtcgcggcgctcagggtacataattttctcccaaagtgttacattaccaacgttgaggttgatgttagtactgtaaataaagaagaaactttcgatgatcatccatcattggcaccaggacgcaacattccgcttgttaatcttcgaggagatattctagattctagtccttttccgctgcacgatagggcttcctgtccttcaggttttgaagagttgccggtcttgtctgaaggagagcaacatactttggcatccactcctgctcatcctgctggactatatgctctatatgctagttacttatttggtaacttggtggaacaactgtggaattttgcttggcctgccacactggcaattcttcatccaaatctattgcctgtggccattgttggtttcttcacgaagctttcagtgtttgttggggctcccatagttggcaaacttatggatcatttcccccgaatacccatgtacacagcattgaatgctgtgcaggtaggcactcagttgatatcagctgcaactgtcatctatgctctaagaaacctgagccatgcttctacaacagctgtggttctgagaccttggttcattgcactagtggcagctggagctatcgaaaggcttgcaggattggcgctaggagtttccatggagcgcgactgggttgtgttgttagcaggaacaaacaggcctgttgcattagctcaagctaatgctgtgctcaatcgacttgatctagtttgtgagacagttggtgcttctgtttttggccttcttttgtccaaataccatcctgtgacctgtttaaagattgctagtggtctaatgatatgcagtttccctgttctggtcatgttgggtcaactaatcaatagagtttcttgccatgcacttgattcctctagaactgccactgatgaatctatttgtgctgatcttttagatgtacgcaggatagttccaaatagcttgagggctatcaaacatggatggaatgagtataagcagcaaacagttctacctgcaagtgcagctaccgtgttcctaaatttcaatgttgcacttgctccaggtgccataatgactgcattattgatgcatcgtggtaccagtccatccattgttggtgctttcagtggattgtgctctatcatgggccttgttgcaacattcatctcctcaagcctggtgaaaagagttggaattctaaaggcgggagctgctggattgatatttcaagcttcactcttgtcaatcgcgctcacagtgtattgggctggttcaatttcgcaaacgacacctctacttatattcctagcatccattgcattgtcgcggttggggcacatgtcttatgatgttgtggggactcaaattgtccagacaggtgttcctgcttcaaaagcaaatctaattggaggaatggaggtttcaattgcaagccttgcggagctagtcatgcttgctatggctataattgcgaatgatgtctcccatttcggcttcctggcgatcctgtctgtgtcatcagttgctggggcagcatggatgttctgtcggtggttaacaaatccaacagatgagcagagggaactattcatggttgatcccctttatcaagttcaggcaatatagtggatgaggcaggaaacaaccaggaaaactgcaggcgcctacttgctggtggtgcttgttggatctgcaataccgttacgatgatactaagatacagtgtgacatttaggttcaatacgggatacacttagggtagaagcatttgctcctcgtggcctcagccatgcgcagaattcaatttgtatactcgttcatctcctcacctgtacagcacatatttgatctgtataagtgttacttgttatagctgatgtagaacaacattaacagccatcggtagcacacagtcaatgaaatctaaccccctcacctttcctccctta

SEQ ID NO: 50692 - DNA, 169 bp, Zea mays
  Clone ID: MRT4577_146225C.1
aggaagagcatccgtgcctgattcagcgaaggctgacctcttgcaacgctaatggtccttcgttatgtctatcacacttcagtagtcattagcctcgacggttcgatcctatatgtaggagtttaggttcactaggaagtcgatcttattggggaccacacgtgcagga

SEQ ID NO: 50693 - DNA, 564 bp, Zea mays
  Clone ID: MRT4577_146226C.1
agcagtggtaacaacgcagagtacgcggggtctaatcgaccctatgtgctgctaataaagtatgcatcaagctgagattttgtttgtgcatatgttttgagataacatggttatgcaccctcatacagatctcgaggacgagatttctgttaagggggtaggatttgtaaggcccaaaatctgtataaaaaattataataataaaataaagatatgaagaaaaataaaatagtaaattcagatatctccaattatacttgagtgatgaaaattgaggactggatttgtcaaaaccaagaagtattttggaaaagaagtaatagaaaagttttctattcaactagataattatgcacatcgttaaatgatgcaccataagcctgtatttacatgaatatttaattttgaaataacttttacttcttatcccacattcaaaatactatttttctaaaaaaagaaagaaaacaatatgagtgtgtttcatatttcaaacatcgcccaaaaaaaaaaaaaaaaaaaaaaaaaaaaaaagtactctgcgttgttaccactgcttaagaa

SEQ ID NO: 50694 - DNA, 327 bp, Zea mays
  Clone ID: MRT4577_146227C.1
agaatacaacacttcttcaagtcagttttttattgcaatctgtacacccagcgtttggcttttaaaacgcattttatctcaggcaggggcaaatgcctgaaatccttttggtcggctacaaatttttggccagcgcaaaaccaggaaacctcggcggcgggacgccccaacgagaagccagccatgccagcgggcagcgctgtttctctaatccgcgcggtggccacacacctgtgttaagctccggcgaaacctttatgccgaccctcatgggagatgctgtagggaactttctctcgcgcaccggcgggacgcacggactcctct

SEQ ID NO: 50695 - DNA, 229 bp, Zea mays
  unsure (1)..(229): unsure at all n locations
  Clone ID: MRT4577_146228C.1
cccgggnnctttggtncccactggtagcctgtcaaccctgctgnatgnnagtagncatgtcagnatgcgnatnngttcttcccagtttttctgaccttgaggcctgtncnntctcgtcataccctcaatgtggcncnnttcgcctnntcagtttttccaggcnnccccttgggcagncccctctctgnatttagnntcccaagncannagggttgnnctcgtgcccttc

SEQ ID NO: 50696 - DNA, 507 bp, Zea mays
  Clone ID: MRT4577_146229C.1
ggataccaaacagcgaaagcgaaacggaccccctttcctcccttcccttcccgtcccctacccgcgccgcgcgttctaatttggaccagacggctccagaagcttccgccattgacctaacctaacaaccgtgtcgctttatttatcgaaccaagcccagcggcccagcccctcgtctccgcccagatccacgcgtttcggagttctagctgcgtttattgaccgctcattctctccaaggcatttttcccctcgtcctccctgcgatttcgcgacctccatccaatccctctgcacggagaatcggctaatggcggaggagggctacaaggtgacgctgaacgtgtacgacctcagcaacggcctcgcgcggcagctgtccacctccttcctcggcaagcccattgaggccatctggcacacgggagtggtggtgtacgggaacgagtactacttcggcggcgggatccagtcgtcccccgcggggacgacgccgtacgggcggcc

SEQ ID NO: 50697 - DNA, 502 bp, Zea mays
  unsure (1)..(502): unsure at all n locations
  Clone ID: MRT4577_14622C.1
tgcccgcccgccacaacaaacaaggcagagcaccaacaagggccgccgccaccncgaccacggcccaccggcagcacccggccgacgccacggcaggcaagagcgccaacgccgccaccttcaccatcaccaacaacggcgggcacagcgagagacccgcggccaccccggagggcgggggcacgcagcagaacccgggcgggacggggaccgccaacgagccggacggcaccagctccgaccgcgagggggaccgcaccagctgctccttcaacagcaacagcgggagcagccagatttttttcttttgccaagcaaagcccagaacgctgacaggaaagacgccgcggacgccggccgagaaaaaaaaaaaaggcagccaggaacgccacgacagcccgggcaacgacaggcacaaacgcgccaaggccagcaccagcagcaccggcgcgcggaagaagcgcaaggacccgggacgccccgacgcgcaccacaacccccc

SEQ ID NO: 50698 - DNA, 750 bp, Zea mays
  Clone ID: MRT4577_146230C.1
gcggaagtagtacggcaagaggtcgagctaggccctcatcgaacttcggaatggatcctcgacttgaccgacaacctccacgctgaacagctgtcagggccgaggtgaaggcagctttggactcactgattcttgtatcttgcaagggcaatagcgatgtgtatcaatcatcctagtcaagaatcccccatttgttcataccaatcgttgggtgaagcgaggagatgtggtcagccatgatgtgcattggatgtatgttgctgaggtgacatggctgagttcatatatgcgagggcagcagagctcgacaagctagtgtcgtgcgctgtcggtgcatgcactagtggtcctggatttgcgaaggttggaaggaactgacgcgaaccgttctgactcccctcctacaaaaggatcggatgatataggtgtgcctatggacctgttctgggtggcaaggttaatcagaagtttccgtgctgagtgttgtaattatgtctctagactgtactctgtagtggcgaacttaagagttagtttgatggacaggaaaatgaaggggattcctctcctatggatcttctctatttttctgtccaaactaaatcagccctaatgagggtgggacgttagggtggggatgtatagacgtcatgtaatggaggaggtgcatatttcttagggtacatctacacatcctaaactgaatatagcttcgcccccctatttatatcgatgatctcaattttcggg

SEQ ID NO: 50699 - DNA, 2616 bp, Zea mays
  Clone ID: MRT4577_146231C.1
gcccgctcgagtacctcgccggatcgcccgacctgccggtacagcgctgcagacagcctgatccggccgatccggcgggaatggcggcgcgaggagggatctagcggaggtggtggggtcgcgcggcaatggcggaggcagagccgcggcgccggtgggcggtgtgggcgctactgctgctgctccaccccgccgcgctcgtgctcgccaacaccgaaggtgatgccttgcatagcttacgtaccaacttaaatgatcctaataatgttctacaaagttgggatcccactctggtcaacccctgcacttggtttcatgttacctgcaataatgacaacagtgtcatcagagttgatcttggaaatgctgcactatcaggaactttggttccgcaacttggacagctctaaaacttgcagtacctggagctctacagtaataatatcagcggaattatacctagtggatttggaaaccttacaaacttggtcagtttggatttgtacctgaacaacttcactggtccaataccagattcattggggaagctattgaagctgcggttcttgcgtcttaacaacaacagcctttctggttcaattccaaaatcattaactgctatcactgcactccaagttctggatctgtcaaataacaatttgtctggagaagttccatcaactggttccttttctttattcacccctatcaggaagtagctcttctagtactggagcaattgctggtggagtggctgctggcacagccttgctatttgctgttcctgcaattagttttgcctattggcagcgcaggaaaccacaagaacatttctttgaagtacctgccgaggaagatccagaggtgcatcttggccagcttaaaagattttcactacgagaattacaagttgcaacagatggcttctgcaataagaacattcttggaagaggtggatttggcaaagtctacaaaggacggctggcagatggatctttggttgctgttaagagactaaaggaggagcgcacgcctggtggggaattacagtttcaaacagaagttgagatgattagtatggctgtacacagaaatctattgcgtcttcgtggattctgtatgacaccaacagaaaggttgcttgtgtatccatacatggctaatggaagtgttgcatcacgtttaagagaccgggcaccagctgaacctccgctagattggcaaacaaggagaaggattgctttgggttctgctaggggcctgtcttatttacatgaccattgtgacccaaagattattcatcgtgatgtcaaagctgcaaatattttgttagatgaagacttcgaggctgtggtgggggattttggtttggccaaactaatggattacaaggatacccatgtaactactgctgttcgtggaacaattgggcacattgcacctgaatacctttcaacaggaaaatcctctgagaaaactgatgtatttggctatggaattacacttttagagcttattacaggacagcgggccttcgatctagcttgccttgctaatgatgatgatgtcatgcttcttgattgggtcaagggattgctcaaggagaagaaactggagagtctggtcgaccaagatctagaacacaactacgtcgacgttgaggtggaatctctggtacaggtcgcactcctctgcactcagagcaaccccatggaacgccctaagatgtcagaggttgtgaggatgctcgaaggcgatggtctcgccgagagatgggaggagtggcagaaagcggaagtagtacggcaagaggtcgagctaggccctcatcgaacttcggaatggatcctcgacttgaccgacaacctccacgctgaacagctgtcagggccgaggtgaaggcagctttggactcactgattcttgtatcttgcaagggcaatagcgatgtgtatcaatcatcctagtcaagaatcccccatttgttcataccaatcgttgggtgaagcgaggagatgtggtcagccatgatgtgcattggatgtatgttgctgaggtgacatggctgagttcatatatgcgagggcagcagagctcgacaagctagtgtcgtgcgctgtcggtgcatgcactagtggtcctggatttgcgaaggtagggggagctaaggtgctgtggctgtcatctgggtctgcgataagttaattgtactgacagttgacatctaactattttgtgtatctaatgtaaggttggaaggaactgacgcgaaccgttctgactcccctcctacaaaaggatcggatgatataggtgtgcctatggacctgttctgggtggcaaggttaatcagaagtttccgtgctgagtgttgtaattatgtctctagactgtactctgtagtggcgaacttaagagttagtttgatggacaggaaaatgaaggggattcctctcctatggatcttctctatttttctgtccaaactaaatcagccctaatcagggtgggacgttagggtggggatgtatagacgtcatgtaatggaggaggtgcatatttcttagggtacatctacacatcctaaactgaatatagcttcgcccccctatttat

SEQ ID NO: 50700 - DNA, 301 bp, Zea mays
  Clone ID: MRT4577_146232C.1
aaaaaaaaatacatacacacaaaaaaaaaaatatggccgcagttcgtcctttagttaccatctttaatgctgatggcagcgtttcaggaaccaccaaccttcctgaagtcttctcagctcccatccgtaccgatattgttcgctttgttcacaccaacatcaacaagaaccaccgtcaagcttacgctgtttctcctactgctggtgagcaaacctctgctgagtcctggggtactggtcgtgcagtgtctcgtattccccgtgtcaagggtggtggaactcaccgctctggccaaggtgc

SEQ ID NO: 50701 - DNA, 303 bp, Zea mays
  unsure (1)..(303): unsure at all n locations
  Clone ID: MRT4577_146233C.1
actttctctatagcaagcgcaacnacttcgggcgcgagggtccaagccggcgggcgcgagataatgaaggccaccatccacgtcaagtggtggctagagagcgtcgccctgctcaaggacgccgccacgcggatcgtctacgagtaccaaccgcacctgcagctccctcccgaccagccccccggttacaaagccacctaccacctcaaaaagaacgccgactaggctcgtgaataggccatcgacctcaaggacaatgtcgactttcacaaggtcgccaactaactcatccaaatcctctta

SEQ ID NO: 50702 - DNA, 386 bp, Zea mays
  unsure (1)..(386): unsure at all n locations
  Clone ID: MRT4577_146235C.1
tgtatgcaaagctcatcctgtattcattgatctctgcaccgggcggcggaaccgtgctcgcttgggctagccctcgatactgctggattggtgtaccgcgaccggatcggnnnnnncngcggcgcccacgccatctactggcaacatgagctgcagggaggatgctggcgccctatgggttagcatgtgaaaaatggcatgcttcactacaaggggccgacggcttgacaagcgctgacggtggcgagctttgttccgctggtcggactgctgatggtactagcggcgctgacgctgacagtctccgagggggtgctgtgcacttccacgccagtgatactgatgttgatacacgtgctgctccccgacgtgctgcacatcgggac

SEQ ID NO: 50703 - DNA, 249 bp, Zea mays
  Clone ID: MRT4577_146236C.1
tgcacgcgtagcgtagctcggaattcggctcgagggacacacgaacatcttttacctgaagtgccggcgacctcgctccgtcgggatgacaatcccacttgcggatactctaactcggtgtcagggctcgactcttgcatgcgacgactaagggcctggtggctctactcgagatcgaactacgaatggcacttcgatacagtaccggagagaacaagcaattctgagtcagctacataaccgaccaag

SEQ ID NO: 50704 - DNA, 700 bp, Zea mays
  Clone ID: MRT4577_146237C.1
tttctgcaagtgctgaacttggtgcaagtgctcttcttaatgcaactatgcttcttcaaatttttctgtatcccaagggactagtgtatatttacttcgtcattcctgttccagctgcacttatgggcgcaggtttgattggtgctgatttagtgaggttgatggggcatggcgatgtatcaggttcagctcctttagggggcgccctggttgctgctcttgtgtgggctcgaattaggaaaggctggatctgatcttctaatgtcatatatgtggatggaaagtgcaaaggcaaccatctgcagtcaccttctggcttattgggttgaaatttgcaattgttatcagataatttgcttagaattgagaggataccttataaaacatactctatccctgcattcttttttatttgtcgtggtttagtttaaaaacaaactagcggactataaatatttgagagcagaggtagtactactttctggtctcgtgggctctgggcttctggaggatattgtcaactctgtcagctgaaatttttagagtccagtgagcttttttggggcaaagctgttacaaaaaaccatttggcaaaataaaaaaaaaaaaaaaaaaaaaaaactcgacttttaccctgttttttttaaacaggcattgtctagttacttttttatatattaaaaaaatatagcccttctcc

SEQ ID NO: 50705 - DNA, 443 bp, Zea mays
  Clone ID: MRT4577_146238C.1
ctacattctctgtcttgtcaacgtgatatgtggtcaaggcactcaagacgctgcggaacatggagcaccgcaaggagcgctggcccacagacccgagtgacacggtgccttgctccgttgaccaagaggcatcggactacgaagtcgaggtcacgcagacgacatatgaattgccacaataccgcatattattcacaggtgtcgacatacaaatggactcggctacgctcgaaagacgcttatttgtacagatccatgttagatttccaacaggaatatttcttagcatggacagatactgacaataactcgtagggttcagagcattcggtgaaatgcgcatttacacatctaaatccatagttgccctatggaagcgcgagcctgtgcatacccggataactccgaaccgaatcgcttcacccaggtaccagctgttccct

SEQ ID NO: 50706 - DNA, 298 bp, Zea mays
  Clone ID: MRT4577_146239C.1
ctatagaatgactgtcagaacacgcagcgaaggcattggccgccacggttgctcgttccaagggctaaaaaaagactggtggcattgagagttcaatgatagcgttcgacatcctaatactcatgggtagcgcggactacacatgtgactacgcccagaggtcttttgtccctaattttgtggtgcaccaggatgagactgagttgatgacctctcttatgcagaaggacttcgaatagggggactaactattgtttgacaacaatatggtgatacttaagaacgttgtaaggtactg

SEQ ID NO: 50707 - DNA, 747 bp, Zea mays
  Clone ID: MRT4577_14623C.1
aattcggcacgaggtctgcccacaaacccgcaaaccccccaaatcctccatcgagtccgcttgagtctcgacctcggccaacaagcgattccccccaagtcgaagcagcagaaccaacagcgagccgccggccgccaatggcgttctcatcgccggcttccgcgcgtccgcagcgctcgcctgacgaggtggaggacatcatcctccgcaagatccttctcgtctccctcacgccgctggccaaccccgggcccgccgtcgcctacctcgagctcaccgccgccgagctcctctccgagtcgcgccctctcctagctctgcgcgacgccgccgagcgcctccttatagaccgcctctcgctcccggacccgcccgccgggtctccgacccctttcgccttcctcgtctccgctttccgccgcgccgccgacgaggcgcgtaagatctccaccatccgcgacgctgctctccgggcgcgcctcgcggcctccatcgcgcacctccgggccctcattctctcctacgcccgtatcgtcgccgggaaccccgacaccttcccctcccaacccggcgcgcaacaccccgccgccgaactcctcgtattcctcctcgctgaggcagccgacccgctagaccccaccccaggccccggggcgccgccgccgcctggcttcattgatgagttcttcagcggcgctgactatgactccatcgagacggccatggggggagctgtacgagcttctt

SEQ ID NO: 50708 - DNA, 304 bp, Zea mays
  Clone ID: MRT4577_146240C.1
ggcaccaccactgacctgggacagcgaatcgacaatgccgtcttctgtctcgtggggcatcctcctgctggcaggcctgtgctgcctggtctgtgtctccctggctgaggatccccagggagatgctgcccagaagacagatacatcgcaccatgatcaggatcacccaaccttcaacaagatcacccccaacctggctgagttcgccttcagcctataccgccagctggcacaccagtccaacagcaccaatatcggcttctccccagtgagcatcgctacagcctttgcaatgctctccctg

SEQ ID NO: 50709 - DNA, 405 bp, Zea mays
  Clone ID: MRT4577_146241C.1
ttattattttttttttttttttttttttttttttggggttttttggggttttttttttttttttttaaccaaaaaaagggttattagccaaaatgggggccgggcctttcggacttgtcctacaaaatcatgggggggcattcccggccattatcggaaacggaattaccggaactgcaacacaaaaatgggggccaaagggagcaatatttgcaacagttgccacggggggctgggactttttggaaggcgttaggagcctccacccggggcctgagacaacctttgctggtgtagggggcaagaaaccttccgaaaaaaggggggctgaacctttgctgaggcttgggatccacacccgccggaaccctgggaatgttacttttgccagttcaagcccccctg

SEQ ID NO: 50710 - DNA, 407 bp, Zea mays
  unsure (1)..(407): unsure at all n locations
  Clone ID: MRT4577_146242C.1
gcttctcctccgtgctgtccggtgctcctcgtcgggcgcttcgctgccgccttgcattgcaccccggcaaagctgctcgacgatgagcgaggctagcnaggagccacctcctcacctggacgatggcggccgttcatctcggctaagatccaaatctcggcatcggcggcacccctcgactctccccacgcccctagccatcctaactgcgaccgtggatgaagatctcaaanaatcttggaggtgcagcgggatgacagcgtagggaggcccaatggtgtgatgtagcgagtcctaacggtgctcggatcggggcggatggcccccagtctcggcaggagggacaggcttgtacaacatttgnatcgatgagtcagtggngccctaaagnaaaataaagcagccca

SEQ ID NO: 50711 - DNA, 466 bp, Zea mays
  Clone ID: MRT4577_146243C.1
gttaaagttgtattttttttggggcggaaagacccaaaaaagaaaggcagcattggtggcaggagaagcccaaaaggggggggggggacaaaaggacaggaaaaaaagggcccaaaaaaagacaaccaaggggaagagaaccaaaggccgaagacggagaacgtgaacaaagggggcccaaagggggaaccacgaagtccggaccggggccggccgggggaccagcccggccaatccggagggggaccagaggggggcgaaaacatggccaaaaggggggccgggggaaaagggggaaccgctggcaatggcagacacctggggagaccgggggcatcaagagaaaagcccggggggcctaaagggggaggcaaccaggggtaaagggggggggcccaaagggcgggttacaaaaaggaaaacggggggggcccccgggccaaagaaccggccaaaaaacggggag

SEQ ID NO: 50712 - DNA, 327 bp, Zea mays
  Clone ID: MRT4577_146244C.1
gctcggagccaccggccactacccctttattttcagcttctgaacacacggccgataagaaacatgcgacgatggcgctccaaactgaccgaccaactggactaaataagcttgggaatcaggcgcacctgccctccgaaatgtatgaaggagggcgggcccataacataggcccatccgacttatcttatgaagggagacttgccagaaggaactacatgaccgacaccctcctgggccctcaaaaggctgctagcagcggcatgaatgttccagaaatgcggaccaaactctgggctaatgctcctgctgggtaaagacgcgcga

SEQ ID NO: 50713 - DNA, 357 bp, Zea mays
  Clone ID: MRT4577_146245C.1
cgttctttttttgaggagctcaccgacaccgccgtcgtgggcgacgcccagccgggggagtctaatccatggtacaatacaataatacaaacaagaccttacattttaagcatttttattatccaagcacgtagctatcgtgcactctataaggcaaacccttattggattgtaaggaccggcggttcaaatggatttgctactactcatgcccctcctgaaaatttcaggttagaacaaggtcttcgatggatgtcagaacatatgaaacctgcttttaacagattcatatgatcgatgtggttattgcactcctagatatttccgtctaccttcttactcctatcgtacaagttt

SEQ ID NO: 50714 - DNA, 191 bp, Zea mays
  Clone ID: MRT4577_146246C.1
gcggccgcccttttttttttttttttaccaaacaacatctcggccagacaaccaaaccagcatccaattaccatacttgtggtccttttgcccgcacatgttcaaaagaaaaaaaaggctcccttttttttgcaaaaaggtcttgaacccggatgaaccaaggcgagacgggctggccctaaacggggcat

SEQ ID NO: 50715 - DNA, 989 bp, Zea mays
  Clone ID: MRT4577_146247C.1
aaggttaattgcaaaggcagagaagggccttcatatattcctatagactattcctcaagtgaaccccttttctctttgcctccgtagatttaactgcaccaaagtagtacctgacagtagcttagaataattgatacggaaaaaaaagaaactaaaataattgataattgccaggtcaaggtctctgacccaaatatatgcaattgtttacagcaaaagaaacgggtaaatgagtggcatttcaaatgtcacatcaaaggcatatgctctcgtattcaccctaatctacttcaatacatatagattagggtgaatacaagaatatccaaacaaggttgaaaggggtctgcaaataaattatcttggttgaaaaggaaatacgtcgaagagataaaaagatcttgagttacagtttttgagaccatcttgtgtctcctcaaagttcttactccgttattccatgcaccacgaatgtcaagccataacataaattaattgtccgcttcggattaaagctagttattcggactatattatagaagcagtagaagccagtatgtattaaagccaaacgaagtcgtaacatgtctttggaaatcagcatgtcctataataacacattttgtatggacatgtttgcctactgccctactcgatcacacatattctggcagcaaacagaagccttgtggcgctatgcacatcaataagaatagcaattactctgaagattctaactgtggtgtaaacaatacaaaattatgcataaaaaactcgtccgggagagtaatacataatcttttaggacatgtttggaagcaagtggaatagaggtggctaaaatccctcaatatttaaaaatgaatagtgaggtattatatcccctcaatctcctccattatccttactcccaaacaagccctttccattatccttactcccaaacaagcccttaagacaagttaggagcaagaaaattggaaggaaac

SEQ ID NO: 50716 - DNA, 604 bp, Zea mays
  Clone ID: MRT4577_146248C.1
cgccaaatgaagtcgtaacatgtctttggaaatcaccatgtcctataataacacatttgtatggacatgtttgcctactgccctactcgatcacacatattctggcagccaggggcggacccaggaaataatgagactaaaggcatacttgcaaagatgagcgctaaaatactaaaaaaaaggacctctaagttagtatgagtaagggacctcataataaaaatctagacactactacttacaacagagaaatgagcgggggcctatgcccctactcgcatcaacgtaggtccgcccctgcagcaaacagaagccttgtggcgctatgcacatcaataagaatagcaattacctgaagattctagctgtggtgtaaacaatacaaaattatacataaaaaacttattctggagagtaatacatatttttttagggcttgtttggaagcaagtgaaatagaggtggctaaaatccctcaatatttaaaaatgaatagtgaggtattttatcctctcaatctcctccattatccttactcccaaacaagcccttagaaaagtttaggagcaagaaaattggaagggaacgaggggctaaaatcctc

SEQ ID NO: 50717 - DNA, 695 bp, Zea mays
  Clone ID: MRT4577_146249C.1
ctcggactttctcacccccgtgtctctctcgtctctctctcccttggtcccgccagccaccggccacccccaccgcgcccgcccctggccccgaccgccgctcccgccgcctctctctctctttgcctgtggtcgtggccgctgcacctcccccatcgccgcgcgccactacccccatcccccaccgccgggccatgcccctgccctggccgactcgcgacccccaaccctgctcttgcctagagtcggtagcgttgcagtggagctccaatccgagctctgattcctcctcgctttcggccgagcaacggtgagacctggagcgggttgtgcggcaatcagcagctgagcggcgggagcaagggcttgtgcatgggtagccagcgcgagtgcgagggaaccatctacgagcgtgagggcaaccagaagaaacattgtactgttttgcaagaatcaactttgtgggtatgctacctctctgtcttctttctgtctagtagcttgttagaataagaatttcaataaaataagaaaacaaacaagatatgttgctttgtattattaattggttaattcgttagctacatgtcttgtgtaagttgttcagtatagtcaattaggctattcgagaaataattgttccatttgtagagaacttgtggggtatcacatcttgtagaaacaaatggtatgct

SEQ ID NO: 50718 - DNA, 771 bp, Zea mays
  unsure (1)..(771): unsure at all n locations
  Clone ID: MRT4577_14624C.1
aatatcgacggtatcacttctcggacagaattgcggcctcgatccgcgctctccaggttcccccagattgacggtgtccgcgccgcgcttgcccagatcgatggaatctgcggtctccagatgcgagtccggggctcgctatctgtggaaggcgaggagagacgaagtgacctcgtccatgcctccaccgttggacgagaatatcttctccgatctcaccctcttcgctccaccgcaggagccgctctcgctagagaagaagttgtgcctcgtcatgggcctccacgacggatcaaccaagttccaagaagaacgccaaggggaacaaacctagaaaagaaagaaacataatttttgaagctttcagaacgcctagagaagctattgaaggagaaaatatgagaacaacgaataccaagttaaggtagagctggtcacaaattggaagaggagctgaaggatccatcttggcatccttttaagatgattcaggctatcagataagatcgagatactgaaaatcaactttcatgagaggaagaagaacgcttgggaagattcaagctcatgatgacatttctggtgttatcacacgctttgatgggtgttgacccttcaggntttatgaaaccctcactcagtcactctctattatctctatatatgaaacagacaatttggtgctcagtcccagtgatggttaggctttctgtgcatgtncaatgataaagcagngnccagtagtttcactgttgactacactatttatag

SEQ ID NO: 50719 - DNA, 699 bp, Zea mays
  Clone ID: MRT4577_146250C.1
gcatttcccgctttgcttccacctctttccccgcctcgcctgcctcttcgccgcctctccccttctctcctaggtttagggtttccccggcggcgactggagtcaaggctgtaagcctgttacacgtcgtgactgccaagtcactacagtataacgcggggcgtttccttcaaagctgtcgattgtacggagatggaaatggcccctgaattattgtatggacaaaatgtatatgttccaactgctgtaaattcctatacatatggttatgcagaagttggatcacctatggattggtataaccatcagaactctctagggtatgatgctcaagatgtttattttccggctttccagactgacggcacacagtgtgtttactatgctacccctgacaatggatcagttcatccttcctacagcccttaccctatggatcctggttacatagttgatggatcttatctgccacaagaatatgtccctgatgctgaccctacatgccaatttcagaatcactcaatgatgccaattgttcagttgcataactcacttccaatgaagcaagagctgggaaatgggtccatggtgcctgttaaacctcttcataccccacaggcacctacaaatgtgcttgacagtccaatggctgctgccaagcattcaccaaaggcaaaattatctggaaatgattgtttt

SEQ ID NO: 50720 - DNA, 113 bp, Zea mays
  Clone ID: MRT4577_146251C.1
aggggcaaaggttcgaggaacggaaaccctaccgctgtgggactcccctccggagatgactgcggtgacgatcctgacgaagctgtccaagcacgtgatcatcccggtcgcgg

SEQ ID NO: 50721 - DNA, 716 bp, Zea mays
  Clone ID: MRT4577_146252C.1
gtctctcgcatttcccgctttgcttcacctctttccccgcctcgcctgcctcttcgccgcctctccccttctctcctaggtttagggtttccccggcggcgactcgagtcaaggctgtaagcctgtaacacgccgtgactggcgatgccggttcctctcgggatggcggaggtgtggatctatttgccatgggccgggccggtgaattagccaagtcactacagtataacgaggtgcgtttccttcaaagctgtcaattgtacggagatggaaatgacccctgaattattgtatggacaaaatgtatatgttccaactgctgtaaattcctatacatatggttatgcagaagttggatcacctatggattggtataaccatcagaactctctaggatatgatgctcaagatgtttattttccggctttccagactgacggcacacagtgtgtttactatgctacccctgacaatggatcagttcatccttcctacagcccttaccctatggatcctggttacatagttgatggatcttatctgccacaagaatatgtccctgacactgaccctacatgccaagtagttccctcatcttattacattccatctgttcttccttatgcagtcgatagtgtcctaggaatcactgccacatctctccacccatctagtgttgcattcattccaagcatgccagcttatgctgtaacatc

SEQ ID NO: 50722 - DNA, 760 bp, Zea mays
  unsure (1)..(760): unsure at all n locations
  Clone ID: MRT4577_146253C.1
gggagacgaacgacatgatcccgactctgatatggaagtggatgaccacaggctgtggaagagtcatcgaggtctctctctttcggttcctctctcgctgtccccttccctctctgagcaacagtactcattaggttttgggttttatttttcatcctgatgtgtgcccctcgtcaatttctgtaggaggagcattctaggtataaaaatcaagagagaatttggtgaaaatgtgaccagagtacaggtatttttattttcttgtgcacttctattttctcgactaatgtgattatctgctgaaatagacattcttattgattttatattgtgcaggatggtggcagagtcgcatctgaacatagaggactggaacccatggcagaagacattggttcctccaagcaagctcctgtaagtgcattcgtttgtagtattcactactataataccacatggagaactcgaggagtgtatgctatcaacactatgaccgtccaactaaccagatcgatctttttctcttcatggtgctgggaactgtagcaggcggatgccagtgcaatggccatcgatgaaccaagcaatgtcaagaatgaacctgagagctcaactaaattgcaaggccaagcagctgcgtaccacaagccatagctgcgaccatcaagagttgnctgggtttctgctaggcaacttcctccgtgatttggacagtccagaaaaccagaagtgaatccgcaatacgtccctgccatttcaa

SEQ ID NO: 50723 - DNA, 227 bp, Zea mays
  Clone ID: MRT4577_146254C.1
cgcctcatcgccaccctcttttcacaccccacaggccaagccagccgtggcgggccgcaccgcattttggacatggcgtcgtcctcctgcctcgcctcgccgtgtggcgccacgctctgccgtccgcggcggccgaggtgccgtgtggcgtgctcggcggcccacgcccgcgatcgcactgggcctgtttctgctcaggagccagtcttacccatacccttgccgct

SEQ ID NO: 50724 - DNA, 543 bp, Zea mays
  unsure (1)..(543): unsure at all n locations
  Clone ID: MRT4577_146255C.1
aagctttttttttttttttttttttttttttttttctttttttttttttttttttttttttttttttttttttttttttttttttttttttttttttttttttttttttttttttttttttttttttttttttcctttttcctacctttgttgtgtcttaccagccagggcacccccatcctccttcctgggccttggcagcccgtttccctccttttctttctttctccctctgccccttttcttttcccctactcacactggggggtgcgccaggaccaaccaaaaacacaccccccggtgtttttcaaatttcacaaggggagaaaaggttcttttataaaacccccgcccctcgggtccccccactcttggggcgaaaccgagcgcacaaaccaccaaacccgggggccgtcgcccccgccccaagcaaggcaaagnccccgcccccccaataaaacggctgacctcgtcatccccttccatccccgcacgcccactgccccccagaccaaaaacccccccccccccccgtctaagaag

SEQ ID NO: 50725 - DNA, 472 bp, Zea mays
  Clone ID: MRT4577_146256C.1
aagaatacaagtgttgaagaattcttaggcgaagaaggagtcaaacatgagttctcggtcccctacactccacaacaaaatggtgtagcggaaaggaaaaatcgaacactaattgaagtcgcaagaaccatgttagatgaatacaagacacgtgacaacttctgggccgaggcggtcaacaccgcttgtcatgcaatcaaccgtttatatcttcataagatttataagaagactgcttacgagcttctcattggtaacaaacctaaggttgattactttagagtctttggttgtaaatgcttcattcttaacaagaaagtcaagagctcgaagtgtgctcctagagtggacgagggtttcttgcttggttatgcatcaaatgcgcatggatattgtgttttcaacaaaaccaccggtcttgttgaaatagcgatagatgtgacatttgatgaatctaatggctcgcaagggc

SEQ ID NO: 50726 - DNA, 337 bp, Zea mays
  Clone ID: MRT4577_146257C.1
aaacccagtaactcgcatattcctccgtgatccaagttctagcagcgcacctctcggaatcggcattagtcagtctcgtcttaggcctatccgggtctgcacagggacggacaccgagcatccactcggaagaatcctgaatcgacaacattcaagacatcacgaagccgacgatcccatatctgactaggaattacgtcgtctagcacatcgcctatcttatatacgaggggaccgacatcgtgcttaatagctgaatgtacaacttcaaattttacgcagtcacgtacgccgagctctcacttcttaagaccgactccttcatggatgtattata

SEQ ID NO: 50727 - DNA, 748 bp, Zea mays
  unsure (1)..(748): unsure at all n locations
  Clone ID: MRT4577_146258C.1
ccctccgctccccgccttaactcctctcgctttcgcccactctcgctccccccttctctctcctcacgcgccccgccacgccaccgctcgccgcggccactatttatcgcccccctccccgccgctgccgagaggaaccctagcccgctcgcccgaattcccgcccccgcatgaggcggaccgctcgccgccgccgccgcttcaccccctccgcgaccctcggctgcttgctcggtttggcccggtagggttgttgctgttgcttgggctggttggtgcgccgggccgccgcggcggatggggaactgctggggcacgcggatcaaggatgggagcacccacccgggcgcctcaggaatgttctcaaggggtagtggtaaagatgggagtaggcttagtgcctgcagcagtcgagcttcttcagcttccatgcctccaagtgcaaagactgaatgtgagatcttgcaatcagccaatgttaaggtcttcagttataatgatctcaggttagccacaaggaacttccgtcctgacagtatgctcggcgaaggagggtttggatctgtctacaaaggatggattgatgagcatacattgtcagcttgcaaacctggtactggaatacctgttgctgtgaaaagactcaacctggaggggttgcaagggcaccgagagtggntggctgaagttaattacctaggtcagttttgccataccaaccttgtgaagctaattgggtactgcttaa

SEQ ID NO: 50728 - DNA, 586 bp, Zea mays
  Clone ID: MRT4577_146259C.1
gaaattctcattccctatctataggaacaggataacccaccacttcatttataagcatgcatgacaaggcctgaccgacttggtacaaagggatgttctccaccacctctgctgactatgcctcaaaaaactctcgcggcggaaaaaaacacacaaattttcggttcgaaaccacccaccaggtgtttatgcggagcacccacatcatgatggccccgacttctcagctggcgaaagaatcttcttgctgggcttccacccggcgatcaactggttctaccacttggcatactccttcatgttccccgtgcacttattgtcgcggtcgacgaagaccacgccataacgcccggtgaaaccggcgaaccattcaaagttgcccagcacatacccagccaagcatccttgcaccttagatcccaagtctattgattccataaaagcagagatgtgtgcactggacgccatctacccttttggagacacttaacgcctcctccaagggcaaacccgtccccttggaagaaacatccccgattccgttctccgtgatgtagatagcggccttcccgaatttcctcttccc

SEQ ID NO: 50729 - DNA, 237 bp, Zea mays
  Clone ID: MRT4577_14625C.1
gagccggccggagctaggattccgtcctccctccgatccgccgcgtgaacaccaagttatagacctcctttccactcatggccctcgtaaccttgtcgccccgctgattattgtcgagagcttctgatggtaagtttggcgtgtagtatgacaggctaggttgaggttaaacgtatcagcatcggactcacatgaggaaacgtcacgaacttggagaaagactgcgcggatttgcaa

SEQ ID NO: 50730 - DNA, 610 bp, Zea mays
  Clone ID: MRT4577_146260C.1
gcaccagtgtatccgcagaggtggaccgcttcgcgggaggtgcgggctcccctccatcgtcgtcctcgtcggcccaatcgccggtcgggtcgaccccagaagctcaaaaaagttatttaccaaaactgcagaagtccaaacgttgaagtgtaacagcatgctgctctcattaatattgttaattttgaatgtgcgcatcacgcagatcaagattctgagtaaaaaagccataaaaagggaatgtcaatgaatctgttgacaaggaagtgcttccttacctgtggatcgtgacaaggatgggtgtggctgtattacaacgggattgaagtcgattggcaggagatgatgctactcaacaattgttccctgactgtaactgcctacaaaggcatatttgtccccaacatggatcgttttaatgaagagagagagcatggccttactgtcgccaagagatcaaatctgaacccgctgcttgatgaaaaggacaagccatgaacatctgactaaaatggagtacaagctgatgaattgcagtgggattattgaatcaggggaaagcgagaaggtcttgctgctcatgaagagtggtgtcaggatacccttttat

SEQ ID NO: 50731 - DNA, 309 bp, Zea mays
  Clone ID: MRT4577_146261C.1
atattgtatacccaaaggggggatattaaaacggggttggaaaaaaaaggcagccaacttggttggggggggccccgttatagaagatttgcaacggggggaaaaaggatacccgcgggggggggggttattgggtattgggaaaaagggaaacccgccggggaggggaactgggcccccttggggaacacaccccaaagggaacgctccaccccaaagtttattattgaaaaggcggcccacatggcagggatggtttgttagggaccctggggggggctagaacaaaggaatatggggggggatgtt

SEQ ID NO: 50732 - DNA, 341 bp, Zea mays
  Clone ID: MRT4577_146262C.1
tcgtcgcgtccgccacccgttcgggcaagcgagggtttgtttagagagagactgcttctcctccatcccagccagccgacgccgtctctacggtcgctaataagccgtcgaatacagggatggagatgaagaagatcggctgcgccgacctcgacgccgactaggtcaccgcggcgctggccgcggaggcgccagctccgtctcccaccagcgggtgcttcgtggccggacccgccatagacggggccgacgtggcctcctttttagcgtactacattcactgacccgccggacgaggagcccgaccctgcgggaagagaccaatgtggggggagagactt

SEQ ID NO: 50733 - DNA, 2032 bp, Zea mays
  Clone ID: MRT4577_146263C.1
tacctcgaggccggccgggaaggattccccaaccccaaccccaaccccaaccccccaagaagcaccgcacagaaccctctgctcctctcaccctcacgctccaaggcggcggcgccatgcacggcggaggcgcggcctcgcccgatgccgccatatgcatctccccagaagctgggcccatcgtcggggtcgcccccgccgggatcagggtcgaaaactgctacgtgttcaagagccggctgcaggagtatgctcagagggttggcattccaaccccggagtaccacacgctgaaagaaggcccgtctcatgaacctgtcttcaagtccacagtgttcgttaataataccaagtatgagtcgctgcctgggttcttcagccggaaggctgcagaacagtctgccgcggaagttgcgctcatggagatagccatgtccgctccggtgaccgaaattaggaacatgccagcagttcaagaaactggcctgtgcaagaatctccttcaggagtatgctcagaagatgaattacgccattccatcttatatttgcactaaacaagcttcgggtgtagctcctttcgtatgcagtgttgagattggtggcatcctatacattggtgctgcagctaggacaaagaaggaggcagagataaaagctgcccgaactgctcttcttgcaatccaaagtcaatcagaaggtggtgcaaatggtgccaaaaagtacattgttgttcctgggcaaaggccagataaggaggcgaataaaaatccaactgaaacccccataccacttagagtcaagaagcgtggttccaggaagaaatggaacaagaggaaattcaggaggatggctgaccgaattgttgatgctggaaaggatgcagaggggcttggaacgcttctacatgatgactatgaggaagctagaagaataggatatgagttacctacagatactgctatggttcaatttaacaaggaagttgtaatgacacaacctggtgaaggagataggatagtacaattggagccacccagagatcctgcagaggtccaatataacaaggaagctagaagtgttgaacaggacccacccagagatcctgcagaggtccaacataacaaggaagctagaagtgttgaacaggacccacccagagatcctgcagaggtccaacataacaaggaagctagaactgtcgaacaggacccacccagcaacacagaagtgtggaagcctgacaataaggctacaactacagagcaggagtcggtgagcgctttcatagcattgagatctaatggggattctacagatgtggaggcggcaccaggcgataccttgatgatgcagggccaggagtcggaagccacaatgcaagaagcatctcacgctggtgaacaggcccagcctaactaggaacctgaaagcaaaaaaaaacttcctgaacaggaagaccgaaatgtaggtcgaatgcatgcattgctgtaggagaataagtccactggaggtacatgagcctaaaataatttgtggagtggtggttgactccagtggtaagtgccttccagagtgtaccggcatgcccaaaactgaaatttccggtttagatagaattgggggcgcggaagagggtgccatgtgtgtgtttgtgtgtgttgcctgtggatggaggaattgatgggagtatgtgaactgatgtagctagtctatgtttgttaccattgagggcttgttcggttagctctcaatccatgtggattgagcgggattggatgggtttgaatcccaaacagctcaaacttcttcacaattttttccaatcccatccaatccatgtgtattgggaataaccgaacaagccctgatgatgattgtgtttggccatgttttcactgtcatattggttggcgaccgctacttgcatgcacaatgcattcgaggtagccggtccaagcctccatttggtcactggatgattgcttaaatgatgtttgagttctcttgtgttaaattattaatgcacaagg

SEQ ID NO: 50734 - DNA, 658 bp, Zea mays
  Clone ID: MRT4577_146264C.1
acacaaatatatttaataacattataattaatataatatagataagtatcattcaatatctcataaataagcattgtcaaataactcatacataagtgtactttaaatccatactaaaatactaatggaaaaacttggtcatcaactgtttgcatcaacggtttgcgctaacgttgagcctaactaagcatatatcaattcaagtctccacacttatgcagccaccaaaatttaagtttaattccatcttttccttctctagaacttcgctataagcagacgtgctgacaattggtgagatccaaaaggacacatagattttgcatcattttctgccttcttgtaaatgcagataaattggcagcaccaaaaacccaatcaggcaattagtttatcctgaatcaccacgcacatgatgatttatgcatcaatctgaccattggtggaatgcagcttactgcacgcattctatgccaccacaggaagatgtagaaagaaattcaaggtacacacaacaacactacacataccgacacttccaaagttacgggtgatgagtagcctcgcttagaatccagttacctgttatcaatggatttttttgtgcaggatcaccccccataatttagtctgtattttctctgcgtacagattctct

SEQ ID NO: 50735 - DNA, 325 bp, Zea mays
  Clone ID: MRT4577_146265C.1
atgtgtatatgtctttttatggggattctagggtgtgttgtgacattttgtgctacaagccatgaaaattttagattaatggaattactgccaccagcaattttcttgtttcttcgctgcatccgaaggcgggagattacatgcagtggaggaaaaaaagaggactatttttagctgataagaaatgaagcatcctacaaaaaaaagagagacaggtaaacagcaaaaccaagggagggcgggctgaacctaaagcatgggattttgcggaggtaagagcacatttcgtctcagtgggtgcggaaaagaaatatacaggagggta

SEQ ID NO: 50736 - DNA, 307 bp, Zea mays
  Clone ID: MRT4577_146266C.1
cagccttccgttgacactttgaccattagctttttattccaaactgcccggtaaacacctggggggacatggatcgcacagcggcacaaccgcgcgaaagtccttacctaaacaccccaggggggctccattttgctctaatcgcgggacacaatttaaatgccgtagtgcccttcatgggtgaatctgcaactcctgtctccattggctaccttattcctgaagcctttttacagagacgattgcctccacaccaacaatgagcaatgcaaccggaggagggcagggggggggacaacaccccaag

SEQ ID NO: 50737 - DNA, 841 bp, Zea mays
  unsure (1)..(841): unsure at all n locations
  Clone ID: MRT4577_146267C.1
ccgcgggggggttttttttttttttttagataagtatcatgcaatatctcataaataagcattgtcaaataactcatacataagtgtgctttaaatccatactaaaatactaatgggaaaaacttgggcatcaactgtttgcatcaacggtttgcgctggggggggggggaactaancatatatcaattcaaggctccacacttatgcagccaccaaaatttaagtttaattccatcttttccttctctagaacttcgctataagcagacgtgctgacaattggtgagatccaaaaggacacatagattttgcatcattttctgccttcttgtaaatctgagttatacgtctagttaataagtaattgcggggagatccaaaaggtctccttttctacatttgcactattatatatcccaacaatccttcacaagatgttaatcttattctctattcaaaccagttagaaaagcttgtgtagattagaaaagcttatggagatgtatgacaacaatacaaaaacttacgcagataaattggcagcaccaaaaacccaatcaggcaattagtttatcatgaatcaccacgcacatgatgatttatgcatcaatctggccattggtggaatgcagcttactgcacgcattctatgccaccacaggaagatgtagaaagaaattcaaggtacacacaacaacactacacataccgacacttccaaagttacgggtgatgagtagcctcgcttagaatccagttacctgttatcaatggatttttttgtgcaggatcaccccccataatttagtctgtattataactgctgcgtacagattctct

SEQ ID NO: 50738 - DNA, 434 bp, Zea mays
  Clone ID: MRT4577_146268C.1
acatcaaataccacagagatttttccactcaagaaggaacttacttactggaggggctccctatctacatgacgggaaacagcttaccttctctgttcatcatcccaaagttaatattatctccactgcttccaatgcgtccactacaaccaattcctttccgtttatcatccagctcgtttggaacagcattattactgaccggcaacccccgatgaacatgaataccatgagcaacaccatcagcacaaataatatctacattatcagccaccccttggcccaatcactattataggactagaggagctttccctgtactccctacacgtaaaccacggtttcctccatgttcttatcgattctgagtgctagctcaccctgttgagaaaccatatacctcaactgctttaagtttatttctcaactcatat

SEQ ID NO: 50739 - DNA, 1948 bp, Zea mays
  Clone ID: MRT4577_146269C.1
gcttgggtcggggggttttatttaaaaacattataattaatataatatagataagtatcattcaatatatcataaataagcattgtcaaataactcatacataagtgtactttaaatccaaactaaaatactaatggaaaaacttggtcatcaactgtttgcgctaacgttgagcctaattaagtatatatgaattcaagtctccacacttatgcatccaccaaaatttgagtttcattccaacttttccttctctagaacttcgctataagcagacgtgctgacaattggtgagatccaaaagaacacttagattttgcatcattttctgccttcttgtaaatctgagttatacgtctagttaataagtaattgcagggagatccaaaaggtcgcctgaactacatttgcactattatatatcccaacaatccttcataagatgttaatcttattctctattcaaaccagttagaaaagcttgtgtagattagaaaagcttatggagatgtatgataacaatacaaaaacttatgcagataaattggcagcacccaaaacccaatcaggcaattagtttatcctgaatcaccacgcacatgatgatttatgcatcaatctgaccattggtggaatgcagctacaagtagatgaggggagatcacacatatggattggatcaaccgctagttcataaatgtaagagagatatgatgcaagttgcatccggtactagcttcattgctagctcaataaaacaactttgtaggcctgaaggtcccactaccccagattagaggcgaggtaggaggcacaagggccattaggcaacacccaagtcaataacaatctgttacccagagggagcaacagagaaacatcatttaaacaaaaacacatatcgaccataaatacacaaggcatgtcaaacagaaggtagaccataccttactgcacgcattctatgccaccacaggaagatgtagaaagaaattcaaggtacacacaacagcactacacatacctacatagtcacgaatcgatttatgggctcagtgcgtcccatagaacgcacacaagtacacgtataagaaatcgcacgaggtacaagtgaatagtatgtcaactaactcacacttccaaagttacaggtgatgagtagcctcgcttagaatccagtcacctcctcatcaccttcttcttcttcgtccccttcaccgtcctcgtcatcttcttcctctccatcatcctcatcgccctcctcctctccctccgccccttcttctccctcgtcgtcctcctcctcgtcctcgtcgtcatccgtctccaaacgctcgttgccctcagcgtcagcgccatcaaggtacttgaggctgggaatcagcgcgaagacctcctccctgtaccccttgaccttggtgacggggcactagaacaggtcaagtgactcgacccggaccccggcaagcggcgcgagctcctggacctctgcgaaccggttgttccctaggtagaggtggttgtcggggagggagaggcgccggagcgccgggaggtgtggcaggctcgttagcgaggagaggcgcgcccccgcgacggagagctcctcgagggaggcagcgaagcgctcgaggagcacggcggaggggaggccgcccgtggaggacttgacggcgccgttgagggtgagggtcttgggcgccgaggtggacttggtggcggcggagatggcgcgctcccacgccgcgtcgtcctctccaccggcggcggcggccatcgctgtggcaggcaggggcggtggtggaaggatgagaaccctagcaaaaccactggctgagtgtgtatggggaagtacggcgtacgaaaatggatggggaattgcagacgtccagacatggattgatttgggcttttagtccatgctcttaagaagaagagaaaggctgat

SEQ ID NO: 50740 - DNA, 241 bp, Zea mays
  Clone ID: MRT4577_14626C.1
atcgcgcacaagagatagagagagagagatagtcgcgaaaatgagcagagcgagtcgctagaagaagggagcgagctgtgtgatcgatcgcgcgaagtctgaggcgcatataagtatggacattgcttctctggagagagagcttcacgagatgattaaggttggcgatatgacatgtgcactcggcgatgacattactggcactagggacaagagcactatcaccgtcacctcagacagc

SEQ ID NO: 50741 - DNA, 622 bp, Zea mays
  Clone ID: MRT4577_146270C.1
aaaaacactaattattattttatatttatgttaacatcaataaaaagatatccaaccagtttatcctaaaaaagatgagaaaaatgtcatggaaggttcctcgctaactttcgcaagtttaggtgtcttttccaccgccacgcgcgcgtcagcaccggtgataaggaagatatcagtgaaacgcggagaagctctcaaatagccacgaatttcaatagaaaagattacaaaaatggtctgaaagttgccagtagtcacaagtgcatgccccagaatccagttgaccaaaagtaacttaactgtaagtgaatttatcatacaagtcgccgatcttgtgaggctagagatccaatcctgaaccaataaatatagtcacaagattgtcctgactatacatacaacgggtgttgcacgcctagcttctttcctctgggaagatgcctcttgtatcttcacgagttcagcatcttatcgcctctgtggagcatgatcggcattctttttctagctaattcatcttcaaaggggaatgcttgagcttttgcttgtgcttcttgttgcaaactatttctgtaatcttcagcttttttaactgggcaaggtcatctcgtatgccttcttg

SEQ ID NO: 50742 - DNA, 1825 bp, Zea mays
  Clone ID: MRT4577_146271C.1
gccggccgggccgggcgtgcctgccggaagtagaatcattcgattccccaaagcgaaatccgcagcctcgcctctctcgccattttccaggcgcgcgctcggcgcggccgccgccagcgatacagatccttgcacggacacaagggctccgcgctcccaccggatcggatcccgtcccgatggctcccactcccactcacacggcggcggcggtggcgctcgccgcgcacgactcgtccggccacctcgcgccgctcaccatcacccgcaggagcaccggggacgacgatgtagcgataaagatcctgtactgtgggatgtgtcactctgaccttcacagcatcaagaacgagtggcacaacgccacgtaccccatggtccctggtcacgagatcgccggagtggtgacggaggtgggcaagaacgtgaccagcttcaaggccggggaccgcgtcggcgtgggctgcatggtgaactcgtgccagtcgtgcggcagctgcgacgaggacttcgagaacagctgccgggccgtcatcttcacctacaactccgtcgaccgcgacggcaccgtcacctacggcggctactccagcagcgtggtggtgcacgagcgcttcgtggtccggttccccgacgcgatgccgctggatcggggggcgccgctgctgtgcgcgggcatcacagtgtacagccccatgaagtaccacggcctgaacgtgccggggaagcacgtcggcgtgatggggctgggaggcctgggccacgtcgccgtcaagttcgccaaggcgttcggggccaaggtcacggtcatcagcacgtcgcctgggaagaagcaggaggcgctcgaccggcttggcgccgacgccttcgtcgtcagcaaggacgccgaagaaatgaaggcggctgcgagcaccatggacggcatcatcaacacggtgtcggcgaacctcaccttggccccgtacatgggcctgctcaagcccaacggcaagatgataatggtcggcctgcccaccaagcctctcgagatcccgccctttgatctcatcattgggaacaagaccctggccgggagctgcatcggcggcatgagggacacgcaggagatgatcaacgtggcggccaagcacggcgtgacggcggacatagaactggtggccgcggactacgtgaacacggccatggagcgcctggccaaggctgacgtcaggtaccgcttcgtcatcgacatcggcaacaccctcaagaattcagagtgatcagacctaaaacgccggcgacacctctactgctgctgcttgttgtgccctgtcggctttatacgatgaaccgcgtcctttttttttctgtgtcagtgataatattttagctaaggcagacgtaaacgtagttcgcgaggattgccttcccatgcatgttatggaagttggatgcttttattgttgttgccgtaaaacgagatatgatgcagcatttttttattttccctctatcatttggttgctgcatcctctcggttctaaattataaattatttaagttttttaatgtatatttttcattgtatatctagataatactttatatttagacagtgtcggtcttacaccaactcaagcaggccgtgaaaatggacgtacaaaacattgttttatactgctatagatagtcttgtttgtttcacccttaatccatgtggatttttgtggtattaagtcggtttaaatccatattaaattaaaatacaatcctattcattccaatacatttgaatccacatgaaattggaataaccgaataggctccttgttcgtcgacgcggccg

SEQ ID NO: 50743 - DNA, 480 bp, Zea mays
  unsure (1)..(480): unsure at all n locations
  Clone ID: MRT4577_146272C.1
cctttacttttttctttctttgtttttttttttccccgatacctcctcaccagtggggtcaaaaagcgttgtgaaaacccatattgctaaccctacaggtatccaaagggcacatcgcaacaggggttttaccattaaaacccttggggctccaacaaccgagagccctattacaagagttaccttgggtccatttgggggcgcaaaacataggggcacaacaactacaacaacttgtgctagcaaaccttgctgaatactctcagcaacatcagtttcttccattcaaccaactggctgcattgaactctgctgcttatttgcaacaacaactaccattcagccagttagctggtgcctacccccaggaatttgttccatttaaccaactagaaggattgaactgtggtgattatttacagnagtaacagctactaccatttagccaggtagcatgatgtgggccctggtgcctttttg

SEQ ID NO: 50744 - DNA, 390 bp, Zea mays
  unsure (1)..(390): unsure at all n locations
  Clone ID: MRT4577_146273C.1
acgctttcgttcttttttggctgtatgcatgcgtgttgggttgctcgagaccggtttcgtgtggatgctgttgaaggcccgctaggaaaacaaatttcgacgggcgggtaaaacgcgggaaccacgacaccggcgataaatccagccaataggacgggcggttaaagaaaaaaaagggggaaaacggccagccaccccaaagcgtctgcaaagaaagacgatggaaccggcctttttcacccgagggcccccgaaaaaccttaaggcaaaggtgcccagcagccgctcaaagtacccgggacgataacaacacgcgggcgctcgggtttccgattaacttgcggagaagaatgagagcagggggagatggcttacaacccancccccccc

SEQ ID NO: 50745 - DNA, 347 bp, Zea mays
  Clone ID: MRT4577_146274C.1
gtgggaaaacctgaaaaaagatataaatttggggaattttccccgggaaccaatgccccaatccatttttcccttggaaaaaaagccttttggcccctttttcaaaaaccatcctttttcttacatgttggacgggccccaacaaagggactaaccccccaattcgttaacaaaaaaaaaggtacccttcattggtgttctttaaaaagaaagaatccaaagtccttcataaagactaactgggggggggggggcgcccaaaacccaaatattttaaacggccaaaccccccaagccagtttaaaaaactatccaaaattatgtttcttcacccaaaaaaggccccc

SEQ ID NO: 50746 - DNA, 348 bp, Zea mays
  Clone ID: MRT4577_146275C.1
tgggtacctcgaggccggccgggtatattatttcgtgctctcacattaaaaaaaaaaaaaaaaagcaaccccaccgggtccacccccttttctgccttcctttccccgtgcaacaaacgcaaacgcgacctaacgaatcgaatcaaattcgccgtccacctcgtcggcgtcggcgcaagcccagcccccgtccgagtccgatcagccaccggagatgcagcacgggagcggcgactacgcctcctccgccccctccggccactactaccagcaccagtacgcgccccccggctcaaacccctatccaaccgccacggacgccacggcgccgggggcagtggcgggtga

SEQ ID NO: 50747 - DNA, 303 bp, Zea mays
  Clone ID: MRT4577_146276C.1
gatacgcttgggcaagcgcagaaacctcagtgcgcatgacgcggcgatgattgcgggcgcggacaccgtctgagtccgatagcggacgtcgatcggctcggcgtcgtcggagccgagcgcgtaaatggtaactgcgtagcgcaataccgcgataaggcaaatggcggcacggagctgcgtcgtgtggagcacgtcgtggatcgaagaccgctagcaacgagagatgttgcaccctgccagcagggttgcgttgaatttgccgcaaccggacatgaggcagcgaatttatgtagaagtggaatg

SEQ ID NO: 50748 - DNA, 423 bp, Zea mays
  unsure (1)..(423): unsure at all n locations
  Clone ID: MRT4577_146277C.1
cagaaaaaaacctttattattggacctataaccccatagccattctaaaaagaaggccccctccatggtgggtttgttggtaaaccgctggtgggtttggtcaaagcatggtggtttgatgggcagcatttgttttttttttaagagggggccaacggaaggaacagcgtgcaggtataacggtatcatttgtggcaaacccaagagggcagggggcctcacagaaggctacttggttaaagggaaaaaaaagagggggcccccacccaggagggttattgctccccagaggtttgattgaaaaaaatcgctgggggtaggcagcatctatttgtctatatgaaaaaagttgtccatgttggaaataacccccacagttaaatgcanctcgtggcgtgattggcaaaaccccccaaagctgaa

SEQ ID NO: 50749 - DNA, 3459 bp, Zea mays
  Clone ID: MRT4577_146278C.1
atgaatcctcctaatcctccaccaggcggagttgacccactggttgctgctcagatggcggtgatgcagcaaatggcggacactatggccgatatgcgtgcccagatgcagcaagaacgccaggagatgcgtcaggaaagagaagatatacgtcaggagttacgccaagagcgagaggagatacgccaggaaaggagggcacaacaacagcagttgcaacaacaacttcaacaacagcagcaagtgccattgcctccaccaccaccaccagttccacctcgtgataagcaccgggagtttatgagccataagccacctacatttgcaagctcacctgatccactagacgcggatcattggctgaactggagctgcttcggccccgaagctggtactctcgataacaggcggttcatgctcagagccagccaacaagaagcagaagaaggaaccatagagaagggtacagcacgtcggggcagcgcagctgatatcatatttgctaaagctttcagacaaatgcaagagcccgaagacaagatccattatgctacgcaccctctttgtggcttcggaggacggcaaattgtagcacttgggaagatcaccatgccagtaaccttcggatttgttaacaatacaaggactgagcaaattgtgtttgacattgttgatatggagtatccttacaatgctatcattggtcgtggtactctcaatgccttcgaagcaattcttcatccagcttacctttgcatgaagataccttccgaacaagggcccattgttattcatggaagtcaggaagctgccagaagggccgaaggaaattggacatattcaaaagcgatccataacatagatggagctgaagcttgtgagcagtacaagttcagaagggaaaaagctgcttcggctgatcagccgaaacccatgctcatatgtgaggacatagcagagcagaaggtgctattgggatctcaattgtccgaagaacaggagaaaaccttgatacggtttttgttcaacaataaagatgtttttgcttggtcagctaatgatctttgcagagttaacagggatgttattgagcactcgctcaatgttgacccatctttcagacccagaaagcagagacttcggaagatgtctgatgacaaggccgaaggtgctcggaataaagtgaaaagactccttagtgctggagttattagagagataaaatacccagaatggttggctaacactgttatggtgaagaaggccaatggctatcatcaaatctggatgaagaaggaggatgaaccgaagaccagcttcataacccctagtggaacatattgtcaccttcggatgcccgaggggcttaagaatgctggaggaagcttcagcagaatgacagcgaaggagaccttcgctaattttagacaggctggtttaaagctaaacccagaaaaatgtgtcttcggagtgaaggggaaatttcttggttgcctagtttcaacaaaaggaattgaggctaatccaaacaaaatcgaagctatccttcgaatggaaccaccaagtacaaagaaaggggctcaaagattgataggaagactggcatctctcaacagatttatatccagatcagcagagagaaatttgccatttttcgaagtgctgaagtcagttgaagtttttcagtggggaccaatccagcagaaagccttcgaagagatgaagcaatatttaatagatctaacaacactaactccaccaacgccaggggctcctttgttattatatgtggcagcttcgcactcagcggtaagtgcagcacttgttcaggagaagcttgaaggccaagtcaaaaagcaggccccaatatactttgtgtccgaagttcttagtttatcaaagaaaaattatacagaattggagaaggatattataagaaaccgagaagctactggaaggattggaaaatgggctgcagagctcaatgaattttgtattgattatgtccatagatcttcgattcagtcccaagcgttggcagactttattgctgactggacgccaggagctcaggaagaagaaatgaataaagatgccgaagcatggacagtgttctgcgatgggtcttggggaaccttcggagcaggagcagctgctgtgttggtttcaccttccaaagttagaacttgttatgcggcaagacttgattttagttgcacaaataatattgctgagtacgaagctctgctcttgggtctccggaaattaaagacaatggggatcagaagggctattcttaaaactgactcccaagttatttctggtcatattgacaagagctataaagcaagagatccgaagcttgaaaaatatctagatacagttcgaaggattgaggcttcctttgaaggattctctgtcaaaaatattcctcgcggagaaaatgaatatgctgatttgttagccaagtcagcggcacaggggctgcctttaccttcggatggtaattttctatcagatgacgaagcttacaacagaaggttagaagcaagagctcgaccatatgttattatagaaggggaattatacaagcgtggggtctgttccccgttgctcaagtgtttgtccagagccgaaggtccgctaccaccagcacaagtaaatttaagatatgttgtagtggcagtggaatatttttctaagtggattgaggcaaagcctttagccacaataacttcggttaccgtccaaaagtttttctggcaaaacattgtttgtcgcttcggagtgccgaaggccattactgtggacaatggaacgcagtttgactccgaagttttcaaagagttttgtgaccaaattggcacgaagatccattttgcatcagttcgacatccagaatcaaacggactagtcgaaagagccaatgggatcataatgacaggaataatgaagtcaatcttcaatcagcccaggggaaagtggccagaagaattaatcaaagtggtgtggagccttaacacaacagcgtcaagatcaacaggctttacgccatttaaactattgttcggtgacgaagcaataacaccggaagaagccaaagtaggatctataagaacaataacttcggcagaaggcgaggatgaagctgattgctctgtggaaaaggatgctatagaggggatcaggcttcaggctgtggaaaacatcaataaataccaagccgaaacaataaaatggcgtgacagaaaggttcggttgaagaacattaaaccaggacatttggtgcttcggagagtggccaacccagacaaagtaggcaaactacagctgaagtgggaaggccctttcttagtagtatcttcgtcaagacccggttcctacagattaaaggacatggatggcaacgacatccctagatcgtggaacgcggatgagcttcggcgatattatgtttag

SEQ ID NO: 50750 - DNA, 3717 bp, Zea mays
  Clone ID: MRT4577_146279C.1
atggcttcgttcaacaatcaagctggagctgcttcggacccgaagctggtgctcccaattacaggtggttcgtcctcagagccagctaataagaaacaaaagaaggaagcacagagaagggtacaacatgttggggtgcaaggacccttcatcaagtcaagatggtctcacattcctattaccttctcccaagaggaccttcagctcaaagattacccacacaacgatgccatggcagtgcagctgacatcatatttgctaaggccttcaggcaaatgcaagagccagaagataagattcatgatgctacacatcctcggagggagacagattgtagcactgggaaagatcaccatgtcagtgaccttcggattcatcaataacactagaactgagcaaattgtgtttgacattgttgacatggaatacccttataatgcaattattggtcgtggtaccctcaatgccttcgaagcaatccttcaccctgcttatctttgcatgaagataccttcggatcagggacccatcgctattcatggaagccaggaagctgccagaagggccgaaggaagctggactgattcaaaagcaatccataacatagatggagctgaagcttgcgaacaatacaaattcagaagggagaaagcagcttcagcagatcagccgaagcccatgctcttatgtgaggatgtagcagaacagaaggtgctgttgggctctcagttatccgaagcacaagagaaaaccttgctaaggttcttgttcaacaacaaagatgtttttgcatggtcagccaatgatctctgcggagttaatagggacgttattgagcattcgctcaatgtcaatccatccttcagacccagaaagcaaaggcttcggaaaatgtcagatgataaggccgaaggtgctcgtaatgaagtcaaaagactcctcagcgcaggagttatcagagaagtaaagtatccagagtggctagccaatactgttatggtaaaaaaggccaatggcaagtggcgaatgtgtatcgattttacagatctgaacaaggcttgtccgaaggatgaattcccattgcctaggatagattctttagttgatgcagcagcctcttcagagctcatgagtttgttagactgctattcaggctatcatcaaatctggatgaagaaggacgatgagccgaagactagcttcataactccaagtggcacgtattgctatcttcggatgcctgaggggctcaaaaacgctggaggaagttttagcagaatgactgcgaaggttctccaatctcagataggcagaaatgtgctaacttatgttgatgacatcattgtaaaaagcacgaaacaggagaatcatattgctgatttgcaggagaccttcgccaaattcagacaagctggcttaaaattgaatccagaaaaatgtgtttttggggtgaagaaggggaaatttcttggatgtttggtttcaacaaagggaatcgaagctaatccaagtaaaatcgaagctatacttcggatggagccaccaactacaaaaaaaggggctcaaagattgacaggaagattggcatctctcaatagattcatatccagatcagcagagagaaacttaccattcttcgaagtgctgaagtcagccgaagtctttcaatggggaccaatccagcagaaggccttcgaagagctgaagcagtatttaatagatctaacaacattgactccaccaatgccaggggctcctttgttattatatgtggcagcttcgcactcagcggtaagtgcagcgcttgtccaggagaagcttgatggccaggttaaaaagcaggttccagtgtattttatatctgaagttcttagtatatcaaagaaaaattacatagaactggagaaggtgttatcttcgattcagtctcaggcattagcagatttcattgctgactggacgccaggggctcaggaggaagaaacaaataaagatgccgaagcatggacagtgttttgcgatggatcttggggaaccttcggagcaggagcggctgctgtgctggtttcaccttccaaggttaaaacttgttatgcggcaaagcttgactttagttgcacaaataacattgccgagtacgaagccttgcttttaggtcttcggaagttaaaagcaatgggaataagaaaggccatacttaaaactgattcccagattgtttcgggtcatgttgacaagagttgcaaggctaaggatccgaagcttgaaaaatatctggatatggttcgaagagttgaagcttccttcgaagggttttctgtcaaaaatatccctagaggacaaaatgaacatgctgatttgctagctaagtcagcagcacaggggctgcccttaccttcggatgtattctttgaaacaataaaggctccttcggtagaacttcttgaaagagcagttctcaacatatctcctgtttatagcgaggattggagaactgagatcatttcctatcttcagggaaaattcctttcagatgacgaagcttataacaggaggatagaggcaagggctcgtccatatgtcatgatagaaggagaattgtacaagcatggagtttgtgctccgctactcaaatgtttatccagaaccgaaggtattgagttgatgaaagaaatacatgcaggcctctgcggatctcacattggatccaggccattgcttggaaaaattttccgccaaggattttattggccgaaggcggcttcggatgcagcggagttagttcaaaagtgcgaaggttgtcagaaatgtgcacgagagcaaaaacaaccttcgtccttaacacaactcatacaacccatttggccgttgcaaaggtggggccttgacttgttaggtccgttaccaccggctcaaggcaacctaagatatgtcgtagtggcggtggaatatttttctaagtggattgaggcaaagcctttagctacaataacttcggccaccgtccaaaagtttttctggcagaacattgtttgtcgtttcggggtaccaaaggctatcactgtggataatggaacacagtttgactccgaagcttttagggatttctgtgatcaaatcggtacaaagatccattttgcatcagtcagacatccggagtcaaatggacttgttgaaagagccaatggtattataatgacaggaataatgaagtcaattttcaatcaaccaaggggaaagtggccagatcagttaaccaaagtggtgtggagccataatacaacaacatcaaggtctaccggttttaccccattcaagttattatttggtgacgaagcaataactccagaagaagctaaaaccggatctataagggtaatagcttcggcagcatcagtttccgaagctgattattctgtggaaaaagatgctttagaagggatcaggttgcaagccgtggaaaacatcaacaaatatcaagccgaaacaattaaatggcgagatagaaaggttcgactaaagaatattgagccaggacacttggtgcttcggagagtggccaacccagaaacagtgggcaagttacaattgaaatgggatggacctttcttagtagcatcttcgtcaagacccggttcatacagattgaaggatatggacggcaacgacattcctagatcttggaatgcggatgagcttcgacgatattatgtataa

SEQ ID NO: 50751 - DNA, 275 bp, Zea mays
  Clone ID: MRT4577_14627C.1
acgggacgcgtggtaattgacccaaacaccaggcatcacatgtccagggaaaagactgagactatattgaatacttttagtgaagcaattctttgtagagaaagaagttacttccacattagtgatggactctttgtatacaagtctgaaggcacttgaatatcggatgaagagcaagaaatgcaaaacaagattagcagatttggaagaactacctgtggctatggtccatgttgacatggacatgtttggcttggctgatgatgttatagctt

SEQ ID NO: 50752 - DNA, 531 bp, Zea mays
  unsure (1)..(531): unsure at all n locations
  Clone ID: MRT4577_146280C.1
ngccggccgggacctccacacattcaagtacctcctcctcctccgccggccaacaactcatccgccgcaaccgccacatcagccatgggcgactgcgcaaccagagcccaatgacgcttgaggggtagggcccagctgaggccgacggctccacacccaaggatgcgcccgaggccactccaatctccgatgaggttgcagctgatgaacaggtaactgaaaaagtggtggtgaagagattcctggctgcggcggccgacggtgagcatcagaacgctaatgaggtggtcgctccagaggctggccgtctctcgagcccgatcacaatgaggatgaagccgaggataagaccgtcggcgaggaggagaaaccagagggagccgcccatgcagaggaaaagggcgctcaccgccgccgagaccacgacgcacagcggaggcgaagaagaacgccgcaggaaggcgctgaaggagacagctggcgcaacgaagaatgaatccactgcctcgtgcatgcagtgccaatataata

SEQ ID NO: 50753 - DNA, 3687 bp, Zea mays
  Clone ID: MRT4577_146281C.1
atggcttcgttcaacgaccaagctggagctgcttcggacccgaagctggtgctcccgatcacaggtggctcgtcctcagagccagctaacaagaaacagaagaaggaagcacagagaagggtacagcatgttggggtgcaaggacccttcatcaagtcaagatggtctcacattcctattaccttctcccaagaggaccttcagctcaaagattacccacacaacgatgccatggttatctcttgtgttatcaaaggatttctggtccacaatgtcttggttgacacaggtagtgcagctgacatcatatttgctaaggccttcagacaaatgcaagagccagaagataagattcatgatgctacacatcctctctgtggcttcggaggaagacaaattgtagcattgggcaagatcaccatgtcagtgaccttcgggttcatcaacaacactagaactgagcaagttgtgtttgacattgttgacatggaatacccttacaatgcaattattggtcgtggcaccctcaatgctttcgaagcaattcttcatcctgcctatctttgcatgaagataccttcggatcagggacccatcgctatccatggaagtcaggaagctgcaagaaaggccgagggtaattggactgactcaaaagcaatccataacatagatggagctgaagcttgtgaacagtacaaattcagaagggagaaagcagcttcagcagaccagccgaagcctatgctcttatgtgaggacatagcagagcagaaggtgctgttaggctctcagttatccgaagagcaggagaaaaccttgataaggtttttgttcaataacaaggatgtttttgcatggtctgccaatgatctctgcggagttaatagagatgttatcgagcactcactcaatgtcgatccatccttcagacccagaaagcaaaggcttcggaaaatgtcagatgataaggccgaaggtgctcgcaacgaagtcaaaagactcctcagtgcaggagttatcagagaagtgaagtacccagaatggctagctaacactgttatggtaaaaaaggccaatggcaagtggcgaatgtgcatcgattttacagatcttaacaaggcttgtccgaaggatgaattcccattaccaaggatagactctttagttgatgcagcagcttcttcagagctcatgagtctgttagactgttattcaggctatcaccaaatttggatgaagaaggaagatgagccgaagactagcttcataactccaagtggcacatattgctatcttcggatgcctgaggggctcaaaaacgctggaggaagtttcagccgaatgactgcgaaggttctccaatctcaaataggcagaaacgtgctaacttatgttgatgacatcattgtcaaaagcacgaagcaggagaatcatattgctgatctgcaggagaccttcgccagtttcaggcaagctggcttgaagttaaatccagaaaaatgcgtcttcggagtgaagaaggggaaatttcttggatgtttggtttcaacaaaggggattgaagctaatccaacttcgcactcagcggtaagtgcagcgcttgtccaggagaagcttgatggtcaagtcaagaggcaggccccaatatattttgtatccgaggttcttactttgtcaaagaaaaattatacagaactggagaaggtattgtatgctgtcttgatggcctccaggaagcttcgacactatttccaagcttacaacataattgttccttcatcacaacctctgaaggatattatgaggaatcgagaagctactggaaggattggaaaatgggctgcagagctcaatgaattttgtattgaatatgttcatagatcttcgattcagtcacaggcgctggcagactttattgctgattggacgccaggggctcaggaggaggaaacgaataaagacaacgaagcctggacagtgttttgtgatggatcttggggaaccttcggagcaggagcggctgctgtgttggtttcaccttccaaagtcaaaatttgttatgcggcaaaacttgattttaattgcacaaataacattgctgagtacgaagcattggttctaggtcttcggaagttaaaagcaatgggaatcagaagggccatacttaaaactgattcccaggttgtttcgggtcatattgacaaaagttgtaaggctaaggatccgaagcttgaaaaatatctggatatggttcgaagagtcgaagcttccttcgaagggttttctgtcaagaatattcctcgaggacaaaatgagcatgctgatctgctagctaagtcagcagcacaggggctgcctttaccttcggatgtgttcttcgaaacaataaaagcaccttcggtggaacttcttgaaagagcagttcttaatatatctcctgtttttagcgaagattggagaaccgagatcatctcttaccttcagggtaaatttctttcagatgacgaagcttataacaagaggatagaagcaagagctcgtccatatgtcatgatagaaggggagttgtacaaacatggagtttgtgctccgctgctcaaatgcttatccagaaccgaaggtatagagttaatgaaagaaatacatgcaggcctgtgtggatctcacatcggatctaggccgttactcggaaaaattttccgtcaagggttttattggccgaaggcagcttcggatgcagcagaattggttcaaaagtgcgaaggttgtcagaaatgtgcaagagatcaaaaacaaccttcgtccctaacacagctcatacaacccacttggccattgcaaagatggggccttgacttgttaggtccgttaccaccggcccaagggaacctgagatatgttgtagtagctgtggaatatttttctaaatggattgaggcgaagcctttagcaacaataacttcggccaccgtccaaaagtttttctggcagaatattgtttgtcgtttcggggtgccaaaggccatcactgtggacaatgggacacagtttgactccgaagctttcagggatttctgtgaccaaattggtacgaagatccattttgcatcagttaggcacccggagtcaaatggactcgttgaaagagccaacggcattataatgacaggaataatgaagttaatcttcaatcaacccagaggaaaatggccagatcagttaaccaaagtggtgtggagccacaacacgacaacatcaaggtctacaggcttcactccattcaagttgttattcggtgacgaagcaataactccagaggaagctaaaaccggatcaataaggatagtagcttcggcagaatcagattccgaagctgcttattctatagaaaaagatgctttagaagggatcagactgcaagccgtggagaatatcaataagtatcaagctgaaacagttaaatggcgggatagaaaggttcggctaaaaaatattgagccagggcacttggtgcttcggagggtggccaacccggaaacagtgggcaaattgcagttgaaatgggacgggcctttcttagtagcatcttcgtcaagacccggttcatacagattgaaagatatggacggcaatgacattcctagatcttggaatgcggatgagcttcggcgatattatgtataa

SEQ ID NO: 50754 - DNA, 2832 bp, Zea mays
  Clone ID: MRT4577_146282C.1
atgctcttgtgtgaggacatagcagagcagaaggtcctattgggatctcaactgtccgaagagcaggagaaaaccttgataaggtttttattcaacaacaaagatgtttttgcttggtcagctaatgatctttgcggagtaaacatggatgttattgagcacgcgctcaatgttgatccatccttcagaccaagaaagcaaaggcttcggaagatgtctgatgacaaagacgaaggtgctcgcaacaaagtgaaaagactcctcagtgctggagttatcagagaggtaaaatatccagaatggttggctaacactgttatggtaaagaaggccaatggtaaatggagaatgtgcatcaattttactgatctcaataaggcctgtctgaaggacgagtttccattgccaaggatagattccttagtcgatgcagcagcttcatcagagcttatgagtctgctggattgctattcaggttatcaccaaatctggatgaggaaggaggatgaaccgaaaaccagcttcataacccctagtggaacatattgttaccttcggatgcctgaggggctcaagaatgccggaggaagtttcagcagaatgacatcaaaggtcctccattctcagataggcaggaatgtgctaacttatgttgatgatatcattgtaaaaagcacgaagcaagataaccacattgatgatctgcaggagaccttcgctaattttagacaggctggcttaaagctaaatccagaaaaatgtgtcttcagagtaaagaaggggaaatttcttggttgcttagtttcaacaaaaggaattgaggccaatccaagcaaaattgaagctatacttcgaatggaaccaccaagtacaaagaagggggctcaaagattgacaggaaggctggcatctctcaacagattcatatctagatcagcagagagaaatttaccatttttcgaagtattgaagtcagccgaagtttttcaatggggaccagtccagcagaaagccttcgaagaactgaagcaatacttgatagatctaacaacactaactccaccaacgccaggggctcctttgttattatatgtggcagcttcgcactcagcggtaagtgcatcacttgtccaggagaagcttgaaggccaagctaagaaacaggccccaatatattttgtatccgaagttcttagcttatcaaagaaaaattatacagaattggagaaagtactgtatgctgttttgatggcctctaggaagcttcggcattattttcaagcttacaatataattgttccttcttcacaacctttgaaggatattatgagaaaccgagaagctactggaaggattggaaaatgggccgcagagttcaatgaattttgtattgattatgttcacagatcttcgattcagtctcaagcgttggcagacttcgttgttgactggatgccaggggctcaggaggaggaaatgaataaagatgccgaggcatggacagtgttttgcgatgggtcttggggaaccttcggagcaggagcagctgctgtgttggtttcaccttccaaagttaaaacttgttatgcggcgagacttgatttcagttgtacaaacaatattgttgaatacgaagctctgcttttgggtcttcggaagttaaaagcaatggggatcagaagggccattcttaaaactgattcccaagttatttctagtcatattgacaagagctataaagcaagagacccaaagattgaaaagtatttagatacagtccgaaggattgaggcttgcttcgaaggattctctgtcaaaaatattccccgtggagaaaatgaatacgctgatctaatggctaagtcagcagcacaggggctgcctttaccttcggaagtattttttgaaacaataaaagcaccttcggtcgagcttcttgaaagagcggtccttaacatatcccctgtctatagtgaagattggagaactgaaatcatttcttttcttcagggcccattaccaccagcacaggggaacttaagatatgtggtagtggcagtggaatatttttccaagtggattgaggcaaagcccttagccacaataacttcatttactattcaaaagtttttctggcaaaacattgtttgtcgcttcagagtgccgaaggccattactgtggacaatgggacacagtttgattctgaagccttcagagaattttgtgatcaaattggcacaaaaatccattttgcatcagtccgacatccagagtcaaatggacttgtcgaaagagctaatgggatcataatgacaggaataatgaagtcaatcttcaatcagcccaggggaaagtggccagacgagttaatcaaagtggtgtggagccataacataaccatgtcaagatcaacaggttttacgcccttcaaactattgtttggtgacgatgcaataaccccggaggaggccaaagcaggatcaataagaacagtagcttcggcagaaggcgaggacgaagctgattgctctgtagaaaaagatgctatagaagggtttagacttcaacctgtggaaaacatcaataaatatcaagctgaaacaataaaatggcgtgacagaaaggtcaagctgaagaacactgaaccaggacactttgtacttcgaagagtagccaaccctgaaacagtaggcaaattacagctgaagtgggaaggcccctttttggtagtatcttcgtcaagacccggttcctacagattgaaggatatggacggcaacgacatccctagatcatggaatgcggatgagcttcggcgatattatgtttag

SEQ ID NO: 50755 - DNA, 3714 bp, Zea mays
  Clone ID: MRT4577_146283C.1
atggcttcgtccaacattcaagctggagctgcttcggccccgaagctgctgctcccgataacaggcggttcgtgctcagagccagccaacaagaagcagaagaaggaggcacagagaagggtacagcatgtcggggtgcagggacccttcatcaagtcaaggtggtcccacgttccaatcaccttctcccaggaggatcttcagctcaaggatttccctcacaacgatgctatggttatctcttgcgtcattaaagggttcctggtccacaatgtcttggttgatacaggcagcgcagctgatatcatatttgctaaggccttcagacaaatgcaagagcccgaagacaagattcatgatgccacgcaccccctctgtggcttcggaggaaggcagattgtagcactcggcaagaccaccatgccagtgaccttcggattcatcaacaacaccaggactgagcaagttgtgtttgatattgttgacatggaatacccttacaatgcaatcattggtcgtggcaccctcaacgctttcgaagcaatccttcaccctgcttacctttgcatgaagataccttcggaccaagggcccattgctattcatggaagtcaggaagctgccagaagggccgagggaaattggactgactcaaaagcaatccataacatagatggagctgaagcttgtgagcagtacatgttcagaagggagaaagctgcttcggctgatcagccgaagcccatgctcttatgtgaggacatagcagagcagaaggtgctgttgggctctcagctatccgaagaacaggagagaaccttgataaggtttttgttcaacaacaaagatgtgtttgcttggtcagctaatgatctttgcggagttaacagggatgttattgagcactcgctcaatgttgacccatccttcagacccacaaagcagaggcttcggaagatgtctgacgacaaggccgaaggctatcaccaaatctggatgaagaaggaggatgagccgaagaccagcttcataacccccagtggaacatattgttaccttcggatgcctgaggggctcaagaacgccggaggaagtttcagcagaatgactccgaaggtcctccagtctcagataggcaggaatgtgctaacttatgttgatgatatcattgtgaaaagcacgaagcaggataatcacattgctgatctgcaggagaccttcgccagttttagacaggctggtctaaagctgaatccagaaaaatgtgtcttcggagtgaagaaggggaaatttcttggttgcctggtttcaacaaagggaattgaggctaacccaagcaaaatcgaagctatacttcggatggagccaccaactacaaagaagggggcccaaagattgacagggaggctggcatctctcaacagattcatatccagatcagcagagagaaatttaccattcttcgaagtgctgaagtcagccgaagtctttcaatggggaccaggccagcagagagccttcgaggaactgaagcaatatttgatagatctaacaacactaactccaccaacgccaggggctcctttgttgttatatgtggcagcttcgcactcagcggtaagtgcagcacttgtccaggagaagcttgatggccaagtcaagaagcaggccccagtgtattttgtatccgaagttcttagtgtatcaaagaaaaactatacagaattggagaaagtactgtatgctgttttgatggcctccaggaagcttcggcattattttcaagcttacaacattattgttccttcttcgcagccgttgaaggatattatgagaaaccgagaagctactggacggattggaaaatgggctgcagagctcaatgaattttgcattgattatgtccatagatcctcgatccagtcccaagcgttggcagacttcattgccgactggacgccaggggctcaggaggaagaaacgaataaagatgccgaagcatggacagtgttttgcgatgggtcttggggaaccttcggagcgggagcagccgctgtgttggtctcaccttccaaagtcaaaacttgttatgcggcgagactcgatttcagttgtacaaacaatattgctgagtacgaagccctgctcttgggtcttcggaagttaaaagcaatggggatcagaagggccattcttaaaactgattcccaggttgtttcgggtcatgttgacaagagctgcaaggctagagatccgaagcttgaaaaatatctagacacagtccgaagaatcgaagcttccttcgaaggattttctgtcaaaaatatccctcgaggacaaaatgagtatgctgatttgctagctaagtcagcagcacaggggctgcccttaccttcggatgtgttcttcgaaacaataaaagcaccttcagtggaacttcttgaaagagcagtcctcaatatatctcctgtttatggtgaagactggagaactgagatcatctcttaccttcagggtaatttcctttcagatgacgaaacttataacaggaggatagaggcaagagctcgtccatatgtcatgatagaaggggagttgtacaagcatggagtttgtgctccactactcaagtgtttatccagagctgaaggcatagagttgatgaaagaaatacatgcaggcttgtgtggatctcacattggatctaggccgttacttggaaaagtttttcgtcaagggttttattggccgaaggcagcttcggatgcagcggaattagttcaaaagcgcgaaggttgtcagaaatgtgcaagagatcaaaaacaaccttcgtctctaactcagctgatacaacccatctggccattgcaaaggtggggtcttgatttgttaggtccgttaccaccggcccaaggaaacttaagatatgttgtagtggctgtggaatatttttctaaatggattgaggcaaagcctttagccacaataacttcggccaccattcaaaagtttttctggcagaatattgtttgtcgtttcggagtatcgaaggccatcactgtagataatggaacacagttcgactccgaagctttcagagagttctgtgatcaaatcggcacgaagatccattttgcatcagtcaggcatccggagtcaaatggactcgttgaaagagccaatggcatcataatgataggaataatgaagttaatcttcaaccaacccagaggaaagtggccagatcaattaatcaaagtggtatggagccacaatacgacaatatcaaggtcaacaggctttaccccattcaaattattgtttggtgacgaagcaataactccggaggaagctaaaactggatcgataagagtagtagcttcagcagagtcagatcctgaagctgatcattctgttgaaaaagatgctatagaagggatcagacttcaagctgtggagaacatcaataaatataaagccgaaacaatcaaatggcgtgatagaaaggttcggctgaaaaatattgagccaggacatttggtgcttcggagagtggctaacccagatacagtgggcaaactgcagttgaaatgggagggaccttttttggtagtatcttcgtcaagacccggttcatacagattgaaggatatggacgacaacgacattcctagatcctggaatgcggatgagcttcggcgatattatgtataa

SEQ ID NO: 50756 - DNA, 224 bp, Zea mays
  Clone ID: MRT4577_146284C.1
cctccttgtgctccgtcgggaacggcgtccaccgcagtcaagctcatcgacatcgaactcaacttcacagatcggctgttcacgggcctctaccacggcaagcagtgacacgccggcagctatcacagtcgtacttgcgcgcgagtcggctgcacgcgtcgatcgcatcattgtcaccggacgctcctgaaagagccagagacgcactgagatcgccgagaccg

SEQ ID NO: 50757 - DNA, 308 bp, Zea mays
  Clone ID: MRT4577_146285C.1
ggatattcatacaaacctacatactgtacataccgtgtgattattcaaataaggagctatgctcgatccagtgcgagtaacaattccgtaatctgtaatgatgcatgatgttgccatcacaaaaaattacactattgttatggacctacctttagttgtccgaccaaaggaaatggcgatgaacggcgagttaatccacaagtttgatttctacaaagaaaggatagggtaggcattctttctcgcttttgcaaaagatgacaaactcatcccatggttttaactacctcatttcttcatataacaat

SEQ ID NO: 50758 - DNA, 4824 bp, Zea mays
  Clone ID: MRT4577_146286C.1
atggatcctaagggaaaggggatggtggtcaacgataatgagaaggagtccatcttcaacgagccaagggacgacaaagtcaatgactccggctcaagtcaaaagaagaaagacggaaagaagaagaggcgcatcaggaaggttgtctactacgacagcgacgaatcttcctcttctcaaaaggacgacgaatacgaggagaaaaagaaaacgatctgggacaccctcaagatctcgcatgaggggaacgacgtcaccatgctcaccaagatggagttggtggaaggcgaactaggaaggttcgcaatgatcaggggagaggagccaactcaaacgtacaataggctcaagatcctggtcaacaagataagaagctatggaagcacaagatggacggaccacgacgtcgtccgactcatgctaaggtccttcactgtccttgatcctcatcttgtaaactctattcgtgagaatcctaggtacatcaagatgacacccgaggaaatactcggaaagtttgtaagcgggcgaatgatgatcaaggaggcaaggtacgttgatgaggcattgaatggcccaatctacgagcctcaaaccgttgctctcaaagcaacaagtagtagggagacgctacctagcaaggtggcgcaagttgaggcggccgagctaaatgaagatgaaatggctctcatcaacaagcgcttcaagacggtgctcaaaggtcgcaaggagcaccccaacaagagcaagacgaaggggaagcgctcctgcttcaagtgtgtgactaggaacaagggaagagcggaaagtgggaaaagaagaagacctacaaaaaggcgaagggcgaggcacaccttggaaaggagtgggattcggattgctcctcgtccgactctgacaatgaaggactcgccgcctcagccttcaacaagtcggctctcttccccaacgagcatcacacatgcctcatggcaaaggagaagaagtaattgcaatcgcataacctggaattcaacttttgccaaggcagagcgtttgagaacaagtccccaacattggcgcccacctccggtgaactcacttccactttttgagctgatggcttcgttcaacgaccaagctggcgctgcttcggacccgaagctggtgctcccgatcacaggtggctcgtcctcagagccagctaacaagaaacaaaagaaggaagcacagagaagggtacagcatgttggggtgcaaggacccttcatcaagtcaagatggtctcacattcctattaccttctcccaagaggaccttcagctcaaagattacccacataacgatgccatggttatctcttgtgttatcaaaggatttctggtccacaatgtcttggttgacacaggcagtgcagctgacatcatatttgctaaggccttcagacaaatgcaagagccagaagataagattcatgatgctacacatcctctctgtggcttcggaggaaggcagattgtagcattgggcaagatcaccatgtcagtgaccttcgggttcatcaacaacactagaactgagcaagttgtgtttgacattgttgacatggaatacccttacaatgcaattattggtcgtggtaccctcaatgccttcgaagcaatccttcatcctgcctatctttgcatgaagataccttcggatcagggacccattgctatccatggaagtcaggaagctgcaagaagggccgaaggcaattggactgactcaaaagcaatccataacatagatggagctgaagcttgtgaacagtacaaattcagaagggagaaagcagcttcagcagatcagccgaagcctatgctcttatgtgaggacatagcagagcagaaggtgttgttaggctctcaattatccgaagagcagaagaaaatcttgataaggtttttgttcaataacaaagatgtttttgcatggtcagccaatgatctctgtggagttaatagagatgttattgagcactcgctcaatgtcgatccatcctttagatccagaaagcaaaggcttcggaaaatgtcagatgataaggccgaagatcttaacaaggcttgtccgaaggatgaattcccactaccaaggatagactctttagttgatgcagcagcttcttcagagctcatgagtctgttagactgttattcaggctatcaccaaatttggatgaagaaggaagatgagccgaagactagcttcataactccaagtggcacatattgctatcttcggatgcctgaagggctcaaaaacgctggaggaagtttcagccgaatgactgcgaaggttctccaatctcaaataggcagaaatgtgctaacttatgttgatgacatcattgtaaaaagcacgaagcaggagaatcatattgctgatctgcaggagaccttcgccagtttcaggcaagctggcttaaagttaaatccagaaaaatgcgtcttcggagtgaagaaggggaaatttcttggatgcttggtttcaacaaagggaattgaagctaatccaagtaaaattgaagctatacttcggatggagccaccaactacaaagaagggggctcaaagattgacaggaagattggcatctctcaatagattcatatctagatcagcagagagaaacttaccattcttcgaagtgctgaagtcagccgaagtctttcaatggggaccaatccagcagaaggctttcgaagaactgaaacagtatttgatagatctaacaacattgactccaccaatgccaggggctcctttattattatatgtggcagcttcgcactcagcggtaagtgcagcgcttgtccaggagaagattgatggtcaagtcaagaggcaggccccaatatattttgtttccgaggttcttagtttatcaaagaaaaattatacagagttggagaaggtactgtatgctgtcttgatggcctccaggaagcttcggcactatttccaagcttacaacataattgttccttcttcacaacctctaaaggatattatgaggaaccgagaagctactggaaggattggaaaatgggctgcagagctcaatgaattttgtattgaatatgttcatagatcttcgattcagtcccaggcgttggcagacttcattgctgactggacgccaggggctcaggaggaggaaacgaataaagacaacgaagcctggacagtgttttgtgatggatcttggggaaccttcggagcaggagcggctgctgtgcctcggaagttaaaagcaatgggaatcagaagggccatacttaaaactgattcccaggttgtttcgggtcatattgacaagagttgcaaggctaaggatccgaagcttgaaaaatatctggatatggttcgaagagttgaagcctccttcgaagggttttctgtcaaaaatatccctcgaggacaaaatgagcatgctgatttgctagctaagtcagcagcacaggggctgcctttaccttcggatgtgttcttcgaaacaataaaagcaccttcggtggaacttcttgaaagagcagtccttaatatatctcctgtttttagcgaagattggagaactgagatcatctcttaccttcagggtaaattcctttcagatgacgaagcttataacaagaggatagaggcaagagctcgtccatatgtcataatagaaggggagttgtacaagcatggagtttgtgctccgctactcaaatgtttatccagagccgaaggtatagagttaatgaaagaaatacatgcaggcctgtgtggatctcacatcggatctaggccgttacttggaaaaattttccgccaaggattttattggccgaaggcagcttcggatgcagcagaattggttcaaaagtgcgaaggttgtcagaaatgtgcaaaagatcaaaaacaaccttcgtctttaacacagctcatacaacccacttggccattgcaaaggtggggccttgacttgttaggtccgttaccaccggcccaagggaacctgagatatgttatagtagctgtggaatatttttctaaatggattgaggcgaagcctttggccacagtaacttcggccaccgtccaaaagtttttctggcagaatattgtttgtcgtttcggggtgccaaaggctataactgtggataatgggacacagtttgactccgaagctttcagggatttctgtgaccaaattggtacgaagatccattttgcatcagttaggcacccggagtcaaatggactcgttgaaagagccaacggcattataatgacaggaataatgaagttaatcttcaaccaacccaggggaaaatggccagatcagttaaccaaagtggtgtggggccacaacacaacaacatcaaggtctacaggttttactccatttaagttgttattcggtgacgaagcaataactccggaggaagctaaagccggatcaataaggatattagcttcggcagaatcagattccgaagctacttattctatagaaaaagatgctttagaagggatcagactgcaagctgtggagaatatcaataaatatcaagccgaaacagtcaaatggcgggacagaaaggttcggctaaaaaatattgagccagggcacttggtgcttcggagagtggccaatccagaaacagtgggcaaattgcagttgaaatgggacggacctttcttagtagcatcttcgtcaagacccggttcatacagattgaaggatatggacggcaataacattcctaggtcttggaatgcggatgagcttcggcgatattatgtataa

SEQ ID NO: 50759 - DNA, 655 bp, Zea mays
  unsure (1)..(655): unsure at all n locations
  Clone ID: MRT4577_146287C.1
gtcgacccccaccgatccctcccgcgctcgcacgcagcaggggcggagttgggcgagctccgtgctcgttcaacccgtacgctagtacctccagggttcgggtcgggtctgcctttctcttcgtatggcttccgccgccgcggaaaccctcgcctcgttcccaatcgcatccccgtcccgctcgctcctacgccccttccccaggcgaccagccgccgctaggacaggcgcaccgtcgatccggatatccgccgtgccgccgcggggcctcggcctcgcgctcgtacaccgccgctgcccgccagcggcgcgcgcgaatgttgagcgcgacggcgacggcgcctccgggaacggcgagccgtcgtcctcgtctggggatggcgaccgcgacgcggcttcggagtcggggggcgatagcaccagcaccagcacgagcaccacgagcacggccgcgacaccgccgccgccctcgtcggagaggaacgaaaataagtggcggcggaggctgactaagggaggcggcgtggggcggtggctatgggagcccatagtccagggacgggagatgggcttcctcctgctccagctgggcttcgccatatttgcgctacgcatgcttcgcccaganatcgcgttgcccggttcagagccccgc

SEQ ID NO: 50760 - DNA, 6138 bp, Zea mays
  Clone ID: MRT4577_146288C.1
atgtacgatggattcgacagtgccactcatgggcactctgatgcatgggtgagagttgcagatgaattcgtggcactcgcatttgctggtgatgctcgtttagcgaggtgcctgcgtataaaatgtcggaacttggttcggttgaaaaaagtggagctctcgtatcatgttttcaaacatggttttatgccgaactatctgatatggcatgagcatggagaggtggaccatactattgagtcggatggggacctggatgtagaccgaatggaagagatgttagatgatattaggaatgagtacccagaactacagaataatgaagcttttccagaggatgtgagagagttctacaagcttcttgaagcctcagaggctaaagtgcatgaaggaaccaatgtgagcgtactgcaggtggtaacacgtcttatggcgatgaagtcaaagtacaccttctccaacaactgttacaacgatattgtgaaactgattattgatatcatcccactgaatcataacatgcagaaggacttgtaccattgcaagaagctcgtagctggtcttggcatgaactaccaaaagattgatgcttgcgagaacaattgcatgttgttctggaaggagcatgaaaataccacacattgcatccactgcagtaagtcaagatatgcagtggtgctagatgaggatggaaacgaggttacgacaaaggtgtcgatgaagcaactctggtacatgcctatcactccatggcttaagcgtctctttctaaatcaagagacagcaaagcaaatgaggtggcataaggaaggggatcggcagggtcaagatccgaatgtcatggtgcatccctcagatggcgaggcctggcaggctctcgaccgttttgatccagaatttgcaagagaccctaggagtgttcgtcttggtttgtcaacggacggattcactccttactccaataattccacttcttactcatgttggccagtttttatgatgccctacaatctccctcctaacaaatgcatgaaggaagaggtcatgtttcttgcccttattgttccaggtccgaaggatcctgtaacgaaaattaatgtatttatggaaccgttgatcgaagaactaaaaatgttgtggcagggggttgaggcatatgatagtcatctgaaatgtcgttttactctacgcgcagcatatctatggtcaattcatgatctgctagcatatgacattttttctggttggtgtgtccatggcatactgcgttgttcgatatgtatgggtgactcacaagcatataggttagaacatggtaagaaggaaacattttttgatgttcaccgacgcctccttccctataatcatcattttagaaaggatacaaagtcattccgaaaaggcaagagggttagagatgggccaccgaagcggcaaactggtgaaaatatcatgagacaacatcgtgacctaaaaccgggcgtaggaggtcggtttcaagggtatggtaaagaacacaattggacgcacatctcgtttatctgggagctaccttacacgaaggcattgctgttaccacataatatagatttgatgcaccaagaacgtaatgttgcagaaagcatcataagcatgtgcttcgacttcaccggtcaaaccaaagataacatgaatgcaagaagagacttagctgaactttgtgatcgtccgcaccttgagcttagaaaaaatccaagtggatctgagagtcggccactagctccttattgtctgaaacgacaagagcgagaggagatatttcaatggttgaaaaagttgaggttcctagatcgctatgcggctaatataaaacgagcagttaacctcgacactagtaaactcgttgggttgaagagtcacgactatcccattttgattgaaagactagtgccagtaatgttccgtggatactttagtcccgatgtgtggaagatatttgcagaactcagttatttttataagcagatatgtgctaaggaaatctcaaagaaattgatgatgaggtcttctaggaagaagcggttttcggctgaagctgtttgtataagatggccgaaggtccctcttcatgaagcttcgcatttgagaacaagtccccaacattggcgcccacctccggtgaactcacttccactttttgagctgatggcttcgttcaatgatcaagctggagctgcttcggacccgaagctggtactcccgattacaggtggttcgtcctcagagccagccaacaaaaaacagaagaaagaagcacagagaagggtacagcatgttggggtgcaaggacccttcatcaagtcaagatggtctcacattcctattaccttctctcaagaggaccttcagctcaaggattacccacacaacgatgccatggttatctcttgtgttatcaaaggatttctggtccacaatgtcttggttgacacaggcagtgcagctgacatcatatttgctaaggccttcagacaaatgcaagagccagaagataagattcatgatgctacccatcctctctgtggcttcggaggaagacaaattgtagcactgggcaagattaccatgtcagtgaccttcgggttcatcaacaatactagaactgagcaagttgtgtttgacattgttgacatggaatacccttacaatgcaattattggtcgtggcaccctcaatgcttttgaggcaattctacaccctgcctatctttgcatgaagataccttcggatcaaggacccatcgctattcatggaagccaggaagctgccagaagggccgaaggaaactggactgattcaaaagcaatccataacatagatggagctgaagcttgtgaacagtacaaattcagaagggagaaagcagcttcagcagatcagccgaagcccatgctcttatgtgaggatatagcagagcagaaggtgctgttgggttctcagttatccgaagaacaagagaaaaccttgataaggtttttgttcaacaacaaagatgtttttgcatggtcagccaatgatctctgcggagttaatagggatgttattgagcattcgcttaatgtcgatccatccttcagacccagaaagcaaaggcttcggaaaatgtcagatgataaggccgaaggtgctcgcaacgaagtcaaaagactcctcagtgcaggggttatcagagaagtaaagtacccagaatggttagctaatactgttatggtaaaaaaggccaatggcaagtggcgaatgtgtatcgattttacagaccttaacaaggcttgtccgaaggatgaattcccattgccaaggatagactctttagttgatgcagcagcttcttcagagctcatgagtttgttagactgttattcaggctatcatcaaatctggatgaagagggaagatgagccaaagactagcttcataactccaagtggcacatattgttatcttcggatgcctgaggggctcaaaaacgctggaggaagtttcagcagaatgactgcgaaggttctccagtctcagataggcagaaatgtgctaacttatgttgatgacatcattgtaaaaagcacgaagcaggagaatcatattgctgacttgcaggagaccttcgccagtttcagacaagctggcttaaagttgaatccagaaaaatgcgtcttcggagtaaagaaggggaaatttctaggatgcttggtttcaacaaagggaattgaagctaatccaagtaagattgaagctatacttcggatggagccaccaactacaaaaaagggggctcaaagattgacaggaaggttggcatctctcaatagattcatatccagatcagcagagagaaacttaccattcttcgaagtgctgaagtcagccgaagtctttcaatggggaccaatccagcagaaggccttcgaagagctgaagcagtatttaatagatctaacagcactaactccacctatgccaggggctcctttattattatatgtggcagcttcgcactcagcggtaagtgcagcacttgtccaggagaagcttgatggccaaaccaggaaacaggtcccagtatattttgtatctgaagttcttagtatatcaaagaaaaactacacagaattagaaaaggtgttatatgctgttttgatggcatccaggaagcttcggcactattttcaagcttacaacataattgttccttcttcacaacctctgaaggatattatgaggaaccgagaagctactggaaggattggaaaatgggctgcagagctcaatgaattttgtattgaatatgttcatagatcttcgattcagtctcaggcgttagcagacttcattgctgactggacgccaggggctcaggaggaagaagcaaataaagacaccgaagcatggacagtgttttgcgatgggtcctggggaaccttcggagcgggagcggctgctgtgttggtttcaccttccaaagttaaaacttgttatgcggcaaagcttgattttagttgcacaaacaacattgccgagtacgaagccctgcttctggggcttcggaagctaaaagcaatgggaatcagaagggatgttcttaaaactgattcccaagttgtttcgggtcatatcgacaagagttgcaaggttaaagatccgaagcttgaaaagtatctggacatggttcggagagttgaagcttcctttgagggattttctgtcaaaaatatccctcggggacaaaatgagcatgctgatttgctagctaagtcagcagcacaggggctgcccttaccttcggatgtcttcttcgaaacaataaaagcaccttcggtggaacttcttgaaagagcagtcctcagtatatctcctgtttatagcgaagattggaggactgagatcatctcttatcttcagggtaaattcctttcagacgacgaagcctataacaggaggatagaggcaagagctcgtccatatgtcatgatagaaggagagttgtacaagcatggagtttgtgctccgctactcaagtgtttatccagaaccgaaggtatagagttgatgaaagaaatacatgcaggcctgtgtggatctcacattggatctaggccgttacttggaaaaattttccgccaaggattttattggccgaaggcagcttcggatgcagcggaattagtccaaaagtgcgaaggttgtcagaaatgtgcacgagatcaaaaacaaccttcgtctttaacacagctcatacaacccatttggccattgcaaaggtggggccttgacttgttaggtccattaccaccggcccaagggaacctaagatatgttgtagtggcggtggaatatttttctaaatggattgaggcaaagcctttagctacaataacttcggccaccgttcaaaagtttttctggcagaatattgtttgtcgtttcggggtaccaaaggctatcactgtggataatggaacacagtttgactccgaagcttttagggatttctgtgatcaaattggtacgaagatccattttgcatcagtcagacatccggagtcaaatggactcgttgaaagagccaatggtattataatgacaggaataatgaagtcaatcttcaatcaaccaaggggaaagtggccagatcagttaaccaaagtggtgtggagccataatacaacaacatcaaggtctacaggctttaccccattcaagttattattcggtgacgaagcaataactccagaagaagctaaaactggatcaataagggtagtagcttcggcagcatcaggttccgaagctgattattctgtggaaaaagatgctttagaagggattaggttgcaagccgtggaaaacatcaacaaatatcaagccgaaacaattaaatggcgagatagaaaggttcggctaaagaatattgagccaggacacttggtgcttcggagagtggccaacccagaaacagtgggcaagttacagttgaaatgggatggacctttcttagtagcatcttcgtcaagacccggttcatacagattgaaggatatggacggcaacgacattcctagatcttggaatgcggatgagcttcggcgatattatgtataa

SEQ ID NO: 50761 - DNA, 1587 bp, Zea mays
  Clone ID: MRT4577_146289C.1
ccggccgggctcgcgccccgcgacggcgacgacgaccgtggcgtcgatccagcgcttcgtggcgcacgagtacgacgccggcgagctgggcccctcgcggttctcggtggcttccgtgcaccgagtcggcatcctggacgtccgcctcctcaacatcgatcggcacgccggcaacatcctcgtcaaggacccgccgcggggcttacagcgcgcccacggaagctcatccacgccggcgcggctcggcctcgtgccgatcgaccacgggctctgcctgccggagcagctcgacgacccgtacttcgagtggctgcactggccgcagtcctccctgcccttctccgacgacgagctggcgtacgtggcgtcgctggacccgttcaaggacgccgagacgctccgcgccgagctgccgtccctgaaggagcccgccatccggatactcaccgtctgcaccatcttcctgaagcgcgctgccgctgccgggctctgcctcgccgacatcggcgacatgatgacccgcgagttcacggctcagcaggatgggctgagcacactcgaggcgctatgcaagcaagcgcacgactccgtcctcccacacccctcgcccgacggcgacggcgacggcgtcgacgagagtacaagcgtctccggcgggcggaaacacgtgtcgttcggcgacctgagcctcgcggagtggacgtcgttcctggagaggttcgagcagctgctgccggcggcgctcgaggacaagaagtgcgctgtgctagggacgtcgacgtcgtcgtcgttctgaccgtgctacgtactggtcaatcactaccgccaccatttgcatgcatacatgcgtgagtgcgtgcgtgcgtggatgcaaaataatacacgtgtgcatggcgctgtgctagggacctactagctccgtctggatgccttttgtgtgtctactacgtagggtcgtcgaccttgtacggtggcattggcatgcatgctgttgggatgggatcatgggagttgggagctgctgtggaacacccttccaaagaagctgacgtgtgggggcaatgccacccgataccttgaacagcaacgactctttcccaggcgggcgtgtctccacaaatctgtcatcacatacacaacacgtacgagaagtaccctggaaattgtatatacgacagtagttcgatcagtgtggattttccgcaatgacggccacgccggaaactacattatggtacacaataaaaccccgtgcttttcggcgggattacattagaaatcagatagaaatgtatagttattcggtacctttttggaaatacatggaggaaggaaactgttcaaggtgaaaaaaaaaaaaaaaaaaaaaaaaaaaaaaaaaaaaaaaaaaaaaaaaaaaaaaaaaaaaaaaaaaaaaaaaaaaaaaaaaaaaaaaaaaaaaaaaaagggggggcccttttaaagggatcaaagtttatttccccttccttccaacataaaaccttttttatagggtcccgaaattaaattcaagggcccttgttttaaaaaattagagattggaaaaaccttggttttcccaatttt

SEQ ID NO: 50762 - DNA, 559 bp, Zea mays
  Clone ID: MRT4577_14628C.1
tcgagcggccgcccgggcaggttaacagtattcgttccacgaggaaacaaagctatttttataaaaaaaaaaaaaaaaaaaaaaaaaaaaaaaaaaaaaaaaaaaaaattttaaaaataaaaaaaaaaaaaaaaaaatttttactttggcttgtcccccgctcggggcccgttttgggggttttctttccggtggccccctttttgccttccttttggggggcccttttgggggtccattgggcccttttgcggttccttggccatttctttgcccccccttttcctgctaaacccctggggtaacccttttttttcccctgcgtatccatccccctttgcccgtgcctttttgtcttgttctggcgggttccgcaccggggccccgttccggcggtttcccaaccggggggcaaatgacgggccctgggcggccctttaaccggcggctttattgccttggttccggcccagggtccccccttccttggccatttccctggccccggctttttggcctgcctttttttcctttttcccctcttttgtggggctttccc

SEQ ID NO: 50763 - DNA, 3858 bp, Zea mays
  Clone ID: MRT4577_146290C.1
atgacttcgttcaacgaccaagctggagctacttcggacccgaagctggtgctcccgatcacaggtggttcgtcctcagagccagctaacaagaaacaaaagaaggaagcacagagaagggtacagcatgttggggtgcaaggacccttcatcaagtcaagatggtctcacattcctattaccttctcccaagaggaccttcagctcaaagattacccacacaacgatgccatggttatctcttgtgttatcaaaggatttctggtccacaatgtcttggttgacacaggcagtgcagctgacatcatatttgctaaggccttcagacaaatgcaagagccagaagataagattcatgatgctacacatcctctctgtggcttcggaggaaggcagattgtagcattgggcaagatcaccatgtcagtgaccttcgggttcatcaacaacattagaactgagcagattgtgtttgacattgttgacatggaatacccttacaatgcaattattggtcgtggtaccctcaatgccttcgaagcaatccttcatcctgcctatatttgcatgaagataccttcgaatcaaggacccattgctatccatggaagtcaggaagctgcaagaagggccgaaggcaattggactgactcaaaagcaatccataacatagatggagctgaagcttgtgaacagtacaaattcagaagggagaaagcagcttcagcagatcagccgaagcctatgctcttatgtgaggacatagcagagcagaaggtgctgttaggctctcaattatccgaagagcaggagaaaaccttgataaggtttttgttcaacaacaaagatgtttttgcatggtcagctaatgatctttgtggagtaaatagggatgttattgaacactcgctcaatgttgatccatccttcagagccagaaagcagaggcttcggaaaatgtcagatgataagaccgaaggtgctcgtaacgaagttaaaagactcctcagtgcaggagtcatcagagaagtaaagtacccagaatggctggctaacactgttatggtaaaaaaggccaatggcaaatggcgaatgtgtatcgattttacagatctcaacaaggcgtgtccgaaggacgagtttccattgccaaggatagactctttagtagatgcagcagcttcttccgagctcatgagtctgctagactgttactcaggctatcaccaaatttggatgaagaaggaagatgagccgaagactagcttcataactccaagtggcacatattgctatcttcggatgcctgaggggctcaaaaacgctggaggaagtttcagccgaatgactgcgaaggagaccttcgccagtttcaggcaagctggcttaaagttaaatccagaaaaatgcgtcttcggagtaaagaaggggaaatttcttggatgcttggtttcaacaaagggaattgaagctaatccaagtaaaattgaagctatacttcggatggagccaccaactacaaagaagggggctcaaagattgacaggaagattggcatctctcaatagattcatatccagatcagcagagagaaacttaccattcttcgaagtgctgaagtcagccgaagtctttcaatggggaccaatccagcaaaaggcttttgaagagctaaaacagtatttgatagatctaacaacattgactccaccaatgccaggggctcctttgttattatatgtggcagcttcgcactcagcggtaagtgcagcgcttgtccaggagaagcttgatggtcaagtcaagaggcaggccccaatatattttgtatccgaggttcttagtttatcaaagaaaaattatacagagttggagaaggtactgtatgctgtcttgatggcctctaggaagcttcggcactatttccaagcttacaacataattgttccttcttcacaacctctgaaggatattatgaggaaccgagaagctactggaaggattggaaaatgggttgcagagctcaatgaattttgtattgaatatgttcatagaacttcgattcagtcccaggcgttggcagacttcattgctgactggacgccaggggctcaggaggaagaaacgaataaagacaacgaagcatggatagtgttttgtgatggatcttggggaaccttcggagcgggagcggctgctgtgttggtttcaccttccaaagtcaaaacttgttatgcggcaaaacttgattttagttgcacaaataacattgccgagtacgaagcattgcttctaggtcttcggaagttaaaagcaatgggaatcagaagggccatacttaaaactgattcccaggttgtttcgggtcatattgacaagagttgcaaggctaaggatccgaagcttgaaaaatatctggatatggttcgaagagttgaagcttccttcgaagggttttctgtcaaaaatatccctcgaggacaaaatgagcatgctgatttgctagctaagtcagcagcacaggggctgcccttaccttcggatgtgttcttcgaaacaataaaagcaccttcggtggaacttcttgaaagagcagtcctcaacatatctcctgtttatagcgaggattggagaactgagatcatctcttaccttcagggaaaattcctttcagatgacgaagcttataacaggaggatagaggcaagagctcgtccatatgtcatgatagaaggagagttgtacaagcatggagtttgtgctccgctactcaagtgtttatccagaaccgaaggtatagagttgatgaaagaaatacatgcaggcctatgtggatctcacattggatccaggccgttacttggaaaaaatttccgccaaggattttattggccgaaggcagcttcggatgcagcggaattagttcaaaagtgcgaaggttgtcagaaatgtgcacgagatcaaaaacaaccttcgtccctaacacaactcatacaacccatttggccattgcaaaggtggagccttgacttgttaggtccgttaccaccggcccaagggaacctaagatatgttgtagtggcagtggaatatttttctaaatggattgaagcaaggcctttagccacaataacttcggccaccgtccaaaagtttttctggcagaatattgtttgtcgtttcggggtaccaaaggctattactgtggataatggaacacagtttgattcggaagcttttagggatttctgtgatcagattggtacgaagatccattttgcatcagtcagacatctggagtcaaatggactcgttgaaagagccaatgacattataatgacaggaataatgaagctaatcttcaatcaacccaggggaaaatggccagatcagttaaccaaagtggtgtggagccacaatacaacaacatcaaggtctacaggctttactccattcaagttattattcggtgacgaagcaataactccggaggaagctaaaaccggatcaataagggtaatggcttcggcagaatcaggttccgaagttgcttattctgtggaaaaagatgctttagaagggatcaggctgcaagccgtggagaacatcaataaatatcaagccgaaacaattaaatggcgagatagaaaggttcggttaaagaatattgagccaggacacttggtgcttcggagagtggccaacccagaaacagtgggcaagttgcagttgaaatgggatggacctttcttagtagcatcttcgtcaagacccggttcatacagattgaaggatatggacggcaacgacattcctaggtcttggaatgcggatgagcttcggcgatattatgtataa

SEQ ID NO: 50764 - DNA, 2610 bp, Zea mays
  Clone ID: MRT4577_146291C.1
atgactgcgaaggttctccaatctcagataggcagaaatgtgttaacttatgttgatgacatcattgtaaaaagcacgaaacaggaaaatcacattgctgatttgcaggagaccttcgccagttttagacaagctggcctaaagttcaatccagaaaaatgtgtctttggagtaaagaaggggaaatttcttggatgcttggtttcaacaaagggaattgaggctaatccaagtaaaattgaagctatacttcgaatggagccaccaactacaaaaaagggggcccaaagattgacagggaggctggcatctcttaatagatttatatccagatcagcagaaagaaatttaccattctttgaagtactgaaatcagccgaagtctttcagtggggaccaagccaacaaaaagccttcgaggaactgaagcaatatttgatagatttaacaacattaaccccaccaacgccaggggctcctttgttattatatgtggcagcttcgcactcagcggtaagtgcagcacttgttcaggagaagcttgttggccaagtcaagaagcaggtcccagtgtattttgtatctgaagttcttagtatatcaaagaaaaactatacagaattggagaaggtgttatatgctgttttaatggcatccaggaagcttcggcattactttcaagcatacaatattgttgttccttcttcgcagccgttgaaggatattatgagaaatagagaagctactgggcggattggaaaatgggttgcagagctcaatgaattttgcattgattatgtgcatagatcttcaatccagtctcaagtgttggcagattttatcgccgattggacgccaggggctcaggatgaagaaacaaataaagatgccgaagtatggacagtgttttgcgatgggtcttggggaaccttcggagcaggggcagctgctgtgttggtctcaccatccaaagttaaaacttgttatgcggcaagactcgattttagttgtacaaacaatattactgagtacgaagccctgcttttgggtcttcagaagttaaaagcaatgggaatcagaagggccattcttaaaactgattcccaggttgtttcgggtcatatcgacaagagttgcaaggctaaagatccgaagcttgaaaaatatctagacacggtccgaagagtcgaagcttccttcgaaggtttttctgtcaagaatatccctcgaggacaaaatgagcatgctgatttgctagctaagtcagcagcacaggggctgcccttaccttcggatgtgttcttcgaaacaataaaagcaccttcagtggaacttcttgaaagagcagtcctcaatatatctcctgtttatagcgaagactggagaactgagatcatctcttaccttcagggtaaattcctttcagatgacgaaacttataacaggaggatggaggcaagagctcgtccatatgtcatgatagaaggggagttgtacaagcatggagtttgtgctccactactcaagtgtttatctagaaccgaaggcatagagttgatgaaagaaatacatgcaggcctgtgtggatctcacattggatctaggccgttacttggaaaagtttttcgtcaagggttttattggccgaaggcagcttcggatgcagcgaaattagttcaaaagtgcgaaggttgtcagaaatgtgcaagagatcaaaaacaaccttcgtccttaacccagctcatacaacccatctggccattgcaaaggtggggccttgacttgctaggtccgttaccaccggcccaaggaaacttaagatatgttgtagtggctgtcgaatatttttctaaatggattgaggcaaaacctttagccacaataacttcggccaccattcaaaagtttttctggcagaatattgtttgtcgtttcggagtaccaaaggccatcattgtagataatggaacacagttcgactccgaagctttcagggaattctgtgatcaaattggtacgaagatccattttgcatcagtcaggcatccggagtcaaacggactcgttgaaagagccaatggcattatagtgacaggaataatgaagttaatcttcaatcaacccagggggaaatggccagatcaattaatcaaagtggtatggagccacaacacaacaacatcaaggtcaacaggctttactccattcaaattattgtttggtgacgaagcaataactccggaggaagctaaaactggatcaataagagtagtagcttcgacagaattagattctgaggctgatcattctgtggacaaagatgctatagaagggatcaggcttcaagctgtggagaacatcaataagtatcaagccgaaacaatcaaatggcgtgatagaaaggttcggctaaagaatattgagccaggacatttggtgcttcggcgagtggctaacccagatacagtgggcaagttgcagttgaaatgggagggaccttttttggtagcatcttcgtcaagacctggttcatacagattgaaggatatggacggcaccgacattcctagatcttggaatgcggatgagcttcggcgatattatgtgtaa

SEQ ID NO: 50765 - DNA, 278 bp, Zea mays
  Clone ID: MRT4577_146292C.1
gccggagcgtagtgcgtcgaattcggctcaaccgcagatgtcactggcgaatgacggctcgtcatgcggcgatcgataaagggccgcaggtaccacgcgagacgaagcgtatatgaatgcggaacataggcctattttttcttcttcctcgtagagatatttcggacgagggagtgcgtgctttcctctcagctgattcgccgaggccacgagctcctctagagggttgtgctgtttggcgtgaggctttgggggcgttttgctttgctcgacatggg

SEQ ID NO: 50766 - DNA, 3345 bp, Zea mays
  Clone ID: MRT4577_146293C.1
atggcttcgttcgacattcaagctggagccgcttcggcttcgaagctggtactcccgataacaggcggttcatgttcagagccagccaacaagaagcagaagaaggaggcacagagaagggtacagcatgttggggtgcaaggacccttcatcaagtcaaaatggtctcacattcctattaccttctcccaagaggaccttcaactcaaggattacccacacaatgatgctatggttatctcttgtgttatcaaaggatttttggtccacaatgttttggttgatacaggcagtgcagctgatatcatatttgctaaggccttcagacagatgcaagagcccgaagataaaattcttgatgctacacatcccctttgtggcttcggagggaggcagattgtagcactcggcaaaatctcaatgtcagtggctttcggatttatcaacaacacaaggactgaacaaattgtgtttgatattgttgacatggaatacccttacaatgcaatcattggtcgtggtactcttaatgccttcgaagcaattctgcattcagcttatctttgcatgaagataccttcggaccaagggcccattgctattcatggaagtcaagaagctgccagaagggccgaaggaaattggacagactcaaaagcaatccataatatagatggaactgaagcttgtgagcaatacaagttcagaagagaaaaagctgcttcggctgaccagccgaaacccatgctcttatgtgaggatatagcagagcagaaggtgctattgggatctcaattgtccgaagagcaggagaaaaccttgataaggtttttgttcaacaataaagatgtttttgcttggtcagctaatgatctttgtggagttaacagggatgttattgagcattcgctcaatgttgatccatccttcagacccagaaagcagaggcttcgaaaaatgtctgatgacaaggccgaaggtgctcggaatgaagtgaaaagactcctcagtgccggagttattagagaagtaaaatacccagaatggttggctaacactgttatggtgaagaaggccaatggctatcatcaaatatggatgaagaaggaggatgaaccgaaaaccatcttcttaacccctagtgggacatattgttaccttcgaatgcctgaggggcttaagaatgccggaggaagtttcagcagaatgacagcgaaggctggtctaaaattgaatccagaaaaatatgtcttcggagtaaagaaggggaaatttctcggttgcctagtctcaacaaagggaatcgaggctaatccaagcaaaatcgaagctatacttcgaatggaaccaccaagtacaaaaaagggggctcaaagattgacaggaaggctggcgtctctcaacagattcatatctagatcagcagagagaaacttaccattcttcgaagtgctgaagtcagccgaagtctttcaatggggaccaatccagcagaaggccttcgaagagctgaagcagtatttgatagatttaacaacattaactccacctacgccaggggctcctttgttattatatgtggcagcttcgcactcagcggtaagtgcagcacttgttccggagaagcttgaaggccaagttaagaggcaggccccaatatattttgtatccaaggttcttagtttatcaaagaaaaattatacagaattggagaaggtactgtatgctgtcttgatggcctccaggaagcttcggcactattttcaagcttacaacataattgttccttgttcacaacctctgaaggatattatgagaaaccgagaagctactggaaggattggaaaatgggctgcagagctcaatgaattttgtattgattatgttcatagatcttcgattcagtcccaggcgttagcagacttcattgctgactggacgccaggggctcaggaggaagaaacaaataaagatgccgaagcatggacagtgttttgcgatggttgcacaaataacatcgctgagtatgaagctttgcttttgggtcttcggaaattaaaggcaatgggaatcagaagggccattcttaaaactgattctcaagttatctctggtcatattgacaagagctataaagcaagagacccgaagcttgaaaagtatctagatacagtccgaaggattgaggcttccttcgaaggtttctctgtcaaaaatattcctcgtggagaaaatgaatacgctgatctattggccaagtcagcagctcaggggctgcctataccttcggaagtattttttgaaacaataaaagcaccttcggtcgagcttcttgaaagagcaatccttaacatatcccctgtttatagtgaagattggagaactgagatcatctcttttcttcagggtaattttcttacagacgacgaagcttataacaggagaatagaagcaagagctcgaccatatgtcataatagaaggagagttatacaagcgtggggtctgttccccattgctcaagtgtttatccagatccgaaggtatagaattaatgaaggacatacatgcagtggagtatttttccaaatggattgaggcaaagcccttagccacaataacttcatttactattcaaaagtttttctggcaaaacattgtttgtcgcttcggagtgccgaaggctattactgtggataatgggacacagtttgattctgaagccttcagagaattttgtgatcaaatcggcacgaagatccattttgcatcagtccgacacccagagtcaaatggacttgtcgaaagagctaatgggatcataatgacaggaataatgaagtcaatcttcaatcagcccaggggaaagtggccagacgagttaatcaaagtggtgtggagccataacacaaccatgtcaagatcaacaggctttacaccctttaaactattgttcggtgacgaagcaataaccccagaagagtccaaaacaggatcaataaggacagtagcttcggcagaaggcgaaaacgaagctgattgctctgtagaaaaggatgctagtgaagggatcagacttcaagctctggaaaacatcaataaatatcaagctgaaacaataaaatggcgtgacagaaaggttaagctgaagaacattgaaccaggacacttggtacttcgaagagtagccaatcctgagacagtaggcaaactacagctgaagtgggaaggcccctttttagtagtatcttcgtcaagacccggttcctacagattgaaggatatggacggcaacgacattcctagatcttggaatgcggatgagcttcggcgatattatgtttag

SEQ ID NO: 50767 - DNA, 356 bp, Zea mays
  Clone ID: MRT4577_146294C.1
aaaccaaaaaagggcctttttttttttgggggggccccaaactttggacaaaaaactttttttttggccttttcctcataagaaatttaaaggggggccccccccttgttgggttgttggtaaaacccttttgggtttttcaaaacaagttggttgaatggcaccatttgttgcagttttaaaagggtgcccccttttggccccgcgggtttgtaaaacggcaacacctggggttgttttaaaaagggtggggggctcaccccaccttcctggctaaatggtaaaattttttgctgttgtaaataacccggggagttcaatgctcccctttggtttaatggaaaaaatttctgggg

SEQ ID NO: 50768 - DNA, 1187 bp, Zea mays
  unsure (1)..(1187): unsure at all n locations
  Clone ID: MRT4577_146295C.1
gccggccgggtcgcgattgttttaaaattaaaatggcttgcccctgtaagaaagacgtttgccaatgctctggaactaaggactgtaactgtggtgaaaagtgctcttgtgaaagctgtggaaacaaacaaaagaatgcttgtgcttgtggagaatctagcaaagaatgcggttgtggtgacaagtgcagctgttagtcttgattaactagctttatatcctttctgacaaatatcaatctctaaaaaaattttttaataaagactcttgttcagtttgaaaaaaaaaaaaaaaaaaaaaaaaaaaaaaaaaaaaaaaaaaaaaaaaaaacgggcggtcgaggccggccgggtggccgacttgcgacatccccgtggtcagcaccaccgaaagccccgagaaaccctaggcaccagggccaggagggcgcgccgcgcagccatggcgaagaaccggaacaagaagaacagggccaagagcggcggcctcgccgccatggacacctctgagggcggccccgccacatccactgccgcggacgtcccacaaccaatggacacgtccgagggaaagcagccatcgtcggccacagcggcgctcggttcgatcaacaagaaaataaagaagggggtgcatatgaaaaggtcacagaatgctaggaaaatgaaagcaattgctagggctgtatcgaagaatgagaagtccgaggagaagatccagaaagcaaaaggcaagaagacaagaatccagtcggccaagtctttgtacgactgaatatttagcactgagcagaattttgtgtaccagtatatttctagattgtagagcaaccgaatctgtgcttgcgacgaagaaatgaaagcttgctttgcttacaaatctacaaaaaaaaaaatttacaacctctcgggaatctgctttcgcgctacctggtgtctcgtgatacttcgatgttttgatgccttgatggtttggtacttcgatattgacttcaggatatggtgaccaagtgcttggtctgttctacaaaaaaaaaaaaaaaaaacttgcggcccaacatattttcactcagtactggtaaaatacttccagngntcaatggtctttcttatatgtaccccccttcaacaatttctttgaggctggacggntactggacccaaacaaaaaaaaaaaaaaaaggccct

SEQ ID NO: 50769 - DNA, 415 bp, Zea mays
  unsure (1)..(415): unsure at all n locations
  Clone ID: MRT4577_146296C.1
aaccacacagaggaaacaaaaccacaactactatagctcaggcgtcactctcattactaagacggacaacggcccactcatcagttccaactggtctaccggactggggggcgacacaagagacacaccatgcctttaattaactttgcagcgttaactactacacgtacgccctgtccgatgcgacaatggtgacgcattgccaactgtgcagccttcactggtcggtgaccattttgggggtcgtaccccacgcgttgtcgctgactgggtcggcccgctggtcngcgaggctctgcgctcgccccttgccggtgtctttggcctgggcgtttgtgccgggcttgggggccttggggcgggggcctgggtttggctcgttgggttgggggtgggggggtggtgtcgtcgcggc

SEQ ID NO: 50770 - DNA, 357 bp, Zea mays
  Clone ID: MRT4577_146297C.1
cgcgccgggacttgttgagcacattcatatgccgcctcacaaacgaagtctcgtgggtgaacctgaaccgcgtagggtcgttagagaactcgtagtcctgcaccagctgcacatcttcatcttcttcctcgccgtcttccacgtctcctacagcgccatcaccatggcgctcgggagggccaagatacgcgcgtggaaggagtgggagaaggaagcagcagggcaggactacgagttctataacgaccctacgcggttcaggttcaccctcgagacttagtttgtgaggcggtatatgaatgtgcttaatttgttcctggaatttttggcggttgactaatgctatctggagagtgt

SEQ ID NO: 50771 - DNA, 832 bp, Zea mays
  Clone ID: MRT4577_146298C.1
gctcaccagtcaccaaaccaacgcatcagatactcattcagacgactcgagcgaccactgcctcttacttgtcccgtccctgccacgtactacgtactcctacatcgcaatggccgcagctgcagcaccggccaggtccacgaaagaagtgctcccgcctgcactgggcgccgtctccgagccccctcccctcttcgatggcaccaccagactgtacatttgctacatctgcccgtttgctcagcgcgcctgggttacccggaactgcaagggcctgcaggaggagatcaagctggtcgccatcaatctggaggacaagccagcatggtacaaggagaaggtttacccacagggcacggtgccttccctggagcacgacggcaaggtcaccggagagagcttggatttgatcaagtacatcgacagcaacttccacggcccggcactgcttcctcaagatcccgcaaagaggcagttcgccgatgagctgattgcttacgctgacgcctttaccaaagcactctactcgcccttgatctcccaagtggccatgtcagacgaagctgttgctgctctagacaagatcgaagctgccttgtccaagttcagcgacggcccgttcttccttggccaatttagcttggtggatattgcctacgtgacgatctttggagagggttcagatatactactctcacttgaggaactcgagatcccccaaagccagggccaaccttgagagaaacacgggggaaaagaacctgatccgaagcgaataagcaaaaccaaaaatgtcccgctggccttgcttgatgctgccaagaggcatctc

SEQ ID NO: 50772 - DNA, 638 bp, Zea mays
  Clone ID: MRT4577_146299C.1
cggggccctttcccaaccccaccgaatctcctgcgattcctctaggctcacctccttgtcttctcctatgggagcgccggacaggaatccgagagcagggccgccgcatacgagttaacgaaagcctggaccacaatgaggctgggagccaggcccccgagggacccatcctctgcatggaatgaacgtgtggtttgttgaggcagagcggataccatgaggtgtgctacaagtgccacagagagatgatgacgaaacttgatcaggccaacctggctgcctcctctatcgacaggatcgggaacggaagacacgccgacagggaaccgattgatgctgggagaagcacggtaggagctgtggtccatgaggaggagcagacactgaacgtgcaggagcccgctgatgctgccgggcccatcaagggggcggcggcgatctccaaaggggggaaggccgggccgagccggtgcagcgcctgcaggaagagggctggacttacgcgattgaactgacggtgtgggagacgagtctgggcaactgaccgctacttggtcaggcaagactgcgagtttgactaccgcactgctgccagggacgccattgccaagggtaatacgggtgatggcggcagacaa

SEQ ID NO: 50773 - DNA, 225 bp, Zea mays
  Clone ID: MRT4577_14629C.1
tcctgtttcgtctccccagcattcccaggccaaaatgaacaataagctgtaaggaaaagataaactatcataagtcataaccccgatgctatatgtgggggtaataagtggacagtcttgtgttggatgttgtcagctgtaggcgtccagcttgtgagttgtgacgtttcgccactgtaaatgtgtacattgcttgtcttgtatggaaacctgttaacatctttg

SEQ ID NO: 50774 - DNA, 926 bp, Zea mays
  unsure (1)..(926): unsure at all n locations
  Clone ID: MRT4577_1462C.1
tccaaataccagttttgaatttttaatgctgatgtgtgcggggatttgcttaatgctcaccttcttaaccatctatctatcgagcaggatggtccctcctttcttatggaggggcctccgtaatcagctaatggagtaatctgtgttataaaattgtatgaaaggtgtgtgattgcatggggggggggttcagaattctggatccgctatgtgcaatgtatggaggataaaaggagtctagacctagcaaacaatgccctggctcgtgctactcatgtgtttgtcaagaagcagccggagatccatctgtttagtgcgcgctttaaggagcttaatggcgatatttttggagcacgtgcagaatatcagcatctgtattcagatttatgccctggctttctagaggccattgtgaagcattctaatatggaacaccgactgggagataaagaattgtcctgttcagtttatgaaaaggtcatcgctgctgagaagggaaaggaacagagccagctcttaccaacattgcttattcagtactcccgtttcttatttcggacgcgtggggatttggagaaggcaagagaaatattaactgtgctgcatgagcagttaaatgctgtcattcatctagagtcaatttttccatgcgaaaagcgtattgattttttagactcacttgtggagaagtttgttacacctgaatcatctcagggagaggtggcaagtctagttgacaaagaggaaatatcttccatatttttagagtttttggatctctttggggctgttggaataagtgatattttagagtagttaatactagtagctagggtcaggatttacatgtttatttgcaatatgtcgacgccaaaggattcggtctttatactgataataaaccgctattgatttnaaaataaaaa

SEQ ID NO: 50775 - DNA, 377 bp, Zea mays
  unsure (1)..(377): unsure at all n locations
  Clone ID: MRT4577_146300C.1
gccgtgtgctggattcgtcttagcagggtaacaacgcagagacttttttttttttttttttttttttttttttgtttttttttttttttttttttttatttccggggcttgattattataatgttgaattccatcgagaggaatgattctttattggctggcatcagcagactcagggagggggaggggggctagcattttttggcccacagatcatatatgctgcatcttattgtgatggagacatctgccccgacatccttatatcactcgttatgcatgggttcctccgaagttgncgcccgaccggtagcccccggcctccgcgttgtttcccctgcttcagggccccctccccccctctgcgtcccccctcc

SEQ ID NO: 50776 - DNA, 205 bp, Zea mays
  unsure (1)..(205): unsure at all n locations
  Clone ID: MRT4577_146301C.1
ttattttttttttnccacataacgcacaaaaagggtactttcaacgctccagcgggaaaaaaacccccacagccccacagcacttacaaacagatccttttcttttactaaaccaaatttgaacacactgcccctgagatgcatggaatggaacgaacgaagcacaaagccggtccaaggtaatattaacctgccaggatcgatc

SEQ ID NO: 50777 - DNA, 440 bp, Zea mays
  Clone ID: MRT4577_146302C.1
gctggtatattctcattatatcttttatgctttagtgatgaatccctatgtataatcttgttatatctttcatgctggctggataaaaaatgatcttgttctaattatagttgcctcattgtctgattctgtgattcatatttgaaaggtgcacttatgataagattagtaatagggacgtggaagggaaacactttgctccttaagggcctgtttgggagtaaagtatttttgtagtttctaggcattaccatggtttatggaatactagagtattttataccatgatgtgtttgattattttcctaaagactatgttttcaaagccatggttttcttgataccgtgatatttttggagtatttgaaactccattctaactcaaagttttcatggcatgactagttcttgcctaaataccatgatttacaatgttgtat

SEQ ID NO: 50778 - DNA, 312 bp, Zea mays
  Clone ID: MRT4577_146303C.1
tatgtcgtctccaattcggcgataataacatacggaagagggaggaacagatttctcctggctatccataattgcggagttcgtcgtgatccgccatgctcgacgaccatccctttgctcaggatggcatctcgagccccatagcagcgcacatctttgacttctgcgacaatggcagcggcggcgacctcttcacggccgtgaacgtggcctcagacctgttcacggcgccatcagaggatgcctcgtcgtcgtccgtagtgacgacgcctttcgtgccctgcggccacggcgactacatgccgttgggca

SEQ ID NO: 50779 - DNA, 476 bp, Zea mays
  Clone ID: MRT4577_146304C.1
tactcggttctcggaattcccgggtacgacgccacgccgtaccggcaacaaaggcctaagaacgaagacacgaatagacggcatgactactgtcgtgaatgaggaactggcgtgaagtggatctgaatgcttggatggacttacgcagtcctgaaaagaggcatacatgatgacggaatacttcagaagtttctacgcaactcacgtagcacaaggcacttcaggagtatgacccatcgctagtgggttgagagcacacttcaactggatgaaaggagatgctttaatctcaaaggctttagctattcattccactcgaaagctacagcatgatctactatgaggagttactacaacagacaagcaagtcaaactctcaagctgtatgccagaagaatgttcatatgtgctgaatctgatgaccttgttccaaaatatctgagctatttgaggtgtattgttgactcagacgcact

SEQ ID NO: 50780 - DNA, 369 bp, Zea mays
  Clone ID: MRT4577_146305C.1
gaaaaaaaaactgatgtcatttcgggtattctcaaccaccgcttcatgacaaacggacagtccttctttgatccatttactgaaatctactaattcttgacgaccgcaccacatgttatgtttgtgacaagtgattaaatgtctttttttatgggtgtgcacatttcttgccgttgcgatgcggaacgctgctggtaaccaatcgtcggtagtgcctgacccttcatccctcttgcccctcttacctacaggggcccttatgggctcgctgtggctcggctcgctcgctaacgcctcaggctctgcggcgcctagggctctccttttgcgccccgttctttctggcgttcctgcctctctcctcttagc

SEQ ID NO: 50781 - DNA, 438 bp, Zea mays
  unsure (1)..(438): unsure at all n locations
  Clone ID: MRT4577_146306C.1
aggtcctctcccccgttgcgcacgcgctttcccccacttcacccgcctcggcgccatggctaagctcgcgctggcgctcctcctcctgctggccgtggcggcgtccgcgtcggccagcagcgggagccacctggatctcgacctgggcttcctctcctctggggaacgccggagggagtgccgcggcacggtggccgagtgcctcgccgaggagtcggatgaggagggccttgacctggccggatcccaccgccgcggctgaggcggctccggatccgcccgactgccgaggaaaggtctggttggtcaaggtcccggtcctttcgccgacaataatttctttcgccttgttggttcaggcgctaccgccaccgccactgctgtttactatagcaccagacctacggattgaattgttgtatgggatttgtttggncg

SEQ ID NO: 50782 - DNA, 1085 bp, Zea mays
  Clone ID: MRT4577_146307C.1
ctcgaggccggccgggccactgtccctgacctttgactagcagcagcagcagcacagctgtggccagttgtgcgctctgcgccgcgcaccgcgtccgccggctgcaggaggcgccgcgtttgcgttcgccacctccacacgcttctgcctgctctcctttatctttgcgcctcccgcgcagactctctcacgagcacaacagggcggccagacagggctcccacaggccatcaccacaacacacaaatacagctcagagcaactcacacacaggctcctctcccccgttgcgcaacgcgctttcccccacttcacccgcctcggcgccatggctaagctcgcgctggcgctggcgctcctcctcctgctggccgtggcggcgtccgcgtcggccagcagcgggagccacctggatctcgacctgggcttcctctcctctggggaccgccggagggagtgccgcgggacggtggccgagtgcctcgccgaggagtcggatgaggagggccttgacctggccggatcccaccgccgcgcgctctacggcggcgggtacatcagctacggcgcgctgcggcgggacaacgtgccctgctcccgccgcggcgccagctactacaactgccgcccgggcggccaggccaacccctaccaccgcggctgctcccgcatcacccgctgccgcggctgaggcggcgccggatccgccagactgccgaggaaaggtctggttggtcaaggtcccggccctttcgccgacaataatttctttcgccttgttcgttcaggcgctaccgccaccgccaccgctgtttactatagcaccagacctacggattgaattgttgtatggatttgtttggccaaatctttgttctgttgtaaagtaaggggagggattcctgcccctgcgcctgcttaaaatacttatatgaacatatcagtctttcttgtttttttctaaaaaaaaaaaaattgcttgattggttggttctcgtatgtcctgcttgatttgaattgattgttacaaaaaaaaaaaaaaaaacccaagggggggggggggggggggggggggggggtggagg

SEQ ID NO: 50783 - DNA, 1683 bp, Zea mays
  Clone ID: MRT4577_146308C.1
cctttagtacaatttggaatacccattctctcctggtcccgtccctggaagccacggacaagccacagtccacagatttcagaacaagcagcttgcttcactcgcactgacacgagtccagcatctctccgtttcatttgaactacaactaatctttgccaactaaccaatcaggatgtacaccaagcgagggtacctatagagtagagactacaagttgagtaaagttggtgtccccaaacagctcggcagagtcagagatcctactgccggtaggcgctgctgttggattgcgatcctggtttcccctgcttcgacttggacaacgaccggccgccgccagtggcaggccgtgcatccgtcagctccttcacgacggcggtcatggagggcctttggctcgcctccctggccgcgcaccgcagcgccactgacaggaccttactcacctcctccatctccaccgtgccgaagacttcctccatgagagccgggtcgcagacggcctcgattttgtcggtgccgttcagggcggacgacgcccagctgactatgtccgtgccgtcgggaaacgagggatccaccgccgccctcctcgtgagcagctccagcagcaccacgccgtagctgtacacgtcggactccatgctgctcttggtggagaacgctaactctggggccatatatccaatggtgccaacgacaccagtggtctgaggagcagtagaaggctgctccaagagctttgcaatgccaaaatctgaaatatgtggcaccatgtccttgtccagcagtatattacttggcttgatgtcgcgatgaatgatcgcagggcggcagtcatcatgtagatatgctaacccatgggcagtgccgagggctatgtcataccgcacacaccagtccaaggctggtgctggctgaactacatgtagaacatcatgaaggctacctttttccataaaatcatacagtatgaatccattgtcatttctcaaccaagattctttcagcttaatcaagttcctgtgcttgattttacctagtgtcttcagttctccaaccatgcttttgtatgaacctttgtgtgcagaaatcacaagtttctttatagcataaacatcccctgacctcagtgttgccttgtaaacagttccgtgaccacctttaccaatgatatacttgtcatcaaaacattcagttgcctctataacctcatttaatttagatgaggaaccttcaaacatatgactgactgcttcctcactattcttcttctgatctcgagatttcagaaggatgcaccagagtatgagtaccagaactgctcccacaaataatgagccaagaacaatgagaacaattttgaatcggccatgcactgctcttttctttgacccgccacaaggtttcagaacattagctcccatgcaagaagaatcactggtgctgcaagagatacagaggcctgagtttccatcaaaagaatttgttgtggaactcagaaacttcagaagattatctgggactggtccactaaattggttgtaagaaacattcaaggccgaattgtgatggaatgtcacccactagaccattgctactaaggttcaaggttgtacccagtttcaccagctgtcctaatgatgaagggatactgcccccaagaatatttccaccaag

SEQ ID NO: 50784 - DNA, 190 bp, Zea mays
  Clone ID: MRT4577_146309C.1
gcacgaacaaaacacatattattttatgtaaagctgaggcaagtccagaagggggaaaaaaaagcctggagggtgtagattgaagaagcgaatgctgctcaagcccatctcctgggggagccttctgctcgttctcggtctgtggcagcttcctttgtgtgtttacttgtcttctgactcttctgctctt

SEQ ID NO: 50785 - DNA, 252 bp, Zea mays
  Clone ID: MRT4577_14630C.1
ttctgagcttgtgttgctgagagtcccgaagatagccgggttactaatgttgtatcagctcttgaaccatgaggcctcaaggaggtggcttctcccagcaaaattgtgaataatccatcgacctaaatcctcttcatgacttcattaggaactatactgtcctgctcactgataaaaacaaggctgactttatatccaagaatatcacacattatcttgttcaaataatcaagttgactcttgagcctttac

SEQ ID NO: 50786 - DNA, 258 bp, Zea mays
  Clone ID: MRT4577_146310C.1
aatcaaaaatacaaatggggtatttataacttgcatatcaattaccaaaaaaccaacccagatactatatatacattaaaatatatattgtaggagtaaacacaatccaaaaccgtctacaacaaaacttgactgccctacctaccaccaaggcggataactcaactacaacctctgacaaaattactagcacttattaaactcataactaaccaaggcaggaacagaaactcttcacagaaccaatcatgctcagta

SEQ ID NO: 50787 - DNA, 547 bp, Zea mays
  Clone ID: MRT4577_146311C.1
aaaaaaattaaaaaaaaaaaaaaaaaaaaaaaaaaaaaaaaaaaaaaaaaaaaaaaaaaaaaaaaaaaaaaaaaaaagaaaaaaaaaaaaaaaaaaaaaaaaaaaaaaaaaagaaaaaaaaatgggggggccgttttaagggggcccaacttgaaatccactgggcgggcgccaacttaagggggggggggggggacaaaatcttagactgcttgggccgtagttgaaaaggcaagaactgggggaaaccccgggcggtcccaaattaaaagggctggatgaaaccccccttttaacgggtggactaattgcggaaggaggccgggcccgctccgtgtttccaaacatttaggccggcttgattggaaaggggaacccccctttaccgggcctttttaccgcggcgggggggggggttctccccatggggccctttcctttgggcggcctttagggggctgttcttgtgattttttacccttggttttcagcaaagttgcccggttttccggttaaagttttaatgggggggtttcttttagggtgc

SEQ ID NO: 50788 - DNA, 372 bp, Zea mays
  Clone ID: MRT4577_146312C.1
cctatatgctatagcggcagggagaaagagagcacccacctcaacccgcccgccgccatggcgctccgtcgcatcacaccgcggaggagacccgttctccccgtcccccgtgccttctcctcgagtccgccgttttcttcacccccgcctccggcgaacgaccccgaccccgacgccgcccaacccccattcttttcttcgccccctaatttcggcgcgccgcggaacccggagtccttggtcttccaggacattaaaagatcgcctccggtcgtgttccacgttttcgtctacgtgccggaatccgactaccctgtcccgtcccgaccctgttcgcggggcttctttttctggaccgcctattggagacat

SEQ ID NO: 50789 - DNA, 734 bp, Zea mays
  Clone ID: MRT4577_146313C.1
ccggccgggtcccctcgaccgacgcgctcaagcagctgctccgcgacaacccaaagatcaaggccgtcatcctcgtcacgccaaacaaccccaccggagcactctacccgcccgccctgatccacgactttgccaggacctgccgcgacgccaaaatcgcgctcctgctcgacgaaacgtatcgtgattttgtcctcgccgaagacgaggcgaggccggaaatcggctcgtccagcggcgcaaaggggaccgccctcgctgaaggctcgccgtccacttctctgcccctcggacgcccgcacgaggtcttccaggaaagcatggacggcgattccgcttggaactggcgccagacggtgatccagctgtttagcttctccaagtcgtacgccatccctggccaccgattgggtggagtcgtggcgcacctggccttcctgcagcaggtgacgcccagcgcgaccgggggcgaagacgtcgcctttggaccgatggccaaggcgctcgacaacttgcagatcggccctcctcgaaccgacacgcagcgcgctgtagcctgggccatggcggacgagaagcagagggagtggcggctgtcgacggcgcgcgagctgcgcgaccgccgcgtggctttcaagcagggcctctcgcgcaaggtcccgcgccggctcgactcggacggcaacctgctttccacgtcgtcgtcgtcgtcgtcgtcgagcgacgtgcaaagc

SEQ ID NO: 50790 - DNA, 730 bp, Zea mays
  unsure (1)..(730): unsure at all n locations
  Clone ID: MRT4577_146314C.1
ccccctgagtgcccagaattccagtgctcccaggcctgagagctgcgccggcgagcggcgcgctgcgggctgtagaaaccgcttggaggtcccactcggcctccatggttgggtggtagaccttgcatcggaggtaggtggcgcaagcggctgtaccgacggcccagaccttgccgcttccgaactgcctcagcagccgcgccatctccgacaccaccgccttgcccccctctgacgctgctgccgccggcccgtccaccagccacttgagatctccaagatcaagaaccacggcaccgtggtccacgaggagcctctggatcaccgggcccaggtccccgatcctcgccgccaaggcggctttgtcaccggcgagcttggcgaggtcgctctcgagcggcaagaccttcgcaccggcgagggaaggagagccagccatcgggatcctgcgtaccgcctccttcagcaccgcgtctggcccggcgtcgcccacgagcaccgggttgcggcgcgccggcttgagcatgacgtcgagcaccttgcgcgcgtcgtccccgccaccgcctgcggcggccgccacccgagggttcatgtaggcgttggctgagccgagtcgtgagagcggagaaggggacggggccaaggtcgtagtcgcggcgacggtcggggtggagacggcggagggcgccgcacaagccgacgcgagcgactgcntaatggggtcttgcgg

SEQ ID NO: 50791 - DNA, 3924 bp, Zea mays
  Clone ID: MRT4577_146315C.1
atgcctattaaaatctcattacgaagatttaagcttcgtaattttactctcatcaaccttcgtccaaggttcattatcctcaagggaataatgtttcatggacgaaggacgttaaaatttaacactttatgttgccttgttcttaaggcagagcacttgagaacaagttcccaacattggcgcccacctccggtgaactcacttccactttttgagctgatggcctcgttcaacgatcaagctggagctgcttcggacccgaagctggtgctcccaatcacaggtggttcgtcctcagagccagctaacaagaaacaaaagaaggaagcacagagaagggtacagcatgttggggtgcaaggacccttcatcaagtcaagatggtctcacattcctattaccttctcccaagaggaccttcagctcaaggattacccacacaacgatgctatggttatctcttgtgttattaaaggatttctggtccacaatgtcttggttgacacaggcagtgcagctgatatgatatttgctaaggccttcagacaaatgcaagagccagaagataagattcatgatgctacgcatcctctctgtggcttcggagggagacaaattgtagcattgggcaagatcaccatgtcagtaaccttcgggttcatcaacaacactagaactgagcaagttgtgtttgacattgttgacatggaatacccttacaatgcaattattggtcgtggcaccctcaatgctttcgaagcaattcttcatcctgcctatctttgcatgaagataccttcggatcaaggacccatagctatacatggaagtcaggaagccgccagaagggccgaaggtaattggactgactcaaaggcaatccataacatagatggagctgaagcttgtgaacagtacaaattcagaagggacaaagcagcttcagcagatcagccgaagcctatgctcttatgtgaggacatagcagagcagaaggtgctgttaggctctcaattgtccgaagagcaggaaagaaccttgataaggtttttgttcaacaacaaagatgtttttgcatggtcagctaatgatctttgcggagtaaatagggatgttattgaacactcactcaatgttgatccatccttcagagccagaaagcagaggcttcggaaaatgtcagatgataaggccgaaggtgctcgtaacgaagtcaaaagactcctcagcgcaggagtcatcagagaagtaaagtacccagaatggctagccaacactgttatggtaaaaaaggccaatggcaagtggcgaatgtgtatcgattttacagacctcaacaaggcttgtccgaaggacgaattcccattgccaaggatagactctttagtagatgcagcagcttcttccgagctcatgagtctgctagactgttactcaggctatcaccaaatctggatgaaaaaagaagatgagccgaagactagcttcataactccaagtggcacatattgctatcttcggatgcctgaggggctcaaaaacgctggaggaagtttcagcagaatgactgcgaaggttctccagtctcagataggcagaaatgtgctaacttatgttgatgacatcattgtaaaaagcacgaaacgggagaatcatattgctgatctgcaggagactttcgccaacttcagacaagctggtctaaagctgaatccagaaaagtgcgtttttggagtaaagaagggaaaatttcttggatgcttggtttcaacaaagggaattgaagctaatccaagtaaaattgaagctatacttcggatggagccaccaactacaaagaagggggctcagagattgacaggaaggttggcatctctcaatagattcatatccagatcagcagagagaaacttaccattcttcgaagtgctgaagtcagctgaagtctttcaatggggaccaatccagcagaaggccttcgaagacctgaagcagtatttaatagatttaacagcattaactccacctgtgtcaggggctcctttattattatatgtggcagcttcgcactcagcggtaagtgcagcacttgtccaggagaagcttgacggccaagccaggaaacaggtcccggtatattttgtatctgaagttctcagtatatcaaagaaaaattacacagaattagagaaggtgttatatgctgttttgatggcatccaggaagcttcggcactattttcaagcttacaacataatcgttccttcttcacaacctctgaaggatattatgaggaaccgagaagctactggaagaattggaaaatgggctgcagagctcaatgaattttgtattgaatatgttcatagatcttcgattcagtcccaggcgttagcagacttcattgctgactggacgccaggggctcaggaggaagaagcaaataaagacaccgaagcatggacagtgttttgcgatgggtcctggggaaccttcggagcgggagcggctgctgtgttggtttcaccttcaaaagttaaaacttgttatgcggtaaaacttgattttggttgcacaaacaacgttgccgagtacgaagccctgcttctgggtcttcggaagctaaaagcaatgggaatcagaagggctgttcttaaaactgattcccaagttgtttcgggtcatatcgataagagttgcaaggctaaagatccgaagcttgaaaagtatctagatatggttcgaagggttgaagcttccttcgagggattttctgtcaaaaatatccctcgaggacaaaatgagcatgctgatctgctagctaagtcagcagcacaggggctgcccttaccttcggatgtcttctttgaaacaataaaagcaccttcagtggaacttcttgaaagagcagtcctcaatatatctcctgtttatagcgaggactggagaactgagatcatctcttaccttcagggaaaattcctttcagatgacgaagcttataataggaggatagaggcaagagctcgtccatatgtcatgatagaaggagagttgtacaagcatggagtttgtgctccgctactcaagtgtttatccagaaccgaaggtatagagttgatgaaagaaatacatgcaggcctctgtggatctcacattggatccaggccgttacttggaaaaattttccgccaaggattttattggccgaaggcagcttcggatgcagcggaattagttcaaaagtgcgaaggttgtcagaaatgtgcacgagaacaaaaacaaccttcgtctctaacacaactcatacaacctgtttggccattgcaaaggtggggccttgacttgttagtcagacatccggagtcaaatgggctcgttgaaagagccaatggcatcataatgacaggaataatgaagttaatcttcaatcaacccaggggaaagtggccagatcagttaatcaaggtggtgtggagccataatacaacaacatcaaggtccacaggctttactccatttaagttattattcggtgacgaagcaataactccagaagaagctaaaaccggatcaataagggtagtagcttcggcagcatcagattccgaagctgcttattctgtggaaaaagatgctttagaagggatcaggttgcaagccgtggaaaacatcaataaatatcaagccgaaacaattaaatggcgagatagaaaggttcagctaaagaatattgagccaggacacttggtgcttcggagagtggccaacccagaaacagtgggcaagttgcagttgaaatgggatggacctttcttagtagcatcttcgtcaagacccggttcatacagattgaaggatatggacggcaacgacattcctagatcttggaatgcggatgagcttcgacgatactatgtataa

SEQ ID NO: 50792 - DNA, 2268 bp, Zea mays
  Clone ID: MRT4577_146316C.1
atgtttcaaaggacgaagggctttgatgcttcgttcaacattcaagccggagctgcttcggctccaaagttggtactctcgataacaggcggttcatgctcagagccagccaataagaaacagaagaaggagacacagagaagggtacaacatgtcggggtgcagggacccttcatcaagtcaagatggtctcacatttcaattaccttctctcaagaggatcttcaactcaagaattacccacacaacgatgttatggttatctcttgtgtgatcaaaggatttctggtccataatgttttggttgatacaggcaacgcagctgatatcatatttactaaggctttcagacagatgcaagagcccgaagataaaattcatgatgccacacatcccctttgcggtttcggaggaaggcagattgtagcactcggcaaaatcacaatgccagtgaccttcggatttatcaacaacacaaggactgaagaagttgtgtttgatattgttgacatggagtacccttacaatgcaatcattggtcgtggtactcttaacgccttcgaagcaattcttcatccagcttatctttgcatgaagataccttcggaacaagggcacattgctattcatggaagtcaggaagctgccagaagggccgaaggaaattggacagactcaaaagcaatccataatatagatggagctgaagcttgtgagcaatacaagttcagaagggaaaaatctgcttcggctgaccaaccgaagcctatgctcttatgtgaagacatagcagagcagaaggtgctattgggatctcaattgtctgaagaacaggagaaaaccttgataaggtttttgttcaacaataaagatgtttttgcttggtcagctaatgatctatgcggagttaacagggatgttatcgagcactcgctcaatgttgatctatccttcagacctagaaagcagaagcttcggaagatgtctgatgacaaggccgaaggtgctcggaatgaagtgaaaagactcctcagtgccggagttattagagaggtaaaatacccagaatggttggctaacactgttatggtgaagaaggccaatggtaaatggagaatgtgtatcgattttactgatcttaataaggcctgtccgaaggacgagtttccattgccaaggatagattccttagtcgatgcagcagcttcatcagagcttatgagtatgctagattgctattcaggctatcaccaaatctggatgaagaaggaggatgaaccgaaaactagcttcataacccccagtggaacatattgttaccttcggatgcccgaggggcttaagaatgctggaggaagtttcagcagaatgacagcgaaggtcctccattctcagataggcaggaatgtgctaacttatgttgatgatatcattgtaaaaagcacgaagcaagataatcacattgctgatctgcaggagaccttcgctaattttagacaggctggtttaaagctgaatccagaaaaatgtgtcttcggagtgaagaaggggaaatttcttggttgcctagtttcaacaaagggaattgaggctaatccaagcaaaatcgaagctatacttcgaatggaaccaccaagtacaaagaagggggctcaaagattgacaggaaggctggcatctctcaacatattcatatctagatcagtagagagaaatttaccattttttgaagtgctgaagtcagccgaagtttttcaatggggaccagtccagcagagagccttcgaagagctgaagcaatatttgatagatctaacaacactaactccaccaacgccaggggctcctttgttattatatgtggcagcttcacactcagcggtaagtgcagcacttgtccaggagaagcttgaaggtcaagttaagaagcagtccccaatatattttgtatctgaagttcttagtttatcaaaggaaaattatacagaattggagaaagtactgtatgctgttttgatggcctccaggaagcttcggcattattttcaagcttacaacataattgttccttcttcacaacctttgaaggatattatgagaaaccgagaagctactggaaggattggaaaatgggctgcagagctcaatgaattttgtattgattatgtccacagatcttcgattcagtcccaagtgttggcagacttcattgctgactggacgccaggggctcaggaagaagaaatgaataaagatgccgaagcatga

SEQ ID NO: 50793 - DNA, 665 bp, Zea mays
  Clone ID: MRT4577_146317C.1
attcgaggagaactctgctgcgcaggcatttctccccgctggagcgtgcgcgcgccaccctgcgcgcagcgatctcgaagggaccagtacagcgtgtgcgcgacacatctgcggcaacgcggcggagctgcagcctatgctagaggtggcgccgacggcggaaccctcgccatagccggaaaatcacgcacctacgccagacccacggatgctcaggtacgcatctatcaagctccgtctgtgctgctgctggaggacaagtacatggttgataacatccatcgtgaagctcccgtacatgcgcatataggtaccaggtccaccgtagatctggctccgatcagaacaaggccagaacctaggtcatacgcacatactctgccgcatgcatgattgcacgctccggctgtattatttgggtgggccacatagatatacgaccctcggtgtatgcgtttgttagatacaaggcccgagctcttttcctctctattcagaacatgcagtagtcacaacatcgaatacagttccacggataatgcatggccgcttattcttagctacaatgctggacacttatgagcgcttagtccaccctccgacgcgcacatatgtattctccgactcccttctattatccgcccgctgagacctaatagagtatg

SEQ ID NO: 50794 - DNA, 902 bp, Zea mays
  Clone ID: MRT4577_146318C.1
ggcttcggaaaatgtctgatgacaaggccgtatgagctcggaatgaagtcaaaagactcctcagtgcaggagttatcagagaagtaaagtacccagaatggctagctaacactgttatggtaaaaaaggccaatggcaaatggcgaatgtgtatcgatttcacggatctcaacaaggcttgtccgaaggacgaattcccattgccaaggatagactccttagttgatgcagcagcttcgtcagagcttatgagtcttttagattgttattcatgctatcatcaaatttggatgaagaaggaggaatggttatctcttgtgtgatcaaaggattcctggtccataatgttttggttgatacaggcagcgcagctgatattatatttgctaaggccttcagacaaatgcaagagcccgaagacaaaattcatgatgccacgcatcccctttgtggcttcggaggaaggcagattatagcactcgacaaaatcacaatgtcagtgaccttcggatttatcaacaacacaaggactgaacaagttgtatttgatattgttgacatggaatacccttacaatgcaatcattggtcgaggcactctcaatgccttcgaagcaattcttcatccagcttatctttgcatatacacgccttcggaccaacgaatcattgctattcatggaagtcaggaagctgccagaagggccgaaggaaatttgacagactcaaaagcaatccataatatagatggagctaaagcttgtgagcaatacaagttcagaagggaaaaagctgcttcggctgatcagccgaagcccatgctcttgtgtgaggacatagcagagcaaaaggtgctcttaggatctcaactatccgaagaacaggagaaaaccttgataaggt

SEQ ID NO: 50795 - DNA, 359 bp, Zea mays
  Clone ID: MRT4577_146319C.1
ggttcggtcttcgtgttttcctttgttttttgaattttttttttccgttttttctgttgtcgttcatatattgtgtttatcgtcgccttgggcgtgttccgaacaaaaaaaaaaaacactggcaagcttggacggaccccaaacaccgctccggcgggggggccccgacacacggagatggccccccccccggggctaaagggactccaccccggacaggggccttgtacggcgggccttttgtacgggggaacaaaacaaggggggcccagatccgcccccccaccccccaggggggacccagcctccggggcctccctttgggccggggtggggtcgcccccaacgggcatctcgac

SEQ ID NO: 50796 - DNA, 335 bp, Zea mays
  unsure (1)..(335): unsure at all n locations
  Clone ID: MRT4577_14631C.1
tcacggccgtcactcggaancggctcgaggcccacatgctctacatccttactgaaccgngcacttccccngtgacctacgatgtcagatcgagactagatctgccgacctacctaggtggccaataaaccactgttgcccacttcccctgccccacaagacctgccacacatgaacaagaacgtggtctccgtgattgacatcagtggctccatgataggccagaaagtgaagcagaccaaggaggcatccttaaaattctagcgtacatgcagccatgggactcatttgactagttctctttgtggactcgagtacaatcgtggcagggctcg

SEQ ID NO: 50797 - DNA, 1089 bp, Zea mays
  Clone ID: MRT4577_146320C.1
atggcttcgttcaagaaccaagctggaactgcttcggctccgaagctgattctcccgataacaggcggttcatgctcagagccggctaacaagaaacagaagaaggaggcacagagaagagtacaacatgtaggggtacaaggacccttcatcaagtcaagatggtctcacatcccaattaccttctctcaagaggatcttcagctcaaggattacccacacaatgatgctatggttatctcttgtgagatcaaaggatttctggttcacaatgttttggttgatacaggcagtgcggctgatatcatatttgccaaagccttcagacagatgcaagagcccgaagacaagatccatgatgccacacatcccctttgtggcttcggaggaaggcaaattgtagcactcagcaaaatcacaatgccagtaaccttcagatttattaacaacacaaggactgaacaagttgtgtttgatattgttgacatggaatacccttacaatgcaatcattggtcgtggtactctcaatgccttcgaagcaattcttcatccagcatatctttgcatgaagataccttcggaccaagggcccattgctattcatggaagtcaggaagctgccagaagggccgaaggaaactggacagactcaaaagcaatccataacatagatggagctgaagtgaacaatacaactaatgatctttacggagtcaacagggatgttattgaacactcgctcaatgttgatccatccttcagacccagaaagcagaggcttcggaagatgtctgatgataagatcgaaggtgctcggaatgaagtgaaaagactcctcagtgccggagttatcagagaggcatcatctcatgctccagttccgttctatgatggccctacttttctagaaggtttacatggatgtgttgtgcaaatccagatcctgcaaatccagatgtgttgtgcagccaaacggcaacagatcgtgtggtacacaatgtttgctaacgtcatcgactcgagtgtaatacccaaaaatgtatacaatgagaatattgttgatctccttattttgtgtgccatctaa

SEQ ID NO: 50798 - DNA, 3891 bp, Zea mays
  Clone ID: MRT4577_146321C.1
atggcttcgttcaacgatcaagctggagctgcttcggctccgaagctgctactcccaataacaggcggttcatgttcagagccagccaacaagaagcagaagaaggaagcacagagaagggtacagcatgttggggtgcaaggacccttcatcaagtcaagatggtatcacattcctattaccttctcccaagaggaccttcaactcaaggattacccacacaacgatgccatggttatctcttgtgttatcaaaggatttctggtccacaatgtcttggttgatacaggcagtgcagctgatatcatatttgctaaggccttcaggcaaatgcaagagccagaagataagattaatgatgctacacaccctctctgtggcttcggaggaagacagattgtagcactgggcaagatcaccatgccagtgaccttcggattcatcaacaacactagaactgagcaagttgtgtttgacattgttgacatggagtacccttacaatgcaattattggtcgtggcacccttaatgctttcgaagcaattcttcatcctgcttatctttgcatgaagataccttcggatcaaggacccatcgctattcatggaagtcaggaagctgccagaagggccgaaggaaactggactgactcaaaagtaatccataacatagatggagctgaagcttgtgaacagtacaaattcagaagggagaaagcagcttcagcagatcagccgaagcccatgctattatgtgaggacatagcagagcagaaggtgctgttgggctctcaattatccgaagaacaggagaaaaccttgataaggtttttgttcaacaacaaagatgtttttgcatggtcagccaatgatctctgcggagttaatagggatgttattgaacactctctcaatgttgacccatccttcagacccagaaatcagaggcttcggaaaatgtctgatgataaggccgaaggtgctcgtaatgaagtcaaaagactcctcagcgcaggagttatcagagaagtaaagtacccagaatggctagctaatactgttatggtaaaaaaggccaatggcaaatggcgaatgtgtatcgattttacagatcttaacaaggcttgtccgaaagatgaattcccattgccaaggatagactccttagttgatgcagtagcttcgtcagaacttatgagtcttcttgattgttattcaggctatcatcaaatttggatgaagaaggaggatgagcccaaaaccagtttcataacccctagtggaacatattgttaccttcggatgcctgaggggctcaagaatgctggaggaagtttcagcagaatgactgcgaaggttctccagtctcagataggtagaaatgtgctaacttatgttgatgatatcattgtaaaaagcacgaagcagggaaatcacattgctgatttgcaagagaccttcgccagttttaggcaagctggcctaaagttaaatccagaaaaatgtgttttcggagtcaaaaaggggaaatttcttggatgcttggtttcaacaaagggaattgaagctaatccaagtaaaattgaagctatacttcgaatggagccaccaactacaaaaaagggtgcccaaagattgacagggaggctggcatctcttaatagatttatatccagatcagtagaaagaaatttaccattcttcgaagtactgaaattagccgaagtctttcaatggggaccaagccaacaaaaagccttcgaggacctgaagcaatatttgatagatttaacaacattaactccaccagcgctaggggctccgttgttattatatgtggcagcttcgcactcagcggtaagtgcagcacttgtccaggagaagcttaatggccaagtcaagaagcaggtcccagtgtattttgtatctgaagttcttagtatatcaaagaaaaactatacagaattagagaaggtgttatatgctgttttgatggcatccaggaagcttcggcattactttcaagcatacaatattattgttccttcttcgcagccgttgaaggatattatgagaaatagagaagctactgggcggattggaaaatgggctgcagagctcaatgaattttgcattgattatgtgcatagatcttcgatccagtctcaagcattggcagattttatcgccgattggatgccaggggctcaggatgaagaaacaaataaagatgccgaagtatggacagtgttttgcgatgggtcttggggaaccttcggggcaggagcagctgctgtgttggtctcgccatccaaagttaaaacttgttatgcggcaagactcgatttcagttgtacaaacaatattactgagtacgaagccctgcttctgggtcttcggaagctaaaagcaatgggaatcagaagggccattcttaaaactgattcccaggttgtttcgggtcatatcgacaagagttgcaaggctaaagacccgaagcttgaaagatatctagacatggttcgaagagtcgaagcttccttcgaaggattttctgtcaaaaatatccctcgaggacaaaatgagcatgctgatttgctagctaagtcagcagcacaggggctgcccttaccttcggatgtgttcttcgaaacaataaaggcaccttcagtggaactccttgaaagagcagtcctcaatatatctcctgtttatagcgaagattggagaactgagatcatctcttaccttcagggtaaattcctttcagatgacgaagcttataacaggaggatagaggcaagagctcgtccatatgtcatgatagaaggggagttgtacaagcatggagtttgtgctccgctactcaagtgtttatctagaaccgaagttacttggaaaagtttccgccaagggttttattggccgaaggcagcttcggatgcagcggaattagttcaaaagtgcgaaggttgtcagaaatgtgcaagagatcaaaaacaaccttcgtccttaacacagctcatacaacccatctggccattgcaaaggtggggccttgacttgttgggtccattaccaccggcccaagggaacttaagatatgttgtagtggctgtggaatatttttccaaatggattgaggcaaagcctttagccacaataacttcggccaccattcaaaagtttttctggcagaatattgtttgtcgtttcggggtaccaaaggccatcactgtggataatcgaacacagttcgactccgaagctttcagagatttctgtgatcaaattggtacgaagatccattttgcatcagtcaggcatccggagtcaaatgggctcgttgaaagagccaatggcattataatgacaggaataatgaagttaatcttcaatcaacccagaggaaagtggccagatcagttaaccaaagtggtgtggagccacaacacaacaacatcaaggtctacaggctttactccattcaagttattattcggtgacgaagcaataactccggaggaagctaaaactggatcaataagagtagtagcttcggcagaatcaggttctgaagatgcttattctgtggaaaaagatgctttagaagggatcaggcttcaagctgtggagaatatcaataaatatcaagccgaaacaatcaaatggcgagatagaaaggttcggctaaagaatattgagccaggacatttggtgcttcggagagtggccaacccagacacagtgggcaagttgcagttgaaatgggagggacctttcttagtagcatcttcgtcaagacccggttcatacagattgaaggatatggacggcaacgacattcctagatcttggaatgcggatgagcttcggcgatattatgtgtaa

SEQ ID NO: 50799 - DNA, 287 bp, Zea mays
  unsure (1)..(287): unsure at all n locations
  Clone ID: MRT4577_146322C.1
ttgagtgctttgtatgtactatactacatattatttatnccnacatccagataacttatacattcccaagaaagatcagtcctgatggaaggtgttcaggtaaaggtgggctgccttttccccttgtccttatttagcgatgccgacgggcatttaacacccacctggaattcaacagagtggtccggggcgaaccagacatgggacggtcaccagcagtgccgggctgggctctgcggtgcggtccacgggagagcaggcctccagctggaaaggccaggcctgga

SEQ ID NO: 50800 - DNA, 3516 bp, Zea mays
  Clone ID: MRT4577_146323C.1
atggttatctcttgtgttatcaaaggatttctggtccacaatgtcttggttgacacaggcagtgcaactgatatcatatttgctaaggctttcagacaaatgcaagagccagaagataagattcatgatgctacacatcctctttgtggcttcggaggaagacagattgtagcactgggcaagatcaccatgtcagtgaccttcgggttcatcaacaacactagaactgagcaagttgtgtttgacattgttgacatggaatacccttacaatgcaattattggtcgtggcaccctcaatgccttcgaagcaattcttcatcctgcctatctttgcatgaagataccttcggatcaaggacccatcgctatccatggaagtcaggaagctgccagaagggccgaaggcaattggactgactcaaaagcaatccataacatagatggagctgaagcttgtgaacagtacaaattcagaagggagaaagcagcttcagcagatcagccgaagcctatgctcttatgtgaggacatagcagagcagaaggtgatgttaggctctcaattatccgaagagcaggagaaaaccttgataaggtttttgttcaacaacaaagatgtttttgcatggtcagctaatgatctctgcggagtaaatagggatgttattgaacactcgctcaatgttgatccatccttcagagccagaaagcagaggcttcggaaaatgtcagatgataaggccgaaggtgctcgtaacgaagtcaaaagactcctcagtgcaggagttatcagagaagtaaagtacccagaatggctggctaacactgttatggtaaaaaaggccaatggcaagtggcgaatgtgtatcgattttacagacctcaacaaggcgtgtccgaaggacgagttcccattgccaaggatagactctttagtagatgcaacagcttcttccgagctcatgagtctgctagactgttactcaggctatcaccaaatctggatgaagaaggaagatgagtcgaagactagcttcataactccaagtggcacatattgctatcttcggatgcctgaggggctcaaaaacgctggaggaagtttcagcagaatgactgcgaaggttctccagtctcagataggcagaaatgtgctaacttatgttgatgacatcattgtaaaaagcacgaagcaggagaatcatattgctgatctgcaggagaccttcgccagtttcagacaagctggcttaaagctgaatccagaaaaatgcgtcttcggagtaaagaaggggaaatttcttggatgcttggtttcaacaaaggggattgaagctaatccaagtaaaattgaagctatacttcggatggagccaccaactacaaagaagggggctcaaagattgacaggaaggttggcatctctcaatagatttatatctagatcaggagagagaaatttaccattcttcgaagtactgaagtcagccgaagtctttcaatggggaccaatccagcagaaggcttttgaagaactgaagcagtatttgatagatctaacaacattaactccaccaacgccaggggctcctttgttattatatgtggcagcttcgcactcagcggatattatgaggaaccgagaagctactggaaggattggaaaatgggctgcagagctcaatgaattttgtattgaatatgttcatagatcttcgattcagtcccagactttggcagactacattgctgactggacgccaggggctcaggaggaagaaacaaacaaagacgccgaagcatggacagtgttttgtgatggatcttggggaaccttcggagcgggagcggctgctgtgttggtttcaccttccaaagtcaaaacttgttatgcgacgaaacttgattttagttgcacaaataacattgccgagtacgaagcattgcttctaggtcttcggaagttaaaagcaatgggaatcagaagggccatacttaaaactgattctcaggttgtttcgggtcatattgacaagagttgcaaggctaaggatccgaagcttgaaaaatatctggatatggttcgaagagttgaagcttccttcgaagggttttctgtcaaaaatatccctcgaggacaaaatgagcatgctgatttgctagctaagtcagcagcacaggggctgcccttaccttcggatgtgttcttcgaaataataaaagcaccttcggtggaacttcttgaaagggcagtcctcaatatatctcctgtttatagcgaagattggagaactgagatcatctcttaccttcagggaaaattcctttcagatgacgaagcttataacaggaggatagaggcaagagctcgtccatatgtcatgatagaaggagagttgtacaagcatggagtttgtgctccactactcaagtgtttatccagaaccgaaggtatagagttgatgaaagaaatacatgcaggcatgtgtggatctcacattggatccaggccgttacttggaaaaaatttccgccaaggattttattggccgaaggcagcttcggatgcagcggaattagttcaaaagtgcgaaggttgtcagaaatgtgcacgagatcaaaaacaaccttcgtccctaacacaactcatacaacccatttggccattgcaaaggtggggccttgacttgttaggtccgttaccaccggcccaagggaacctaagatatgttgtagtggcggtggaatatttttctaaatggattgaggcaaagcctttagccacaataacttcggccaccgtccaaaagtttttctggcagaatattgtttgtcgtttcggggtaccaaaggctattactgtggataatggaacacagattgattccgaagcttttagggatttctgtgatcaaattggtacgaagatccattttgcatcagtcagacatccggagtcaaatggactcgttgaaagagccaatggcattataatgacaggaataatgaagttaatcttcaatcaacccaggggaaaatggccagatcagttaaccaaagtggtgtggagccacaatacaacaacatcaaggtctacaggctttactccattcaagttattattcggtgacgaagcaataactccggaagaagctaaaaccggatcaataagggtagtagcttcggcagaaccaggttccgaagctgcttattctgtggaaaaagatgctttagaagggatcaggctgcaagccgtggagaacatcaataagtatcaagccgaaacaattaaatggcgagatagaaaggttcggctaaagaatattgagccaggacacttggtgcttcggagagtggccaacccagaaacagtgggcaagttgcagttgaaatgggatggacctttcctagtagcatcttcgtcaagacccggttcatacagattgaaggatatggacgacaacgacattcctagatcttggaatgcggatgagcttcggcgatattatgtataa

SEQ ID NO: 50801 - DNA, 438 bp, Zea mays
  Clone ID: MRT4577_146324C.1
ccacctcgtacctcgaaacaagttacgcgagatggcaccctcctaataagtcatggtcgtgggtgtcgtccttgcaacactcgtcgtcggcgggtcatgcgggcccccgaaggtgccgtccggtcccaacatcaccaccaactacaacggcaagtggctcaccgccagtgccacctggtacggtcagtccaacggtgccggcgctcctgacaacagttgtgcgtgcggcatcaagaacgtgaacctgccaccctacagcggcatgacggtgtgtggcaacttccccatcttcatagacggcaagggttgcggctcatgctatgaagtgagatgcaaggaaatacctgatttcttcggcaattcattcacggtgtacatcacttacatgaactacgaacctatcgctccctaacactttgacttgagccgcaaggcctt

SEQ ID NO: 50802 - DNA, 650 bp, Zea mays
  Clone ID: MRT4577_146325C.1
ccggccgggaaccgagacaccgcgtgcgaaccaagcagaccacaacaagaagaagcgtagtcgtcgccggaaggaaaggcgcggagcaagatgtcgtggcaggcgtacgtcgacgagcacctgatgtgcgagatcgaaggacagcatctcagcgccgccgccatcgtcggtcacgacggcagcgtttgggcgcagtccgagagcttccccgagccgtgcggcccggccggatcggagcgaggggatgtccggatctcggtcgctgaggcgagatgcggatctaaggccccttccctcggtgacgtggttgctgctgctgctgttctccgggcgtttgatgccaatatagctgagatcaagcttgatgatctgcgtactgtggatttgctagtgagggatggccggatcgggctgttggcgtccgacctgatttggttgttcgcttgaatagacttacttaccagtggacagtggtagtgatcgttcagcagcagtagagcaatttgttttacatgtaaaatttgagtggctgctagagatgcaccaatggccgagctgcatgtgtttattcctatatagcgacagttgtgtgattgatccaaaacgcaaaattttagttttcaccaaaaaaaaaaaaaaaaaaagcggcc

SEQ ID NO: 50803 - DNA, 1149 bp, Zea mays
  Clone ID: MRT4577_146326C.1
atggggatcagaagggccattcttaaaactgattcccaagttatttctggtcatgttgacaagagctataaagcaagagatctgaagcttgaaaaatatctagatacagtccgaaggatcgaggcttcctttgaaggattctctgttaaaaatattcctcgtggagaaaatgaatatgctgatctattggccaagtcagcagcacaggggctgcctttaccttcggaagtatttttcgatacaataaaagcaccttcggtcgagcttcttgaaagagcggtcctcaatatatcccctgtctatagtgaagatttgagaactgaaatcatctctttccttcagagtaattttctttcagacgacgaagcttacaacaaaagaatagaagcaagagctcgaccatatgttataatagaaggggagctgtacaagcgtggggtctgttccccgttgctcaagtgtttatccagatccgaagtgccgaaggccattactgtggataatgggacacagtttgattctgaagctttcagagaattttgtgaccagattggcacgaagatccattttgcatcagttcggcatccggagtcaaacggacttgtcgaacgagctaacgggatcataatgacaggaataatgaagtcaatcttcaatcagcccaggggaaagtggccagatgagttaattaaagtggtgtggagccataacacaaccatgtcaagatcaacaggttttacgcctttcaaactattgtttggggatgaagcaataaccccggaagaggccaaagcagaatcaataagaacggtaacttcggcagaaggtgaagacgaagctgattgctctgtggaaaaagatgctatagaagggatcagacttcaggctgtggaaaacatcaataaatatcaagccgaaacaataaaatggcgtgacagaaaggttaagctgaagaacattgaaccaggacatctggtgcttcgaagagtagctaaccctgagacagtgggcaagttacagctgaagtgggaaggaccttttttggtagtatcttcgccaagacccggttcctatagattgaaggatatggacggcaacgacatccctaggtcatggaatgcggatgagcttcggcgatattatgtttaa

SEQ ID NO: 50804 - DNA, 361 bp, Zea mays
  Clone ID: MRT4577_146327C.1
attcccaggtctagccactcatccttatctctccacaaaaccctcctccgctttacacccttgaatcctactactctgtcccgtaattattctcctgcacctctgcaacaaccaaacattatcaccatcttccctatccacatcgccatctcctgcatttacctctccttctatcacctcttcttatacacccaacttccttactctataataaccatcacttactataaccaacccgatctacctatcaataccctgatcactcatttcttgaaagtctgtcatctattcaaccatctattaccataaacagtctaacctgatctccaggtattccacgacttctactaattccaatact

SEQ ID NO: 50805 - DNA, 805 bp, Zea mays
  Clone ID: MRT4577_146328C.1
ggccgcttttttttttttttttttgcatcaggaattcatcatttgatgaaaactaaaattttgcgttttggatcaatcacacaactgtcgctatataggaataaacacatgcagctcggccattggtgcatctctagcagccactcaaattttacatgtaaaacaaattgctctactgctgctgaacgatcactaccactgtccactggtaagtaagtctattcaagcgaacaaccaaatcaggtcggacgccaacagcccgatccggccatccctcactagcaaatccacagtacgcagatcatcaagcttgatctcagctatattggcatcaaacgcccggagaacagcagcagcagcaaccacgtcaccgagggaaggggccttagatccgcatctcgcctcagcgaccgagatccggacatcccctcgctccgatccggccgggccgcacggctggggcagatccagagtcgcgcgggtctaaatcagcgcaggagcactgaacatggataaagcaactaagcaagtagagcgggaagagataaggtgggagtgaatgacctcggggaagctctcggactgcgcccaaacgctgccgtcgtgaccgacgatggcggcggcgctgagatgctgtccttcgatctcgcacatcaggtgctcgtcgacgtacgcctgccacgacatcttgctccgcgcctttccttccggcgacgactacgcttcttcttgttgtggtctgcttggttcgcacgcggttctcggttcccggccggcctcgaggaacccaatcgcccataggagt

SEQ ID NO: 50806 - DNA, 3918 bp, Zea mays
  Clone ID: MRT4577_146329C.1
atggcttcgttcaacgatcaagctggagctgcttcggacccgaagctggtgctcccgattacaggtggttcgtcctcagagccagccaacaagaaacagaagaaggaagcacagagaagggtacaacatgttggggtgcaaggacccttcatcaagtcaagatggtctcacattcctattaccttctcccaagaggaccttcaactcaaggattacccacacaacgatgccatggttatctcttgtgttatcaaaggatttctggtccacaatgtcttggttgacacaggcagtgcagctgatatcatatttgctaaggccttcagacaaatgcaagagccagaagataagattcatgatgctacacatcctctctgtggcttcggaggaagacagattgtagcactgggcaagatcaccatgtcagtgaccttcgggttcatcaacaacactagaactgagcaagttgtgtttgacattgttgacatggaatacccttacaatgcaattattggtcgtggcaccctcaatgctttcgaagcaattcttcatcctgcttatctttgcatgaagataccttcagatcaaggacccatcgctattcatggaagtcaggaagctgccagaagggccgaaggaaactggactgactcaaaagcaatccataacatagatggagctgaagcttgtgaacaatataaatttagaagggagaaagcagcttcagcagatcagtcgaagcccatgcttttaggtgaggacatagcagagcagaaggtgctgttgggctctcaattatccgaagaacaagagaaaaccttgataaggtttttgttcaacaacaaagatgtttttgcatggtcagccaatgatctctgcggagttaatagggatgttattgagcactcgctcaatgttgatccatccttcagacctagaaagcagaggcttcggaaaatgtcagatgataaggccgaaggtgctcgtaacgaagtcaaaagactcctcagtgcaggagttatcagagaagtaaagtacccagaatggctagccaacactgttatggtaaaaaaggccaatggcaagtggcgaatgtgtatcgattttacagatcttaacaaggcttgtccgaaggatgaattcccattgccaaggatagactctttagttgatgcagcagcttcttcagagctcatgagtctgttagactgttattcaggctaccaccaaatctggatgaagaaggaagatgagccgaagactagcttcataactccaagtggcacatattgctatcttcggatgcctgaggggctcaaaaacgctggaggaagtttcagcagaatgactgcgaaggttctccagtctcagataggcagaaatgtgctaacttatgttgatgacatcattgtaaaaagcacgaaacaggagaatcatattgctgatttgcaggagaccttcgccaatttcagacaagctggcttaaagttgaatccagaaaaatgtgtcttcggagtaaagaaggggaaatttcttggatgcttggtttcaacaaagggaattgaagctaatccaagtaaaattgaagctatacttcggatggagccaccaactacaaaaaagggggctcaaagattgacaggaaggttggcatctctcaatagattcatatccagatcagaagagagaaacttaccattctttgaagtgctgaagtcagccgaagtctttcaatggggaccaatccagcagaaggcctttgaagagctaaaacagtatttgatagatctaacaacactaactccacctacgccaggggctcctttgttattatatgtggcagcttcgcactcagcggtaagtgcagcacttgttcaggagaagcttgaaggccaagttaagaggcaggccccaatatattttgtatccgaggttcttagtttatcaaagaaaaattatacagagttggagaaggtactgtatgctgtcttgatggcctccaggaagcttcggcactattttcaagcttacaacataattgttccttcttcacaacctctgaaggatattatgaggaaccgagaagctactggaaggattggaaaatgggctgcagagctcaatgaattttgtattgaatatgttcatagatcttcgattcagtcccaggcgttagcagacttcattgctgattggacgccaggggctcaggaggaagaaacaaataaagacgccgaagcatggacagtgttttgcgatgggtcttggggaaccttcggagcgggagcgactgctgtgttgatttcaccttccaaagttaaaacttgctatgcggcaaaacttgattttagttgcacaaataacattgccgagtacgaagccctgcttttgggtcttcggaagctaaaagcaatgggaatcagaagggccatacttaaaactgattcccaggttgtttcgggtcatattgacaagagttgcaaggctaaagatccgaagcttgaaaaatatttggatatggttcgaagagttgaagcttccttcgaaggattttctgtcaaaaatatccctcgaggacaaaatgagcatgctgatttgctagctaagtcagcagcacaggggctgcacttaccttcggatgtgttcttcgaaacaataaaagcaccttcggtggaacttcttgaaagagcagtcctcaatatatctcctgtttatagcgaagattggagaactgagatcatctcttaccttcagggtaaattcctttcagatgatgaaacttataacaggaggatagaggcaagagctcgtccatatgtcatgatagaaggggagttgtacaagcatggagtttgtgctccgctactcaagtgtttatctagaaccgaaggcatagagttgatgaaagaaatacatgcaggcctgtgtggatctcacattggatctaggccgttacttggaaaagttttccgtcaggggttttattggccgaaggcagcttcggatgcggcggaattagttcaaaagtgcgaaggttgtcagaaatgtgcaagagatcaaaaacaaccttcgtccttgacacagctcatacaacccatctggccattgcaaaggtggggccttgacttgttgggtccattaccaccggcccaagggaacttaagatatgttgtagtggctgtggaatatttttccaaatggattgaggcaaagcctttagccacaataacttcggccaccattcaaaagtttttctggcagaatattgtttgtcgtttcgggttcgactccgaagctttcagagatttctgtgatcaaattggtacgaagatccattttgcatcagtcaggcatctggagtcaaatgggctcgtcgaaagagccaatggcattataatgacaggaataatgaagttaatcttcaatcaacctaggggaaagtggccagatcagttaaccaaagtggtgtggagccacaacacgacaacatcaaggtctacaggctttactccattcaagttgttattcggtgacgaagcaataactccggaggaagctaaaactggatcaataagagtagtagctttggcagaatcaggttctgacgatgcttattctgtggaaaaagatgctttagaagggatcaggcttgaagctgtggagaatatcaataaatatcaagccgagacaatcaaatggcgagttagaaaggttcgactaaagaatattgagccaggacacttggtgcttcggagagtggccaacccagaaacagtgggcaagttgcagttgaaatgggatggacctttcttagtagcatcttcgtcaagacccggttcatacagattgaaggatatggacgacaacgacattcccagatcttggaatgcggatgaacttcagtggtattatgtgtaa

SEQ ID NO: 50807 - DNA, 373 bp, Zea mays
  unsure (1)..(373): unsure at all n locations
  Clone ID: MRT4577_14632C.1
ngcggcggccgggcgggggggccgcggcccctcggtgtttcgggcgctgtgtgncagcngccttcgtccccccaggtgccancgggctggtccggcgggcgtgtctccttgtgaaccctgtgcgccggccgcattgatgtgcccttctgcgtcggttgccggggggggggggggggggcncttagctccgcgcgcgcctcctccaacgtcttgggctcgcctgccttgctgccttctcccggcgtctgcggggggctgccgtgcggccggctggctgcgttgggctctgggcctggtccgcggccgcggccgcgccctggccggctgctacctcgctgggcgcccccggcggggggttccgtgcggccggccg

SEQ ID NO: 50808 - DNA, 4943 bp, Zea mays
  Clone ID: MRT4577_146330C.1
tttgtctccaaagcaataatacttcatgttacggtggctcaaagatcaaacaaactccagatgtttctccaattgatgacaatatttattgttttaattggatataagttggaaagagaagcaagtagttttgcaaacacaattatttccatttgctaacccattctgtcgatatttctgactcagagcagtccattatgagtctgcaaaatgttagcaacgaaagactattgaaacaacatgtcaaagaagtcgttgaaaatctatgagttatgccaacaagacgacatcgtaaaaaatgttatttatttgataaatctgtttaaatctacctttagaaatcattcccttttagacactataaatataaaaaatcgtgtatataaatatgattttcatggaaagtttgtggaattgttatgtttatgtagatgcattttagggggcgtatttatttagtcaactgtacctaaatacaatttctaagaatattttgtaagatatatgttgggcacttgttttttattactgattcataaaacaagacaacacaattgttaaatgttaaggacctttgtccttcgaagcattaattcccttcgggcataatggttcttggacgaaggttgtgaagaacaagtcttcatcattcataaatgttgggaccatgcttcgtcgccgaaggtcctgcagaaagaaacagctttcggctgaagctgtttgtacgtgatgccgaaggttccctttcatgaagcttcggaattacaaaccgacttaaagatagaatgaccttttagtccataagagtctgagtcaatgttgtaaacttttatgaggggtatgattgtaattcctcacaggctgtgtcctgtgcctataaatagtgaacagtattcctttactgttcacgcattctggtttttgcaatcgcatctctcggaatacaacctttgtcaaggcataggtatcattgtatttatgattcaatgtattaagtgaatatgatataatgcatctgtgaatcatttatccattttataccttttactttgcattatcttacaatgtttattgaaaatttattacgaaggttcaacttcgtaataagtttcttatcaaccttcgtccaagacctattatccccaaaggaataatgcttcacggacgaaggacagcatcatttaacattttatgttgccttgttcttaattcatagcatttgagaacaagtccccgacattggcgcccacctccggtgaactcacttccacttttttgagctgatggcttcgttcaacgaccaagctggagctgcttcggacccgaagctggtgctcccgatcacaggtggctcgtcctcagagccagctaacaagaaacagaagaaggaagcacagagaagggtacagcatgttggggtgcaaggacccttcatcaagtcaagatggtctcacattcctattaccttctcccaagaggaccttcagctcaaagattacccacacaacgatgccatggttatctcttgtgttatcaaaggatttctggtccacaatgtcttggtcgacacaggcagtgcagctgacatcgtatttgctaaagccttcagacagatgcaagagccagaagataagattcatgatgctacacatcctctttgtggcttcggaggaagacagattgtagcactgggcaagattaccatgtcagtaaccttcggattcatcaacaacactagaactgagcaagttgtgtttgacattgttgacatggaatatccttacaatgcaattattggtcgtggtaccctcaatgccttcgaagcaatccttcatcctgcctatctttgcatgaagataccttcggatcagggacccattgctattcatggaagtcaggaagctgcaagaagggccgaaggcaattggactgactcaaaagcaatccataacatagatggagctgaagcttgtgaacagtacaaattcagaagggagaaagcagcttcagcagatcagccgaagcctatgctcttatgtgaggacatagcagagcagaaggtgctgttaggctctcagttatccgaagagcaggagaaaaccttgataaggtttttgttcaataacaaggatgtttttgcatggtcagccaatgatctctgcggagttaatagagatgttattgaacactcgctcaatgttgatccatccttcagacccagaaagcaaaggcttcggaaaatgtcagatgataaggccgaaggagctcgcaacgaagtcaaaagactcctcagtgcaggagttatcagagaagtgaagtacccagaatggctagctaacactgttatggtaaaaaaggccaatggcaggtggcgaatgtgcatcgattttacagatcttaacaaggcttgtccgaaggatgaattcccactaccaaggatagactctttagttgatgcagcagcttcttcagagctcatgagtctgttagactgttattcaggctatcaccaaatttggatgaagaaggaagatgagccgaagactagcttcataactccaagtggcacatattgctatcttcggatgcctgaggggctcaaaaacgctggaggaagtttcagccgaatgactgcgaaggttttccaatctcaaataggcagaaatgtgctaacttatgttgatgatatcattgtcaaaagcacgaagcaggagaatcatattgctgatctgcaggagaccttcgccagtttcaggcaagctggcttaaagttaaatccagaaaaatgcgtcttcggagtgaagaaggggaaatttcttggatgcttggtttcaacaaagggaattgaagccaatccaagtaaaattgaagctatacttcggatggagccaccaactacaaagaagggggctcaaagattgacaggaagattggcatctctcaatagattcatatccagatcagcagagagaaacttaccattcttcgaagtgctgaagtcagcagaagtctttcaatggggaccaattcagcagaaggcttttgaagagctaaaacagtatttaatagatctaacaacattgactccaccaatgccaggggctcctttattattatatgtggcagcttcgcactcagcggtaagtgcagcgcttgtccaggagaagcttgatgatcaagtcaaaaggcaggccccaatatattttgtttccgaggttcttagtttatcaaagaaaaattatacagagttggagaagggaaccttcggagcaggagcggctgctgtgttggtttcaccttccgaagtcaaaacttgttatgcggcaaagcttgattttaattgcacaaataacattactgagtacgaagcattgattctaggtcttcggaagttaaaagcaatgggaatcagaagggccatacttaaaactgattcccaggttgtttcgggtcatattgacaagagttgcaaggctaaggatccgaagcttgaaaaatatctggatatggttcgaagagttgaagcttccttcgaagggttttctgtcaaaaatatccatcgaggacaaaatgagcatgctgatttgctagctaagtcagcagcacaggggctgcccctaccttcggatgtgttcttcgaaacaataaaagcaccttcggtggaacttcttgaaagagcagtccttaacatatctcctgtttttagcgaagattggagaaccgagatcatctcttaccttcagggtaaattcctttcagatgacgaagcttataacaagaggatagaggcaagagctcgtccatatgtcatgatagaaggggagttgtacaaacatggagtttgtgctccgctgctcaaatgtttatccagaaccgaaggtatagagttaatgaaagaaatacatgcaggcctgtgtggatctcacatcggatctaggccgttacttggaaaaattttccgtcaagggttttattggccgaaggcagcttcggatgcagcagaattggttcaaaagtgcgaaggttgtcagaaatgtgcaagagatcaaaaacaaccttcgtccttaacacagctcatacaacccatttggccattgcaaaggtggggccttgacttgttaggtccgttaccaccggcccaagggaacctgagatatgttgtagtagctgtggaatatttttctaaatggattgaggcgaagcctttagccacaataacttcggctaccgtccaaaagtttttctggcagaatattgtttgtcgtttcggggtgccaaaggctatcactgtggacaatggaacacagttcgactcccaagctttcagggatttctgtgaccaaattggtacgaagatccatttcgcatcagtcaggcacccggagtcaaatggactcgttgaaagagccaacggcattataatgacaggaataatgaagctaatcttcaatcaacctagaggaaaatggccagatcagctaaccaaagtggtgtggagccacaacacgacaacatcaagatctacaggctctactccattcaagttgttatttggtgacgaagcaataactccagaagaagctaaagccggatcaataaggatagtagcttcggcagaatcagattccgaagctgcttattctatagaaaaagatgctttagaagggatcagactgcaagccgtggagaatatcaataaatatcaagccgaaacagtcaaatggcgggatagaaaggttcggctaaaaaatattgagccagggcacttggtgcttcggagagtggccaacccagaaacagtgggcaaattgcagttgaaatgggacggacctttcttagtagcatcttcgtcaagacccggttcatacagattgaaggatatggacggcaacgacattcctaggtcttggaatgcggatgagcttcggcgatattatgtataa

SEQ ID NO: 50809 - DNA, 5920 bp, Zea mays
  unsure (1)..(5920): unsure at all n locations
  Clone ID: MRT4577_146331C.1
atgactttctcagatctattgccatgtgatctgggtgtcggctgcctgggtgacttttacctctacttggaggactcaccgcttcggctttcagtcgtcgtgatctgggtgcttactgcttgggggcatcttcgaggagaccactcaccattttgcgttttcgatcgtcggggctacggaccaatttttcaccaatgttacgtgacattcttctatgctatgcggtatatagtgctatgtctaattctccatgtgtgcgtgttgcgagacgccacgaagcgaagcgcccgaggcacagtgcatttgcacagggttagtcctcaaaaattcgctgctttgttcatgcatgcgatggtcgatacccatcctaatttgcgatgcctctcttgcgggccaaaaaatgcaacctctttagattgcctggtctttgagacagctgatggccatcgcattttccatgctgaagccgaaatagactcgtctaaccttccggggacctctaaccagccaatacctgcgctacaagaaccacctggtacagccatgtttgcccattcgttacttcagcaaaaacaatatggttttagtgatgcttatgtcgacacaggtagtacatctataatgtcattcccttcagcgcttgccgcatccaataggcaacgccggcgcagtagagtacgtcacatggtagctgacgagccattgtcaatcacgcttcctttggacaagtcatacgtagatgctctaaaagatgcctaccctgagaggtcatactatggtggacccgaacacatatgcccatactgccatgctgttttttggttccaagagcgtgtcaaaaacgattcctgcttgacccaaaggaaaattgtgtacaacctttgctgcaaaggagggaaagtgaacctaaaaccatttgaacgtccgccgcctttgcttgttgatcttttgagatttgatggaggtgcgtccatcgacaaaacgataaataaccgcaccgtgccttatgttttcaaaattaatggggtcgtgcaccataggattggcaccctacttccacagcgtgggacacagccaaaatttgcccagctatacacatatgacacggaacatgagacccagaacaggctaggcatgtttgagaccgatgatggcgctggtggccacctagaccctgaaatagcgtcgtcgctgcttgttgggcctatgcttcgtcgccgaaggtcttacaagaagaagcggtcttcggcgaaagctgtttgtataaaatggccgaaggttcctctttgtgaagcttcgcatttgagaacaagtccccaacattggcgcccacctccggtgaactcacttccactttttgagctgatggcttcgttcaacgaccaagctggagctgcttcggacccgaagctggtgctcccgatcacaggtggttcgtcctcagagccagctaacaagaaacagaagaaggaagcacagagaagggtacagcatgttggggtgcaaggacccttcatcaagtcaagatggtctcacattcctattaccttctcccaagaggaccttcagctcaaagattacccacacaacgatgccatggttatctcttgtgttatcaaaggatttctggtccacaatgtcttggttgacacaggcagtgcagctgacatcatatttgctaaggccttcagacaaatgcaagagccagaagataagattcatgatgctacacatcctctctgtggcttcggaggaagacagattgtagcactgggcaagatcaccatgtcagtgaccttcggattcatcaacaacactagaactgagcaagttgtgtttgacattgttgacatggaatacccttacaatgcaattattggtcgtggtactctcaatgccttcgaagcaattcttcatcctgcttatctttgcatgaagataccttcggatcaaggacccattgctattcatggaagtcaggaagctgcaagaagggccgaaggcaattggactgactcaaaagcaatccataacatagatggagctgaagcttgtgaacagtacaaattcagaagggagaaagcagcttcagcagatcagccgaagcccatgctcttatgtgaggacatagcagagcagaaggtgctgttaggctctcaattatccgaagagcaggagaaaaccttgataaggtttttgttcaacaacaaagatgtttttgcatggtcagccaatgatctctgcggagttaatagggatgttattgagcactcgctcaatgttgatccatccttcagacccagaaagcagaggcttcggaaaatgtcagatgataaggccgaaggtgctcgcaacgaagtcaaaagactcctcagtgcaggagttatcagagaagtgaagtacccagaatggctagctaacactgttatggtaaaaaaggccaatggcaagtggcgaatgtgcatcgattttacagatcttaacaaggcttgtccgaaggatgaattcccactaccaaggatagactctttagttgatgcagcagcttcttcagagctcatgagtctgttagactgttattcaggctatcaccaaatctggatgaagaaggaagatgagccgaagactagcttcataactccaagtggcacatattgctatcttcggatgcctgaggggctcaaaaacgctggaggaagtttcagcagaatgactgcgaaggttctccaatctcaaataggcagaaatgtgctaacttatgttgatgacatcattgtcaaaagcacgaagcaggagaatcatattgctgatctgcaggagaccttcgccagtttcagacaagctggcttaaagttaaatccagaaaaatgtgtcttcggagtgaagaaggggaaatttcttggatgcttggtttcaacaaagggaattgaagctaatccaagtaaaattgaagctatacttcggatggagccaccaactacaaagaagggggctcaaagattgacaggaagattggcatctctcaatagattcatatccagatcagcagagagaaacttaccattcttcgaagtgctgaagtcagccgaagtctttcaatggggaccaatccagcagaaggctttcgaagagctgaaacagtatttgatagatctaacaacattaactccaccaatgccaggggctcctttgttattatatgtggcagcttcgcactcagcggtaagtgcagcgcttgtccaggagaagcttgatggtcaagtcaagaggcaggccccaatatattttgtatccgaggttcttagtttatcaaagaaaaattatacagagttggagaaggtactgtatgctgtcttgatggcctccaggaagcttcggcactattttcaagcttacaacataattgttccttcttcacaacctctgaaggatattatgaggaaccgagaagctactggaaggattggaaaatgggctgcagagctcaatgaattttgtattgaatatgttcatagatcttcgattcagtcacaggcattggcagactttattgctgactggacgccaggggctcaggaggaagaaacgaataaagacaacgaagcctggacagtgttttgtgatggatcttggggaaccttcggagcaggagcggctgctgtgttggtttcaccttccaaagtcaaaacttgttatgcggcaaaacttgattttaattgcacaaataacattgctgagtacgaagcattgcttctaggtcttcggaagttaaaagcaatgggaatcagaagggccatacttaaaactgattcccaggttgtttcgggtcatattgacaaaagttgcaaggctaaagatccgaagcttgaaaaatatctggatatggttcgaagagttgaagcttccttcgaagggttttctgtcaaaaatatccctcgaggacaaaatgagcatgctgatttgctagctaagtcagcagcacaggggctgcctttaccttcggatgtgttcttcgaaacaataaaagcaccttcggtggaacttcttgaaagagcagtccttaatatatctcctgtttttagcgaagattggagaaccgagatcatctcttaccttcagggtaaattcctttcagatgacgaagcttataacaagaggatagaggcaagagctcgtccatatgtcatgatagaaggggagttgtacaaacatggagtttgtgctccgctgctcaaatgcttatccagaaccgaaggtatagagttaatgaaagaaatacatgcaggcctgtgtggatctcacatcggatctaggccgttacttggaaaaattttccgccaaggattttattggccgaaggcagcttcggatgcagcagaattggttcaaaagtgcgaaggttgtcagaaatgtgcaagagatcaaaaacaaccttcgtccttaacacagctcatacaacccacttggccattgcaaaggtggggccttgacttgttaggtccgttaccaccggcccaagggaacctgagatatgttgtagtagctgtggaatatttttctaaatggattgaggcgaagcctttagccacaataacttcggccaccgtccaaaagtttttctggcagaatattgtttgtcgtttcggggtgccaaaggctatcactgtggacaatggaacacagtttgactccgaagctttcagggatttctgtgaccaaattggtacgaagatccattttgcatcagtcaggcacccggagtcaaatggactcgttgaaagagccaacggcattataatgacaggaataatgaagttaatcttcaatcaacccaggggaaaatggccagatcagttaaccaaagtggtgtggagccacaacacaacaacatcaaggtctacaggctttactccattcaagttgttattcggtgacgaagcaataactccagaagaagctaaagccggatcaataaggatagtagcttcggcagaatcagattccgaagctgcagattccgaagctgcttattctatagaaaaagatgctttagaagggatcagactgcaagccgtggagaatatcaataaatatcaagctgaaacagtcaaatggcgggatagaaaggttcggctaaaaaatattgagccaggacacttggtgcttcggagagtggccaacccagaaacagtgggcaaattgcagttgaaatgggacggacctttcttagtagcatcttcgtcaaggcctggttcatacagattgaaggatatggacggcaacgacattcctaggtcttggaatgcggatgagcttcggcgatattatgtataacatgatgtaaattttcatgttttttcttttctttttcatggtacccttttcctttccgaagggggagaaaggtttttaatggggccatcatgtgtaatttccttttttagtcttataagagcattttagtgaagattggagaaccgagatcatctcttaccttcagggtaaattcctttcagatgacgaagcttataacaagaggatagaggcaagagctcgtccatatgtcataatagaaggggagttgtacaagcatggagtttgtgctccgctactcaaatgtttatccagagccgaaggtatagagttaatgaaagaaatacatgcaggcctgtgtggatctcacattggatctaggccgttacttggaaaaattttccgccaaggattttattggccaaaggcagcttcggatgcagcagaattggttcaaaagtgcgaaggttgtcagaaatgtgcaaaagatcaaaaacaaccttcgtccttaacacagctcatacaacccacttggccattgcaaaggnggggccttgacttgntaggtccgttaccaccggcccaagggaacctgagatatgttata

SEQ ID NO: 50810 - DNA, 414 bp, Zea mays
  Clone ID: MRT4577_146332C.1
cccatacagggggcccggttaattaaaacatgttcagttttaggggggggggagaggcgagtttttacccctttttcatttgggtgggggccaattgttaaagattccaaactggtcccttagattcgaactaaaacaattccgccccaaactgggaggaaacttcccttcttgcacccccgggcgggggattgactttttttggagccctggaccccgtttacaggaactttttgtttgggggggctggatcctcgtcctggatttggaatttggggacaaagcccttttaaaccagggtggggaccggggggcccaaaaggcccacaacggggagggttgggggggtcccccggaaattgaacttggggtttttggggggggggttccacttttttatccaccggtttttgg

SEQ ID NO: 50811 - DNA, 371 bp, Zea mays
  Clone ID: MRT4577_146333C.1
tcgggtccacgcatacgtccgataacatccgctcgagtgggcgtgcataagccgatataatgcactctgcacggcacatggatgggctgatctccactgagatcacaggattcatggtgggtggcctgctgctcagctccagcatctctgctcccaaagtcgacggcttcatcgcttcctcccaaagaaggtcactagggatatgtaagaggtgcggtgaccttcggattgtaccatgtccgcagtgcaatggaacaggatcagctcggcgctgcgggatgctcactttgggcgtgcaggatgatctcgacgagtctcatgtagccgaagccactactgataatctggttccttgcacaaagtgcaggtcg

SEQ ID NO: 50812 - DNA, 365 bp, Zea mays
  Clone ID: MRT4577_146334C.1
acgtacgtatgacggtaaagacctttaccgacggaccacgaacgttgttgcaagctgtgtcggtaaaacttttaccgaccgaccgttgttttaccgacttatcttctgtcgctaaaagaaaagttttaccgacgcttcatcatttggtaataatagtattaccgactctctaagagttgcagctgccacgatgtaccgacccatcttctgtcgctaaaagagacattttatcaacgcttcatcagttggtaataatagtattaccgactctctaagagtcactaattgtgtagattaccgaccaacaattcgttgccgcagatattaccaaccaacaatccattgcattcatacaaatagataat

SEQ ID NO: 50813 - DNA, 428 bp, Zea mays
  Clone ID: MRT4577_146335C.1
ggtcaaccgctaaaaacattttgttttattaccacccggggatagcaaaaacagggggggaaaaaaacacaaattttcaaaccataaaaacctaaatcaagggataaacctaaaggggtaggacaaccatagagggggtacaaaactaccttttgccaaaaaaaaacttgtcaaaaaggtccccggggttttaaactgggggaaatgtttgtgccctggactcctaaacgctaaaatcaaagggctccttgaaactcataaaaattttaaccgtgtccagggaatttgcacccagttcaaaaaattttgattaaccgcaaactttaatatggtcagaaaaaacaagctgttttttaaaaatttaaaaaaccttggctgttgaatcctttttggcagcgcaggaaaaaaatctaattggcattggttgc

SEQ ID NO: 50814 - DNA, 305 bp, Zea mays
  Clone ID: MRT4577_146336C.1
ggccaatcccaaggtattgatcaccagaaccatttccgcttacaaatgcattatttgacaaattaatctacgggctattatttactatggagaggtttactatcttacgaaacagaccgcacagcttgccattagttgtcagatcccatgaaagggatcaagccggcaaaatgagaattaaaagattacaccgcccctcttttttgtatgagaaggacccatggtcactggcctcgagccgtcgtaagagagatcaacttcctggggtgaagggcgcgaccggaaggacatctactagcatattt

SEQ ID NO: 50815 - DNA, 371 bp, Zea mays
  Clone ID: MRT4577_146337C.1
gcaaaggattcagcacgccgcacgttgggaagggagcttcgaggcggaccatcatgccgcgtacgccgtgcggactgagccaatggcacgggccattgtggcgcgaacactctaacgtgggtcgtagctggctgcgagcaaaagcgcccagtgctatcttggattctcactcataggcgtgcaagcataatccgccacacggaagctcacagccactggcttataaaccaagcgcgatgaccaactgtgtgaagtaacggtgcctatcgagcgatgctgaaggactatcgtgacgccaccatcataaccggaaagctaacctggctcacgacggtctaaccacagcatacgctgcgtatgtgtgggtgcac

SEQ ID NO: 50816 - DNA, 528 bp, Zea mays
  Clone ID: MRT4577_146338C.1
tttttttttttttttttttttttttttttttttttttttttttttttttttttttttttttttttttttttttttttttttttttttccccaaaattaaccggaccccaaaaatgggcaaaaaacccgcccattatgggggaaagagggggttcccaaacccccccccccgcaaaaaataaaaatattttttttccaggcggccaaattctgacattggcccccctggggccccccaaccccggaaaccccaaccctcaaattctttcaatggcccaaattctggggggcggacaaaaaaaacgtcccttcccggaacccaacccccccgtttcccttgccccaccaagtctggcatggggaaaccattttttacccaaccctgacccctttgaaaatgggaaaccaggccccttcctttttccgaaaaaggtccaccccgcccccgttaagggccccaaaatttgccccccccacaaccccaaccatggttccccccaaaattttggcccccttgcccccaatcccc

SEQ ID NO: 50817 - DNA, 333 bp, Zea mays
  unsure (1)..(333): unsure at all n locations
  Clone ID: MRT4577_146339C.1
cccaaagtcacttgcttcacccaattataataataaatcactgccgcatgcatcattgccggaatccaaagctaaaagctgtttgcacaggccctttaacatgggggaatctaccgggccgggccaaccgatcggccggggtctttgttcccgttccaccagggcgaaaaaacacacacggggcccgcccctttgggccaccccccccccccccgggggggctcttaggggggggccacggtttccccnccttttccggactggtcgaacccgttggcgccgaacacggacggggcctctttaatggaggtcacggagcaggtttgctccatg

SEQ ID NO: 50818 - DNA, 1372 bp, Zea mays
  Clone ID: MRT4577_14633C.1
aaccccaaggccatgcgtggttttaataaaaagaaaaacagaaaataagcacatcctcctccatcaccaaattgacgattatatcgaaaatctggacggcggcggactcgattgtagcagcagccgccgggaacaagatggcggcggcgttgtcgcagctggacgacgagatcgtccgcggcatggccatcggcgctgtcttcaccgactatgccgggaagataaactgcctcgacttccaccgcaaggaagatctcctcgtcacttccagcgaggacgactccatccgcatgtacaacatcaccagcgcgacgttgttaaagactacatatcacaggaaacatggtgctgaccgtgtctgttttagtcatcatccaagttctatcttatgctcttcacgatacaacctagagtctgcagaatcacttcgttatctgtcattgtatgacaaccgttgcttaagatacttcaaaggacacaaagacagggtcgtttcattatgtatgtcgcctgtcaatgatagctttatgtcaggatcacttgatcacagtgtcagaatatgggatcttcgcgtaaatgcttgtcagggcatactaaggctgcgtggtagaccttctgtcgcatatgatcagcagggacttgtttttgctgtagcaatggaaggaggtgctattaagttatttgattcccggtcatatgacaagggtccatttgacactttcttggttggtggagatacagctgaagtttctgacatcaaatttagcaacgatggcaagtctatgcttttgacaacaactaacaaccatatatatgttctggatgcatatggaggggataagaggtgtggctttagtttagagccatctcccaatgtaacaaatgaagctgctttcactccagatggtcaatatgtaatttcaggatcaggtgatggaaccctgcacgcttggaacatcaatacagtacaagagcattgaagtgggcccctcgtcgagcgatgtttgcaactgcatcaactgccctaactttctggattcccaaccaatcgaattaggatcaggtgcatggagaaagaagggatgtgacttcatgtatgttaacgtagcaaatgttcatatcttgttcttttgtccaaaagatagatgccatgtatgaaatcacttcattaccatctacggaaacattgacatgtttccaggcagatacttgttgtagtgctcccttatttatatgtactatactaatacacctgcctgttaaattgttgtaacatagttctaggcagatacttgtagtgcctccttccttattttattttatgtacacttgcctgttaaaataagagaaaagaataaaaaaaatataaagg

SEQ ID NO: 50819 - DNA, 1086 bp, Zea mays
  Clone ID: MRT4577_146340C.1
gggggtacacctcgaggctctgccgtcttcttgccctggcttgtccagttccggaaggcgggcattgcccggtgaggcgtggacagagaccggcaagtcagagatcggcaatagtgagctccagcaggagcctacttgtactccttatttacccgttttaaggttcccttcttcgtgctgttcctcgtcttccttcgtttcttcttgtctgttccctcctgccccagagctgtaccggtgagagcagaagatttcagtagaaagtcctgctttctggagacagtttcagtgtttggttttggaatacgctactgtgatttgctcgtggttaaaaaaaaaaaaaaaaaaaaaaaaaagggccggcaagcctttcgctgcatcaacacctgccgactgctgcaggcaagtaaaggtactcctctcctcccctctgctgcagtcctctgcccgctgcagatcatggaggaggaagcatggcaggagtgtctgcatgggtcctgagagtcgcgtgagcagcgaagcagttcacggatggttggatggagggcaatgaccagctgctgagctgctgctgctcctcctggtcgaccatcagtttgtatttgtccatgcctcgtgtagccggccgtcttcttgccctggcttgtccagttccggaaggcgggcaggcccggtgaggcgtggacagagaccggcaagtcagagatcggcaatagtgagctccagcaggagcctacttgtactccttatttacccgttttaaggttcccttcttcgtgctgttcctcgtcttccttcgtttcttcttgtctgttccctcctgccccagagctgtaccggtgagagcagaagatttcagtagaaagtcctgctttctggagacagtttcagtgtttggttttggaatacgctactgtgatttgctcgtggttatctcccctcgtacagataacagatagcttgtggctttttatttgtgctgtcgttttatttgtgcttcggatctgcaatcatgtttgatctacttttgaaaggacgcgatgactgttgtcctattttaagcgaaaaaaaaaaaaaaaagcggcc

SEQ ID NO: 50820 - DNA, 363 bp, Zea mays
  Clone ID: MRT4577_146341C.1
gggacctggctgcggaataccgaaatgttggttgctgtgatgggcccaagagagattctaccacagttggaaaggcacggcaggaggaacttaccgacgacggtctcggcaatcaggcaccgcctgagaaaatggtggccaagccaaagaaagggacgcattggcagaccctgagctggacatcgcatcagaggctcccgatttaaggaggcacttaagcccaaaatgaggactgccaggttctgatcctcacagcgctgctgatgtctcctggaccggaggagaaagagctgccgacatcatttggtaccagggaatcgtacctggcgaccaaaccggagattgatgctgcatggctatgca

SEQ ID NO: 50821 - DNA, 1023 bp, Zea mays
  Clone ID: MRT4577_146342C.1
gaatgggagaattgtcgaggcgggcgagggccgaggctgtgtcgctgcatcaacacctgccgactgctgcaggcaagtaaaggtactcctctcctcccctctgctgcagtcctctgcccgctgcagatcatggaggaggaagcatggcaggagtgtctgcatgggtcctgagagtcgcgtgagcagcgaagcatgttcacggatggttggatggagggcaatgaccagctgctgagctgctgctgctcctcctggtcgaccatcagtttgtatttgtccatgcctcgtgtagccggccggcccgggacagagagcctttcgctgcatcaacacctgccgactgctgcaggcaagtaaaggtactcctctcctcccctctgctgcagtcctctgcccgctgcagatcatggaggaggaagcatggcaggagtgtctgcatgggtcctgagagtcgcgtgagcagcgaagcagttcacggatggttggatggagggcaatgaccagctgctgagctgctgctgctcctcctggtcgaccatcagtttgtatttgtccatgcctcgtgtagccggccgtcttcttgccctggcttgtccagttccggaaggcgggcaagcccggtgaggcgtggacagagaccggcaagtcagagatcggcaatagtgagctccagcaggagcctacttgtactccttatttacccgttttaaggttcccttcttcgtgctgttcctcgtcttccttcgtttcttcttgtctgttccctcctgccccagagctgtaccggtgagagcagaagatttcagtagaaagtcctgctttctggagacagtttcagtgtttggttttggaatacgctactgtgatttgctcgtggttatctcccctcgtacagataacagatagcttgtggcaaaaaaaaaaaaaaaaaggcccctagggccaaaaacccctccccctccccgcgtcctcctcccgcaccgtcgcggcgcagtgacggcgccccaagaaacgccgaaccca

SEQ ID NO: 50822 - DNA, 1049 bp, Zea mays
  Clone ID: MRT4577_146343C.1
ccgggaacaagcatactacacacccctcctccctccccatccttcataagctctcatacgtctctctctctctcccttcttcaaaacaccccaccccatccaaaacctagaacacacacaacaccagagggctttacaaccgcgcacatgatcatgcaggcaatgtggaagccaggatggctagaggcccttgacacacagaagttcttcgtagcatgctctttccatgagcatgccaagaagaacgagaagaacatctgttgccttgactgctgcactagcatctgcccacactgtgtggcagcacaccgtgcacacaggctcctgcaggtgcggcgatacgtctaccatgacgttgtccggctggaggacctggagaagcttattgattgctctagtgttcagtcttatactattaacagctctaaggttgttttcctgaagaagagaccacagaataggcaattcaagggttcagggaatatctgcacctcctgcgacaggagccttcaagaaccgtatttccactgctctctggattgcaaggtagagtatatactacgacagaagaaaaaattgtcagcatatttgcgcccatgcaagaccttgcagcttggccctgatttcttcattcctcatgatgctgatgacgacacaactcactcaacccttgttgatgttgatgagcccatgggatcatcggactcggagaatttgagtgtgccgtgcacaaattttgttcggaaaaaacggagtggaccatatatttgtgcacggtctgcaaacagagtgtctgaagaagacatggccacaaatatgagcagaaggaaaggggttcctcagagatcgcctttgtgctaataaattcaatagttaattattttcccttttctttacttctttcatgttctttatctcttggactaaactggtgcaacaatgatagaattttgtctcagtactaccatgtgattaaaatacatcactagaggcaattgtactcaattcttcaagttggtgcaccagtttatatatatgtatgctttaat

SEQ ID NO: 50823 - DNA, 595 bp, Zea mays
  unsure (1)..(595): unsure at all n locations
  Clone ID: MRT4577_146344C.1
gtaccctngcgggcctgccgggatggcctttccacattttctggttatattttggatattattcagttcaaatgtttgcatgctaaggttgactcttcccagttcatttgcccaaaatgctcatatttgaactagtacatttaattcattagttgatatgaatcttagtagcatcttatgttctcctgataccagtgtgctacaattttcattggtcttatttttaaaaacatcaattgaaaatttattgtcttgtttttttaagagcattgttcatttcagtgtgatatgcttttagttcctcatgtgctctaggctttctaccgttgtcttgatcacttttatgaattggtcctttctgtacctttgtacttggatcggacaatggacttgtgtagcattaacccattgtctcattccacatggttcatctttgtttggttgctggtccaaaataacttagaatatgaatacagtttgacatgctttgaggctagagactctttgcccaattctgtcaggtatgctgcattgcccacattgcagaagaatcataggcacgcttttactcctctgttcttgaccagctaatcct

SEQ ID NO: 50824 - DNA, 752 bp, Zea mays
  unsure (1)..(752): unsure at all n locations
  Clone ID: MRT4577_146345C.1
ccggccgggcaagacaacttcaaagccaacaactacactgttgaaggccgacccgctccccagttctattcatctgagaagactgacatcaacaacttcactgttgacgaccgctcctctcgccctcagtacaaccacaccgagaagaccgaaatcaacaacttcactgttgacagccgatcttcccgtcctcaatacaacacctgtgagaagactgagatcaacaatttcactgttgacacccgctcttcccagcctcggtaccgcgacagcaagacaacccaagtcaacacttactccgttgacaagcccgtttctcgtccatcttacaagaaggacgtgagatttaccgaaaaaaccgtcgaatcttcaaagtccgacaacaagtccaagatgggttactacgacgacgagggttctttccgcaacggcggcatccacaagcttggtgacaagtctcgcgagatcgagattgacatccgcgagacttctggccctgccagctctcccaacaccgtcagcatcccctgccaccacatcncgcctgggtgacttccttatgcttcagggccgcccctgccaggtcatccgcatctctacctcctctgccactggccagtaccgcctaccnttggtgtcgacctcttcaccaagcagcnttcacgaggagtcctctttcatctccaaccctgccccccagcggttgtcgttcagtccatgctcggncctgttctcaagcagtaccgtgtcct

SEQ ID NO: 50825 - DNA, 1211 bp, Zea mays
  Clone ID: MRT4577_146346C.1
tgggatgctcccctcggggccggccgggccggccaaagaaagcccagaccaaagcagagctgcttgcttctccacgccttgtgcttccacagagcaaccagttctcagaagcaatgtccgcacccctggtggacgccgagtacatggccgagatcgagagggcacggcgggacctccgcgctctcgtcgccagcaagaactgcgcgccgatcatgctccgcctcgcgtggcacgacgccggcacttacgacgccaagaccaacacaggaggccccaacggctccataaggttcccacaggagtacagccactcttcaaacgcagggatcaagatcgccattgacctcttagagcctgtgaagcagaagcaccccaagatcacatacgcagacctgtatcagctcgccggagttgtcgccgtcgaagtcactggtggaccgaccgttgacttcgtccctgggaggaaggattcttcgatttgtccagaggaaggacgcttgccggatgctagaagaggtgcttcgcatctcagacaagtattctaccggatgggtttatcagacagggacattgtggcgctctccggcggccatactctggggagagcgcatcgagagaggacagggtttgatggcccatggactagggatcctctgaaatttgacaactcttatttccttgagcttctgaaaggcgactctgaagggctcttgaaactccctactgacaaggttcttgtggaagatcctgaattccgtcagcatgtccaactatatgccaaggatgaagatgcatttttcagggactacgcggagtcacacaagaagctgtcagagctaggcttcaccccccctcgctcttgtctctcatccagatctgcgaataaacacaagtcgttgctggtgcaagctgcagctgggctcgcagttgctaccgcagttgtcgcatgggcgtacctgtgcgaatccaacaacaagttcatctaacttacgcttaccgttagtacaaatacaaattggagtcgccaaaatatttcagttctgtgcacatgtatttgcatctacatattgatataataccaagcatgttatgtgttgtgaaaaaaaaaaaaaaaaagaatggacgctctagaggactaaaaataagggcaaaagaagaagatagaaaaaaaaaaaaaaaaaaaaaaaaaaaaaaaaaaaaaataagaaaaa

SEQ ID NO: 50826 - DNA, 716 bp, Zea mays
  unsure (1)..(716): unsure at all n locations
  Clone ID: MRT4577_146347C.1
gactctaaacgccactcgggtccgtggtccggcgcctccgcgccgtgtcgatccggccgacgaacggcggtcccctcccctcctgcgcagcagccggggccgctacttccagccggcttcctctggcgtacaacccctactcctctcaggtccagccctccggctccaccccgcccttctcatccggacctagggtttgtgcgaccctgcgagctccgtccccgctctccccgctccacccagtcgcgggcgtaccagccgcctccccgagccgttcgagcacaggcctcctcgcagaggcacctgttgccgcccccgccgccgccaagcacgagacgtctccttgttgtgggcctgctcacgggcgaacacagggaagcgtgccgcaagtgaagaggggcgcagggggagacaggggcatgacggagaggcagtacgaccacttggtcgccggtcgccatcggtgtcatctgccaggagagggagcagaacaggctgtttctagctaaatccaaggaattggtgcaatatcaggtcatggaggngagtaagaacatgcaagagtcagacactgcatctgttgtcaaagtatccagngagcctgttatcattatcaatggtgtcccagacttgcctccctgattcgcatctggttcacaacctgcagtaagagacgctcagggatctcgagttgatcatcgctttggtgaatggct

SEQ ID NO: 50827 - DNA, 208 bp, Zea mays
  Clone ID: MRT4577_146348C.1
gggaaaccaagcaacaacttggcttaacttttttggggacatatgccccaatttccggggttatgaaaccggtcagcccttcattgggaaaacccggggggcttactccaacagggggcgggaccccaagaacacaacggtgggggggggtttctaacgggaaaacaaaccggccaagggggaaaaacaaatcgggcccggggggccc

SEQ ID NO: 50828 - DNA, 2474 bp, Zea mays
  Clone ID: MRT4577_146349C.1
gcggacttgttccacgatgcgagagacaataaagccaacgtgagagtgagatcggaggaaggaaacttggtcgcctcgaggccggccgggactcggtcgccagcctagcagccagctaccgcatctccgggcgttgcacttgcacagggcggcctccatagttccatactacgaacatgcccaactgtccgctgggtctgggtcagacagaatctgccacccaccccacctcctagtctcccgccgcggccctctggtcagaggcccacatagatagaggggaaccagcacacgcagacgcaggaagccaagtcgcctgacttgcgtcttcttgcttcctcctgtgccgtgtttcatttctttgacacaacgacgtccgggcagccgcctcctgtcgccagttcgccactctctggttgctgcacgcctctagtcggcggggccaagaggtggaaaagggcaggatgaagtccggcgagcggccgaagcagatgcggggcgtccggcaggaatctcggcggttccggcttctggtcatcgtcgccggcttcttcctcgtctccctgaccttcgtcgtcatctccaagcccgattccatcctgtccagcctgaacggcaagctgccggtggaccaggcgccgacgtccatcctgatccagcagaaggttaactcgccccccgccaccgcacttgagacctccaccgacgcactgcgtggagaccctagagtggtcgatgacgaagccgatccaagaccacaggggttcaagggcgaggaggaagagagccgggtactgagcgagccggacgcgaccagcgggatgacggagctgacccccgacaaggacggcagcggccgtaaatccaacgaggaggtgctaggcggcggaggtgacggcgaggggaaaagtaaggaggaccgcggccacgggccggagaagcataaagtgacgctcccaaccgtttccaactacactattcatgacaccgaggacacccaaaatgccaagcaagacgatacaagtaatgaccagcaggggagcaagcccctgtgcgacttctcaaatttcagagcaaacgtgtgcgagatgcgtggtgacgttagagttcacccaaatgctgcatcaatcatgttcatggagcctgggcattcgcagagagatgagctgtggaaaatcaagccgtaccctcggaaaggggacgagttctgccttagccatatcacggagctgacggtgaaatcaagcaaagtggcccccgagtgcagcaagtaccatgacgtgcctgctgtgatcttttccctgacaggctacactggaaatctgttccacgacttcactgacgtgatggtccctcttttcacgacagcaagcgagttcaacggagaagtccagttccttataacggacatggcgctctggtggacaatcaagtaccataccgttcttgagaaactgtccaagtaccctgtgatcgatttcagcaaggacggcgaggtgcactgcttcaagcatgtcatcgtcggcctgcatgcctacatggagttcacgatagactcgtccaaggctccgcacaactactcgatggttgactttaacagattcatgcgcggcgcttactcgctgggcagggacagtgtcaccgtgctgggagagtaccctaaggtgaagcctaggctgctcatcatcaagaggcaccgcacaaggatgttcctcaacctggacgagatcattgcaatggctgaggagctcggctttgaggtggtcatcgacgaggccaacgtgagctctgatatctccaagttcgcggcgctggtgaacacggtggacgttatgatgggcgtccatggagctgggctcacaaactgcgtgttcttgccgcagaacgccacgctgatccagattgtgccgtggggagggttggaatgggtgtcccgcaccgacttcggcaaccccgcggagctgatggggctgcactacaagcagtacagcatcggcgtgcacgagagcagcctcacggagcagtacccgagcgaccatgagatcttcaagaaccccatttctttccacaagaaagggtttgacttcatcaggcagaccttcatggacaagcagaacgtgaagctggactgcaagaggttcaggcctattctgttggaggcactggacaacctcaacgcgtaagaccgtaaaagcttgtgcttgtgctcaattggtactgggcatggcaatagagattccttcctgtatacaattccttcttttttttttacaattcgttccttttagtaaaatctattgttcgttctgtccctccctgagaaggttcgcattgtggaaaatttaggagaaattggcttataaaagttgttgtatacacactgtataaattgctgccactgcatagctttcgttctaatcaatcatacatagctcccgttccaggaaaaaaaatagtaaaaaagcggccggcga

SEQ ID NO: 50829 - DNA, 593 bp, Zea mays
  Clone ID: MRT4577_14634C.1
aattcggcacgagggttctggatgcatatggaggggataagaggtgtggctttagtttagagccgcctcccaatgtaacaaatgaagctgctttcactccagatggtcaatatgtaatttcaggatcaggtgatggaaccctgcacgcttggaacatcaatacagtacaagagattgcttgttggaacagtcacattggtccgattacagcattgaagtgggcccctcgtcgagcgatgtttgcaactgcatcaactgccctaactttctggattcccaaccaatcgaattaggatcaggtgcatggagaaagaagggatgtgacttcatgtatgttaacgtagcaaatgttcatatcttgttcttttgtccaaaagatagatgccatgtatgaaatcacttcattaccatctacggaaacattgacatgtttccaggcagatacttgttgtagtgctcccttatttatatgtactatactaatacacctgcctgttaaattgttgtaacatagttctaggcagatacttgtagtgcctccttccttattttattttatgtacacttgcctgttaaattatcgtgttcttgaa

SEQ ID NO: 50830 - DNA, 381 bp, Zea mays
  Clone ID: MRT4577_146350C.1
cagagaagattcaaatattattcatagatagacttaatcataaacccacaattcatcggtctcaacaaacacagcgcaaaaagaagattacatcgaatagatctccacaagagagggggagaactttgtattgagatccaaaaagagagaagaagccatctagctactaactatggacccgaaggtctgaggtaaactactcacactttatcggagaggctatgatgatgtagaagccctccgtgatgacgggcctctccggcggagctccggaacaggccccaagatgggatcttgtggatacagaaagttgcggcggtggaattaggtttttggctcctgttctgattgtttgggggtacgtaagtatatataggagga

SEQ ID NO: 50831 - DNA, 181 bp, Zea mays
  Clone ID: MRT4577_146351C.1
cgcgccgcggcggagccgacagagccgcaggcacaacgcgagggacgagcagcccggggaacgacgaggaagagaaccacgaagagcggggcccacgcgataccgacgcaccccgacacggaagagcacggccgaccccgaaggcaacagagccgacccgcaccccaccgaaaaagcgaaa

SEQ ID NO: 50832 - DNA, 320 bp, Zea mays
  Clone ID: MRT4577_146352C.1
atcacaacgtcatttctattttattatcatagaaaaatagaaatgatttcagattacatgtgtaccttcggattgcaggaaggcaaaagtataaggatgacgcaaaagcaaatgccaagtcagtgtgaacagtacgggagtactgttcatctatttataggcgggggacgcagctcatgtaaaattacattcatgtccattacatttgctaatgacttatgggaatctattaaggcctaagtagtcttttcatctttaaggcgggtcccttttctgctatcgtgacgaagctttctgcgcatagcttcggccatgcacca

SEQ ID NO: 50833 - DNA, 184 bp, Zea mays
  Clone ID: MRT4577_146353C.1
tgtttctcctccggtcccgtccgtctgccccggtgtagcgtcgcaccgtgctcgcttggttggggatggccgcgggtgggtggttggttgggtcgctccggtttctctggctggagacgttgccccccgccacggtttggttggcgcgctgttcccccggcaggtcggggtcgccgtcggctcg

SEQ ID NO: 50834 - DNA, 194 bp, Zea mays
  Clone ID: MRT4577_146354C.1
ctataaggaaagctgacagcacatgcaggaagcgttaacgactttgcccgttgcccgaaacattgtgtttatacactctatcccgaaagtaagttcatatatacttaaggggctccgctgcaagtataacctgacaaggatagaatgggttgatattatcggatattacaatgaccattatgggaccgaggttg

SEQ ID NO: 50835 - DNA, 355 bp, Zea mays
  Clone ID: MRT4577_146355C.1
atttttcttagtgcatttttagcgttttctggccttttttaagaagaaagcccggtattagaaaaaggaaaagccttctatcccagaccgatgaagctacatcctagccaagaaaaaaaaatgcctccatcgtggtgctgcctagctaggcacaccaacacgtccatgcttcatcaaagccttaatttcgcgcattgaaaaaaaagcatgaaaagctcgcgagggtatatgtttttttttatgcccacgaaatgctgcaaaagctggaaccggactaaaaatttctgcagctctggatggggtaattgttgaaaggacccaccggcctggaccttctacaacaaatactgaaaaa

SEQ ID NO: 50836 - DNA, 267 bp, Zea mays
  Clone ID: MRT4577_146356C.1
ccaaaatttatgaccggagaatgacgcagtgccttcgaggaaaggccgccgacgaggactcccggtcgaaggcgctgcaactcgacaagttacacgatatgggtggagcatgatctgcatcatcctcccaacaaattactcaagatctaccacctataacagacggggcaacagctcttgtgtgtcatcgaagccacagtcgactccgacctgaccttctaaaccgcgatgttaaagtgctatccattgtaccaggctaacaacact

SEQ ID NO: 50837 - DNA, 320 bp, Zea mays
  Clone ID: MRT4577_146357C.1
cagatcttgtatttacggtctcacaaagttacagtttcagggttattgcagtgcatctgtagaatattacaacacagtggtgacttgctctcgcgtaaaggctcctgagagcgagcgatcagcaagccggcctgctgtcgctgctcgctcaggggaaagaagatcacacagatgcaaaatgagagctcaaaaagaagccgtcgtctagcagcgaaagcagcaatagccactttcaccattctccttacattaattcgtatttctctttgtctacgatcgttcacacaaacacttactctatatatacgcagttcttataa

SEQ ID NO: 50838 - DNA, 289 bp, Zea mays
  unsure (1)..(289): unsure at all n locations
  Clone ID: MRT4577_146358C.1
gacccacgcgttcggtatnctctggccattctctctcctggaagccgcctcggtcggacccggacaagaatggccgccttcttcggtgctggaccgccggcgggtttcgcttcggttcgccacgaggaagaagaggagccacatccggacgcccgccgaagaggtggacccaccggaccaagtccattattggcaaccgggacagccccggccacaggggcgcccggcaaaggaaactgtgccccaaggggccctggggccccccccaggacccccaactcaaagagct

SEQ ID NO: 50839 - DNA, 183 bp, Zea mays
  Clone ID: MRT4577_146359C.1
ccgcagatcagtgctgacatgcgtcttcatactcgtctatctccgcgactctaagcgtctctcatttcctacagctgtcgctgcagcttcacatcattccgtcgacaccatgattgagtatatctcgactcacgtagtacaagtcgttatctatgtcggtaacgactcctagcagatctactg

SEQ ID NO: 50840 - DNA, 232 bp, Zea mays
  Clone ID: MRT4577_14635C.1
ggttgttaagacgaaggggatgctatgactcacattgattgaaaacggacaactgagtaccgggtaacaaaaggttgtgcgaaacacaacctttaactgatgcccgttctattgtgcactggtgaacgagagctatggactgtcatgagatactaatggcattggatcttcagctcgccggtggtagactacggttccgaaaagcgccacacatctgatcagcaccaaaaag

SEQ ID NO: 50841 - DNA, 570 bp, Zea mays
  unsure (1)..(570): unsure at all n locations
  Clone ID: MRT4577_146360C.1
atattcaaggcagttcagctaacactcatggcactcattacgatgaccgtctttctccggaccaatatgcatcgtgactcaatatcagatggaaggatatacatgggtgccctgttctttggggtcctgatggtcatgttcaatggactggcagaagttggcctaactattgcaaagctcccagttttcttcaagcaaagggatcttctcttctaccctgcatggacatactccttaccatcatggatcattaagactcccctctccttgctcaatgtaacaatttgggttttcataacatactatgttattggatttgatcccaacgtagaaagactttttagacagttcctgctcctcttactaatgaacgaggcatcatcaggattgttccgtttcattgctgggcttgcaaggcatcaggttgttgcaagcacccttggntcattcggcattctgatatgtatgcttttgggtggattcctcctggcaagagagaatgtgaagaaatggtggatttgggggtactggatatcacccctgatgtatgcacaaaacgccatatcagga

SEQ ID NO: 50842 - DNA, 289 bp, Zea mays
  Clone ID: MRT4577_146361C.1
cttgatgcgttcgtacctgtccaccatcccggtgaccggcaccggcatcaacccggccaggagcctgggcgccgccgtcgtctacaacaaggacaagccatgggatgaccactggattttctgggagggcccgctcctgggcgctgttttttttgccttctgggaccaaaacatgctccgggcgggcgccatttttttctaagctccttcccgagcaacgcgtgatgatcacacctaacgacacgccttggctggactgaatgctggcccagcggttatcgatcgacct

SEQ ID NO: 50843 - DNA, 223 bp, Zea mays
  Clone ID: MRT4577_146363C.1
tcgacccacgcggccggtggctcagctatgtgcctatgtcgcccttctccttcctcttggagtcccatctgtcggaccatagctcgtatgctggctcctgcttgttgcttaggcgttctaggtcaggtgagcagcactggcagcaatggccaaggagtattactactaggacgtgatcggcatatgccccgacgcatccgactaagatatccgcagggcctac

SEQ ID NO: 50844 - DNA, 155 bp, Zea mays
  Clone ID: MRT4577_146364C.1
aggacgcgtcggtcactccgttcagtggatctcgcatgagtccttgggtggggctgtctatgccgagttcggacactggggcctatttcatcttacggggttctcagtcgggaagtgctgttctctcttcatcctctcgctgctgagtattgcag

SEQ ID NO: 50845 - DNA, 214 bp, Zea mays
  Clone ID: MRT4577_146365C.1
tctttcggattaatacttcaagtttctgacttgacaaagtgatgcttgtaataaaaaaatttctggggttgaaaatcaaataattatcggacgacattatgtatattactccatgttccattaaaacactcaaggggttatttatattatccggattctaaatatcgtaaccacttctaattttcaaattgggggttaccaaaattattcccaa

SEQ ID NO: 50846 - DNA, 653 bp, Zea mays
  unsure (1)..(653): unsure at all n locations
  Clone ID: MRT4577_146366C.1
ttgggaccctcgaggccggccgggnaatctttctaagaggagatgacgaacgacgacggttgttcagacaactgttacacttacgacgaataaaaaatcccccgcgccccactgagtttccccccatctcttatttccaaaacgggaaactgggttgacgttgactacaatcccgaggccgtggttgccctcagggccaaaagggcgttcgctaagttctcctactgcggggccgactttgacaagctcttcaacctgggttcggaggagttcaggaacatggccttcccccgatcccgcaataggttgaaccgatgtctcaagccaaggccctgggggttcttctagaagtttggaaagtccaagcagggggcccgccccaaagaaatgcccaacctcgtgaagacccccctccgcgacaggatcgtatcccccgagatgattgcaagctttatcgtcgtctattccggaaaggagttcaccaagatccaaatcaagcccgagatggccgtgcactacctcgcaaatgtcccaatttcttacagcccagccagaggcgaaaggcccgaaattggtgccattattttttccagtttgatccctcacaagtaaactactgggacaaggttgcatgggttctttagggggggggc

SEQ ID NO: 50847 - DNA, 506 bp, Zea mays
  Clone ID: MRT4577_146367C.1
ccagcattgacctgtgaaccagaccagaccccagccgctgatgcggacgaagaggcgcccgagggggaaaggctctcccaaacgtgcatcacgactagttagaccactacaagggcgcctgcggtgccgatgatgatggtcctgctgatacaaaagagctaacagaaaccgaccagtaaccagattcaaatgagtgagaccagaagttctgttaatgcaaaaagagcgatgcgaaaacaaacccaactaataaacctacgatgttagttcaatatgagtcaaggtgagaactcataggtggctaacaggactgagactgcccaaaccatgatagcatgttgatgctgctgctagtgccattgagacagacgttgacttccatacagccactgtagatgatgttgttacgcaatagctgacccattacgaaatggaccttattgacagagatgctgatgtgaagcacattatagaacatctaattaatagcttgtgttactatgaag

SEQ ID NO: 50848 - DNA, 216 bp, Zea mays
  Clone ID: MRT4577_146368C.1
ttcgacccgcgcgtgcgagaccccaggcgccgccggtcactcgcaatccatcaatcgccggaaaactaacccttaactttgtctggagcctgcgaggtggacaaaaaccccgtcatgggcggtccccacataaaccttaaggccaagggccaggatggcatttaggtgagctttagagtaaaaaggtccacccggttggaaaagctgatggaaccc

SEQ ID NO: 50849 - DNA, 209 bp, Zea mays
  Clone ID: MRT4577_146369C.1
ggtacctaggaaagcagaatgaaagaccattagttatttattctaagtctgtacacaaggacacattttttaccgtatggttttcccatatagattcaagtcttcataaaatttttcaaacatgcactataacaaatgagaaaagcatttattaaaactctcccttatgcatttttttttttggaacctttgttctgcattaacatgtc

SEQ ID NO: 50850 - DNA, 473 bp, Zea mays
  Clone ID: MRT4577_14636C.1
gcagttcttcgttgcaatagaacaattgtgttttccgaatctaatgcatgtgtcatgggctgagtatccccggacagcagggccttgactacgcagttcgtagtcacgacccgtcttctccggcaaggttttgcccctcagccgcaggctccttggtgatgtcgtcaacatcatcttcctcgatgccctccaggaggaacagccgctggcagacacggttgtgaccccgggtgtacttctcgtcgcagttgtagcagaggcctttgcggcgccgctcctcttgctccgcctgggtgagtcgcttgatctggcagccctcgacggagatcatcgtgggtgctgctgctcggggacctagcggcgccgacagaggccgtggcggggcccgggatatcggggcggcgtactgctcacgcggctggaattgcctggccaggctcatggtggctgccaggtactgtgggttctggatg

SEQ ID NO: 50851 - DNA, 465 bp, Zea mays
  unsure (1)..(465): unsure at all n locations
  Clone ID: MRT4577_146370C.1
cggaggggggggggggttttataacatcacccattggggcgtttcctaatcttcgaaaaaacaaccttttttccgaacatacttaaaaaaggggcaacacttgccgtcccctaaaatactctacatcccacaaaccaaatccaantttcccacttgaggggggggagaccccccttttttttctggaagggtacattcccaaatacaaacaaccctccgctccaagcgaacccacaccttattttctttctttcccgcatctccccaactaccccacccccatattttatcccaactaactaaaacaatactcacttgtcgcgcagaaatccacccccggtataggtccttgaataattacaccttcctcttaccgcccccttcatatgtgtggcaaacccccccaaaacgaaattatttttacagtcgacatatgtttctaacaaacccaaaaccttacttaaa

SEQ ID NO: 50852 - DNA, 545 bp, Zea mays
  unsure (1)..(545): unsure at all n locations
  Clone ID: MRT4577_146371C.1
tttttttgtccggataaattcaaacatctccagtttcagtaattgaaaagactagtcattacaccttgttgatttggctcaggcccgcttattcaggattgcaaatcgcttcatcagattcagacttacacaataccgctgcaaactgagtagaaactcccgttctcgtagccccggtcggggtatcgacgtcttctggcgccctggacgccggttcacgggaacttcctgtttggccgtcctgcgtgctggtcctgcgtttggaatttgtgggcgatgcccttgttgactaggatgggggcagcgcggccgcttaggcctgcccccgcttggctgtggcgggtcctgcggtagttgaactcgcggttctcccgggcggcgttccgctctcttctccgccggttgttgttgccctacttggcgtcgcccctctcctgcttgcctccttcggtccgtcnntgggatatgtgtgcttggtgttgtggagaccgtgggcgtgtttcgctgtctcgtgggtcttccctggtttttcgggccggtgcctg

SEQ ID NO: 50853 - DNA, 1293 bp, Zea mays
  Clone ID: MRT4577_146372C.1
caattggctactgtctttttcacattttcccttggcactaagactcactactatggaagaatgttgcttcatggaggtgctcagtacagaggtactggcaggggatttgtcgtctttcatgctaagtttgcagagaattatagactctattctcgcagccactttgttaaagggattgagctgatgattctgctcattgtataccaactatttggtcaatcttatcgctcaacaattgcctatatttttattaccttctctatgtggcttctggtattgacatggctatttgcaccctttctgttcaacccctcgggatttgagtgggcaaaaattgttgatgattggtctgattggaacaagtggatcagcaatcgtggtgggattggtgtgtcaccagacaagagctgggaatcttggtgggaagtggagcaggatcatctaaaatattcaggaacaataggacgctttgttgagataatcttggctatacgttttttcatataccagtatggccttgtttaccacttacatgtcacacataacaaaagcatcttggtatatttaatttcttggctcgtaattgtggcggttctgctcgttatgaagactgtgtcggtgggaaggcggacattcagtgcagatttccagctattcttccgtctgatcaagtttttgatatttgttgctttcattgctattttgattgtcttgatagtattacttcatatgacctttcgcgatatatttgtgtgctttctagcattcttgcccacaggatgggggatacttctgattgcacaagcttgcaagcctcttgctcgacatgtaggattatggggatctgttcgtgcccttgcacgggcctatgagataattatgggggtgcttctctttagtccagttgctatattggcatggttcccctttgtgtccgagttccaaacgcggatgctgtttaatcaagcgttcagtagaggactgcaaatttctcgaattcttggtggtcaaaagaaggaacgctccgctcgtaacaaagattgattagtcttctttcatgtgtgttccaatatgcacttgtaaatatttgttactgtctcacggggtatagtgtgtttttatgattacaatatgtaaatatcagatcaaggtgtcataattgtattcgttagattactgtgtgtgtttctattgtaatagtctttgatccagcacatgtacttttactacatatatacgcaaagtctactctaatcagggtttcccaccaaaaaaaaaaaacacgcggccccc

SEQ ID NO: 50854 - DNA, 274 bp, Zea mays
  Clone ID: MRT4577_146373C.1
ggaccgtggcggctatgccgtgctgtttggtttcctacaccacctatttagcccatcaatgtatctacttgctcgctggtcgcactcgtctcgtcaagcgcacactttcagcccatcaatgtatctacttgctcgttggtcgcactcgtctcgtcaagcggctctgttgtccatttgttcatgttgtcgctgttcggacctgtcattataactcggtcgcgcggcaagttaacaacctccttcgctaagctgctgctcgcggatggaccggaaa

SEQ ID NO: 50855 - DNA, 607 bp, Zea mays
  Clone ID: MRT4577_146374C.1
gttccccatctttaaatattaatagagctccgcagagatctggggggggggggggggggcacccactacctaccacaagtgtggcacgtgcagtagctaggacgtcaggacggtacggagactgcgcggcacattccgcggggcaccccccctcgaacccgcccggtcgggaaccacccgtcgcaccgaggaggtggcagtcgcgacgtcgtagaggttcagtagacaccggcgaagggttaccagtccattgtgccgggggtactaacacgtacgagtacgttgccttgctgacttaacgtaaattggatcgtcaggcgaaggccggaaggctgcggaggttcacggcgcaacgtccccgaaggcacgacaatctaaacgaggtcagttataaaaatcgaacaagtgagagaaggaagaaagtactaccaccttcgttagatagatatggaaggagaaggttaagagagaggaggaagagaagaaagactagaggatcgtagaggaggaaagaacagaagaggacaaaatggcaaagaaaggtacgagagtaaaagaaaagaaggttaatagtaatagtactttagatcacgtgcaactttacaat

SEQ ID NO: 50856 - DNA, 254 bp, Zea mays
  Clone ID: MRT4577_146375C.1
tttttggaacctgcacagaaagagttacgagccccttgcacattggacctttactcttctagacatcacagacagcaggtgttgtacgtgaacatcttcaacaagatagtgctacctcatctagagtgcgtgctctgcgctagtggactcaaccatggttacgctagctaaaacatacgatacagatgacggacgcctgcttggagccattctttatggccgatctgacaatattcaggtagagctggcactga

SEQ ID NO: 50857 - DNA, 490 bp, Zea mays
  Clone ID: MRT4577_146376C.1
tttcaaccaacattatgaaatgtcattcatgacgcaggttcagatgacacggtttagaactctaccaggctaccactgcccataggctaaaatgctcctatagttcttacaatgaattgaacaaacattccatctacatttcacacaaatagcactgcaagtgagccagaactttgcgcctgatactgcgagctgctgcgcaagacttaactagatcaaagcgtacagaagcacctagtaactggtgcagagcacttgaacagcaaacaaattagctttttttttaatctaagagactaaagcaaatcttataagaataatagtaccgaacaaactaccacttccactgtgctaccagaacagcataattttggggaataagtgctcgaatcgttgttgggaaatatcaacaggtacgggagccaacaaatattccccattttgaagcgacccatgcagcacgaggagaaattcggacaagatagcccca

SEQ ID NO: 50858 - DNA, 255 bp, Zea mays
  Clone ID: MRT4577_146377C.1
agaatgagggccgcggtgattacgtgcgccgactgacacggtaggtgctggaggcgcggtaggtgtatgaccatcccgagctctgcgaacgagacgtgctcatttgaggtcatccgccggagcgtcaattgcgctgacaccttgcaggagatgtgccactaccctgcgggtgtcggctcgtgctcttacccgaggatcgagtgcttccgctccatcctggcgctcagctccaacatcccctccttctggtgccgc

SEQ ID NO: 50859 - DNA, 845 bp, Zea mays
  unsure (1)..(845): unsure at all n locations
  Clone ID: MRT4577_146378C.1
tgggtaccctngcggntcggggccggccggcctacagaaacctgagcccattgccatttacagcgtctcgtctcgctgtatcgttcggtctcccacccctttcccctcttcgtcgatctcaccaccgcgccgaccccgatggcctccgccgcctcatcggccgccgccgctggcaaatcgctgttccaggggttccgcaggttcctcaaaaagccgtgggagatcacgggcccctgcgcctcgcccgagtaccgcagcgcgctgcctggcgcgctcgagtaccgcgtcaagtgcccggccaccgtgcgcgacgaccgcgacaaggccatcgtgcccacatccgatccggagacagtctacgacatcaagtacttcacccgcgatcgccgccggaaccgtccgcccgtgcgccgcaccctgctccgcaagcccgacctcgagcgctacatggtcaccaagcagtttgaccccaccaaggacttccccgtgccatacgtcaacaccactgtcgaggaggacgacaacacggtcggcggtggctaccagaaatgatccaggcatccttgttgtgcttggactccatgagcagctgcacaaatttcgtttcagctttcaaatatctcctttttctgcaagttttctggttgtaaaagatgatggtggcaataatatggtacttgagctcacaggatgcacatttcttgtaacctgtattccaaaactttatctacctgaaaccatagttactgtttaagaataaccaaaggttttctaatgtgcaaaaaattgcaaaaaaaaaaaaaaaaaaaaaaaaaaaaaaagtactctgcgttgttaccactgct

SEQ ID NO: 50860 - DNA, 406 bp, Zea mays
  Clone ID: MRT4577_146379C.1
ccatattcaaaataacgcaccctgttttgtgagataaaaagcatgaacagagctttacatgaatttggacgtctacagactacaaaaaagacccaactgccagaagaacctaccacaaaacatccctgaaaaaaaaggaagtggcaaaaaaacccacaaaaccatcctgggaactatcagatatgaggaagaatttaaaaaaaaaaaaagtgggcttgctcttgctcccagggcgtgtgggagagagttcaaaacatccaggataagatgaatacagcctaacacagtttgcaagaggagcaaaacaactccggagcaggaaaaacactggagaccccgaacaaagctggccaaaaaaaaaactggagggagaaaaaggactcgagcaaaatggcatccttcagct

SEQ ID NO: 50861 - DNA, 461 bp, Zea mays
  Clone ID: MRT4577_14637C.1
atagagcgactgaattacaacaaaatacatggtccccctagctgaacaatgatcggctgtacacatacagtatatgttggaaatgactaagatctcgccataaggtgatcgaagctggtgcacactagccagaaaggacgagcagccatgcgccactcagcgcgccttcttgtaaggcagaaatccgatgtgggattaacgaagcgcgcatttcacattctggattaatcaagcctcacagagagcacccggcgatgtaatcgatcggaacgatcttatataatcctatagatttcgtaggctgctccgaatgaaaccactacttgtacggtgtttatacccacagcatcactggcaaacaaggtaccagcaccaagtattacgcttgcaggatgcattacgctctcactcgcaaaacctaccaatcgttttcactaccagccaccattaaggggagacaa

SEQ ID NO: 50862 - DNA, 498 bp, Zea mays
  unsure (1)..(498): unsure at all n locations
  Clone ID: MRT4577_146380C.1
attcttaaacagtaactagggttccaggtagataaagttttggaatacaggttacaagaaatgtgcatcctgtgagctcaagtaccatattattgccaccatcatcttttacaaccagaaaacttgcagaaaaaggagatatttgaaagctgaaacgaaatttgtgcagctgctcatggagtccaagcacaacaaggatgccttgtcttacattgcaggcctgtccagttagctaatgcacgtaacgcacacgacatcaaacacaccatgtccagataactgcttcatgttttgtggcaagccagcaatagctcgttttgcagcccggatatatcaattctaatcaagcattatgtttccccctacttgaatgcaaggcaaagctcctggatcatttctggtagccaccgccgaccgtgttgtcgtcctcctcgcagtggtgttgacgtatggacggngaagtccttggtggggtcaaactgcttggtgaccatgtag

SEQ ID NO: 50863 - DNA, 1016 bp, Zea mays
  Clone ID: MRT4577_146381C.1
ccggaacagaaacctgagcccattgccatttacagcgtctcgtctcgctgtatcgttcggtcttcaccccctttcccctcttcgtcgatctcaccaccgcgccgaccccgatggcctccgccgcctcatcggccgccgccgctggcaaatcgctgttccaggggttccgcaggttcctcaaaaagccgtgggagatcacgggcccctgcgcctcgcccgagtaccgcagcgcgctgcctggcgcgctcgagtaccgcgtcaagtgcccggccaccgtgcgcgacgaccgcgacaaggccatcgtgcccacatccgatccggagacagtctacgacatcaagtacttcacccgcgatcgccgccggaaccgtccgcccgtgcgccgcaccctgctccgcaagcccgacctcgagcgctacatggtcaccaagcagtttgaccccaccaaggacttccccgtgccatacgtcaacaccactgtcgaggaggacgacaacacggtcggcggtggctaccagaaatgatccagtggcaggagctttgccttgcattcaagtagggggaaacataatgcttgattagaattgatatatccgggctgcaaaacgagctattgctggcttgccacaaaacatgaagcagttatctggacatggtgtgtttgatgtcgtgtgcgttacgtgcattagctaactggacaggcctgcaatgtaagacaaggaaagcttactgatttgatgctggttaatttgccaggcatccttgttgtgcttggactccatgagcagctgcacaaatttcgtttcagctttcaaatatctcctttttctgcaagttttctggttgtaaaagatgatggtggcaataatatggtacttgagctcacaggatgcacatttcttgtaacctgtattccaaaactttatctacctgaaaccatagttactgtttaagaataaaaaaaaaaaaaaaaaagtgcacatcatctccaacttaaccaaaaaaaaaaaaaaaaa

SEQ ID NO: 50864 - DNA, 579 bp, Zea mays
  Clone ID: MRT4577_146382C.1
ggccaaataaacacttgattgttataggccagcacactctcctggtcctggtgatgggctcatctcccacactcgctcgctcatgactgcctacatagcatccctcccctaaattcaataacctcagagatgtttgtctctacaacattttcgttgagtgtgacctcaattggattgactatatatatttgtccttgaagctaagtgtctctacaatattttcattatattatttgattactacgggagtagtatagtattatatatattattatacacgtactagtactagctatcttcctatatatggatgggtgctgggttagtgctgctgatgctttacttaatttgctcagattagtgataaagatggcgtgacctcaattggtgatgatggcgtattagagattgattcctctgtttcattggaaacaacatgttatgcaatgaaagaacttgtttccatgggactggtgcacatcattggaatcagcaatacaatttgcagagcttggctgagaagcacggcaagatgttggcgcagcttgtcctccggtggggtctgtagcgtactatggt

SEQ ID NO: 50865 - DNA, 603 bp, Zea mays
  unsure (1)..(603): unsure at all n locations
  Clone ID: MRT4577_146383C.1
ctcggttcaagtcgaattgtgttcaaattggatatctggcaggtcagctggcaatcgaacatgtacttcaacttctactcaagtgtgttgctcgctctgagcttatctttgaacgttctcgctgatacaacgccgaatccggtcgatggtaaacaaacaagattaaccacaatcaattgtaattaattaactcgattccatttgttcgttcgacaagtgaaagcgatcgttttcgacgaggatcgctacgacaacttcgtgatgaatgtggtgatgccttttcaaaattcgttgttcgtctcgtccactcgagaaaacatgactgtcctggatgttctgcacacgtccaggaacggacgattccacacaatcatctatcacatcaacaaccgaatctttgcctaccagaacatcaatggactcaaactctgcatgttgcaatcattcgaccaagaaagtcacgaaatggaagaaaccaagaaaaacttctttcaaacattccgagaattcacgaaaaaagattntgaaggtgacaagcttgacgtgaatggattgagaggcactcgaatcctgagattcaaagcgaccaacattgacatggat

SEQ ID NO: 50866 - DNA, 154 bp, Zea mays
  Clone ID: MRT4577_146384C.1
aaaggagctttctctctctacgattttccccttaactattcggcgtccctctctcctgatgctgtccccccgatactgcggtcccccagcgccgcggaggagacacctctagatgtctcttccgagagtatgcgcaagtgggcagatccgcttc

SEQ ID NO: 50867 - DNA, 167 bp, Zea mays
  Clone ID: MRT4577_146385C.1
gtagccatgcacaaatagagtactgtaaggatatggaaaaaacctacaaatgggtagctggtactactgggtgtgcagccatgcgtggtatgtggggcttttagtggtcttggtggcctggtcaacgtgggtatactactgggaagcctagttgttctaactagctg

SEQ ID NO: 50868 - DNA, 341 bp, Zea mays
  Clone ID: MRT4577_146386C.1
attatattttttttttttttttctacccgggtggttttatttgggcacaaccgaatcggcgcccaccaaaataacggttttatgcgcatccatgatttcctaacacgcgtgagttccgaaaagcaagaacagggccggatacccaagcccaaatttgctatacaaccatatacctcccgggaaagaggccggcattatttggacaccgggcgcccgaggatttttcgcacacttgcccaatccagaagacttaacgcggggcccaaaattggctgtgatcaagtcgaaaacaacatgcataccatggggaacaggggagagcccaacactattggatgact

SEQ ID NO: 50869 - DNA, 202 bp, Zea mays
  Clone ID: MRT4577_146387C.1
gacctactcgcgcgatgccccgcggcagcatgaccgagtggagatcattgccaacgaccagtgccaaccgcacaacggagacttatgccgcgctcaccgcattcggagaggctcgtaggcgacgccgccaagaaccaggacgacatgaaccccatcaacaccgtcttcgaggcgcacgggctcatcggccggtgcttctctg

SEQ ID NO: 50870 - DNA, 379 bp, Zea mays
  Clone ID: MRT4577_146388C.1
cccacgcgtccgattctcatactataaacaattttctgtcgtaagaataatatcttgagggttaggtatcctttaaggtatgttgtaattcctctatgaagaatagactttagaacgtttgattctatttatattgaaccaactatagcttccttctagatttcaggaaaccattatcttgtgccaaacaatacttgactttatataggatagaattgttgtttatgatgatacttaggtaactgctgtacttggtattcagtgtgtaatatttttgttgtgtggattaatgttttaagtgctttatgtctcattagtgttaagcttagctcatcctgcttcgtcgtagtagttatttaacaataaggatctctttaaa

SEQ ID NO: 50871 - DNA, 333 bp, Zea mays
  Clone ID: MRT4577_146389C.1
gcaaaccctgctgctagcgctgcgcccctctctcactccgactccccatccgtcttcagggggtcgactctttctttgcgcgctcagggtatcggaatggaagccgatgcttcattccaaaatgactctgtagagcgtggaggactccgacgcggcggtgatctccgtctttattccaaggatggctctacctgatcagccccatgtggccctgtgaggctcactcttcgatggtggagaaggttctgttccaatggatgttagactaccaaaacgttatagtactttagtcttctactttcggtaaggtgctcgttctttatggatctattc

SEQ ID NO: 50872 - DNA, 282 bp, Zea mays
  Clone ID: MRT4577_14638C.1
atgaagcgcatgggctcggagcatgaacacacgtggcacccttctgccataggccgaacgccaaacaccagcaacatgctaatagcagaaatgaacgtggacgagaaaggagagctgaaacgacgcatcgcgattgccatctgccagcttgacgccgcccccggcgccaagactgcaccctccggcaccgaccgatggtcccggttctgctgtgggctgcggactggctatgtggcgaacaagcgcactcatgggcggcctcaacgttcttcatgctcctag

SEQ ID NO: 50873 - DNA, 212 bp, Zea mays
  unsure (1)..(212): unsure at all n locations
  Clone ID: MRT4577_146390C.1
ggctcgcgtccggcgctttcggcaggctcttcccttcccctcggncctgcctgtaccgcgcatcgagggtgagggacctatacacgtagtcggctcattggcagagcgcaagaaccacaaggcggagataaagtgattgaggatgacagaggcaggaagcaaggagacccggaggagagtcgagaggaggccgccaaataaatgggatctga

SEQ ID NO: 50874 - DNA, 253 bp, Zea mays
  Clone ID: MRT4577_146391C.1
aattcggcacgagggctgacacgtgagccggtaatgcttaaaagaagagccaactgtactggcctatgctggccaatgatgaaagcatacacgaacaaacaattaaaccacactaagggagcgcgccaatgcccaataaaccgatgagaatgacacttaactctagtccagacatactccgaaggcatcgagcacatcaaccaccaaacaaagagccagccaaatgaggagctagctcgccaccgtccatgca

SEQ ID NO: 50875 - DNA, 200 bp, Zea mays
  Clone ID: MRT4577_146392C.1
cggccgcgtgtgtgatctcttggtcgctaagaagggcttcgtggacacgatggtcaacacgcagatctgcatagggcacaataggtgcggtgttacatattgcaaatggtacggacctgtcgaaagtttttgcgtgggaggtttctacaccgccttggaatcgtctaattcatcactcaaagttcctggagctggtcatg

SEQ ID NO: 50876 - DNA, 190 bp, Zea mays
  unsure (1)..(190): unsure at all n locations
  Clone ID: MRT4577_146393C.1
atcatactgtgtggcatgagacttatgaagcatctggcaatcaatggggagattctgatgcttagaagggtgaatattatgcatatggaacttatgagtacaggcatcaaatgccacagcatgctggtcaaacagctgcctatggtgcttatggtcaaacatactgtgataangnctatagacaacaaag

SEQ ID NO: 50877 - DNA, 868 bp, Zea mays
  unsure (1)..(868): unsure at all n locations
  Clone ID: MRT4577_146394C.1
catgccaacancaaagagtagatgcttattgtttatttagtatgcgtaacaagtncaagctagtcttatcatgcatgcatgataggctgcatgcgagcgtacacatcaatcaatcacagattcacatgtacagggacaaggagangcttctccgtacacatgcatccgtacacatgcatgataggaggctgcatgcatgtccaacaagcatgtcgatcttatcatgcatgataggaggctgcatgcatccgtacacatgaatcaatcttgttgtgcaagtacaggtacaaggaggagcttctccgtacggtgcactgtgaccccaaacgattcagtcatgtcgatgcctttgctggccgattccgcaggcagctcccagtcgaagtggtagacaaggttggcgagcatgaggtggatagctgcggtcgcaaagctgatgccggggcacatccttctccctgccccgaacggtatgtactggaagtcgttccccttgttgctgtccatggctgcggcactgccgccctccatgaagcgctcgggcatgaactcctcgacgcccgcccagcagctggggtcgctgtcgagagcccactcggtgactatctctcgtgttcccgacggtatcgtgtacccctcctcggcgcagtcggcgctcatgaggtggggcacgaggagtggagccggcatggcgagccgcagcgctatgaaggaggtgtcagtgccagcttcgaacatgaccaccagctgcgccttgatctgatctctcgtcaggttgtactcttgctgaagggagagcaagacatggatgaaatcactctcctcctccccgtcagcgtcagcgccgccgtcacgctctgacgacgac

SEQ ID NO: 50878 - DNA, 653 bp, Zea mays
  Clone ID: MRT4577_146395C.1
aacctggctggcggtcgtcaagcaggaagaggagctgtaccagaagctgaacccgggcgcacgcccaccggcgtctactggtggcatcgcaagtgccatatccttcaacaccagctcgagcgagtatgatgtggacatcatcgatgagtgcaagggggacgaggccggtaaccagaggacggcagtcactgacccaaccgcgttcaaccttggtgccgctatcctaagcgacatcgccgccagcgcgccggagttcaggttcggtcctggtttcaacatgtctagcggcgtcgactacccaggcgcggcacagaggaacgacgggaccaattggttctactgaagaataaataaacctgtagggctgagaaaagagagggagagagagagagagagagagagagagaaaagcgtcgttataagctttgggtctctccatggtgctcctgctccatggttctcctaagttgtcgagtgtcgagtctatagggtcttggtcgtataggtttctgcagtagctgcaaggcggctggaacttggaaactggtttatacttgtactacgtccgtccagccataaaaatcctctcttatggaaacttaatgctatatccctagttttaatgaatttgttagcttcaacgctgttcatat

SEQ ID NO: 50879 - DNA, 309 bp, Zea mays
  Clone ID: MRT4577_146396C.1
attcatttcgccgagacggcgagaactgcttcgcacctacgatactgctggagatccagccggcacaccatcgactaagaagactgcggagagaggatgatactggcagtgctctacgccaactccgatcgaaacatccatgttcgagcgattccatggggttccagaggaggagaggctcaagtggcgctcattactggtgaaactaggatccgagaacctcaaatggtccacgaacgaggagatccacgttgcctcgcaaaagtctgtgtctattgtgtataccacagtcggggatgtcagcctcta

SEQ ID NO: 50880 - DNA, 955 bp, Zea mays
  unsure (1)..(955): unsure at all n locations
  Clone ID: MRT4577_146397C.1
ctgcaagcacagggatccaacccctcanagcaccgagaacaagccgccgtcagcaggtgtactggtggctgttgcgggcattccggtccacctgcaagcacaaggatccaacccctcagagcaccgagaacaagccgccgtcagcaccgccacagccacaagccttccagccggccttcagccaacccaaccaggcactgaacagtctggatttcagcctgcccatggacgggcagaggtccatcgccgagctgatgaacatgtacgacaacaacttcgtgccgaacaagaacccgagcagcgacagcgtcgccgtcatggagaggccaaacgcgatgccccagcagaggatccagatggacgagggtttcttcgtacagggcaacggagccttcgacgacgtcaacagcatgatgcagcagcagcagcagcaacaccaggcgccagtgcagcagcagcagcagttcttcatccgcgacgacacgccattcgtgagccagatgggcgacatcgccgccagcgcgccggagttcaggttcggtcatggtttcaacatgtctagcggcgtcgactacccaggcgcggcacagaggaacgacgggaccaattggttctactgaagaataaataaacctgtagggctgagaaaagagagagagaaaaaaaagcgtcgttataagctttggatctctccatggtgctcctgctccatggttctcctaagttgtcgagtctatagggtcttcgtcgtataggtttctgcagtagctgcaaggcggctggaacttggaaactggtttatacttgtactacgtccgtccagccataaaaaatcctcttatggaaacttaatgctatatccctagttttaattagtttgttagcttcaacgctgttcatatatatacacgggctgtcaaaaatgcttctgaaaaaaaaaaaaaaaaaagcggcc

SEQ ID NO: 50881 - DNA, 284 bp, Zea mays
  Clone ID: MRT4577_146398C.1
tgtgcccgggagtaagggagatattttgtccttgataattctgattttcccttggcatcaccaacgcctcagagagatacacctgcaccctccagtcagggtcagtgttggctggaaaacactgaaaagtcttcgctctgtctttcaccttaaattgtgttttccaacaaatgagagagaagcttacgggggagatgcctgagagatgcctatggcgctgtagttttttttcttccctatgatctcacatgaaaggtgctatgtaacaaccagtatgagtcaaa

SEQ ID NO: 50882 - DNA, 540 bp, Zea mays
  Clone ID: MRT4577_146399C.1
cgtgctgtcggcgacggcgcggctgccctcctcggccacccggcggcggcgctgtccaccactccagcagcatcccctacgcgtcaccatggccacgctctccgcctccgcgccgttccccaccatcaccctcgacctcacccagcaggcgcccggaggcctgctgccccagccccacgggctccatcgcccgcccggaggaatccaccccgtagtggccgccccggcggcggcgatgccgtttccggcaccatcgccgctggcgatgttccttccgcagcgagcgcccacggggccgaccgggctgccggtcgcgcggcagcagcagcagcagcagtcggtgatggagacggtgactgcagccatcgccgccgaccccaacttcaccacggcgctggcggcggccatctcgtcggtcatggcaggagcagcgcatcaggctcagcagcctactccacgtgcgagcaacatcatcggcatcgccggggatgaggccaacggcggcagcagcgcgggtgccgccacagcaggcccgacgac

SEQ ID NO: 50883 - DNA, 460 bp, Zea mays
  unsure (1)..(460): unsure at all n locations
  Clone ID: MRT4577_14639C.1
agttttcctgctctcccacccccagctcccaattcctcatcatcatgctctgcccccctctcgttttacctacatggcgctgcccaatcacgcgaccattgattaccccagcttcaagctcgtcatcttcttcgatagtggaactggtaaaactacatttgtgaagaggcatctcactgcagagttttagaagaaatatgaaccaaccatttgtgtggaagttcatccgttggattttaccactaactgttgtaagatcattttctactgctcaaatacctcatggcaatataattttggtgccctcagggatggatactatatccatggtcagtgtgcgatcatcatgtttgatgtaacctcaaggcttacttacaaaaatgttcctacattgcatattgacctgtgcacggtctttgaaaacatccncattgtactctgcagtaataaagttgatttt

SEQ ID NO: 50884 - DNA, 1548 bp, Zea mays
  Clone ID: MRT4577_1463C.1
atctggacatcaatggggagcttcttatgctcagcaggctgcatatcctgcatatggaacttatgactacagccatcaaatgccacagcctgctcctcaaacagctgcctatggtgcttatcctccaacatactctgttcaggcctatacaggaaggaaggtggccattgttggcagtggaccatctggtttggctgctgcagatcaactaaataaaatgggccacttcgtaactgtgttcgaacgtgcagatcgaattggaggtttaatgatgtatggtgtgccaaacatgaagacagacaagattggcgttgtccagcgccgtgttaatttaatggctgaagagggtgtcacatttgtggtgaatgccaatgttggtagtgatcctttgtactcgattgaacgtctacgttctgaaaatgatgcggttattttggcttgtggagcaacaaaaccgagagatctcaccatccctggacgcgagctatctggagttcattttgcaatggaatttctccatgcaaatacgaaaagtttactcgacagcaacctggaggatggtaaatatatctccgcccgtgggaaaaaggtggtggttattggtggaggtgatacaggcacagattgcattggcacatctattaggcatggttgcaccagccttgtaaatcttgaactcctgtcaaaaccaccaagcactagagctgctgacaacccatggccccagtggccaagaattttccgtgttgactatgggcatcaagaagctgctaccaagtttgggaaggatccaagaacttacgaagtcttgacaaagcgttttattggcgatggaaatggcaaggtgaaggcccttgaggtagtgcgtgtgaagtgggagaaagtagatggaagatttcaactcaaggagatggaaggatcagaagagattattgaggctgatctcgtcctcctagctatgggattcttgggtcctgaagcgacaatagctgagaaattgggtttggagaaggacaacagatcaaacttcaaagcgcagtttggagacttcgctaccagtgtcgatggtgtgtttgccgccggggactgcagacgtggacaatcactggtggtttgggccatcacggaggggcggcaggctgctgcagcggtagacaagtacttgtcaaggtatgatcagaatgctgctgctacaggcgacagcactccctccgggacagggctcgttcagccggttgcggcatagtagcataaactggagcaagttttacgtttgtcagtcagtcagtgtatcctgtgggttccacacagcaaacaccgttcttgtagttgtctaaaagaaacagagaaatccgggctcattaaggaatgaaagcccttctatattttttttggacgatagataaacagttgaaagttttggtggctattgtctcttttttctgctgcatgtggttttgtagtccaaacaatgtacagtttcccctttcttaaatagatgtaaatttgtcgtgtgataaaaagaaaaaaaaaaaaaaaaaagcggcc

SEQ ID NO: 50885 - DNA, 444 bp, Zea mays
  Clone ID: MRT4577_146400C.1
aagccatggcatcacaagggaagcgtggtgtgccaggtcccccacaggacccatactgtgcatgaataactgcggcttattaggcagcgcggcgacctgaacatgtgcttagtgccacaaggagagataacgaagcatgatcaggccaagctggctgcctactttatcgacagcatagaaaacggcaactacgcccaaatggagccggttgttgttggcatcaacaccgaaatagttgttgcccaagttgagttgcaaacaattaacttgcagcaccccattgatgttgccggacccatctaggtggtgcgctagctatctccaaagagggaaggtagggaccaaaccggtacaccgtctgtaagaagaagcttgtacttacggcatttaactgatcgtgtgggaacttgaactgggcactccaccgttacttctacaagcacg

SEQ ID NO: 50886 - DNA, 2480 bp, Zea mays
  unsure (1)..(2480): unsure at all n locations
  Clone ID: MRT4577_146401C.1
cgtacagggcacggaagcctcgncgacgtcataagcatgatgccagcagcagcagcagcaacaccaggcgccagtgcagtacctcgacccacgcgtccgcccggcgctacccccgttcttatccccacctcgtgcctcccctcctccccccttcccctctctcgcccctcctccctccgtctcgtctcccaggtcatggcaaaagctggagcaccgggaaaaataacaagtgggagataaacaggaagagctaggtgaatacttggagaaaaaggtcccccacaccccccacgcaggtgaatactacaagtagcagtacaaggaagagagccaatctgcccgtgactgcgagtgaattgctagggtgtggtggttagttgaggtcacgatgatgggaggcgggctgatgatggatcagagcgtggtgttccctggcgtccacaacttcgtggatctcctgcagcagaacggcgacaagaacctgggcttcgcctcactcatgccgcagacgtcctccggcgaccagtgcgtgatgggggagggtgatcttgtggacccaccgccagacagcttcccggacgccgtggaggacgacagcgatgacgacgttgaggacatcgaggagctggagcgccgcatgtggcgcgaccgcatgaagctgaagcggctcagggagctgcagcagagccgcggcaaggatcccatggctagcggtggggccctggccgacggctcatccaagccaaggcagtcgcaggagcaggcccggcgcaagaagatgtcgcgcgcgcaggacggcatcctcaagtacatgctcaagatgatggaggtgtgccgcgcgcaggggtttgtgtacgggatcattccggagaagggcaagccggtgagcggcgcctccgacaacctccgtgcctggtggaaggagaaggtccgcttcgaccgcaacggaccggccgccattgccaagtaccaggccgacaacgccgtccctggcgccgagaacgagctcgcctcgggcgctgccagcccccattccttgcaggagctgcaggacactacgctgggctcactgctctcagcgcttatgcagcactgcgagcccccacagcggcgctacccgctcgagaagggcgttcctccaccgtggtggcctaccggcgacgaggagtggtggccggaactcggcattcccaaggaccagggcccacccccgtacaagaagcctcatgaccttaagaaggcctggaaggtgagcgtgctcaccgctgtcatcaagcacatgtcaccggacatagagaagatccgtcgcctggttcgccagtccaagtgcctccaggacaagatgactgccaaggagatctcaacctggctggcggtcgtcaagcaggaagaggagctgtaccagaagctgaacccgggcgcacgcccaccggcgtctactggtggcatcgcaagtgccatatccttcaacaccagctcgagcgagtatgatgtggacatcatcgatgagtgcaagggggacgaggccggtaaccagaggacggcagtcactgacccaaccgcgttcaaccttggtgccgctatcctaagcgacaagttcctcgtgccgacgccgatgaaggaggagaccgccgacgtggagttcatccagaagaggacacccccgctgcagccgagccagagctgatgctaaacaaccgattgtacacctgacacgaacccgagcagcgacagcgtcgccgtcatggagaggccaaacgcgatgccccagcagaggatccagatggacgagggtttcttcgtacagggcaacggagccttcgacgacgtcaacaacagcatgatgcagcagcagcagcagcaggcgccagtgcagcagcagcagcagttcttcatccgcgacgacacgccattcgtgagccagatgggcgacatcgccgccagcgcgccggagttcaggttcggtcctggtttcaacatgtctagcggcgtcgactacccaggcgcggcacagaggaacgacgggaccaattggttctactgaagaataaataaacctgtagggctgagaaaagagagggagagagagagagagagagagaaaagcgtcgttataagctttgggtctctccatggtgctcctgctccatggttctcctaagttgtcgagtgtcgagtctatagggtcttggtcgtataggtttctgcagtagctgcaaggcggctggaacttggaaactggtttatacttgtactccctcccggaatttggctctttgctgagtgccatattctttgccgagtgttttatttcgggcactcggcaaagaccttttgtcgagtgtcacccaacttaatgctctttgtcgagtgtcacacaaaaaagacctctttgccgagtgtcacacataaaaccctcggtaaaagataacactcggcgaagaagctctttgccgagtgttttatttttgacattcggc

SEQ ID NO: 50887 - DNA, 702 bp, Zea mays
  Clone ID: MRT4577_146402C.1
gcccctcttgtaccagtaaaccgtgctgctatcccccgctaccgctaccgctacccgccgcgctgctgcggctcgcctccctcccccccacgccccgccgccgccgcctcctctcgctccctccttttaccccgagcttaagctcgcgcgtacctgcctacctatccgtaggagaggaagaggggacaaggcccggtcggtcggtcggtcggtcggggggctctcggatctcgccgctgcctccccgttcgttcgttcgttcgttgggatctcgcgccatggccgccgtcgcgccgcccccggcccccgcgccggcaccggttccggctcctgctcctgccaccgtccctgtcgcggatcaaaccacggatttgctgcagaagctgtcgctcgactcgcagcccaagccggcggacgcaacacagcctgctgctgccaccgccaaaaagcagggcgccgcggcgagccagccgctgagcgtggcgatcccgccggagacgaccatcacgccggtgatccaagactttacggatcccaacctgttttatctaccagcgtattactacggaggctacgacagctccatgagcgagtgggatgattatccgagatatctaaattccgatggagtggagattgccccagcggtatacggagatatttatggatatgggcatgctccttaccgggggatactctcct

SEQ ID NO: 50888 - DNA, 173 bp, Zea mays
  Clone ID: MRT4577_146403C.1
acttaaaagtgctaacttaaaacctactatattagactagcggttaaattaatatttccaaatgccattctccttcatcctgttaatatgttatatacaaaaagggctatacacataaaaaaataagttacccatttgcttttaaacagtcatataatttgataccttttttg

SEQ ID NO: 50889 - DNA, 509 bp, Zea mays
  unsure (1)..(509): unsure at all n locations
  Clone ID: MRT4577_146404C.1
ccggccgggcttttcctgctccgacacagcccctgtcgtaccagtaaaccgtgctgctatcccccgctaccgctcgctagccgccgcgctgctgcggctcgcctccctcccccccacgccccgccgccgcctcctctcgctccctccttttaccccgagcttaagctcgcgcgtacctgcctaccaatccgtaggagaggaagaggggacaaggcccggtcggtcggtcggtcggtcggtcggggggctctcggatctcgccgctgcctccccgttcgttcgttgggatctcgcgccatggccgccgtcgcgccgcccccggcccccgcgccggcaccggttcctgctcctgctcctgctcctgctcctgccaccgtccctgtcgcggntcnnnccncggntctgctgcngaagctgtcgctcgactcgcagcccaaggcggcggacgcaacacagcctgctgctgccaccgccaaaaagggcgccgcggcgagccagccgctgagccg

SEQ ID NO: 50890 - DNA, 126 bp, Zea mays
  Clone ID: MRT4577_146405C.1
gtcaatagcaacagcgactccctccagcgcgctccacagcaactccctcccaagttcgcaaccaccttctcctgcggtccttccacagcaccccgattgtacccacggctcacgccttctccctct

SEQ ID NO: 50891 - DNA, 397 bp, Zea mays
  Clone ID: MRT4577_146406C.1
ctcaaaacaacttggttgtcactaatatcgatgatccaatctgttgaacctgttgactctcgtacccgagatgcccttcaaaagtctgtgcaattagccattgagattaccactaagtcgcaggaggcttctgccagacacgaagctgagcgaagagaacaagtcgccagaggtaagctcgaacgccaaaagatcatgcacgaagctgctgctgaagaacaaagaaaggagctccttcaattacaagctgcttcggcagtcattgaagccagtggtcacgccactgctgaggcctgtgctaaggcagaggctatgtccatcgaaggtgaagccgccgtgaagcaagcagagctttccgccgaggccgagaggattcgtgtacaatccgacttagctc

SEQ ID NO: 50892 - DNA, 228 bp, Zea mays
  Clone ID: MRT4577_146407C.1
attccttcccctcttctttaggtggctttcttttaaaatccatctaccccactaaacccaccatatattatcaaccaccaatttcaataaaaaaaccccctataaaacccaaaacacgctcactaattcaaaaaccacttaaccccccaaaaaaaaaacacactttcttaaaaaaacacacctcaaatcaccctcctgtatttagacaaaacaaatcatcaactccaa

SEQ ID NO: 50893 - DNA, 1956 bp, Zea mays
  Clone ID: MRT4577_146408C.1
cccacgcgtccgcggacgcgtgggcggagggagagttcgagccagcaatggcgaggccacggccggcggcggccaccctcctcctggtcaccttcctcctggccgcggccgccgccgagaccacggacgtcatcagcggcggcggcggcatggtgggcgtggacggcacgcggttcgtggtgggcggcgccgccggaggcaggcccgtctacttcagcgggttcaacgcgtactggctcatgctggtggcgtcggagccggcgcggagggacaaggtggtggcggcgttccgccaggcggccgaccacgggctcaacctcgcgcggacctgggccttcagcgacggcggggacacgccgctgcaggcggcgccgggcgtctacgacgaggccatgttccagggtctggacttcgtggtcgccgaggccaggcggcacggcatctacctcctcctctgcctcgccaacaacttccacgacttcggcggcaagcggcagtacgtgcagtgggccagggacgccggccaccgcctcgccaccgacgacgacttcttcaacagcaccgtcgtcaagggatactacaagaaccacgtcaagacggtgctgacgcgggtgaacaccctcaccggcgtggcgtacaaggacgaccccgccatcctcggctgggagctcatgaacgagccccgctgcgacgccgagcccaccggcgccatggtgcaggcgtgggtggaggagatggcgccgtacgtgaagtccgtggacggcgggcacctggtgacggcggggctggagggcttctacggcgcgggcgcgcacgagagcaaggacctcaacccctggcgcatctactacggcaccaacttcgtggagacgcaccgcgcgcgcggggtggacttcgccaccatccacctgtacccggacgcctggctctggggctgcgccgccgacgcgcagcgcgccttcctccgcaactggacgcgcgcccacgcccgcgacgccgcgctctacctgcgcaagccgctgctcgtcaccgagtacggcaagttcctgtgggagggcgtcgccggcgccaaccgcacccagcgggacgccttcctccgcctcgtgctcgactccatctacgcctccgccgcgcggggaggcccgctcgtcggcggcgccttctggcagctgctcgacgacggcatggacacgctcagggacggctacgagatcatactccccgacgaccagctcgccgccaccatcatcgccacccactcccgccagctggccgacctcagcctcgtcaccgccgaggacgtccgggaagaggaggcggcgccgcttcgccggaggaggaggaagagcgcgcatggcaagatacaccacgttctccgcgtgggtgggggtactagtagtgatgatagttattatacgcaacggttgctgcacatattcttgcttcgtctcatctctttgttcgaatcaatctcttcattgtttcagtagtgtataggttacgtgtagaatttttttttctctatcgccaccaggaaaaaaaaacctggttaggtgtgtgtgcgcgtgtgcaggttgttctagaaagttaggcatagccagtgtgtgtagagtatacagtttctcttttttttttgtttttttttttttctttgagggcaaaaaagacaggtgctctgatcctttcattcaaaaggaagcaacagagtttacaagaagattacaagaggccaggccaagagccggtggtcaaaatgaaagagaacagggacaggcagagccaaacactttacaccaaaagttttgcataatggtgtgttaagccttcgaatacattaagatagaagttaccgtgtcttacatatcaaagtgtattgtatcttgtttagattagataacatagtgtataactcatagcttgtttttcctaaacttttaattcatgagatctttgatc

SEQ ID NO: 50894 - DNA, 135 bp, Zea mays
  Clone ID: MRT4577_146409C.1
ggtcgaactcatactctattatgcgtagtatatctattaattaggccggtcaccaaacgactattgaggatgggtccccgaggccagtacacatgtagagagactaaactgaagagtgactcaaacacctagatg

SEQ ID NO: 50895 - DNA, 137 bp, Zea mays
  Clone ID: MRT4577_14640C.1
gcgcttgaccacatccggctcgcactcaccggtgatcacgagcgcgacctaatggcgctggacgtgggactgaagcagactggcacgggagcaggggccgcagcctgccagatcgggacattgtcagggcctaccga

SEQ ID NO: 50896 - DNA, 181 bp, Zea mays
  Clone ID: MRT4577_146410C.1
aacacccacccaaactgctatcagcagggaaggaatatcacagtttcagaggccaccccaactcctattacccatcaagtgcatgcccccgacctacccactccccgctgccagctcccactctcctgactacacctataccacacccatctcccacacatcgattccattcacctcttca

SEQ ID NO: 50897 - DNA, 427 bp, Zea mays
  Clone ID: MRT4577_146411C.1
accacgcgtccgcaaagcaactgactcctttgacaggtttgttttgtaccttcctgaaatctgctctggttctctacatatacagatgggttcttagttggtacccatttcttacatccttcaacttcacgcttaccatatagtatacagaagggccattgggtcccctttcagttgtctttagcatttcagcgacatctgctccacaaaatcacggcgtgtggcgtctcaacgaacgctatattaaattaattgttttctgattgcgactcatttcagctctgcattcatgatctgctctggaacccatatggttgattacagccaacttttactttctatgccctctttgttaggttttaggttggaaacatttgcgtcatatcatttatgcctttcatttctgtatctgaaaaaagtgtgaaat

SEQ ID NO: 50898 - DNA, 245 bp, Zea mays
  Clone ID: MRT4577_146412C.1
ggccacatcacccggtgaattattttaaggttttacaatgccttggttgggtgggactgaattaaaactaaagacttgggggggggggaaagaactcatgcttacttattattagacagacaggacaaaaacccccattggataagcatcggatttgggaaacgcaaaaaggattttttacgttgatggggaaattaaatggggggggtgacaggtaaaaaatttttgggatagggtacccaaaa

SEQ ID NO: 50899 - DNA, 397 bp, Zea mays
  Clone ID: MRT4577_146413C.1
gccggccgggtctcgcgactgcagaaccccacaagcgcggcacacgccatcgaactgcactctactccgtcgctccgtctattgatcagatgtcatctattcccgctcgacttcccctgcccgaatctcccgagaccacgccccatagagcgcacggcctggacccgccacggcactgcgcccgctcgtgccccagacccccgccccacattgagccgcgaccatgtcatccggacgaccgtgtgaacccgccatgagcgctgatgtaacctccggattacttggacttccgacatcgaatgaacggtcggcccccatgcgcgacggccactcgagcgccaacgctatgccgcgcgtctccgccgaccgcatgagccaggtgaacggcaggcgtcgc

SEQ ID NO: 50900 - DNA, 318 bp, Zea mays
  Clone ID: MRT4577_146414C.1
attctgagcattcagaaacacaccaagcgaagcgcactagcaacaacctaacaacaatggctaccaagatattatccctccttgcgcttcttgcagcttttgcgagcgcgacatatgcgtccattattccacaatgctcactactcctagtccattattcacagtctccaccagtacttaatggcttgaacaccactgcagcttttaaaaaggatgcgaggctaaaacaatgcaatgacacatctgccattacataacatgacgacagacaagtcacagatacactactggactgcctatgaagagtgtgtcacatgt

SEQ ID NO: 50901 - DNA, 740 bp, Zea mays
  Clone ID: MRT4577_146415C.1
atctttctctctcgcgcgccatggccgagtaccacctcagcgcgcagctccacggccacgaggatgatgttcgtgggatctgtatctgtggtgatgtgggggtcgcaacatcgtcaagagataaaacggtgagattctggacgcagcacccggaaaagaagcgcgaatatgtcctctcaaaaacacttgtaggacattcaagttttgttggcccgatggtttgggctccaccttctgatcgctttccggaaggagcgattgtttctggtggcatggataccctagtattgctatggaatttgcatacaggagaagttgttggaacaatgaagggtcacacctcacaggtgactggtcttgctatcgacgacaacggtgacattatatcttcatcgatggattgtactttaagaaggtggagagatggcaatgctgtagaagtttgggaggctcataaagttgcagtgcaaactgttctaaagctgccctcgggagaactatttacgggttcaagtgattccaccattaaactttggaaaggaaggacttgtctacatacattctctgggcatgcagacactgttcgatgtttagcacagatgccagggatgggtatactttctgcatcacatgatggaactataaagttatgggcattaactggccaacccctgttggagatgattggccatacctctcttgtatattctgtggatgcgcattcatctggtctaattgct

SEQ ID NO: 50902 - DNA, 707 bp, Zea mays
  Clone ID: MRT4577_146416C.1
ccggccgggttagaatttgatgtactaatggaggctaaggcacggaaaaaggcgacacagcacgtcggcacatgagtgtatgagctcacgccttggcatacagcacttgacgacgtccgagctggcgcaggctcgaactaatgcgcacgctgctgctactccaactgcgccaagaagccatcctgatgtcccttttgagtaacgcattctaggaggttaggatcagtttcatgactctatgattctgacgcaatctctgtggcctgctgcttcctgatcaagcgaccagtttcccacctttgctgcctgctctcctgcctccatgtccagcatcgtgtgctgattcacctagctgcaatggatggtctttttgatgctgccgcttccgctggcctacctataggggatgaaggctctgtaaagcgtgctgagatcacattctgtgatgcacctgtctttgtggaccctgatgggcgtggttcgcgcgccctctgcactgcccagattgactatgttctggatcctgcacggtgcacaatacgagtacgagctctgcaacatagatgctcgactgatatgaacctgtctgatgaagagcttgtttatctatccgtcgaatataggaatgaagacctgcggcactaccaagctactgctcaccattccaagaatacatgatcctgctgaagagctgtgtatgccactag

SEQ ID NO: 50903 - DNA, 598 bp, Zea mays
  Clone ID: MRT4577_146417C.1
aattcggcacgaggtttgtcaaccacattcgttccccccaggacagctgtcactcgtttccagcgtcctacccgtgtatcctaccagtcccggtaccatatacccataataattattattattaattcttctggactgcttcgatcctagtcacaaccatgaggtcttcggtttacggccttggcctgctcgttggcgcggcctcggccaacatcaacttcttctgggtccaacccacctgcaactacactgaccccgccgccttccctaagtgtttgactggccagcactgcctacagaacaacacttgtattccagatgatgccagtccctactccaaggttgcatcccgctctactttgcttttcgcccctgaaaagaggcaaaacaacaagtactcccaggatggcaagtgcggtcctcaaaacggcaacttgctctgcgaccccaacagcacagtctacacaggcacctgctgctccgagtacggctggtgtggcaacaccgcagcccactgctcaacgggctgccaatctggttgcgacaacgcccccaaggcctctactgctgccacccctgccaactctgccgtcaggga

SEQ ID NO: 50904 - DNA, 2468 bp, Zea mays
  Clone ID: MRT4577_146418C.1
aaccaaccctcgcccctcgtcttcattcgctcgtccgatcaggaaggacggtggatgaaaaagcgccctgcacgcctgaacgatcggcattattgttcactatctccttttgttttccctctcccgtccatctctctcctctttggccttcctttccttgcgacgacgactgggacgaacgccccccgcgcttctgcaggcgagcaccccgccaccagtcggagatgaacgcgtccaggaaatccagccatctctccagcaaggacagtgcagagaccgcgagggatatcatcaccacgtccggccaaatccaacccctcaaaatcccggacgctgttgctgcgctcgcacaggctgctgcaaaggcaaatggtgagaccgagaaatatcttccagggtggccgttgttctcgcctcctaaggtgcagctggacaagtgtaccaagtgctccagagaattctgttctgcaatcaacttccggaggcacacacgtgttcatcgtagatccctcaagatagatagggattttccaaagaatagagaccttctcgctgcattctggaataaactcactgtggatgatgccagcaaaattttgtccttgacaggtgttgttattgagggtgtaactggttcatcaattttgacagcactgtcatcatggatgtgtaaaccagggtatgcttcgttgccagttgcatatgccagagctggcagtgagcttctggatctaattcaagcaaagccttcaatgcatctgcctgtttcatcggatgaactatttagtttgctcgatgaagcaagtgaaaaaacatttctttgcacaaatacagctgcttgtatacagaagtttttatttgatggagaggtagaaaaaattgcaactgagttgaaaaatgttgtttcgtgcgctagttacatgcttgaacaaaagctgcttgaagcatggtgtgctgataagactgctgaagcattaagatgccagaagttgctggaggatgaagaggaagctgctcagaaaaggcaagccgaactgatggaaaggaagcggatgaagaaacttaggcagaaagaacagaggttaaaaaacctcaaggatgaggatgcgacagttcagtcacctgaaatcatggatgatgcgacatgttctactgccattcaaagtgtgaattccatttatgatcctgactgttttgagcaagaagaatcgcagtatcttcaatttccagcactaattactttggaaactgacaatgattttaatgtggacctaccagtagaagatatcagttgtgatttggggcctgaaatggataaaggtgttgtattaaggcaacaagttgtttcaaggcatcatttaggcagaacggagaagcttgctgaaagtagcattttatctggttccgtagttacttcaaagcatgcagctttagcaaggccttcaaattacaaggatccaaatgtctgttctgcaccaagtagaaacaaaacttgtgaattgaaactacggtctgagattgaagaacagtgccaaaaacatgagttagatgtagatgaacgtggcattggtcctagcaaaaactctcgtgtgctaataggatctataattgtcgcaattaaagattgtagtgaacacttgctggacttaggttccaagaatgacccagtacctcccaatgtaaagacaaagaaacatgcatcagtcaaggtggtgcaacaagttacccatgagggaaacagaaatgaaggtgttcctgatagtgataaccgttctagcctcagtgttactacagatgaaatcagttattcaacctgctgcgatgcagatttggcagtggatgaacatttacaatgcaccacgttttccagtgaagaagcgacagcctttctttctcaaagatggaaagaagcaatagccgccgatcacgtgaaacttgttgtgtcctgaaaactaaaggaatggcagaataaagaaattctgttgagggcaacagcatggaagctccggccgacttgtcgccggatcccacagccctacaacataggtggttcttatctagcctgcagggtgctatgaaagtttggatgtcaagtttgtgttgcggcatgaatggttgtaaaatggcaggtgcattttgcagctgatttgagattgaagcagagggttctagttttacaaggggacagcttgtgtgatgggatctgtttttggtaaggaaaaaaaagagtgatttgaataatggtttggtcgcacaagttcctaatcttttgtactcgttagagtctgctaaacacgaaatgcatgtgtgttgaacatgttgtgcttgcgggttgcggctttcatattgtcccagttctttctgctgtcagttcacgtaactggcgttcattttgtatcgcttcgtgctgtataacccgtactatttgcaatctattctggaagtctgcagaaaaaaaaaaaaataaa

SEQ ID NO: 50905 - DNA, 374 bp, Zea mays
  Clone ID: MRT4577_146419C.1
gttctagatcgcgagcggccgacctagaggatcatattttactcactcttgctaacacagctagggttataaaatggattcgtgagacaccctatctataaccaccactttacatccataccattactatcacacttacatgtggcacacacattagtcaatcacatgatcgcccatgatatatatgtaaagatagcaaatattaaagcactaaacctaattgccaacatcacaacaagctgattggcccatggcactcgcaatggcccacgccattacgctctttcttcttctacattacgcgtctcttaaaagaaacactacagggcgcattacattcaccccctttgggttaaatcggacacttgcataaa

SEQ ID NO: 50906 - DNA, 487 bp, Zea mays
  Clone ID: MRT4577_14641C.1
gttcagctcctggtggtgctacggacgtgactgcggtggccactgcggctggaggatgatgtactcatagaccactctcggcgacgtctctactacgagcagagatctcagctcgtacaccctgcgagatcctggaggagattgacacggggattcgaggacgccattacagatctggagcccatggccacaggaggcctactaaacatctcctcctgaggacaaggctctgtccagggatctaaagcccgccacggtcatcactaagaacttcgccgcagacaccaagttcctccctgagctggctaacattgtccgccctcgaataaatgttctctcatgattgaggacaaactcctagctgaaaacctggactctgctcttaaccatgaacagctgctctctgtttgaagccttttctagaacatacctgaggatagaactttgcaacaactacgtgcaatctgcaacaatgctgcaaaccttc

SEQ ID NO: 50907 - DNA, 446 bp, Zea mays
  unsure (1)..(446): unsure at all n locations
  Clone ID: MRT4577_146420C.1
gggggggggggggggttttatatatagcaacaaaattatgtaaggaaaaggagccccggtttttggtaccagaccaagggggggccccccgggggggtaaattataaacaaaccccctgtttttacatgacaaaacccaaaaagcccctgccttggatatccctaacccgaaagggccctggggttttaaacaaagagggcccccccccccaggatcccaacgggggggacggcccaaaacaaaaacccaggggttccacccacctaaacctccccggggggaaaacaaccatccccggtgaaaaatgggctgtatcccgcaaacttcgccccctacttgttaaaaaaatgggacacccccttgcccttgccctttttcccggtgggggnaacgttgacgggaaagccacccccaaacccggaggggttggggggcttgaactttt

SEQ ID NO: 50908 - DNA, 165 bp, Zea mays
  Clone ID: MRT4577_146421C.1
gggtgttttttttacaatggtacccaacatgaacagactttccggtggaacgcctacagcggaatcctgggaatatggcaagagtgggacattgagaacaataccttcagtggcatgtggatgagagaaggggattcctgtggaaacaaaaacaggcaaacaaag

SEQ ID NO: 50909 - DNA, 338 bp, Zea mays
  Clone ID: MRT4577_146422C.1
atggggtggtgttttttttttttgggttgggggggaccgctgtatatttcattaccaaacaacaccttcggggaaactagtacttcaatacacaggggtgcccagggttttttccaaacaagtcctttaatttacaaattacacaaggttgtattgtacaattgccttctttaagttcacaagggcagtttttgggccatataatgcatgcatgcatgggtgcattaaactgccgcttcccaggggacaaatgacaaaaaactttgattatgcccccttaagtttcaatctgggggttggaaacagccatttccgtttttgaatcccaagggcattcc

SEQ ID NO: 50910 - DNA, 371 bp, Zea mays
  unsure (1)..(371): unsure at all n locations
  Clone ID: MRT4577_146423C.1
ttgctcaaccttttgtagcgncgcttgnatctttgcgagatcaacccttatgnngnnccacaagncctttatcgatggagctnnngattgctnagccgngactgtcnctagcggtgtttttcatggtgacggagacttctttttctttttatgattttacgaaatttgttggttccttcttgttcacttgttctcttttttgcttttctctttttcttttttctcttcgtttttttttctcctctcctctttttctttccttttctgtttttttgttttttttttttttttttttttttttttttttttttcttttttttttcttttttttttttttttcttttttttttttcttttttttttttttattt

SEQ ID NO: 50911 - DNA, 245 bp, Zea mays
  Clone ID: MRT4577_146424C.1
aaaaaaaaaaaaaaaaaaaaaaaaaaaaaaaaaaaaaaaaaggggtgaacaaaactaaagggaaggaaaattttatgtgctcgcatatacaaacctcaaattttctatatggtgacctatatttagttcactcttgctggggttacacacttcgggtctttgaaaacccttaggtgtcacaactttatattctcttgactcatatccctttttccaaatctcgtaataacctttagggccccacc

SEQ ID NO: 50912 - DNA, 983 bp, Zea mays
  Clone ID: MRT4577_146425C.1
ccggccgggaccattcgatgtacccaaacgccaataaatccaagccattgcctacctcgaggccggctgacccacacgcatacgcttcatagcgctgatctcgcgcagcaggagaaaactgcagcagcgcttgactactgcatccatggcggccacttccagttccatgtcgtcggtcatcttcctcctactcgctaccttggccgccgatgccagcgcggccaccttcaccgtcaaaaacaactgtaactacacggtgtggccagcagtcatcccggccggcggaggcgagcggctggacccaggacagacgtggaccgtctccgtgccccccggcacaaccggccggttctggggccgcacaggctgctccttcagcggtggtggaagcggcggccactgcgataccggtgactgcgctggcgccctcaattgcaccgtctccgggcagcctcccacgacgctggccgagttcagcatcggcggcgccgaggatttctacgacatctcggtggtcgacggttacaacctgcccatggccttctcctgcagcaccggcgttggtctggtgtgcacgagtcccgcctgccctgccgcgtacctgtttccgaacgacgattccaagacccgtgggtgcagcagcaacagcaactaccagctcaccttctgtccatgaggtgtcggctactctcggatgcaccgtgcacgcacagcatagatggcattagagtatgtatgcatggaacacctcctgaataatttttaaaacgtattaagcaaataaaggtgtgggttttaaaataaaagcttgtgatgagttgtatagagaatttggaacagcgccgtagacatcgtctgccatagatatatgcgcttgtgattcaagattgtgatgagtgagatcgtgtggttagaattgtatacaagaaatcataatcttaatggatcgatatgtatccaaaaaaaaaaaaaaaaaagcggcc

SEQ ID NO: 50913 - DNA, 356 bp, Zea mays
  Clone ID: MRT4577_146426C.1
gggaccctcgaggccgccgcaccgaaacccgtgaccttcctacccgcgccgcgctgcgcgccggcaaccattgctctccccgttaccccaccttccgtcacaccatcctgtcgtatactaccggaacctgctgagccttcgcccgcagcaccatatttgacgaattgcgcgatccagccggggctgcctgcctggcgaccctaacagctttccaggatgctcgttgccagtcgatgcttagagatattcgtgggccacgagtcatccgatgggcgcgccggccctctagggaccttagaccgcatgagagatgcagaatgtggaatgagcgggctgtgctgcacatgatcgatgat

SEQ ID NO: 50914 - DNA, 161 bp, Zea mays
  Clone ID: MRT4577_146427C.1
gttcatgtactttttctgcattaagataaatttaccaacaaggactccatgaattgtttctagttcaatcaaatatacgttattattacaatgcttattttatcactttttttaccttacccatttttaaaacatctctttggtctcatgctatattttgt

SEQ ID NO: 50915 - DNA, 279 bp, Zea mays
  Clone ID: MRT4577_146428C.1
tatgttcagacgtgccgactacctgtatttcaagatcgagggtagaattgttcctgatggagtcaacgcaaagctgctcggcaaccatggatgactagacaagcgtgctcctggagaaggctttcctcgacgctttttcttaaaaccaaactacagatggaatgccaatgcagaccctttggcttagcctatactctttctgctgtatgcaacatgaactttaagtgcatggagtcttacaaggcctcgggggaacctaatgatctagagctgaacatc

SEQ ID NO: 50916 - DNA, 587 bp, Zea mays
  Clone ID: MRT4577_146429C.1
cggacgcgtgggtgcgccgtgtacaccctcgctctcctcgcgtcgcccgccaccgcgtcctctctcgctctccttctccgcttgggcctgccactgcaccgccgtctcactcgcttgtcgccggcgcccccttcctcgctgctgctcgtagggttctccgctcgctccaccgcctgcggacatccttgggtgagaaataaggaaccataaccccccgctgcggtggccgcgcgggcccagctgacgccaatgtcgaagatcccgcggtcgtggatggcgcagcaatgccgctgaagccggaggaagggcctctacggcgcggcatcgacgcgaccaattttttgcctcgcctcacacctgcaggatattaaaacctcacctacgtcctccacctgcatgaggcacctcctaccgtggcaccccggcccttctccgcgtgcccccatcggaggactcagaaccgcgtggaccactggatgcctcttggcctcttccgttgcgtccttgcagtcacggcggtgggcttcgacaactccgcaagtcatctgaggcttaggtgataaagcctacaacaggctaatagtact

SEQ ID NO: 50917 - DNA, 604 bp, Zea mays
  Clone ID: MRT4577_14642C.1
tttttttttttttttttcgattaaactttttatttcttaatcataaaccctgatggcagccacaaaaggtaggaattaggttacacgtatattcaaaagaagaaaatatacctgcaggttacatatgagctctcttcagcaatacatgtccacttggctgtacatctttgtacgtacgacataatacatttgggagtcactttaacatattacagattatcaatcttctctgcaaaacactactttcttttcctggagaaatttgatggtgcagctttgaaccctcaggagttcccagtggtgcacccatgcaggagcagttatcgactgtatagagctcccatttctttatagcacagttctctaaagcagaggccaatcttgggtcttccaggtcaggataagacccatctggagtaacaagcactgctccagtgtatgatagcccagcagcttgtgctgcgccacgataatggaacagaccccagctgaaatcctccgcaacgtcaacaattgtccaatattctttggaaatgacaccattatccaacacactgaagtaaaatgtaccaggagtgctagcccttctcacacgatacctcct

SEQ ID NO: 50918 - DNA, 258 bp, Zea mays
  Clone ID: MRT4577_146430C.1
aagccgggcgttacttatccgcattatttgatatccacagggcatatatacagaggtttttttgccgccttttacaaaaaactccacccgacttttttatttggcgcattttaatctacaaacatatatcccacaacggggtgaatacaaaagaaacatttgccctgctttatcataccatttatatctgggtatcaaggaactttcaagtcttcaatttcttaaccagcttgatggcccaacactccaaaattttca

SEQ ID NO: 50919 - DNA, 2275 bp, Zea mays
  Clone ID: MRT4577_146431C.1
ccctagccgcctcctgcaagtttcagagctcaggaatctgcgccatggcgagtgagacggagaccttcgcatttcaggctgagatcaaccagctgctctcactcatcatcaacaccttctactccaacaaggagatcttcctccgcgagcttatctccaactcttccgatgcgctggacaagatcaggttcgagagtctcactgacaagagcaagctcgatgcgcagcctgagcttttcatccaccttgtcccagacaaggccacgaacacgctctccatcatcgacagcggcatcggcatgaccaagtccgaccttgtcaacaacctcggtaccatcgccaggtccgggacgaaggagttcatggaagcccttgctgccggcgctgatgtgtccatgattggccagttcggcgtcggtttctactctgcctacctcgtcgccgatagagttgtcgtgaccaccaagcacaacgatgacgagcagtacgtgtgggagtcccaagcgggcgggtcgttcactgttactcgtgacacgtcaggggagcagcttggcaggggcactaagatctggtcaagaagcactctgagttcatcagctaccccatctccctgtggactgaaaagacaacagagaaggaaatttctgacgacgaagacgaggaagagaagaaagatgctgaggaaggaaaggttgaggatgttgatgagaaggaagagaaagaaaagaagaaaaagaagatcaaggaggtttctcatgagtggtcattggtcaacaagcagaagcccatatggatgaggaagccagaagaaatcacaaaagaagaatatgctgccttctataagagcttgacaaatgactgggaggagcatctggctgtgaagcacttctctgtggagggtcaactggagttcaaggctgttctctttgttcctaagagggccccctttgatctctttgacaccaagaagaagcaaaacaacatcaagctctatgtgcgcagggtgttcatcatggacaactgcgaagagctgatccctgagtggctgagcttcgttaagggtattgttgactctgaggaccttcccctcaatatctctcgtgagactcttcagcagaacaagatcctgaaggtgatcaggaagaaccttgtgaagaagtgtgttgagctcttctttgagattgctgagaacaaggaggactacaacaagttttacgaggctttctccaagaacctcaagcttggcatccacgaggactcgcagaacaggaccaagatcgccgagcttctgagataccactccaccaagagtggtgatgagctgaccagcctcaaggactacgtgaccaggatgaaggagggacagaatgacatatactatatcactggtgagagcaagaaggcagtggagaactcccccttccttgagaagctgaagaagaggggctatgaggttctgtacatggttgatgccattgacgagtatgctgttggtcagctcaaggagtttgagggcaagaagcttgtctctgccaccaaggagggtctgaagcttgatgagactgaggacgagaagaagaggaaggaggagctgaaggagaagtttgaggggctgtgcaaggtcatcaaggaggttctgggtgacaaagttgagaaggtggtggtgtctgatcgcgttgtggactcaccgtgctgccttgtgactggcgagtatggctggaccgccaacatggagaggatcatgaaggcacaggccctgagggactcgagcatggcgggctacatgtcgagcaaaaagacaatggagatcaacccagagaaccctatcatggatgagctccgcaagcgtgccgaggctgacaagaatgacaagtcagtcaaggatctcgtgatgctgctgttcgagactgctctcctgacctccggcttcagcctggatgaccccaacaccttcggcaaccggatccaccgcatgctcaaactcggtctgagcatcgatgaggacgagcctgttgaggcagaggctgagatgcctcagcttgaggacgacgctggtgaaagcaagatggaggaggtcgactaagtgtcgcatcgcatgcttgccgtttatcttatccctagctaagctacctgtgatagcttaattttcactattgttcgaggtttttggcacgttatcggttgtcctgctggccaggctataagtctggtttatctgttatgtttaccctttttaacagtttgtcgttattattcgtaatggtaaaaatgtagt

SEQ ID NO: 50920 - DNA, 187 bp, Zea mays
  unsure (1)..(187): unsure at all n locations
  Clone ID: MRT4577_146432C.1
canatgtacattaaattgttgttggctacagggtctcttttatggtcatnaganaacaanataaacanaatgcatacatttctgagacctgaattaacattaaaaaattgtnatatattnntcttaaaacatgttgcctctctgcctgcaagcacatacagactattgttttgatttacncagagtg

SEQ ID NO: 50921 - DNA, 318 bp, Zea mays
  unsure (1)..(318): unsure at all n locations
  Clone ID: MRT4577_146433C.1
tcttactcgtgttcggcttgaacactctttgcgtgtccatttaccncaaggacagggcncccttctgttagttcgctccccacntccacccnccccccacctatttctttctcttcacccacngctagctcctcttgggcatcgtcggcagccttttctcctttaacaggtactactccaaggtggtcctctcctgtgagtctttttttatccctctctgtctcattctcttccatttcaacttcttcatggagtactccaccattttggtgtttttcaacagtcacattaccttcattttcttcttgcccctcacac

SEQ ID NO: 50922 - DNA, 447 bp, Zea mays
  unsure (1)..(447): unsure at all n locations
  Clone ID: MRT4577_146434C.1
caaaaacctcgaacaatagtgaaaattaagctatcacaggtagcttagctagggacaagataaacggcaagcatgcgatgcgacacttagtcgacctcctccatcttgctttcaccagcgtcgtcctcaagctgaggcatctcagcctctgcctcaacaggctcgtcctcatcgatgctcagaccgagcttgaccagatccttgaggcgacgctcctcaaggtactccagctgatcgtccttgaggaacagtgtgatcttagggcccctgccaagctgctcccctgacgtgtcacgagtaacagtgaacgacccgcccgcttgggactcccacacgtactgctcgtcatcgntgtgcttgggggtcacgacaactctatcggcgacgaggtaggcagagtagaaaccgacgccgaactggccaatcatggacacatcagcgccggca

SEQ ID NO: 50923 - DNA, 427 bp, Zea mays
  Clone ID: MRT4577_146435C.1
tcaggccggccggggatatgagttgcccacgagtgagtgaaaaagtgagagagtgcaggcaaactgctgggccacggcgcccgccggctgaggtcgcgcgcagtagatccggctgccgcgcaccaagcagatcgcccgccgtacgcgcccagggaggccctccaggactccatggtcatcaaggcctggaagaaggccgcccccaacatccagccccatggacacccctctcaccgtatggagccgggaccgcgcaggtgagctacaatccctagcaagataacagtacagtgctgcttctcctacaactgcgatatcgccgactggggcgtgggattgcgaatggcaccaggtacgactgcccatatgggagctctgccggctcgtgctccacaatggcacagatcactacctgggctctctcttc

SEQ ID NO: 50924 - DNA, 344 bp, Zea mays
  Clone ID: MRT4577_146437C.1
gaaattgcttttattttcttttcggttttcgtggatatggtattatgcgttccaacatttacacccatttacttacaggaccaaaaaaacagcgctctgaactggatgccatttccgtaaaccaccgccacatacatgcttaccctgccaaaaaaagaacaacagcgggaacaggattccccccccatcctagaagaggaaaaaaatcggcactcaggatcagcccctctgtatggtcgatgttcacaagtatcagaacaacccttcactccttgctttccttccacctctacattgccacgggcagaggctcgttggccgagacactgaccccgatatcagcg

SEQ ID NO: 50925 - DNA, 511 bp, Zea mays
  unsure (1)..(511): unsure at all n locations
  Clone ID: MRT4577_14643C.1
gtacctcgaggccggccgggccgggattcagaggcggttattggtcatcgcatacgcagtttgtattcgttgcgcgtcgcgaatagattgcgatctattcctaagctttaaggaatcgacagtcaagtttcacgaccaagcgaacaagctcctcgagttccataatgttgaagaccctaagcttctgtttggtgaaggtaaagaagaagaagaaggtgataaggcggacttctaggagttccaggacttcaatgagtttgacgacctcccccagtcagctgtatgtggcgggtttatttacgttggttacgtttctattatgtgcactttgatttatatcatgtaaatgactatagtctgtagtattattacttagtctttattaatattcgaagcattgtgctatgatgagtcatttatgtaatcgctanaaaaaaaaaaaaaaaaaaaaaaaaaaaaaaaaaaaaaaaaaaaaaaaagaaaaaaaaaaaaaaaaaaggcccctagggcc

SEQ ID NO: 50926 - DNA, 1453 bp, Zea mays
  Clone ID: MRT4577_146440C.1
gccggccgggtcgggacctctcttattcttcctcttatggccacgaccgccatggatatgcgggactctcatctctcctcggcgcccctcatccatccacattaaatctgcatttatcccctgccactgccgcacaccattgatgcttgcctgctcagcttccctctccaaaaatatttaagccatggagccgtgaccctttcactaccgctctccgctcctcctacgtgctgaattattgtagcgcctgcttgatgtttgcttgcagagcaccgcgctgacgattgtcaaaatgccgcatagctggtcgaactccttcgactagctccgacagctccccggaagtcctcgctagacgtatcacgtatgatgtttcagaaaagattaacttggtgaacctaatatttgtatattttacttaagctatttttaagctcatgtcttgtttcataaagtatagaacacacattttttaaaagaataccctcatattatagccattacttacgacgtttttggaaagcgaacgctcttttcgttaggctttcttttagctttatgtatggtgaatgttgtatgttattgagtggtgtttgtttcttcttatttgtttgtgtgatattcagtggttgatctaatagttgagaatcaagtgctattccgatggacgaacctcaaattttcagttagcaaggcaagtggacttctccctctgtatactctgcttgatcccaaacaatacatttaataaagtttattcatatatatatatatgcataatttgcgattggtacctatgtggccggccgggacaccatttcttccggctgctatagtttcacggaatcgttctagatcacacagctcacaaccactctcgctcctctgctcgctatctcctgcaggccctcgcaaaatcactgtcgtgcttctactctggccgtcaccttgccggtgatctgcaccctaaaccttcctttgtgacccggcgctaagagctctactcaactgctccctgctcagttcgtcgaagcctcttccctgcgtgcttctcgcttggagctccacgccggaatttcgccgttcatctctggtgcagcgacctcgccattgctgaaagttccattgactgaagcctacagccagcctgctctgcttgcgtcgaatcaataagaagtgcttgatctagtagttaagaatcaagatctattcagattcgtggaaaagtctcaagttttcaataagcaagaagttgcagatgaagatatgatgctgaactccatggatgctagtctagtgatacccccggtcatcttcctgtggatggatgtccttgtttcgctgtactttgatgaataaaggttaagacattatgtctgttcaaagtgtaatatgttaatataatcgttatttacgcttttatggcaaaaaaaaaaaaaaaaaatttgcggcc

SEQ ID NO: 50927 - DNA, 1205 bp, Zea mays
  Clone ID: MRT4577_146441C.1
tcgaggttcggccgggtagcatcctaccatcctggcaggatccacttatcctactgcttgtttttcagatgtttcaggcagaaagaacgatacttcagagaacatgtctatcagtactgatagtggagtggtttcaaagcaagatcaccaaggccataaaaaggaattgcagttacctggccagagtctttttgttacctcagaagccccttgcaaaagcagcgatgccagtgatatgttatctaatcatcttccaatagatgcatctgatgctaaaggtcacaccatgcaatcttctgatggcattttagagaataatttggcaaggagaattggcggatcatcagctagtgcctataaagcaccggaaggaaaccgaaggaatatcagggcactgaagttgtcgctgaaatcagtaaagcctgaaaagaaaaacaacgatcaaaatgaaaatatggctccaaaccatctgccttcacagtcaagctttagctatttgcagaaaaggcccttagatgctgtttcaaggaaaaaattcgaggggaggtcctgcactggttcaacagaatcctaacactgagcagcaaccatcgaacactaacatggtatcaaatgaagagcgcaaccaaggtctaaagatgctgtgttcacaacgcaggaggctgtcactgaaatcggagccgcggctgcctagagtagaaaatgcctgtgaaaaggagactaagcgacccaataattttcctctaagcgatgagaaactcaatgaactgccatcatctgaaccaatccccaaaggtgaacccgtggcacccagtgaactcccattttcggcgccagcagtcctcaaaagtcaaaccagggcccttggctctgctggtggacagaaagactccagctcaggcaattcctgtgtcaatgaaaacacgcttgccatcgagaatgctgttgtttcagacagtgaagatagcgcagacgagcgtgaaaggcccccaagatcaaggctatcattgatgcggagacgactgggtggaaagctgaggactatagtgtcaccgcagaactatttctatgctgcgttgtaaattcttggaaggcgagtattccaatttgctcaaacaaattgtgcctgcgtttgtggtagatcaggccctataggttagtatatgtgttagagaactctgtcgtcctacaacgtcgtggagggt

SEQ ID NO: 50928 - DNA, 264 bp, Zea mays
  Clone ID: MRT4577_146442C.1
ggagaagagcggcctgtggtcgccgtcgccgccgtgtgtgggctggatggcctgctggggggtgctcctcctatatgagagatgtactccctccaaggagcagggtttcgctaccttttcgtactcgctacagctacagctagtacgtactatactaataaaagctgcagtttcttcaggttcttgtcctacctttcacgtcattcgattacgaactgaacttgttttttttcatcggacaaaatatatctttttattgaacat

SEQ ID NO: 50929 - DNA, 703 bp, Zea mays
  Clone ID: MRT4577_146443C.1
ccggccgggatccatctcacaagctcaactcaagctcaagctcgcattctacgccagcaaattcgtccatttctcacaacttcttcacccaaaaacacttctaatcaataaccatggctgagatccgccgaaagctcgtcattgtcggcgatggtgcttgtggtaaaacctgtttgttgattgttttctccaagggcactttccccgaggtttacgtccccaccgtcttcgagaactatgttgccgatgtcgaggttgacggcaagcacgtcgagctcgccctatgggatactgctggtcaggaggattacgaccgtcttcgacctctttcttaccccgactcccacgttatcttgatctgcttcgccgttgactctcccgactccctcgacaacgtccaggagaagtggatctctgaggttctgcacttctgccagggtctccctatcatccttgttggctgcaagaaggatttgcgatacgaccagaagatcattgaggagctccgaaagaccagccagaagcccgtctcccctgaggagggtgaggagatccgcaagaagatctctgcttacaagtaccttgagtgctcagccaagaccaacgaaggtgtccgcgaagtgttcgagcacgctactcgcgctgctctgctgtcgcgcagcacccgaagcaagtctcacaagaagtgtcttgttctgtaaag

SEQ ID NO: 50930 - DNA, 348 bp, Zea mays
  Clone ID: MRT4577_146444C.1
cacgccctcgcttccggagccgaacccagagggaaagaggcctgggtgaacatgcaaactgccggggcctcaccagacacaggcccagacacaagcaatgggcaagagatacacgaggaaagagcccgtgcatgacaagagtgaggacggcccaaagctgggaggaaggcccgccctccggaaacaggtgcaccccggaaacccaactgccatagaccgcacacgagagcagacaagaacgtcccctcgggccagcagacaaagaagcgctgggatgacaaccagggataccagaggcaccaacaccacaccaaacagaaaaagcagcacgaaaggcctgtggaaaga

SEQ ID NO: 50931 - DNA, 377 bp, Zea mays
  Clone ID: MRT4577_146445C.1
gagggctggtatcattctttagtcaaaggaacaatttcataaggcccatagaattttatttgcgccataaggattctgaaaactgatcagacacttaaattatgcaggatgcttttgaggacaaaaagtgttttggagtaaagggtacacttgtcaaaaacaaattcaactaccaacaaatactggcatgggttgaagtctgcgggtacaatgccccttcagccgagaagcgaattggcttcacgctttatttttgttgtgattaagccactccctttgccttgggataagaagctggaacattgcttttctggggaagtgattctctattgaatttggttgtcttttacttttgggagtttgttgagctctgacct

SEQ ID NO: 50932 - DNA, 700 bp, Zea mays
  Clone ID: MRT4577_146446C.1
cattgggtacctcgaggccggtcgagactctgtctcttcctcattcccggcatcatcgctcacaccctaacacgccacgcgatcccgatgcgcagtggtctgggcagcgaggcatcgttgcgccagaggcgcgttgcgtatgcggctttgcttcggattgctcgcgctggagtccgtgaccgtcgtgcctcttctcctcctcttcggtcatcctgtcgctcgcctcttacaggacccagatacgctgagtaaataaatagcgcagaactgaacatgtgaatgaaaggacgagcatcttctgcaccacccaactactggcctccccctgcaactgaatcatagagtcctgcctacttgcgacgatcacagcaatggaggctcgaaccaaaaacgtagagaaccatgtaatgtagttgtagatgaacggattctgactgctacactgctgctgccataaccagacacaaacctgttcgtgtaatgaagacatggccttcgtactcacttatgatggtccccacttcatctcagtacactgaaatatgacgtatctaattgttatgagcattcctgaaatcactactgatgtgaagacccaaaacctccgagcacaccaacttctgccacctatacatgcaccatcatcttgatatgcaactgatgctttgcagactatgaacaatgatggagctatatattt

SEQ ID NO: 50933 - DNA, 708 bp, Zea mays
  unsure (1)..(708): unsure at all n locations
  Clone ID: MRT4577_146447C.1
accggtaccggccttcccggggctcgccctccacttccgccgccgccgcctcgctcctccctcgccgccgcttcctgccctcccgccgaagaagagcaagctcccgagccaccaccatcatgtcggcgttgggcgatgacccgatcagggaatggattcttacagaagggaaggccacgcagataaaagggatcaggtccattggtggtggctgcattaactccgctcagcgctatgataccgacgcgggccccttctttgtgaagaccaacagccgcattggtccagaaatgtttgaaggggaggctcttggtttgaaggcaatgtatgacacaaagtcgatccgtgttccgttgccatacaaggctggcgcagtggcgcccaacgtcctagaatcctggagggttggatcggcgagatggcgaacgacgatcgcgtggagggtatggtcgcacagacgcgcgacgacgtgagcgtgacgactaggcagtgggcaactcgtgccgcgtggtctgtgtgtgtcgggcatctgtgtgcccagccctaccagtttgttagctacctatactattttattattagtatatagctcgtgctaacgctacgttcctaggaagagnaggagtggggtggacaatgacngtggtggcgcgagggaaggggttgacggcggtgtggacgcaaggagggagggctcaagatgatcca

SEQ ID NO: 50934 - DNA, 1598 bp, Zea mays
  Clone ID: MRT4577_146448C.1
tgctgctgaagtacccaccctgtgttgcatttagcaagtttcaaaacaacaatcaattttgcaaaaacatgattaccggtttttcaactgccgtgggcggcaagacgacaacacatgccacagccacacgcgacacacctgtctcggctgtggcgagcgcgatggccgcaaacgtggcgctggtgctgctatcctcctgctcgccctccacttccgccgccgccgcctcgctcctccctcgccgccgcttcctgccctcccgccgaagaagagcaagctcccgagccaccaccatcatgtcggcgttgggcgatgacccgatcagggaatggattcttacagaagggaaggccacgcagataaaagggatcaggtccattggtggtggctgcattaactccgctcagcgctatgataccgacgcgggccccttctttgtgaagaccaacagccgcattggtccagaaatgtttgaaggggaggctcttggtttgaaggcaatgtatgacacaaagtcgatccgtgttccgttgccatacaaggttggttctttacctacaggtggttcttttatcatcatggagtttattgaatttggtcgttcaaggggagaccagtcagatttgggaaggaagcttgctgaaatgcataaggctgctaaatctgataaaggatatggtttcccggttgacaatactattggaagcactccacaaattaacacttggactgatgactggattgagttttactccaagcatagattgggttaccagttggagttggcatcgagacgatatggagattcggccatactcgaaaaaggtcagcggttgatcaagaatatccgcccactttttgatggagcggttattgagccatgcttgcttcatggtgatctgtggagcggaaacataagctctgatagcaatggggatcctgtaatattggatcctgcttgctactatggacacaacgaggcagagtttgggatgtcctggtgtgctggatttggtggggacttctacaacgcctattttcaggtgatgccgaaacagccagggtttgagaagaggagggacctctatctcctctaccactacctgaatcactacaatctctttggctctggctaccgttcatcagctatgtccataatcgaagactacctatatgtgctggcgatttagtctcttctgtctattctcacatggaaacgaaaagatcttcatttgtgtaaataaatatctcactgcccatccatttggacacggttcggtggctcaaagaagaataatgtaatagtatagtggactctgattgaaaaaaaaaaaaaaaaaaaaaaacaaggcaggaggcgcccgggggggccatattgttaacaaccttagcgaaaagccaaaaaaattttaaaaagggaaaagtggcgcccaacgtcctagaatcctggagggttggatcggcgagatggcgaacgacgatcgcgtggagggtttggtcggtcagacgcgcgacgacgtgagcgtgtcggcttggctgggggcatctcgtgccgcgtggtctgggtgtgtcgggcttttgtgtgcccggcccttccg

SEQ ID NO: 50935 - DNA, 467 bp, Zea mays
  Clone ID: MRT4577_146449C.1
gaaggcgcgcaccacatgccctccccctcctcctcatccggccgccccttcctctccggcctctgcgccgccgcgctccgccgcaagcccatctccgcgcgcgcctctgccgccgcctccggcgagggtctcgtgcggcagctcggcgtcctcgagctcgtgctcctcgggatcggcgcgtccatcggcgccggcatcttcgtcatcaccggaaccgtcgcccgcgacgctggcccaggtgttacaatcagttttgctctcgctggagctgcgtgtgtgctcaatgcattgtgctatgctgaactggcatctcgttttcctgccgtggtcggcggagcatacttgtacacatatgcagcgtttaatgaactcacggccttcttggttttcacccagttgatgcttgattaccatattgcggcagcaagcattgctcgcagcttagcaagctattttatccaattctt

SEQ ID NO: 50936 - DNA, 248 bp, Zea mays
  Clone ID: MRT4577_14644C.1
tattgtatgaactatagcttattgtaatcatacaaagggctctggcaaagatgggttcgtagtctcaacgatgacggttttttcaattcaaccaggtgggggggggggactttcctgcttatttacagggggaacaagtactgcgattcaggctggtagatggtgtgagccgtggttccttcttgatagaagcagggttgatgccggtttgccagctggctgggcgtaacggtggcagctttttataa

SEQ ID NO: 50937 - DNA, 735 bp, Zea mays
  unsure (1)..(735): unsure at all n locations
  Clone ID: MRT4577_146450C.1
gagttttactccaagcatagattgggttaccagttggagttggcatcgagacgatatggagattcggccatactcgnnnnnggtcagcggttgatcaagaatatccgcccncnnnnngatggagcggttattgagccgtgcttgcttcatggtgatctgtggagcggaaacataagctctgatagcaatggggatcctgtaatattggatcctgcttgctactgtaagtaaannnnnnnnnncttagtatccgaattcaggatcatgagtagtggttgcaaaaggatgaatttacatgtctctttccagtaattttcgtcgagatggacacaacgaggcagagtttgggatgtcctggtgtgctggatttggtggggacttctacaacgcctattttcaggtgatgccgaaacagccagggtttgagaagaggagggacctctatctcctctaccactacctgaatcactacaatctctttggctctggctaccgttcatcagctatgtccataatcgaagactacctatatgtgctggcgatttagtctcttctgtctattctcagatggaaacgaaaaagatcttcatttgtgtaaataattctcactgccctccatttggacacggttcggtggctcaaagaagaataatgtaatagtatagtggactctgattgaatttggcccgtcctactaaactaacaccaggaggcgcccgggggggctatattgat

SEQ ID NO: 50938 - DNA, 770 bp, Zea mays
  Clone ID: MRT4577_146451C.1
aaaaattctacgcgctgcttcttcttatccccagcgctccctccctacgtcttcatcctctgctcctccatcctcagcgccggccccagcttgggccctcccgtggcgtccgctcgaccctgcccttctccagtcgcgtcctccctgtgcacgcgcgcagctccctcacggtgctccctctgccctcttcccatggccgagcgcgcctggatctcctccgagctcggcatggatgtgctgtgacttccccagtatcggccgtggcaagctctggtgacccccttccccatggcgcgcccttcctggctcaccggtgatgctcctgctccagctcgccatggcgcccccgccctcaacgccaagctcgccctgtcgcgtgttcctccagctcggaccgcgcccctcctctctgctcggatccgccgtcgcgtgttgctccctggtggtcgagctcgcctagttcgcctcctgtcctcaaccatggatgtcggccgcccatggattgttcacaaactccgccgctagatgccgcgtctcctgcaccagcgtccctgctccctgttctcggcgtcctaaccatggcggccgagatctctctttctctggtgccgtgtgtgctcaccctcgcccatgccgcgtccctgcgctcgtcgtggcgctccagctcgcccgtgcacgctcctctcctctagatccctccctgcacgacggacgtcatccggttctctgtttaatttctagaacacctaggtctgtccacggtcgctccc

SEQ ID NO: 50939 - DNA, 726 bp, Zea mays
  Clone ID: MRT4577_146452C.1
gggtacctcgaggccggccgggccgccgtttctccaagtccaacgctgcccccaccctctcggcctccgcctccgccaccgccgcggtccttccctcccctgcccaccgagtagatttgaggatctccagcttttttaggacaatccagttttcgtcgaagttcaaaatgacggtggtggaggcgggtgaagtgttgaacttgaaggtgggcgagaaccctctactggagggtgaggccaagacggggtacgtctcgcccgacgaccaagacggggagaccgccagcgaaaaaccctgcggcgcgccccagctgaagaagggcccctggagtcccgatgaagataagcttctcaaaaattatgtcgaggcacacggcgaggggaaatggaacaaggtgcagcgcaactccgggctcaatcgctgtggcaagagctgccgcctccgctggaccaaccacctcatgcccgatctcaagaaagggtctttcgacaatgaggagatcgacaagattttgaagttttacctcaagtggggccccaagtgggccaagatagcctcgcgattgcctggtcgcacagataatgaaataaacttttggaataccagtgagactgatttgcctatctatctttctcaagctcctgcagtttcgagcttacttcctacatgcttcttgggtgtagtgggaatgtgctccctgcatcctggaactgatctgctatgcc

SEQ ID NO: 50940 - DNA, 688 bp, Zea mays
  unsure (1)..(688): unsure at all n locations
  Clone ID: MRT4577_146453C.1
ctccgcccccatgccgcagttctgctcgcattggccggatctgggaatgaggaacccacggttccacgacctcctctccgtggaagcctaaaaggcatcacccccataagcgagaggaagaagacacattcctatgtgttctctcagtctgtctgctgctgtctagaaacatcatgtaatgaggctggggaacgatcccacggagtgctcccatgtcagtcgccttggttcggcagaggccagccaccgcggcgcctggtccacagcagtagcagccaccacggctcgctagggctaggccgacctagatgagatgcagtgagctgatgggagagatggacgagcaagaattaccttcttctaccgcaccgtcacatactgtgaagcttccagcaggtgctccactccacccctctcctatctgataaacgttgtcgcccgccgttcccccatccatccctttcgtctgaacgccgccggcagctgctgcgggggggggngggggactgaaggagtgaaggggtgttgtcgtctccgtcagtccatcatcgtctccatcggtttcggttcgtcagcggccacgttctccgcgcttccaccggtccgtaatcgactgttggcgctatggggaagggcagaaggggctcgcacgtcgtcctctctgctgcactgcggcaccgacggcgtc

SEQ ID NO: 50941 - DNA, 179 bp, Zea mays
  Clone ID: MRT4577_146454C.1
tcgtattgttttggtttttttgtgtgaaattgtgttgggcgagcttactcggatgtacggcttgtttcttcaggtcctcacacactagaacgccgccgaattgttcttctaaggttttggggagatgtcgctccggccaagccagcgctagcagatgcggaaggtcaactgcaactaga

SEQ ID NO: 50942 - DNA, 313 bp, Zea mays
  Clone ID: MRT4577_146455C.1
tcggcagcacatcagctcgatatttcgcgctctttaccaaagccaacagccaagcagtcttgtgattaatcagccaaattcacagcgatcacgtcgtccgtcaccagaacctcatgtctgctcttgctcacactgatcctcgtctccgtggtggcgatcttgcccaactccctatgccatgcaaccagggctgtctcagcaatacgtatacattgggaccctaatcatcctgcctgcatacgctcatgctctgcttctgtgtgctcttactctactcttacgctctatactgtcggcgtcccttatgaacctt

SEQ ID NO: 50943 - DNA, 433 bp, Zea mays
  Clone ID: MRT4577_146456C.1
tcgagccggccgggagacgcctgtcgtcgccttcactgaggaaaagatgaggggctagcgccaggtctgtctcgagaggacaatgagcgtcattggtctcccctgagcaatgaatgaaagacgccccgtcccgcccgcgctgacatggcttccttgtactccagctgacccactcgataccttctctgtgaaccaagagatccgagtcaatgccccaactctcatgctgcttcctccacctccagatccggcatttggtactccaccgtttgattctagcgcagatgtttcagtctttgttgattggcacacttgtacttctagtggacgtacgaagacgacaacaccaaccaactcttgggttgcttctctagcattgcttattcttagcaagaaaccacatatgggagccaaagaattgcaatctggttta

SEQ ID NO: 50944 - DNA, 386 bp, Zea mays
  unsure (1)..(386): unsure at all n locations
  Clone ID: MRT4577_146457C.1
aggacttcatctctcctggctgtggctggtgcttcttcctcccgcgacagagaagaaagcaaaacggttaaagccttaaaactccccgacctgacccgccactcgaagcttccacacacgccgcgtgggtcacgcctcctcgccctcctcccctccggccgcacgtgccgcccgacccccaacccccgctctcctcctcccccgtacacccggtccaccgccccctcccagatctcgacctccccggtggtgccgcgctgccgtggcggtagcctccctccctcccgccctcccttagggtttcggncgacgaggggngncatggatcagagccggcgggtcggccgagtcctactgacggtcgcattatggtgtcactgtgtaac

SEQ ID NO: 50945 - DNA, 871 bp, Zea mays
  unsure (1)..(871): unsure at all n locations
  Clone ID: MRT4577_146458C.1
ccggccgggaaaaaactcccgcattctaccccggaattgtggagtccccaatcgcgagacagaccggtcaccacggttcctccctgcggctcctctgccgcgtccggcgttgtctaccggccgttactgcaatcgcgacagaccggtcaccacggttcctccctgcggctcccctgccgcgtccggcgttggctaccggccgttattgctggtggcgagcgccacccccccacccccaacctctcaaagtctcaagtgattaaggatgtctctgtccaaaccgtgcgccatgccggagcggcgcatcgtgccggttcccgcgacgtccgacatcggcgttctgcccatggacgccctgcgcgagattctactgcgcctccaggccaaggagctctgccgcctccgcctggtctgtcgtctgtggcggtccctcctctccgacccgcacttcgccgcgccccactacgcgcggcatcgggcggtgctcatcatcgccgcctacaaggacgacgcggggcgcgacgtgctcgtggacatcatggatctctccgggcaaatcgtgaagaaggtgcccgcaatggagggcgacagagccgccgtgaggggcggggggacccttgaccgcgtctgtgttaggaaaatcgacgatagccgcagcagctaccgagtgttcaacccgattcgcgaggaagtgtactacttaccggacagattactcgatccggctactggagctgtgtaccgcataccagacagctacgcagaagagcatgtggagctcgcttcgagcttgatcaccgagcccaagtatctgtttggacaggtcgcccggacaggagagtgcnagatgtttcgaatgctattccatttt

SEQ ID NO: 50946 - DNA, 281 bp, Zea mays
  Clone ID: MRT4577_146459C.1
ccacgcgtccgtttgttgtttttttttttttttcttaattttatattccacttatctctcatctttctgggaggtttttttttttggaaaagggccaatgcttatggcaaaaaattttaactgcctaatttcttcaccacgctttccgcgaaaccaccggctatttaaaggaaaaccccggtaaaaaccatttcaaaacgcgcacacttcactattgaaaaacctatccattagaaaaaaaagggataaagaaaaccccctaaaaaaaccgttccccaacc

SEQ ID NO: 50947 - DNA, 323 bp, Zea mays
  Clone ID: MRT4577_14645C.1
agcacagcaaggctatctatcggctggcttaagcgactggcgccagtttgtacgattgattagtttagaagatatgagcagaatatctccaaacgggtgaccccacaagcagtctggcctttccatgcttagaagtcgaactctgccaaatcagaaaggggaaaaaatgagttctcgataggcattattggatcatacgggtatgggtttgttcggcttgagaaatgacgcgatccatcattttatacgctgctcgctatttttgaccttgtggaatggaaataaacaatccatcacaaccctatttaacataagctaattaa

SEQ ID NO: 50948 - DNA, 742 bp, Zea mays
  unsure (1)..(742): unsure at all n locations
  Clone ID: MRT4577_146460C.1
ctncgagggcccggccgggnactcccgcattctaccccggaattgtggagtccccaatcgcgagaccacggttcctccctgcggctcctctgccgcgtccggcgttggctaccggccgttactgcaatcgcgacagaccggtcaccacggttcctccctgcggctcccctgccgcgtccggcgttggctaccggccgttactgcaatcgcgacagaccggtcaccacggttcctccctgcggctcccctgccgcgtccggcgttggctaccggccgttactgctggtggggagcgccaccgccccaccccaacctctcaagtgattaaggatgtctttgtccaaaccgtgcgccatgccggagcggcgcatcgtgccggttcccgcgacgtccgacatcggcgttctgcccatggacgccctgcgcgagattctactgcgcctccaggccaaggagctctgccgcctccgcctggtctgccgtctgtggcggtccctcctctccgacccgcacttcgccgcgccccactacgcgcggcatcgggcggtgctcatcatcgccgcctacaaggacgacgcggggcgcgacgtgctcgtggacatcatggatctctccgggcaaatcgtgaagaaggtgcccggaatggagggcgacagaaccgccgtgaggggcggggggacccttgaccgcgtttgtgttaggaaaatcgacgacaggccgcgcagctaccgagtggtaaacc

SEQ ID NO: 50949 - DNA, 293 bp, Zea mays
  Clone ID: MRT4577_146461C.1
cactattccaattctatattgggtagttttttaaacacctaaaaccgcccccttattcccttaccattaccaaaattttcaacacattacataaaataaccccatatcaaaactaacattcatagcttttaaaaaattatacccaaaaacctaaacaacccttacctaaacaaaattcaaaatatataagtctcactaaaatcatttttttatctatcaaagcccttccctaaaaaaaatcacaatcttttatcatgccaaaaacacagctcgatttgggcctaaataaaaat

SEQ ID NO: 50950 - DNA, 629 bp, Zea mays
  Clone ID: MRT4577_146462C.1
cggggagaacaagggggcgtccatgaaggtaaacggcagccccgtggccgacggcagggcgaacgcggccggcagcaaggagcgccgcggccgcacgctcgacggcagcgccgtcgtcagcgggacggagcgggcctggggcggcaaagggttcacggctttcgtcaacagcaacgtgcaggtcatcaacaactcgctgctgctgcagagctcctgcaacggcggcggcccgggggtgcacctcaagctgtccaccaaggccaagaagaaggacggcgagggagccggggggaagagtggctctgctgctgcccccaaaaaaatgatcagcctgcatccatcgctggcgcgcgcatggcgatcgagcagtgactaatgattactactagtatactgttagcatcgataaatttatatgtacgtcgatgtcagttcgcaaaaaaatcgtggtgaatgatgcctgtaaaacataataggatgccgaagatgagcgaatcaagcaaccaaacctgctatgtgtacatggtctggtctctttatgtttgttacttttaaacaaaggaatctctaaatgtttgcttgtgaggaaaaaaaaatggaacccacagataataaccgtattctttctc

SEQ ID NO: 50951 - DNA, 573 bp, Zea mays
  unsure (1)..(573): unsure at all n locations
  Clone ID: MRT4577_146463C.1
aaaaacctcctgaactgagaaagcccctctttaggcgctacccccagggtggggagggcggggggccgaactatgtcgtgaccctctccttcctcttcctcttcttgctccaccatctcctccgccgccaccggcgcaggaccaacgggaagaacaagagaacgcagctgccaccgagccctcccgccatcccgggcttgggtggggggggggcttacngaaacctatccacccggggctcgctcacctaacagaacgctacgggccggggtgcttcctccggctcggctcgcgggaagccgtggtggggtcctccgcggcctacgccacggagtgcgtcaccgagaatgacgtggggggggcgaaccgcccgcgggtccccacgctcctgcggggttccttcggcggggccacgctcccaatgggccgctacggcccggactggcgcaacctccgccgcgtcgccacagagcaactcctgtccgcgcaccgcgtcaactgcatgctccccggcatatccgcccaggggcgcgcaatggcgcggaggatgtaccaatccgccgccggcggccc

SEQ ID NO: 50952 - DNA, 168 bp, Zea mays
  Clone ID: MRT4577_146464C.1
attacaacaattgggaattacaacccagaaagaaaaacacactacgggaagagattccccggagtttcccattcaaagagagccgataacgcttgaacatgactttgagttaaaggatgctgaaaaagattctcataatccttaacagcttgctggttgatgcttgcc

SEQ ID NO: 50953 - DNA, 322 bp, Zea mays
  unsure (1)..(322): unsure at all n locations
  Clone ID: MRT4577_146465C.1
ttttactcttgggctgacttttttttccacctactctcaaaaaagagggggggagaataaagttttgttttcgggcacngcccattccacaacaagttaaattcctttgcgatctatacatttgaagatttcctccggcttcttgttatggttcatcatacattacctagcattctgggcagtgtaatgtcaaataagatgatgtacatcctttttgagcatgcaaagacatgtatcttaagaggaaagcattatgtatactattctatacactcaagaaacgtgtgtgcaatatacaataacatttactaattcactgttt

SEQ ID NO: 50954 - DNA, 276 bp, Zea mays
  Clone ID: MRT4577_146466C.1
actactactccatatcctacacctcctttgcgcggctctttgacaagactcacttttttcgctgtgctacacagctccactgtccggatcagagaccaagaggctcagggcgatggcctcagacgccgcctctgtgccaaattcctgagctgctagcggctgccccgacatgtacgctgacatcggcaagcacgccaagtacctcaacaccctgaatgacaagagagaaaggcttgcgaaagctaggcggaatattacaaggaacagcaaaaagga

SEQ ID NO: 50955 - DNA, 1618 bp, Zea mays
  Clone ID: MRT4577_146467C.1
gaaggggagacgaacgcagactgcagcaggagcggagcgggcggagaggttccgggcgttcggggtggggtttgagatgcctcccgtgaagaagtccaagaaggggaagcggaaatccaaggatggcaagctcaagattgtcagggcgcggggcgcgccgccggcgctgccgccggagctccgcgccctcgacaccgagtggtggtacgctttcctgaacaagcaagtcgagctagagcatgctgtgcctccagatgagggggaagcattcaggcacttcttcaggacttcaaggaagacttttgactacatctgctccattgttagggaagatctgatctcaaggccaccgtctggactgatcaacattgaggggaggctgctcagtgtggagaagcaagtggcaattgccatgaggaggcttgcgtccggtgattcccaggtgtcagtagggactgcttttggtgtgggccagtctactgtttcacaagtgacatggagatttatcgagtcgatggaagatagggctaggtatcatctggcatggccaagccaagagagacttgagcagatcaaagctgtgctggaggatgcttatggccttccgaattgttgtggtggtgttgatgccacccacgtaatcatgacgcttcctgctgtcgagtcatctgcagattggtgtgatcatgcaaagaactacagtatgttcctgcaagggattgttgatgatcagatgaggtttattgatattgttactggttggcctggcagcatgacattctcacgcctgatgaaatgctctgggtttttcaagctctgtgaagctggggaacgtttgaatggctctgtcaaagtttcagcagagggtgcagagatcagggaatacattgctggtgactcatgttatcctctactcccatggcttatgactccattcgaaggaaaacatctgcctgccccattgcaaaactttaatgcccgccaaaaagctgcaaggctgcttggaacaaatgcgttggcgcggctgaagggatcctggaggatcttacacaaagtcatgtggaggcctgacaagaacaagttgccaagtataattcttgtttgctgtctgcttcacaatatactcatagactgccatgatgaattgcttccaagtgttcaacttcccgaacatcatgatactggctataatcgagaaaactgcgagcaggtggatcctaatggcaaagtgatgagagaaaacattacagcacatctccaacactgtgaagcttccaagtttctctgcaactgagctaagttagcttgttgttttgctgggattttgatgatgcatcattattccttttaccttatgcaatttcccttagtttctgttattgtagtgagactttctgattgcaattcagtaaagattctctagaaatggcatggttcagtactatagaaaatagctagttggaaaattacaaggactagccctcatgcttgggtttatgttcttcaggataatgccagtcctcatcatgctgagtgccatgaagttgcataatgtaacaaaattcatgaatgatctggtaactgatatcttattttttgaatgatttgatatcttagt

SEQ ID NO: 50956 - DNA, 352 bp, Zea mays
  Clone ID: MRT4577_146468C.1
gggctcctcactaagcgtaaggaagcggcgaatgtttagacaagggatgtttctcgatgccgcacactcttggaaaaaattctatgcatgaagcgagcgcacccaactgattggcataatctaaacgacctggacaaagacaagcgaattcaatttcacatgaggaaggcactgaaagaccatgatgacgccgagggatcattaattacagatcatgcatacatatctgtgtcggtaaggaaggggactattatctggggcttaaagttgcaacatgctatgatgattggaggcaaaactagagaacatgactacaaagaacagggtgctagtgttaacaatacattaaaca

SEQ ID NO: 50957 - DNA, 474 bp, Zea mays
  Clone ID: MRT4577_146469C.1
aattcggcacgaggctctgttttttttatcgacgagtttcaaacctatcaaataggcggaagaagcgctgaagccgacgggcaactgatcggtccgtgacgcgatgacgtggctccgcagcgcggtgcaccgcgcccttgatgccagctgtgggtcacagtctcgctgacttacaccgtacggtggggggccatcccttgtattcttttcttaccaccatgacccggccagatcttgtagcggggcgaggccaggtttatgaccgctagccggatttacaagagctcgaaggtggcagcgaaaaggctggaagaggaagcgctctcctgcaatggggactaacggttgcatatgatgcgccgaagggtcgtcgcgctcaaggagacccaacgcggcgaccaaagcggacagggagccgaaatttggggacaattcgcaccatactgcgcccctggtggatttgaacatcgatta

SEQ ID NO: 50958 - DNA, 315 bp, Zea mays
  Clone ID: MRT4577_14646C.1
cccacgcgtccgcccacgcgtcagcaatgttgtcgaccacctacttttgagcatagcttttaccatattcctccctcgattcgccattcattccttcacagctgagtcaatagctgtgtcactgactgaatgtagttcttttttttaaagaacgaggccgctaaggtccagggacctgatccagaacattgaatccaaccatcagcattcgcaagaaagagaaagaactcggttcaaagaatcgcttcggtctaaaaacgagtcttccgagatcatgtctatgcgaagagcttgaaccaagcgttcacacgcata

SEQ ID NO: 50959 - DNA, 1527 bp, Zea mays
  Clone ID: MRT4577_146471C.1
cccgcggcgtccgcatcactcgcggactcgcctcgtgcgcttccatttccactccgacccggccggcgacccgccccccggtccccggagcgaccgaggcctcgctcaccgacatgtgggccctcaacaacgccaaggccggcggaccctgcctcacgccgcggcacccagcgccgccttcccttgcgtcgccgtcgacggcatcggctgggcggaggttctggaggcgcagccccgtgtgggcgcccctggtggcggtgcgcgcgtcggggggcacgaggaaggacggctccgtcggtggcgaggccagcggcgaggaagccgatagcaaggcgtcgtctgccgggcatgatgatgcatctaccccaacaggggatacctctgctgggttgaaccaaccgcatgacgagccaaaaacaagcaagccgattaatgtttctagcagcaactactggcgagatgtcagggcaaaccttgtgcgtcgggaacaggagctattagtggatccaagtactccaacagagtcgaaggcgtcctcaggagatccattacagctccctcaaaagtgggctcatgctattacgatgccagaggcaggatgcgttctggttgctaccgaagcgctagacgacgacagcatcttcgaaagaaccgtcatcttcctcctcaggctcggtacaaggggcacgttcgatggcccgtttggagtcatcatgaaccgtccgctctacacaaagatcaagcacgtgaacccgatgttccgagaccaggcgacgcccttcggcgactcccccctcttcttcggaggccccgtcgacatgagcatgttcctggtgaggaccgacgacagcgcgcgcctcaaggggttcgaggaggtggtgccaggcatctgctacggcttccggacggacctcgagaaggccgccgccctgatgaacagcggcgcgatcaggacccaggacctgaggttctacgtcggccacgccgcctgggactacgagcagctgctgggcgagatccgggcggggtactgggccgtcgcgtcctgcagcacggagctgatcggcgatgccttgatgggcgacccttctcgcctctggaccgagatacagcagctgatgggaggataaagtgtagtactctctgagctcagccaggaacagaagcagggccggccgcgtaggtgtttgctcatttgagatgtaataatttgttatgggtaaggttgtggtcgagtctgtacataattggaatagggtgactcgcttgttagttgcccctagcctcgtgtagcaactgctgtgcgtcgaatgtactgaaacaggctctatataatgcctgcctgcctatgtatttcagcaattggcgaacgtgaagatggcgcttctggtgaaaaaaaaaaaaaaaaaagcggccaaaaaaaaaaaaaaaaaaaaataaaaaaaaaaaaaataaattaaatatgttaatattaatatgttgtcttcaagtctacgtaaatagtgatgcatacaaacaggactgaaa

SEQ ID NO: 50960 - DNA, 734 bp, Zea mays
  Clone ID: MRT4577_146472C.1
gccggcctgtttcgggattatccagtgctctctcctcttgttagtccgtcgctctatcctacattcgcttcaaagaagcgcgcgcccatgtgcatgggcacacaagcctcagacgccacgctccaactgctggacgcggtctgccaggcaaaggcgaatccgaggtatctgaggtcgaacatcgcgctgaccggcgtccatctcccacgtgcaggacccattccgctattacacctacgacgtcccgaaggtgcataacgaggtggagcactggcacttggaccccatcaaggctcacatcatcttcggcggatgcacggacaagctgatccacaaggagcaggcggaggacttctaccgcatcaagtgatacgtctcgcctgggagacaaggatcgagatgcccagcgcctggggctgcttctagagctacggctccaacactcttgagattgtcgcgcatagagtatagcctgtcgactcgtgacacaggctgctgctccaatcacaatatcacctaccacctctaccggggcttccctaatatataagagcaacatctccaccacaaggacgaacatctacccagagaatgaatatcccaacatgtaggtggtcggacagaacttccgcaggatcctagagaacgtgcacgccatagaactaaagtatcccggcaagggcaccttctactaatcacacttaacgaacgccgcaagctccaggcgggatcca

SEQ ID NO: 50961 - DNA, 256 bp, Zea mays
  Clone ID: MRT4577_146473C.1
ggtgcaaagaaaaaactttttcagaagcaagatcaagcactgcatacagctctgctttgctttacgtctacttcttctacttacttgatcagcttcaaccccccccactttcccttatcttcgaatcgaaaaaacatgccgccaagcttttgccgagcaccaaacggcgtcgacctcccttcaaatttcctgcgattcacacctgctccgtctcagcccccccaccacactctctacctcaccccccccgcccttc

SEQ ID NO: 50962 - DNA, 385 bp, Zea mays
  Clone ID: MRT4577_146474C.1
caaaaggaaattgcaaaataaatagatcagggggtcagcaaccaatccataccatcagggggggcacccgaaacaagacgaagggatccaacaccaccttaaaatgaaggttcaggcacacaatttgccgtgaaatttaaaaacagtttacaaccccatgcaggacggaaagtttgccacaaaaaaatcaaccatgcccacaaagctttgcacggggtacacacataaaatgacaacggttgttcacaattcaaacataccacccagcaggcaggggaggataactttggtgagcccaccagcacgggcataatttgccaccgaacaggtaccccagggaagacccaccgccaggaccagcgtgaaccttggttaaaggacggcc

SEQ ID NO: 50963 - DNA, 391 bp, Zea mays
  Clone ID: MRT4577_146475C.1
ggatgataacattcaggcaccattccacgatctgcatgggtgcagctagacggacgcgtggggaccattcctttggtggctgactcaaccttgcctgccctctgcctgcttatagggaagttgatgacaccagagcttaccaatgcagacactatctggttcatggcacttttacatgggcatctccgcgaccgagatgctggagatgagagagagtagcaggaaccttctacatctgcaggacgaacatacagttgtggcacatgtgaagcgtatcggcgcatatgctcacagtggtccagggcctgctaacagcgtccgacgcctatgcctcgagcttgtgcgggactctgagcgccggggacgcacaggaattctcctatctttacac

SEQ ID NO: 50964 - DNA, 479 bp, Zea mays
  Clone ID: MRT4577_146476C.1
ctaatgactagtgaaatatcatttatgcaacttaacttttatttgttactaatgccaaatgcaaactcctttgtttatatatactgggtaagtcttgtagttatgttgttttgtaggtacctatagcatattggcgaccatgtcatcccgtagatgtcagcaaagtaggtgagccgtcaaaacacgctcttaaacaaggcagctactagttactccgatttattagttatgttcggtttgtattaatgtagggctcttaaataggaaagacatggtagggtaacaccgattattagggtatgtacaatcctgatattgttgtatgatactttaagtataagacacaactaaaacacaatataatacagtaaaaaaaaaaatgcaaataaaaaaaaaaaaaaaaccggcaagccatattaaaaaataaatttttaaaaaagtgtttcattctactgggggcggcccttttaaagaaccca

SEQ ID NO: 50965 - DNA, 848 bp, Zea mays
  Clone ID: MRT4577_146478C.1
tcgtgcatacacaattgttagagtccccatgggttaccaaattatgtgtttacggtttacagggattaccatcgttctgttgtataacacaattctttctcgagtcatgacttgttagtttgtttgttcacaacaagtttgttaatagtacgtgttcatacatgtttttgttagtacctctatggtagcttcaaccaaatgttgtccatgttagaacgcaattgatgtcaatacatgcaagttagtatgcccttgttagtgaactaacaacctaaatccacatcagatggattcagcagactccatagccgacaaggcaattggaaggatgcaagagattgcggacaagatattttccgtagctcgggaaacaatccgtcccggacgcgggttgacctcatttgacgctaccaaacttcgtgtagcattggaggacatagcttgcatgcttgagcaagactctctggtgttgcaagagaatttggacatcgtgaacaatgtaaacaacccgggtgtagcagctacgaaccttctaccttgtcctcaccaccccctgctgacgacgaccttactccagactgggactttgtggagcacttcgaaaacttctggggtgttgaatatgacttcgatcagatgccttcatttagtgacaatgaggtttaagttagaacatggtgaacctagtagtcaggtgttagggtaacagggatagatcaaccttttgcttaatgcgcagttctaaagtgttccttgtgcttttgtgtccaccagcacatgaatttcttcagtctatatatgtaattatggcaaaccgaatgtgactccttatggtactaccttatgtt

SEQ ID NO: 50966 - DNA, 696 bp, Zea mays
  unsure (1)..(696): unsure at all n locations
  Clone ID: MRT4577_146479C.1
aattcggcacgaggctagggttttcagtttttcgagctccagtgcgccgcggccgccgcccgtgatgcctgactcaccggagctagtcgtgagggcgctcgggaagcgcctggcgcatccgcgcttatgcaaggacgcccttatcaagctcctcaagcaagctgaaagtgcattatcagagtttagtcaatcatcctctctgcaggatcctcttcatgctctgagcaaatctcttgtccagaccactttactcaaccataaggataaggatgtcaagcttcttgtttctgtttgtttaatcgaagttatgcgtgttcttgcacctgatccaccttttagtgatgaaatacttaaggaaatatttaagctatttatcagcatatttgcggaccttgctgaaactagcagtccatttcttactagaaggatgaaaattttggaaaatgttgctgcacttagatgttctatgatcatgctcaacattggctgcgaggacttgattcttgatatggtcaaaattttcttctccacagtgaagcatggtcttcaaaagagtgtgcaccaagctatgctatcaatgatgacacanatattgaatgaganagntactcagtctcttgtagatgtgattttacgcaatttantaaaagatgacaagggagcatgccacaagctagctgttaacatcattgaaaa

SEQ ID NO: 50967 - DNA, 366 bp, Zea mays
  unsure (1)..(366): unsure at all n locations
  Clone ID: MRT4577_14647C.1
ccagtcgactgtggccatcatggaccattttggcaagtttgacagcgttcttgacccaagatgccactacatgccttagttcaccagcaaccgtgtatctcggcatctcacactcactctgcagggggggggggggccccctcnnttttatttaaacaaacgacaatctttttctaaatagtagtggcatctattcaataccccgctctccctaacaaaacaagtgaccctttctacaaactgagcaacacaagcccccagatccaaccctacttctttgacctcatcacagcaacccttcccaacctccatttccaccatcctttccaccaaaagaccaaatccaaacgtcccggaaggaaaacc

SEQ ID NO: 50968 - DNA, 731 bp, Zea mays
  Clone ID: MRT4577_146480C.1
attccgtcgtcagcatctgcagcttctgattgctctggggggaaggagagagagagagagcgagagactgtctagtaaagaggctatgacgggttcctcgaacgaagatgatggagaagttcagcgggcaggtggtggaggtgacggcggatgtgtagacaacgaccaggcgcgacgccgtgctacctgcacgaaggcgtggcagctggtgcggggcttcctggacgcgtccgaggcggccgtgctcgtgcagctcggcgaccacgggcatctcgcctactcccacaccaaccaggcgctcctccgacccacgtaattcgcggccaaagacgatgtgttctgtgctgttcgagggggagctggacaacctggatcgtctgaaccagcaccacggcgtgtccagaaaggacgccaacaatgtgctcctcgttctccagagctacaagatgctgcgcgaccgcgacccctactcgcgcagattcatgctcgctcaactcatcgtgtcctacaccttcgacctcttcgacaagtactacaaatcactgttagtggcatctgacccctagtctctgttgccgctcttctggcggagtcccgccgacgcctgccctgtcttctccgacgacatcgacatgctcataggctcatgcgtgaagtcgctcgcgccgttcccgcaaggctgcttctactccaaggccctcttagggctcaagcgctaccataaccccaag

SEQ ID NO: 50969 - DNA, 125 bp, Zea mays
  Clone ID: MRT4577_146481C.1
agacgcgtgtgctgactcttgggagcgcgttttattatatttcaagcatcacggggcggggatctatgatctcattcactatctttggtagcagcagtcgcctaaacgtatcctccttgctgatt

SEQ ID NO: 50970 - DNA, 347 bp, Zea mays
  Clone ID: MRT4577_146482C.1
tctgcaccgagcttatcaatcggctcaacacatgtctcctccaaatagtgcgtgcactcccttgccccctaggagtacacgcactcttctgaaccagcttagataattcttactaccttctagcttcacatcattaggcacaagttccaacttcaactcagatgtacctgtatttgccctagcaccaatcaaccctaaccccatgagctcctggatcatacttctcatttcactcatcatctcactctttgtaatccctcctgaaccactaccatcaatttctgtcttcttcgcagcctcctctgtactcattttcacagaagcacagagtcacacactctactcct

SEQ ID NO: 50971 - DNA, 1780 bp, Zea mays
  Clone ID: MRT4577_146483C.1
aacagagcacgagaagttgactatcgcgaggtggccaggaaggaaaagtagctgcggcaagcggcatggggtcgcccaaggcggccaagagcatggtgaagcagcgcatctggcgtcaccggctcgtcgcgccgttcgctgccgttctcatcacggccgtcgtcgtattctccggcctgttcgcgcaggacccaagtgccacctcggagttcactgccgtgaatgtgggtaacaccctgccagtgcgcgataagtcggaatccacagagcccaatcaagctttccaaggcaccgtgcctgcagcaggcgagagagggacagcaacggcagtgccggcccaacgagaaagaagcagtggaggatctgaacctgaagagaagcaatcgcccccacaggaccaggaaggagaagaaacctctgctaagtcaggtttagtccagtacacaacatgcacacctcgaacgggagcaaccgtctgtgatctctccaaccagcggtacgacatctgtgagctttgcggtgatgctcgcaccattggccgctcctccacagtaatgtacgtcccacagccccttacttccaacggtgaagagtggaacattccagcacagtcacggaagagccttccgtggatcaagaaggtgactgtcaaaaccctgaaggcttcccaacaggcgccaatctgcacatccaggcacgccatgccagccatcgtctttgcgttgggcgggttcacaggaaacgtctggcacgacgtgagcgacgtccttgtccctctgttccttaccgcccgccagttcgaccaagatgtccagctactcgtcaccgacagccggccctggttcatcaagaaatactcggcaatcctccgccgcctcacgagacacagcgtcatcgatttcgatgcagacgatgaggtgaggtgctatccgcatgtcatcgtcgggctgaggagccaccgggacctcggcatcgatccggactccacgccgcagaagaactacacgatggtggatttccgtctgttcgtccgcgaagcctacggactgcccgcgcctggagtggacataccgtacagggctgacaaagacgagcccgagaagaagaagccccggatgatgctcatcgagcggggcaagacgcggaggctcgtgaacacgcctgacgttctactcgggcttggctggttcggcttcgaggtggtcagggcggatccaaggacccactctgacctcgaggagtttgcccgcctagtcgactcgtgtgacgcgatgatgggcgtccacggtgccggtttgaccaacatggtgttcctgaggtcgggcgcggcgctggtgcacgtcgtgccctacggggtcgagttcatggctgacgggttctacggcgcgcctgcgagggacatgggcctcaggcatgtgcggtacagcgtcggtccagacgagagcacgctgctggagaagtacggcaggaaccatgcggtggtgagagacccggaggccgtaaggagcggcggatgggagaaggtcggggaggtctacatgaccgagcaggacgtcgtgctcaacgtgacgaggtttggacctagtttgttgaaggcaatagagttcattgtgtaggtgggcgagacgagatgaggtttgtgttagctatgacaatggaactagtgtacaccgtcttttttttatattaggttttattgtttctgcttctgtacagggtctaaaatgtatgatgtggtgctctgggaaattttaaggtatagaaactcttaatttttttg

SEQ ID NO: 50972 - DNA, 887 bp, Zea mays
  Clone ID: MRT4577_146484C.1
atctttcttcttttgctttctttctcccctatcaccgaatctgtatgtgttcttactagagtttattgggactcgtagtatgccgtagagaagttgactatcgcgaggtggccaggaaggaaaagtagcggcggcatggggtcgcccaaggcggccaagagcatggtgaagcagcgcatctggcgtcaccggctcgtcgcgccgttcgctgccgttctcatcacggccgtcgtcgttttctccggcctgttcgcgcaggacccaagtgccacctcggagttcactgccgtgaatgcgggtaacaccctgccagtgcgcgataagtcggaatccacagcagccagaggatctcccaacaaggaggatcttgcaacagcggcatttgaggaagaattggatgttggaaattctgagctcaatcaagctttccaaggcaccgtgcctgcagcaggcgagagaggaacagcaacggcagtgccggcccgacgagaaagaagcagtggaggatctgaacctgaagagaagcaatcgcccccacaggaccaggaaggagaagaaacctctgctaagtcaggtttagtccagtacacaacatgcacacctcgaacgggagcaaccgtctgtgatctctccaaccagcggtacgacatctgtgagctttgcggtgatgctcgcaccattggccgctcctccaccgtaatgtacgtcccacagccccttacttccaacggtgaagagtggaacattccagcacagtcacggaagagccttccatggatcaagaaggtgactgtaaaaaccctgaaggcttcccaacaggcgccaagctgcacatccaggcacgccatgccagccatcgtctttgcgttgggcgggttcacaggaaa

SEQ ID NO: 50973 - DNA, 374 bp, Zea mays
  Clone ID: MRT4577_146485C.1
atcgtcgtctccccgtaccgacgaattggaatacggaaagcgaaagatgatggatctcgccgacccccagcagcagcagcggatcatcgacggcgcggcgctgctgctggccaccgcggccttcctcaggatcctcctgggatcccgctccggtggcgataagcgtctgccgcccaccatcccggggacgccggaggacggagccctcgtcaagaaaatgcgacgagaccatccccatgatccgggagtaatacgaccgcctcggaagcgccttcaccgacaccatcatcacccgcaggatcacgatcttcgtcggacctgagacgaccgcgcacttcttttagggaaacgaggtcgagatgagccagcaggag

SEQ ID NO: 50974 - DNA, 783 bp, Zea mays
  Clone ID: MRT4577_146486C.1
tctgttccttaccgcccgcggggactatcgcgaggtggccaagaaggaaaagtagcggcggcatggggtcgcccaaggcggccaagagcatggtgaagcaacgcatctggcgtcaccggctcgtcgcgccgttcgctgccgttctcatcacggccgtcgtcgtattctccggcctgttcgcgcaggacccaagtgagtttattgggactcgtagccacctcggagttcactgccgtgaacgcgggtaacaccctgccagtgcgcgataagtcggaatccacagcagccagaggatctcccaacaaggaggatcttgcaacagctgcatttgagcaagaattggatgttggaaattctgagcccaatcaagctttccaaggcaccgtgcctgcagcaggcgagagagggacagcaacggcagtgccggtccaacgagaaagaagcagtggaggatctgaacctgaagagaagcaatcgcccccacaggaccaggaaggagaagaaacctctgctaagtcaggagctagcttctgtgctcggacggtggtacacaaactggaggaagaatatgtcctttgtgctctgctggagcctcggctctcaacaaactcctctctaggttgctctcctcgggctttctatctcaaggagatgttttcgtgggtcgaggttgtatttttttttgactttgtacctttgtacggggttcagagaggcctctcaataactccctggactattttttttcttctttttaatgaaatgccccacgagtttattttg

SEQ ID NO: 50975 - DNA, 599 bp, Zea mays
  Clone ID: MRT4577_146487C.1
gcaaaataaactcgtgtggcatttcattaaaaagaagaaaaaaaatagtacagggagttattgagaggcctctctgaaccccgtacaaaggtacaaagtcaaaacaaaaatacaacctcgacccacgaaaacatctccttgagatagaaagcccgaggagagcaacctagagaggagtttgttgagagccgaggctccagcagagcacaaaggacatattcttcctccagtttgtgtaccaccgtccgagcacagaagctagctcctcgtcacgttgagcacgacgtcctgctcggtcatgtagacctccccgaccttctcccatccgccgctccttacggcctccgggtctctcaccaccgcatggttcctgccgtacttctccagcagcgtgctctcgtctggaccgacgctgtaccgcacatgcctgaggcccatgtccctcgcaggcgcgccgtagaacccgtcagccatgaactcgaccccgtagggcacgacgtgcaccagcgccgcgcccgacctcaggaacaccatgttggtcaaaccggcaccgtggacgcccatcatcgcgtcacacgagtcgactaggcgggcaaact

SEQ ID NO: 50976 - DNA, 531 bp, Zea mays
  Clone ID: MRT4577_146488C.1
aatataaagccggtatgtatgtgcaatgttacaccctctcttacgggggcaaaattctagcagattacaatttacaagtaacaacaattcgctggcaacaacatatacaggtgacttgtctcatttgagaattgagaccaaacacatccgccatgttatgaacaggaaaatgctgctcaaaaggagagatcctttgtctatgagttcctgatagtcgtttgatcagatccacggagcggcatctttgccctcctcctctatgagcttgccctttgtttgccagagccagttgagacctttcatagtagcaggccttaacatcctctccttcaaaaaatggaaccctcgcggacttcatgcatgacaacccctgccttgaattgcatggatgcttctcgtgagatggcctcatggacctacataagaaaacattctgtgtgattggttgctcagctcccaacgcccggcttgctcctcacaaacgttgaccgcgcctacgttcctgatcggttggctgcacgacggcgcccc

SEQ ID NO: 50977 - DNA, 466 bp, Zea mays
  unsure (1)..(466): unsure at all n locations
  Clone ID: MRT4577_146489C.1
cgagaacactcggtgtaaaaatacgtgagttgggactggtcactggtcactagtaagggggcgaaaccaaagtgccttgcgccgatagatggcgaaatcaattcagaattggagaacaaggagaaggcgaaaacctcaacctaaaaactggaaaaagtggaatcctcgaacctctcactgatgccgaatagtgagtnggaatacttccctctcttgacactgggggttcccccttaatggggaagaatgaaaggaagaggtacttaacttaaaattagaagttcaagaatcttttgaacgaatccaagtatttaagctagtaaagtgtaatggacctcagaccttttgatgaacttccctaagtggccaagggaaaagcgtttaagctttcaaccccttttgaaaccgtcttcaatttaacccttcttctagcttcttcaacttttacgtataaggaatttaaggt

SEQ ID NO: 50978 - DNA, 769 bp, Zea mays
  unsure (1)..(769): unsure at all n locations
  Clone ID: MRT4577_14648C.1
gggcttcatcagccccggcaggttcttagtggtgacatggccggaatctctcttcagagacacgaactgcaccacaccacccgtaaatcaaaattacacagtgaacaagcctggcgaacaactgcagtttccggcgcagaggtaggggaacgaagaaccagcccgcggatgcgaacatcaccttggccttgagcgatcggagctcgacctgcgtgaactgcccctgcagcgaagggtcggacacgacgaccctgacgaatccggacatccccgccggccacggggcgattccacgcgcgcctgaagcggctgcaagacgaatccagatcagagcggtcacgcgacctggatgtaatggagcccttgaaaaaagaagaagtgaggagatggcgcgtcccgacgaagagacggcgcggcgaggagatgccttccggattggtgacggcaatccctcaccctctctggcgcgcggtttccttgcgctggacggaaaaggtgagcaatggcgtcctggtctccagatttcgtgggggccgaggcgcagaggggaagtggtggagacgagaagaggaggtaagggcagggtggagttcgggtttctcngcgtttgtttattcaccttcctgtcgccgaattaggtntcccccggggttaagccattggaaccgttgaaactgctgctgtttttcccaccttcctgtcggcgaattaggtttcctgggggttaagccatggggaacatgggatctgctgctctttttttccactt

SEQ ID NO: 50979 - DNA, 266 bp, Zea mays
  Clone ID: MRT4577_146490C.1
ctcgtcgtcgagtatcagcacgcaatagttgacccagagcagctgtggttagtgcggctcaagagctggctgcttgtgttttcgctactagtattctggaaggaagcatcgtgtgactatcgccgaagcaactgcgctctccaagtccagccccctttcccttcgcacacggttctcaggacttgtggttccgccgttgcaggttgagacagctgaacggattcggaactattggctctggctcacttggtcgactgctccggtcg

SEQ ID NO: 50980 - DNA, 253 bp, Zea mays
  Clone ID: MRT4577_146491C.1
tgtatagtggacagggacattcacgtgcgagctgtcggatgcagtcactggcctcggatctaaacaaagttcgcactttccatataggccagagcgcggatctcgccgtgcattgttgcctgatagctgctagctgggtcctgtcttcgactaatcgcttatacctgtgtgaaagataactcattggagagagacttagagcagatgccgacgtagaagttataggtattgacggcttggaacatgtgggaga

SEQ ID NO: 50981 - DNA, 394 bp, Zea mays
  unsure (1)..(394): unsure at all n locations
  Clone ID: MRT4577_146492C.1
tcctttgagtgccaggagaggagccagcagactatttcattagatcagatcgatcgcccctcataggggccgagaggcggcgcgaggaggagcggcctgggcctggccatggcggcggccctgcagctcgctgcgctggttgacgctgcaagcggcggcacggagccgaggcagaagctggctgctggcagcggtaacgacgacgaccacgcagccgatctcagccgactgtccaacgtcactgatccaccacggagcgggcctccgcgtgcggatgctgtcatggcgaagcggcgacgcggcctcnctgctccgccgccttgatacaccagcatgcaggccgccgtggatcacgcaccagcaccacaagatgccgaggaggtggaggacaagg

SEQ ID NO: 50982 - DNA, 530 bp, Zea mays
  unsure (1)..(530): unsure at all n locations
  Clone ID: MRT4577_146493C.1
gggtaccctcgggctcgccgggatggaaccctaaaacatctccagccgccacctgctagccagccgcccagctgccgccgttcagttttttttccctggcttctgctgttcgcctgttctagcgttcttcacggtcacgggcaggctgcagctttgcagattgtctccatcccgccagcagcccagcgctggtcagatttgctgctagcttcttccgtgtggctgttctccaactccaagagtccgacgcccacaaatttgctgctagcttccaccctctgactcccacgctgccgcaactaccatctngtgtgaaggaagcgctgtgcgcgagaaagctctccacaagacagcaagcgcaggacagcgacgagttgggtggaggcgctgacacaattcttgcgatgttgtgggattcggacagcgatgatgaagcgcacgtggttgaccatcctactgagcatcgtgctgctcctcacgcagagaaaggaaagaccatggctgatgccaacgcgtcttctagtggtgct

SEQ ID NO: 50983 - DNA, 316 bp, Zea mays
  Clone ID: MRT4577_146494C.1
ctgatttatataaaattgttacacggtttctgaaaaccactatgctccaaaggggtcctaaagcttgaaagccaacgaacaaccaaaggaaaagtttttttgaacaatacccgagatgagaaaggagcaaaacattttgaacagtttatacttttttagatgaacctcggaaaaaggccattaagaagaacctggtccctgaaagcttttatttgacataaactgagcataatttagccaatccgatgcaatgaatccccccccccaaacatttagggataaatttgggtgtcctgaagttggcagccataggcct

SEQ ID NO: 50984 - DNA, 362 bp, Zea mays
  Clone ID: MRT4577_146495C.1
cgacaagaagaaccggtcaacggataaggggttcctgacggtaaggcatggacaacgctgcaagccagaaccttacgatccatgaggggacagtaaaagaactgaaccgagcccctgaatagaaaatagcgggacatcggtggataaacacactattaccacaggcgatcctggaatgccaggaatcaaggagaccgagtgtgattaccaggaaccttctattactggttcgtaccagaagtcctttgaggtaacaggaacagtgtggaataaatggggcacattacacaaaggtataagggtgccagggggctctttttttcttcacggtcaacaaaacttaaccggagaacacattcttt

SEQ ID NO: 50985 - DNA, 1634 bp, Zea mays
  Clone ID: MRT4577_146496C.1
cggctgcgggaaaccccgcctccgcgatcctcccgcctccgcgatcctcaagcacgcaaatccctacgcgaatggcgtcgtggccgtttcaaccgccgcgagccgcccgccgcatgcccagctgctacctctgcgaaatccctcgcccagctactacctccgcgcaccagatccacgccaacatccacgcccagatccagtgcataggatgcccccgcctccccctctccgcgatccgcgcgtgccctagcctagctgagcgctccacgaaatccacgccctcctcgcagaggagtatgccctgatccgtggcgtccggggcgacatccaatttatcaccgacgagctagccagcatgcagaccttcctcagcagcctgagcaagtgcgaggagggccacaacaactagacggaggactggatgaagcagatctgggatgtcgcctacgacatcgaagactgcatcgacgacttcgcctacagcctccgtccagaccccaggggcagcggctaggtgacggtcgtccgcaagattctctacgagatccggacgtggtacccctgccgcaacatcgccacccagatcgtcgatctaaagaaccgcgcgcagcatatcggcgagcaccgaaccaggtacggcgtccgcgacccgcagcctaggaagaagagcaacttggggggcgctacggggtatctcgctgctgagaatcaggacgtaacccggcaactcgtccgcgcccagcagcctgtgggggtgaagtgctctgtgcttgcaggcgcctgcaacctctgcaacggtggcatccgcttcgtccgggagcagcaccccaacaggtattgtatagccgcgttgctcaattttcagtcaaatcacatgccgctgcagattgagtctaggagggagctcctgctcccgacggatgaagacagcattcacgccggaggtctgcgtcagccaccccagcgcctcgatggcggcgtcccgctccgcgagctgcttgttccgcttcggcttccccacgaactgcatccccttgaactccaccacggccctgaactcgttcgtcttgaggtgcttcgtcttgtacctgggcggggtgtggccggcccgcatcagcagcgtctgcagcaggctcttggggttcatcccgtcctttatgaggttgctcttgtcatcgtcctcggggctccggagcctggcccggctcgtctcgcggctgaacacgaacctcccttcgcacaggtcgccggcggcgagctcttgtacggcgaataggatgtacttgccttccttgtggattgctcgccgtcggcttgttttatttttttatttcttcctgctgctccctgcttcgagttttgtttgagactcattgtcctggtccttggcgattaatgacttaatgtgctgggatgtgttgtgtgtgtggcattttggaccatgttaggcgagatctggtgtcaatagtttgcatattcttctggtgcaccgcgattggtacttctgcaactaagcatgccattccctgtgcctggatgaattaatagtagtagatgtgttgatatcgtcctgttggtttgttgctcattatctgatctcattatttgatattgcgcatctttggaacagcaac

SEQ ID NO: 50986 - DNA, 1550 bp, Zea mays
  Clone ID: MRT4577_146497C.1
aattcggcacgaggcggaattgaattccggtaggatttgagagcggagcggagcggagaggagaggagaagaaggcggtaggcggggaagatggagatgccggcagggagcggggccccagcgctggcgcggcagggctcggtctactcgctcacgttcgacgagttccagaccacgctcggcggcgccagcaaggacttcggctccatgaacatggacgagctgctgcgcaacatctggacagccgaggagtctaacgccatggctgcggccgccccggccacggccacggccacggcggccgcatccgtggacgcgcacgcgcagcagcagcagcagcagcagcacggggcgcccatccagcgccagggctccttcacgctgccccgcacactcagccagaagacggtcgacgaggtctggcgcgagatcgtgagcctcaccagcggcgaggacgcgcagcaggttgcggctcccgctcccgctcccgcgcccgagcccgagcccgcgcccgcgcccgcgccgctgccggcgcaggcgcaggcgcagcagacgctggggtccatgactctggaggagttcctggtacgcgccggcgtggttcgtgaggacatgggggggcaccagaccctcctgctgcagccgcacgcgcaggggcttttctcccaggggaatgcggtcgcgccgcagaccctgcagctgggaaacgggatggtggccggggtcgtcgggcagggcctcggaggaggggtgacggtggcggctccgacgacgccggtcgtgttcaacgggttgggaaaggtggaggcgggtgatctgtcgtcgctgtcgccggtgccgtatccgttcgacactgcgctgaggatgcggaagggacccaccgtcgagaaggtggtggagaggaggcagcgccgcatgatcaagaacagggagtcggccgccaggtcgcgtgcgaggaagcaggcgtacataatggagctggaagctgaggtggcaaaactcaaggaccagaatgaggagttgcagaaaaagcaggttgaaatgctaaagaagcaaaaggatgaggtcctggagcgaatcaacagccaacatggaccaaaggcaaagaagctttgcctgcgccgcaccctgactggcccatggtagcctgctgaagcttgcacaaaattgaccgaagtcaagatcgtcgggccagatgtgcccgtgtgtatatatcagatgaagtcaagagtactgagtaccccgttacccctgtagaccgccgctacttcagagctgccgttcttgttctgtgacgtgggtagtctgcgcctgacagttcgctgtttaggttcggttgcgcgatcctcacatgaacaatgaggcgtgccatctaatttgtttattaactcactcctatctatggtgagataatgcaagtaacctggagtatgtttggttgatttgccgttttgaaaaatatgctgtgagctgtgtggaaaaacagcggtggcccgtgtggaaaatagaagccgtttgattttacagctaaaaaaaagggcggccgccga

SEQ ID NO: 50987 - DNA, 247 bp, Zea mays
  Clone ID: MRT4577_146498C.1
tgacctcggagccggcgcgggacttcctctttcctcgccgtctgccttctgcgcctccatttcggcctctgtcccttgcaagctcaatctcacctccaaccatgggtaaaagagaagtcccacatcaacatctgtgagttattggacatgcccactctggcgactcaacgaccatcaggacaccttatctatcgagttggagaggttgaccagcgtgtgattgcagaggatagataacgaggcatgg

SEQ ID NO: 50988 - DNA, 291 bp, Zea mays
  Clone ID: MRT4577_146499C.1
gaatggtgagacaccctggacaacacctgatacggggccaagggaaacagcgtttgcttcctcactcaacctcacaaaagggggtccatataacgcgcgcgtttcttgcttcacctagctatattatgttgctggtcaagtggcagctgcaatcggaggcgtgctgggggacccagtgcgtgaccacgcggtggtgctggagggcgccacatcagggacaggcaagctgattctgctgagcgtcgttcggactgacacgtctgcctgtacatcgcgacacgaccgacagac

SEQ ID NO: 50989 - DNA, 291 bp, Zea mays
  Clone ID: MRT4577_14649C.1
actagttctagatctcaagcgacctttcttttttacatgttgctgcacacacaactgggggtgtttttaaaattatgggtggatgttcacacaacacagcacggcacatggctagcctgctaacatgcggcacccacacaacacaacacactgctcgccagaagcgcaaaagaaggccaagggaggacactatacagacatcagccatcatcatcctctcatactcagagcatgccattgtacgcagctgactgactgactagaaacacacacagttacaccactatacta

SEQ ID NO: 50990 - DNA, 786 bp, Zea mays
  Clone ID: MRT4577_1464C.1
cccggaccagccaggtgcaggcgtctgctgttcctcagtcgtctcctccaccttccccctgtgtgcctcggtgtcgccgccgtgcttcccggtgatgaggaacatgtgggcgtcctggaagaggtatcggcatccgccgttgtcgacgcggcagcgcggcgcccacgcggcggagctgttgaagacgacgacgtcctggaggaagttgcccatgtacccccacttgcagaagaggatgtaggggtcggcctgcggctggaagaaggcccgctgcggcttgtacgggtccaggatgaagtagtggaagtactcccagttgcccgagaaggcggcgcggcagctcaggatcatctgcccccccgtcatcgtgctcagcatcgacaccgagtggttctgccccggcgccgcctccgccgcccccgacgacgacgaccccgcccggggctccgccgcgtgcggtgacagcatgcccacgatgatcaccaccgacgggatcgccacgaacacgaacgggatcgacacgatcgtcagcttgcggagcaggtccttcttctcctccattattgccggcttgttatgtctgggctgggcgtctggctggctcttcttgctcttggttcttcctctcctcgctcgtcacctttataaccaaaacgtcctgcgtcaattatagaaactgccctgtgcctatatatgcatcgatactagctgcttgtattaaggtcctgtttggaagcaacacaaccagtttttttttagctagaagagattagctttttgattttt

SEQ ID NO: 50991 - DNA, 321 bp, Zea mays
  unsure (1)..(321): unsure at all n locations
  Clone ID: MRT4577_146500C.1
accaccacacgcccgacccccgacagcaagcgccngagcccaagacccaaggccagggccgccgccaccgncgcagcgncncggcccggggcgcaggggcncgggaagccccacagcgccggcagcaacgcgccgacgcaccgggccgccgcgggcgcgccccgacgacggacggccaggaccaggaaggccgacgnccgggcgaccgcgcaaaagcagcacccggccaaggagcgggcggccgcggcagccgaggcggcggcgcaggagcagccggaggacgcggaggccgcgccagggaacaccccancgcncaagaac

SEQ ID NO: 50992 - DNA, 472 bp, Zea mays
  Clone ID: MRT4577_146501C.1
gctgcttgctctgccgccaatgcctaccggcgaccggcggaagcaggggaactaccatgctgggcaacggtggaccaccctagcgtggagggaaggatgggcgcgtgtgagggcagggagagctgcacgctgcgcgtgctactaccacggaacattgctgcaccatgtgtatgctggccatgtatgggtgaggagatgccccccgagaccgcaaggggctggaaggggccatgagatactaccaggatcaccgccaccaagcgataggccttggacatcatcaagcagatgcagcgcggcggttgtattgaatgacaatcaccggaccagagaggtgacaccgagcacgtcgggcgcacccagccgagtagctagatagctagctactgcgtgagctagatcctagtgccatgcggaacatgtgcatgtccaatgagctgggcgtcaccgtacaaggatgatcggtggacct

SEQ ID NO: 50993 - DNA, 267 bp, Zea mays
  Clone ID: MRT4577_146502C.1
gttgctgacaaattgagatcatcaaatcatagaataaaggttgcaatgttggatgtgattccagaaaacactcttcgtattgtagcactggttactggtccaattatacggttattttttgataaatataatatgttgcaaaatagcaaagacgtatacaagcccttgctttctcagatgaatagccggtcctgcatagttttcagtctagcatatgtggaatgtgctctttggccagcatcgctttcttcaactcctccaatagca

SEQ ID NO: 50994 - DNA, 535 bp, Zea mays
  Clone ID: MRT4577_146503C.1
ccattgcacactaaaatgcgaacacacacagtcaatgatcttcaataacaaaactatttcctttaataacctaactaaaaatcatcttcaaatcttgctcacccttcttgaatccaatatccttctctattgcatcctccaaccattcttgctccttttgcatcttgctaatcatgtctaggtattcctcctcccatcgccaaaaagaccatccagaaccattttctgttagaaccaaaacacttatgcacattagctcaaatttagaataaaccaaccaaacaaatcaatttgaattccaaccttatgcttcaggccttgtagaagattctaccttgattttcgtgctcctcattcttaaccttgagctacaatacaatgtggcaaccaggatcgggccacaagataagaggaattgatggattacactaacgcttggatgaatccgactagctcgagttgccttccatgacgtcgaaggcaaggtggaaggaggaaacaagatcgactccaacgagaatggatgctgaagcaa

SEQ ID NO: 50995 - DNA, 398 bp, Zea mays
  unsure (1)..(398): unsure at all n locations
  Clone ID: MRT4577_146504C.1
cttggcgnggagcctattcttgatggcgtagtgtatggcaacctaatgaaagggtattttctcaagggcatggagaaggaggccatggattgctatgcagaggtgcttggagagggttcccgggtgggggtcggggctgtccgcgcctccttcgcgctcgacgccctcggcagctgggggaggttggatgatgcactcaacctgtttgatagaatgtgcatggagcatgacccgcccaggacaatcactgtgaaccttgggagctttaatgtgatggttgatgcatactgccgtgctgaaaggggtcaagatgcgattgaggtgtttgggcagatgcctgagaagaggcctgcgccagatgcactcccccactataatctgattgactggttaaggga

SEQ ID NO: 50996 - DNA, 316 bp, Zea mays
  Clone ID: MRT4577_146505C.1
gatgaaggctgtgttgagaagcctgaacgtgaaaatatgtcccctagcacaagcgggggaggccgccaacaaatcattttttataatgctccaacataccttgtaaaaccgacctgtgaaaccattcgggccaggtgctttgtcaaggggtaagtcattaactgctgctcataattcctcttctgtgaatgggttgtccaggctggccaaatcatgctgttgcataccaatctcactaagattttttttcgaacacgcaggagagctgcgtatcattgaattaagaaaaggagggtctaaaaaatagatcgaatac

SEQ ID NO: 50997 - DNA, 287 bp, Zea mays
  Clone ID: MRT4577_146506C.1
gcgtctggcttctcctccccctacttaccaaggactactcgggttagggctacttagggctttgtggaggggcgaatgaggaaaaatgatgaggagtaccgcatcttatacaaggaacttggccgagccaccaacgaaggagtggatgaagaaagactacctctggtagggcgaggataattctcttgaagggcacgatcgaccgatagaacaaatggtctcgcggcttcggctttaagggacttattgaaaaggtcgttggtcgtacatttgattcttctgtgctg

SEQ ID NO: 50998 - DNA, 735 bp, Zea mays
  Clone ID: MRT4577_146507C.1
gggtacctcgaggccggccgggccgggattccttcctcccgctcgcttcgcttccttgccctcgctgctaccccacgaaaattctcgaatccccccgaactaaagggcggcagaggagtcgtgctccggtgacgggcttggtttcgttcgcttccctctcgcagtctcgctgctgattcgccgccctgttcgcttgtttctcatgttcggaacgcggttactctctgtgggtttcgtcgtctgctgtgttttttttcgtgggagatcggtggcatcttagtggcggaacctggggcttttcgcacgaatcgtttgcagcggggcgcaattgctcttgagatggaagttgaattgcatctgttgataatttctatcccttcctcccctttttgggagagattgggggtgcattcggaccatttccttcgtcttttgcagtatgttattttgcgttagccctatgattggttcaattgcataccctattgttgatacactattttcatctggattttttgtgctaattttgaagggtgaacatcatggtcaattttgcgtatacttcacatatagtccaatctgtgtatatagtactccgaccaagtcttgtacaagtgcaattctccatgcacctaatctcttagtcaatgttcacttgtttggacctataacttcagagccttggtctttactttcacattttctagctccatatggcttctttgctgtgccgct

SEQ ID NO: 50999 - DNA, 1790 bp, Zea mays
  Clone ID: MRT4577_146508C.1
atagctgaagttggttgcagtttgaaacaatgccacatttaaaaaaccatagacactggtctatatctatgtgaacatattgaccagactcgtacagggcgcgagcaattcactagtaccatttcaaccaccgtcaaccagcaggcgctccactccttgtcctcccattggcgcctcgtagactgctgctctggtaattggatcttggatccatctccatgggtgcctccagtacttgcccttgccaccacttcagctcgtcttccatcctcaccaagcgggccatcgccttcgtgctctacgccctcgtccccctcgccctcctccactacctcctatctcttcctccccgtctcccctctcctcccaccaccggcgccgccacctccccgtcacggccgcagcaggcggaggaggctccggcagcgcggtgcgattactcggacggggagtgggtgcggaccgcggcaggtcctcggtacaacgggtcgagctgcggcaagacgatcaaggccggccagaactgcgaggcgcacgggcggccggacacggggtacatctactggcggtggcgcccgcgcgggtgcgcgctgccgccgttcgacccggaggagttcctgagcgcggtgcgcggtcgccacgtggccttcgttggcgactccctcgcggggaaccagtgcgagtccctggtgtgcctgctcgcctccgcgttcccggcccagctggtgcgcggcgctggcggcggcgacggggacggggacggcgacgagctccgcaagttccggcgctgggcgttcccgtcgcacaacgcgacggtgtcggtgttctggtcgccgttcctagtgaacggcacggagaggcccaagtcgccggcggcggcgggagggctggaccacaaccggatctacttcgaccagcccgacgagcggtgggcggcggcggtcccggggttcgacgtggtggtgctgtcggcggggcagtggtacctgaactcggccatgttctacgaccgtggcgccgtcatcggctgccatcgatgcccggagcccaaccgcacggagacgggcttcttcggcgtgttccgcctcgccgtccgcaacgcgctccgcgaggtcatatcccgcgtcgccgccacgtcctcgcccgcgcgcccccggctggctgtggtgacgacgttctcgcccgcgcacttccagggggattgggacagcccgaccgcgtgcgtgcgcactcagccgtacgcgcgcggggagcgggagatggagtacatggatctggagatgctgcgcgccggggtcgaggaggtcgccgcggccggcgcggacgcgagtgagcgcggggcgggcctggcggtggaggcgctgcaggtgacgcggctggcggcgatgcgcccggacgggcacccgggcctgtacacccgggcgttcccgttcgccgagggtgcgaaggatcggatgcccaacgactgtgtgcactggtgcctgcccgggcccatcgacacgtggaacgagatcctgctgcagctcgtcaagggatgggccgtcggcgtcggcgccatcgccgacacctcgtcgccatcgccatgaactgggccgttcgaagctaccgagtggccgtttggatgggcgattttggtccaaatccttgcgatggatttcgaattatttactcactcaagcgctttagattttgtagagttggccttttgttcaagcgctcagtcaggtatctttcgcttgtattttaatgataccagaactggaatcaacttaattagtcagcttagtcag

SEQ ID NO: 51000 - DNA, 478 bp, Zea mays
  unsure (1)..(478): unsure at all n locations
  Clone ID: MRT4577_146509C.1
acagtctagatcgcgagtacagcacgccctttttttattttatttattttattttttttttattatttttttttttttttttttttttttttttttttttattgttttgaagtaatgcagtaaacaccgaccaaccagaacacaaaaagcaagacgcacagagggcggaaaacgggaagccaaagacgaagggcccaggcgaaagggagacggagaggaggaagcgcagggacgcggggggggggagggggggggggggagggaggcggggggacacaggggggggggagcggggggccgggcggggggggggaaacgggggggggccccccgagggcggggggggggggagacccaggggggggcgggggggggggcccccggggagaagcagaagacgaataaaaaaaagagggggtacacccgtccataggcaagtacctagtaggggggggcgccacactnggcgggctgaacc

SEQ ID NO: 51001 - DNA, 122 bp, Zea mays
  Clone ID: MRT4577_14650C.1
atcgccattcctcgttgcgggcgttctcgtctcgctcgccttcggcctgcttgcggtctgcaggggcggcatccccaccttctttacgcagctcggcgccgtacgctgtgggccctctagtg

SEQ ID NO: 51002 - DNA, 352 bp, Zea mays
  Clone ID: MRT4577_146510C.1
gggccaacaaaactcaagtttttgcagcaattgggcttaaacaggtgtttaaaccaagggtttggttggcccgtccttcaatgtacagacctaaaatttcctgcccagaattaacgacgggggtttaacaaaattggggtcctatttctatggggaaatggtaaacaacttttttttaacaaaacaataattctttacctgttggcaaaatgggaaacaacaggcttttaccaaaatagatgttctccccttaccgtacgtgctggtagaaccacaaatttttccggattttttcaggaggggctttctcgtgcaagaacctacaactggggtgttaaaccaactgggggcc

SEQ ID NO: 51003 - DNA, 869 bp, Zea mays
  Clone ID: MRT4577_146511C.1
agacatcatggagaatgggctagtcgactactccccacacaatccgacgcagatcgaaaaactcgactctgcatctaatgtcattctcattgacaactatgattccttcacttggaatatctatcaatacctggccctcgaaggtgcttcagtaacggtctatcgcaatgaccagattacgctggaggggctgattgccgagaaacccacccagttggtgatcagtcctggccccggccatccggacaccgatggggggattagcaaagcagcaattagggaattcagtgggaaaatacctgttttcggggtttgcatgggtcatcaatgcatgatttctgtgtttggtggcaaggttgatgtggcgggtgagattctacatggtaaaacctcggtattgaagcacgatggaaagggtgtgtatcatgggcttccagcttcattagatgtcaccagataccactcccttgcaggtacacatcctgagcttcccgactcgctcgaggtgtcgtcttcgaccaatttagagcaaggcgcaaagcccattatcatgggatgcaggcacaaagagttcacaaccgagggagtgcagtttcacccagaaagcattcttaccaaacatggacggacgatgttccgtaattttcttaaactgcgcggtggcacctggaaagaacatgacagctgtaaaagtgagccactgtcaatttgatttgcttgattttatttgattatgtacgtattttcataagcacgttccgtcaggaatcatgccccgaagcaagccctgcacacatgggcttgctttcccgttgattagctcttctcttcagctcacgtctacttatttttctatgccatactttctg

SEQ ID NO: 51004 - DNA, 231 bp, Zea mays
  Clone ID: MRT4577_146512C.1
gccgccgccatgtcgaagcgaggcaggggaggttcggcggggaacaagtggcgcatgtcgctgggtctgccggttgccgcgacggttaacttcacggacaacactgtctccaagaacctctacatcatctgcgtcaagggcattaagggccgccttaaccgccttccgttcggctgcgttggcgacattgtcatggccaccgtcaagaaagggaagcccgacctcaagaat

SEQ ID NO: 51005 - DNA, 418 bp, Zea mays
  Clone ID: MRT4577_146513C.1
cacggccccaaaaaaaccagcctttcttagggagcaacttgcaaacagggacgtgaacaccagaggggggaaacgattccggtggggggcccaacatcattcatgaaaagaaaccgccccaaatttaccctttttgtaaaaaaaaggccccccaggggggggggggccccctttggtaggttctcgcccccacagcgaggggcaccgaagcccaaatgttatggaaagcaaggggggccggaaaatgccaatcaaaaaaactcttcacgaggaagggcccacagggctccatttttaacagggggggaatagcactctaggggaggggcgggctccttcccaagcgggggggccgcccgcctagggagcatggcactgaggggggggaaccccacacccctgtgggaggggcggcaaa

SEQ ID NO: 51006 - DNA, 1075 bp, Zea mays
  unsure (1)..(1075): unsure at all n locations
  Clone ID: MRT4577_146514C.1
gtcgtatcgagctaaaacccttgctctccctgcccgcccattttcctttccccttggcattcggctccactgcttctccggcgaattggatcggcgatccatcgtcgtcggatcgcaactcctgactagcttgttgctgcaggatcgttatccgccgcgcctgctgcttgggtttgttttccctgcccacggaaatggggatggagatagacatggagacgtatcccaatcttaatacttccccctcggccgccactgcctcaggcgacgccaaggcctgcgccaactgccacaccaccaagacgtcgctctggcgcggaggaccggagggccccaagtccctctgcaacgcctgcggcatccgctaccgcaagaggaggcaggcgatcggtctcgacgcaggagcggctgccgccgccaactcacagcaagatctgcagcagccaaagaagaaggccgccgtcgatccgcagcagcaggaccagcatcagctgagaaagaagacaacagcggtcgctaatccacagcaggatcggcatcagccgagaaagagagcagctgccgctgccgctgccaccgatccacagcacaccagcatcaccaagaaagacacggacaagaaggatcagcaagtcaccgtggatctccacgtggtggggttcggcaaggaggcgacgttcaagcagcgccgccggatgcgccacaataagtgcatgagcgaggaggagagggccgctgttcttcttatggcgctctcatcgggcgtcatatatgcatcatgagaagtccgctctcctgattccaactgttccgttgcagatggagatatagatccgccttcccttccattcatcatccccctgcttcctatccctatcttcctcttcctcctaggtcatccatcagtagtactgtagtgataggtctagctagactctcatcaatcaatctatcgcttgacccttcactcgtcagtcaatctctctctctctctcttgaaaaattaatccatcctctatctctctctcttgaaaaattaatccatcctctatctctctctttttagnttttttgg

SEQ ID NO: 51007 - DNA, 219 bp, Zea mays
  Clone ID: MRT4577_146515C.1
tcggacgatgctcatcggtgctgaccccactcactgtcggctaccgctgcatcagggtcacgacgcaccactgctcttttgacgggactcggtatacgcaccatcgtctacgattctgaaaggttcacctctacaacaactacactcgcagctggcgcatctacgccagatgcgcaggcttaaaggcccacatcgcgtgccattgcatcaatctaccat

SEQ ID NO: 51008 - DNA, 2875 bp, Zea mays
  Clone ID: MRT4577_146516C.1
aattaattcggcacgaggcctcagcgattttgctgccccccatctcctttttttagcacatcgcttgcgttctctctctggtttcctcctctgctctgcgctccgcttcccaccgctcctcccctgccgtctctcctaccacaaagccgtggcccgtgggcgctgttcgcggcggcgacgggtctctcatctcctctaccctctctcgcgcgcaacggcctaaaaaaaccctagcgactcggtcggcgctcgacttggatcgtgccggggggcaggggcagctctcttctctcgtcgtcgtccaggacattgttgataacttgatactggattttcttccttctcgaacctgtagacggctctgctttatttgattagaccttatatggtttgaatgccacaactgaaactttgcacctaaaacccgaggccaagttcactactttattatatccttccatacacagaaagtggagagacatggatcgtgatgacatagctggtttcgtcagtggaggttgctatgagtcctgaatttctaacccagtatatataacagagttatgatatccagaaggcagacaattgtttcttttcgttttcttgttggtttgcacttgatgtttcataattggaatggataaaactactcaaggccttgagtttggtggtggtatcaactctccgaagccatattgctattggagcacaactcaagacactactgtgcacaaagatagtacaccagaggcatattccaccttttctatttccaactcaaaagcgtcaaaaaggaagcaaggtgccatgtctggagcaaaaggtggaaaccctttactcactttgggtctaggctgctcaccaagttcatcttataacagcaagctaagttctggcactgcttgcataacatcatcatctttattaaaggagattgatgaagagtcttcaatagatcttggccttaaccttgggttgtatattggaaatgatattggacactgccaacagaaatcccatgctggttttgaaaatgtgctctcgacaaactctcctaaactggatcttcagttgagtttgtctaccagttcgcctgaatcagttgtcattgatacaaatagatcaccagatggcttggcgatgccgatggccaattcaccactcgccattgtagaagaaggatcagtaccgcatagttgggttttcgagcattcaattgtttcgtcatcacatgcttctaaggcaacgcatggctttccattatcaaagaaaaccaatggaggcaatgcctctgtgccttctcatgtcatgtcatcaactatgtttacaagtgtgaaaggtccagttgcctctgcttctgagacaactaactcccaacaacgcaacagtaacgctaaaagctgtcagtttccaggatgtgtgaaaggagcaagaggggcatcagggcgttgcatagcccatggcggcggtaggcgttgccagaaacctggttgtgagaagggcgctgaagggaggacaatctattgcaaggcccatggtggaggcaggagatgtcaatttctcgggtgtacaaagagtgctgaagggcgcacagaccactgcatagctcatggtggtggccgccgctgcagccatgaaggttgctcccgagctgctcgtgggaaatctggcctgtgtatcaagcatggtggtggcaaaaggtgtcagaaggagaactgtaccaaaagtgcagaaggccattctggattctgcattgcccatggtggtggaaggcggtgccagtttccagactgcacaaagggtgctcagggaagcacaaagttctgcaaggcacatggtggaggaaagcgctgcacattcgtcggatgcaccagaggggctgaaggtagcacttcattttgtaagggccatggtggaggcaagcgctgtgcctttcagggcggtggcgtctgcccaaagagcgtgcatggtggcactcagtattgtgttgcacatggtggtgggaaaaggtgtgctagctttggttgcactaagagtgctagagggcgcacagagtattgtgtgcgccatggaggtggcaagaggtgcaagttcgagagctgcaccaagagtgcgcaggggagcactgatttctgtaaggctcatgggggaggtacacgatgcctgtggggccaggcggacacaagctttggtgctggtgcacagcaatgcgataaatttgttcggagcaagaccggtctctgctcagctcatagtgctttgatccaggaccactgtgttcatggtggtggtacattaggttccgctatctaccagtctgtgcatgtcaaacctactgagatgatcaatggtgataaaactttactggatccggctatccctgttccaaacagtggtgttcatcctcctgtcctagctcagtctatgatcgatccgctgccagagggcagagttcatggtggtggcctgttggctttactttcgcggggcggaagcagaacaagcgctggtggctcagaattgtgcttcgggcaagatcgtgtggatctgaggctatcaggatctccatgaaactgatgactgcctgcagttttgatccaaattgtgttgctcatgctcgggttccataggatctacccggacgtgtactgtgaatctacccagacgtgtactatgaaaataagagggtagctcctagagcagatgtgttgttttattttagttaattgtttcagtgcatgtaatcacttactttaatgctcatgtttggacttgattaactctcagcaacttaaggttgaaatataatgtgcattttgctgctttaaaaaaaaaaaaaaaaaaaaaaaaaactcgagagaagggccgcggtacc

SEQ ID NO: 51009 - DNA, 308 bp, Zea mays
  unsure (1)..(308): unsure at all n locations
  Clone ID: MRT4577_146517C.1
catataatcgangaaaggatccaaacggatgggttgcttttaaatgatacaagtgcccatccctcttttaggggaagaacatcatctgcatgcatcaattccttaaattaaggataaagagggaacatacaaaaatatgacaaaaggtgtgtctaatcaaaaaacatgcccactcattgtaatgcgcacatccatttcactctctctccccttcatctcttactcggcctccaggcgccccggcctgctcacttaatgtattatgccaaaaaagatcctacggcggccccgagggcggctcctactgc

SEQ ID NO: 51010 - DNA, 236 bp, Zea mays
  Clone ID: MRT4577_146518C.1
cccacgcgtccgctactttgaaaagctggcatccgaactagccccacgaagttatctgaaaggaaaagcagaatcagtgatgcagaaactggttacatgtgttcaaaatacagttgaattatatcatgaattgcatgctctggatagattggaacatgattatcgccttaaacagaaagaacaggatggcctgagtttaagaagagacagtctggatatactgaagcaggcagtga

SEQ ID NO: 51011 - DNA, 789 bp, Zea mays
  unsure (1)..(789): unsure at all n locations
  Clone ID: MRT4577_146519C.1
cctcgaggccggccgggatcttccacattctttgcaatccttacgaatggcaccacacgctgaagaacctaggccggacaccggagtcgacctcatccagcacgatcagaccaagtcctacggtgactggcgtgacgaatttcaccgcgatggctgctgtgtcatcaagggtgtagttagcccagagcgagcagagtattacaaggccaaacagatcgaatggctacaaaacttcggacttggctttgatcctaacgataagtctacctggactaaggaccatctccctgtttccttcaagggaggtatgtacttcggctatggcagcaatcacgaaaagttcgtctgggaagcccgcacagagcccaaagttctcgatgttttcaccaagttgtgggaaacagacgagcttctgacctctttcgacggcatgaacatcactcttccccgccagaaagacatcacttggtcaccatggccacactgcgaccagtcgcaattgaggaagggaatgcaatgtgtgcaaggcttggtcaactaccaaccaaatgggcccaacgacggtggactggtcttgatgaagggcagttcgaagctgtttgacgagttcttcaaggaggagcgtaccggtgctcagtcggtggatgcgcctcctccagaaatgaagttcatcgatcatttccgcttcagcgaagaacacgtcaaatggttcgaggatcggggatgcaagatcgagaaattaacatggaagctggcgatatggttctctgngacagcaggacgatgcac

SEQ ID NO: 51012 - DNA, 422 bp, Zea mays
  Clone ID: MRT4577_14651C.1
cccactcgtccgcccacgcgtccggatttttggcgcaccggacactgttcggtgcaccaggtctggcgccctccaaaccagccactctcgagaattccagggcagtctccgctatagttcaccggactgtctggtgtgccaccggaccgtccggtgagccagcggagcaacggctaactgtcgccaatggtcgactgcaaaagcgttctgcagtaaacagtgcctcaacagaagtcagagcacagaagttagagggcactgaactgtccggtgcagctagaagacaaacatctccaacggtcaactgctccgaaccctaacagttgcgctgacgtggcgcgcaccggacaatgcacagtggatgtctggtgcgcccatcgccagcagcctttgctaacggctaggaagtggttgggggctat

SEQ ID NO: 51013 - DNA, 1307 bp, Zea mays
  Clone ID: MRT4577_146520C.1
ggcccttgcggtggaataatatgccaaccatctctctccggtccggtccggagcggttgaagcgaagcgagagtcaactaccgccgccctctctctagtccagatttccagcggtccagaccgagagctcggctccctacacgacatcatcatggacgccgccccgctcctcgctctcctcctcgcggccgtgtccctctccgcggcggcggcgggcgacggcgcgcacccgggctactccgacgagggcacctgcacggtggacgccgccggagcgggcgtgggctcgggcccggagctgcggcgcctggaggagcgccggcccgggcgcatcatcgacatcacgcacgcgtacgtgccggaccttctggcgttcgcgccgggggctgtcacggggcccttggtccacctcaaggagtccatggcgaacgggtccgagtacaacctgtcggagctgcggttggagtgccacatgggcacccacgtcgacgcgccaggccacatgaaccaaggccacttcgccgccggcctcgacgtggacacgctcgacctcgacgtcctcaacggacctgcgttgctggttgatgttccgagggacacaaatataacagctgaagcgatggaattcctgaatatccctagagggagttcgccgagttctattcaggacgctgaacactgacaggaagttgatgtggaggaagggaggtgacatgagctatgttgggtttacagaggatggcgcacagtggctagttgacaacactgacataaagctagtcggaatcgacagtctatcggttgcagcatttgagcacttgatctctgcccatgtggtcttcttcaagaccccggatataatccctgtcgaaggcctgaagctagacaacattgagacgggaatatacatgctgcattgtttacctctcagactggttggagccgagggtgcaccgaccagatgcatcctcatcaagtgatcacccccctgctcttgctggaggtgacattgtatcatgccagctgagctgatgcttcatcgtggccaacgcattgattcgcagtcttcgtcttcgtctatatgaaacatagtgttgtatgcccatgtagatatgcttgtacggacaatagagacacagcaatacttccatcaaggaaatacttttgggtaagccggtaatgtaaaagacagacatacagttgactgaataaactagaggcctgagaggctgaggcctcgtgcttcacaaatgacaaatgcagaaatcagtgtaagttccgaaaagaagaagaaacattaacggtgt

SEQ ID NO: 51014 - DNA, 415 bp, Zea mays
  unsure (1)..(415): unsure at all n locations
  Clone ID: MRT4577_146521C.1
cccacgcgtccgcggacgcgtggggtaaagcggttgtaaattaattagcgtgagcagcatctgtaagttgacatcaacttggttggttgtgtgtgtgtagattatagagaaagagagtgtcaatgtaacgttaattcctgngccaaaaaaaaaaaaaaaaaaaaaaaaaaaaaaaaaaaaaaaaaaaaaaaaaaaaaaaaaaaaaaaaaaaaaaaaaaaaaaataaaaaaaaaaaaaaaataaaaaaatataaaataaagtaaataattttaaaataaaataaattaatttataatatataggggggggccattttttgaaacccaaaattttctctccccgtgtagttgggttattttttttttttttgggtcccttaattttatctattcggggggtttttttaaacggtggt

SEQ ID NO: 51015 - DNA, 1064 bp, Zea mays
  unsure (1)..(1064): unsure at all n locations
  Clone ID: MRT4577_146522C.1
gttcccttgtcattcccagcacgcaaccagaacagagtccagagagagattcatggcgacccggcggttccctatccgctcgattcgctagggtgtggtcaggcgtccggcgttcgccctccggctgcttcgctcccgtccggccgccaaccccctcctgctcccccgctgtccgcgccgttggtctgcagcatctctcgaccgccgcacccacccacggcctctatttctaccccggcgacttcgctagtcttcgtgattcggggatttcttcactctaattctcagtgggtttccactataattccacttattagctgtaattccaattggatttacagtgtaaatcaagttgcactgatattgtcagtgggtttagtgtaattgacggtaagttcttattttttgatttttagtttattttagtggttttttacagtgtaatccttactggaatttacactgtaatgtgtagtgttttgtttcatcttttgtaaattacagtctatattaatctgaatacctgtgtacttaccgtctaagttaatgtacattaaccctgtaacttactatcccattttcagtctatttttcagtgtatttacactgtaaagtcatttggattctatgtaattacaccgtaatgttagtgcacttacactctattttcccgtgtaattttattcgtaattgtaatgatttacatctgtaattacagtctaagttaatgtagatttttaaccctgtaacttattattctatgtactgtaatttccaatctattttcagtatttacactgcaaattcatttgtattatatgtaattacactgtaattttagtgcacttatactctatttccctgtgtaatttcagtgaattacatttgtaattgtagtgatttatatttgtaattacagtttaagttaactgtaaattttaaccctgtaacttactatatcctatgtactgtaatttccagnttttttttccagtgtatttacaaggaaggtcagagaatttacaaccaagttggaatgtgacaaaatatcacagtaatctctc

SEQ ID NO: 51016 - DNA, 227 bp, Zea mays
  Clone ID: MRT4577_146523C.1
gccttaccaacaggatcactggttagggtggaaaggatgaaactactgatcttggaccttaatggtttgttagcagatgtacttgaagattaccataatgcacactaggcacatgcagaggttcgaaccaaattaatgttcagaagaccatactgcgacgagtccataagattatactctgacaatgttgagcttggaatcttatcatcaaggaaaagggaaaatga

SEQ ID NO: 51017 - DNA, 570 bp, Zea mays
  Clone ID: MRT4577_146524C.1
gggaaaaaaaacgggccctaccccaaatttgtatttcccgtttaactttgccaaacataaggtaaaaaaaaaactcaggggggggcttcccccaggggaaagggcctaattttttttgcccagggttgcccaaaaaaaactttttttttggcccccccccaggggggggggggatacaaattttttccccccgaaagccccctttttttggttttttaaacggccaggggggggaaaaaaaatatttttcccccttttgtttaatttttaacccccagggggggggggaaaaaaaccacccctttttggaaaaagtttcgggcccccttttttttgcagtatttttcccccccctcctgggaaaccctttggggccttttggggggggggccaggggcccggccccaaaaaagcggggaccctccccccttgtttttaaaaacaccaaaaaaaaaagggggaacccgggtttaaaaaagcccaaaggggttaaaaaagagcccactgggggggcaaacattgggccaggggtttttgccctttccccgctcagggggggtggggggcccc

SEQ ID NO: 51018 - DNA, 322 bp, Zea mays
  Clone ID: MRT4577_146525C.1
caatgctcacttcctactatttacataactacacagtttcccacaagagtgactttatttggcctttaacacccatctgtgcacgcctataatccacaacaaacaattgaatgcagcgtcttacaacaaccaattttccaattgcaacaacaatccttggcacatctaacaatacaaaccatagcaacgcaacacctacaacattttctaccagcactgagccacctattcatagtaaacccttgaccctacttacaacaacagttgcttgcatcaaacccacttgctcttgcaaacataattgcaaaccaaccacaacaac

SEQ ID NO: 51019 - DNA, 184 bp, Zea mays
  Clone ID: MRT4577_146526C.1
gacccacccgtccgcggacgcatcgcgacgtatggtccgttgtagcgcgtgcgcaggcgggtaggcaggcccccccccctaggcaatttgggtgcgtgggtttcggtttgctttgttgctctttgtcacactcgccgattttagattagaaattgaaattttggcttgtcgtgtctcaaccttc

SEQ ID NO: 51020 - DNA, 511 bp, Zea mays
  unsure (1)..(511): unsure at all n locations
  Clone ID: MRT4577_146527C.1
ctcngcccgatttgcccccaccccacccaagcgtgccgccggctgtctccctcctccaactccgccccacgcccctcgccgccggctgtctccgccgactccgccacgcccctagccgctcgagcccgacccctccaagtccctcgccgccgacgcccgactccgccccggcctcaccgccagacgccgtttcaatcatggcacgccgaggattactggagcaggacctaaccaaggttgatgacaccaagctcaccccggtgtcacccgaagtcatctcgcgccaagtgacgatcgacattggtacaattggtcatgtggcccatggaaagtctactgatgtgaaagctatatctggagttcagactgttcgcttcaagaatgagcttgagacgtaacatcactatcaagctgggctatgctaatgccaaaatctacaaatgcgaggatgaccgatgtccactaccaatgtgttaccaggcttatggaagcggaaaaaaagatactcctg

SEQ ID NO: 51021 - DNA, 569 bp, Zea mays
  Clone ID: MRT4577_146528C.1
gcccacgcgtccgcccacagacggcgagcagaacacacctgcagctgcagaaatagggtcatgtcctgctagcttgagagctctggtacggtgtagcaaggtacgggagagagagagagagtagcaaactagctagggcacagggcagggcaggggccggctgcattatattgggatcggatctgggggcgaccgagctagcatcagctgagagaagagagagggggcaatatataatggtgttgttgtcgctggaggcgttgaggaagaggaacgtggccggtccgctgctgctgttcaacctcgccctctacgtctccatgttggggttcgcgagctgggcgctcaacgccttcgtcgaccacataggcgaccaccaatactacgacccacctgcaggcgacgcgtgcacgtgcatggacacgcacacgcctgcaggagcggcgccgcgcagcgccggcgacgaggcgatgctccacttcctccagttcgcgctgctggcggccgtgctcggcagcgcggccaaggccgcggcggcgttccacgcgcgcgccttgttgcggctcgtt

SEQ ID NO: 51022 - DNA, 423 bp, Zea mays
  unsure (1)..(423): unsure at all n locations
  Clone ID: MRT4577_146529C.1
acccgtggaggaggagnactaggtaactagctagcgagnnncgcganaaaagaaacacgnngggacacttgttgtggcacaggcgtgcacaaagaaaggaggatggtttcaatgctgttccctcgggaatatgatgctgctctggctagtgggacaacagccagatttatgcataattgggggcaatgtgaagggattgatcgtgaccaaaacggacagcggatgatttccagttttaacagatactatattgctcggtataccctgttgcgttcagatattatccaagaaaaaaaaaaagggcggccgccgactagtgagggtgggccagcgccaaaaaaagaccatatttggagaagcgagctaccaccaccagaatgcaatgcatggtttcggactttggtaacccttaaatgaagccca

SEQ ID NO: 51023 - DNA, 253 bp, Zea mays
  Clone ID: MRT4577_14652C.1
gaggttaaacacttacacatgctcttgcgattacttgcttatatataaataaggggtaagtagtagtaacagatttacgggacacaaaacaaatcaatgggtgggaattcccagctactgggtggatctcgcatcgccgccatttcgaaaatctgagagcgaggtggacctcggggatctgaaactgtcggcctttcttggcgacgccgggcccatttgggtgttcacgctcaacctcgggggggggaatgcc

SEQ ID NO: 51024 - DNA, 186 bp, Zea mays
  Clone ID: MRT4577_146530C.1
tttgacaataaacccgggatttaggagttcaactcattggtcatgggactaccaaccaaataaagggccgaatacacaagggaatggcccggcctcttggtgaccctattcaaaggaaaaagaaagaaagaggcccttgacaaaaaggcaaagcgtaattagggaaccaaaattgggacgccaact

SEQ ID NO: 51025 - DNA, 310 bp, Zea mays
  Clone ID: MRT4577_146532C.1
atcgagaggaacaagaaaaaaatacctcattacccagcttccaatattcaaaatccccaagctcctgaaaagcaaataacaaaatagccgggcacctgcctaatcccatcataaaacaaaacaaaaacaaaaacatactggggtcggcataaacccggaatcatccggaaaagaaacgaaatttctccaaaactcccccactcggaaatctaaaaaagagcaaaccgggatctaaactcaaatctcctattaatacacttaccaaagaaacctcatatcctctgggccactaaaaaaaaaagaaaaaggg

SEQ ID NO: 51026 - DNA, 352 bp, Zea mays
  Clone ID: MRT4577_146533C.1
caggaactgtagtagctttatagattgggaccataagaattaattacacgcttacacctaatgactacttacacaaccctggttgcccctgttttatacaccaatcaaacataatttcggccatagcacagtcgacggcagagctaaacggcccccaaagctctcgaacaagttccgaaggacccaatgccgatgactccactttccaaataacccaatacaactaacgaagatataaaatttatttgccataattaaataaaatatagaccatgtctagattaaacataacacaccttttggatctgaccacatacatcccataatattatatggatcatgtatgacacgg

SEQ ID NO: 51027 - DNA, 332 bp, Zea mays
  unsure (1)..(332): unsure at all n locations
  Clone ID: MRT4577_146535C.1
gatagggagataggattnagagaaaaagttatntagagtgttatttnttttttnatttttntggtgtgnagnnagntnnnattgtatggnattgattnaaggantggaggtgatnntttttantggatgngtgttatnntngnatgaaanngtggnattgtgatggagttgggtattattgnaattgtganntgtggtgtggtaatggaanttgttgtgggattgaagataattgaagttganaanagtgtgagagaggatggtgntgtggtgaatggtgganaaaaggtggttggggtgttggtgggtattggggaaggtgggggatatga

SEQ ID NO: 51028 - DNA, 254 bp, Zea mays
  Clone ID: MRT4577_146536C.1
gtagacagtgatgatacagtgtacacctatagcaataaactgtggcagttttattaaaaaagaaaaagaaggagaaaaaaggaagaaaaaaaaaaggggggggccccaaataaaggaccccggcgcccgggaaatattttcggggggaatccttaagggggacagaatttccccagaaggaggcgatataaaacctggggaaagaaagagaaaaaaggtttccccgggaaaaatttttccccccaaaaagttca

SEQ ID NO: 51029 - DNA, 390 bp, Zea mays
  unsure (1)..(390): unsure at all n locations
  Clone ID: MRT4577_146537C.1
gtttccgtgaggccgtgacgcccccctcggcctcgcctcgccatcgctcgcggcatcgccgcctgccccctttcccccacgcgaataaagcgccggaagcgcgccccccaagcaaagtcctccggcgctcaggatcgggagccaccccctagggttagggctccgttttgcctcgttccggcgtcgaccgatgcgcggcgcatggcgacggtgaactgcctctacgtcgcggccgcctccacggcggtaagcaccgctgctctgcagtggtgggcgtcctcgctcctcgacggcgacgctggggccggcggggatggagactggcttggagccgtgctgcgnncaagggtcaccgtcgcgctcctggcgaatctggcggcccacgtgttc

SEQ ID NO: 51030 - DNA, 662 bp, Zea mays
  unsure (1)..(662): unsure at all n locations
  Clone ID: MRT4577_146538C.1
caccacaaataatttcacaaaatcattaatgcaatgacctacggacaaacctggctccgcggaatcttcaattccacaaggtatccaaataactttgccacatatggaccaacatttcccaacagaagcgggcacatttccagctagataatttacagatatatgtacagaaaatgagttccaacagcgacaactcataacacgaaggttaaggctgaaactcagcgccagccacgccaaacaagcttcctacagcagcacacattatacttcaaaagcgagatcatctagaaaattggctaaggcacctaggttatcaggcaacatatacaatgaacggctgatgttctgttgatgatagcttggtcaccttatgcaagcctctttcaacgccagaggaacattatgctagttggaaacctccactgctggacagctgaggaattttagccagcagttggcttgatggtcccaaagtgaagcataatgaaaacttcaaaaataaaggtaaaagaaggagattactgccttctaaatagatactccagctacatagttaactgtccaatccattcgtcaaccatcccatagtcaatgcttagatccctcaacggtggaatttttccagngagaagatcatgaggccggcctcgagggtccca

SEQ ID NO: 51031 - DNA, 171 bp, Zea mays
  Clone ID: MRT4577_146539C.1
gacgggagctggcggggccgaccggcgcagcagcagaccgagcacccggacaaggcggacctggaagacgcgctgcagacggagggaacagagccgcccagcgacagcgacggcgaggcgcgcacccacgaggagcgccacgcgaaagccagacgcagccgggccaggcaa

SEQ ID NO: 51032 - DNA, 278 bp, Zea mays
  Clone ID: MRT4577_14653C.1
gcgactacccatacataatcttaccatttactgagatatcaccccctattaattgcagggataggattttcaatcttacacacactgccactattatactgactaacctagactcaatatgaccgttcacgcgaggcctaccatctcactattataactttctgatcaaccatgctatatactattttaacatgctcaagtactggtactggaatttatcttccaccctttgcactatcatcaatcaaacggttttaacactgcagtactttgactac

SEQ ID NO: 51033 - DNA, 660 bp, Zea mays
  Clone ID: MRT4577_146540C.1
cactaccatccggcgtcttcacaaacgccggctcgctccccatccttttccgtgctccgcctccccgccccgagccctccgtcgccagatcccgtcgagccccccgcgcccccgtgtcgaacatgatggagagcatctcgatccgcatcggggagggcgacatcgagcgaggtaacgacgagctgcgaactttactgcctccagcacggcatctagtctgatggccacaccgaacggcgacaagatcatcggaggtggtgatgacaacttcaacaccttcttcacggagaccggagccggcaaggacgagccccgtgtggtcttcagagatctcgagcccaccgtgattgacgaggtgcgcatgagcgcctaccgccagctcgttgaccccgaacagctcatcatggttgaggaggacgaagacgacgacttcaaccgtggtgacgacgcaaacggcaacgagatggtggatctctgcatcgagcgcatacgtgagctggacgacgactgcactgcactgaaggtgtgcctggtgttcctgcctacctgagtgggtaccggatctgggcttgcaacgatcctcctcgagtgcatgtctgagtgctatggaaagtaatccaagagtcgagcgcacgcgtgctatcgtctacgtcaggtgac

SEQ ID NO: 51034 - DNA, 211 bp, Zea mays
  Clone ID: MRT4577_146541C.1
acagaaagctgtaattcattcattaacaccagctaggacatcatttatacctcagctgggccaccctgaaacactggattcgaaccccgcttaaccaggccagaggactcgaatgcctacatgacaatacaaggcaccgggccagatgcctttgaccaaacggggggaacacaacaaagtctaaggtgcactgcctggaaggcaggaaaaa

SEQ ID NO: 51035 - DNA, 624 bp, Zea mays
  Clone ID: MRT4577_146542C.1
agtccctgttcctcggagcgcgccgcacctactgccggttcccggtcggctctgggatgatggtcgccgacgacgacggcgaggagtgcgtgacccagtccgagtgccacgggtgccggcggctgttctgcgcgcggtgcgcggtgccgtggcacgccggcttgacctgcgaggagattgcgcggctcggtgagggggagcgcgagcgggaggacctgctgctcgtgaaggccgcccgggagggcagctggaagcgctgcccgcgctgcaggttctacgttgagaagtccagtggctgcctgcacataacctgcaggtgcggatatgagttttgctatggatgcggtcagcaatggcagctgatacatgacggctgtcctggagcatgaaacagggcttcgagctctcctgtggcttcgttaagcaatgggagctgatacgtgaatcacgtgatgagggtttcaaggatggagtaggtattgatgttgctatcagtatggtttctgtagtcccatggaacaatggtccatggatagtctgacaaccttctctacagaactttggaacattcttctctcatgtatgttgtctgtcttcagttaacatgccagacataatatcttt

SEQ ID NO: 51036 - DNA, 284 bp, Zea mays
  Clone ID: MRT4577_146543C.1
acttaaacaaacattacccaaactggcattttgacaatgttggccggtggtgaccacaatggaaacaggaatttagggccaagcgggcccctttggtgggtgggaagggggaccccacacaaaccccccagaccagggggggaaccccccgccgggggggccaacggggggggcttttcgtttttgcccgccaaaaggaaaaataaaacattccgggggggggggaaaccgaataattctgggccaggggtttaggctccttttttgggaacgccaaggggcct

SEQ ID NO: 51037 - DNA, 559 bp, Zea mays
  Clone ID: MRT4577_146544C.1
ggggaccctcgaggcctggccggaccatggatccctccacaccactgagcaccctttctccctgttctgtgcctctggcctatacatactactactacccatctttagactcgacaggtgcatgcaagaagagaaaatgccgcctatcgacctgcgctcgaccgacccgaaggccttgaccaacgaccagtatggaaacagaaggcaccttgttatgacatgtcagtgccagccagacgaacccaatggctaactgtcaagacggtttaactacagttttgcagccctacagctgtacccagttcaagactaatatcggagagcatgctagttcaccctgttcacggcgaagaataatgatctgcctcgcgatcccctcgtgcatggatcatcctacgcctaccgtaaacaacagttgagccctgctttgccacaagctatggacaagctgagctgctaccgcgttctgctccccgataagaggacaaataggacactcattgactccgatgctatcaaggccagccacaacgagctcccacaagtgaagccgggctac

SEQ ID NO: 51038 - DNA, 232 bp, Zea mays
  Clone ID: MRT4577_146545C.1
gttctagctcgcgagctgccgccctttttttttttttttgggattcagaccagtcggtccttgttttatttcaatctaacaagtgcttttttacagaatggtttcacacattccacgcgcgcgcatgctgagcagtccagcagcggtcacaaagctctggtccccaccctctcaggtggggggggggggcacttattctcgcgcctgtgccggttgcccctgtattggggtt

SEQ ID NO: 51039 - DNA, 354 bp, Zea mays
  unsure (1)..(354): unsure at all n locations
  Clone ID: MRT4577_146546C.1
acgtccgtcctctctttcccgctccntgcccaaagcaggctctactttttgagggggcaatccanaccatgctaaccaacccactgtccttcataagctaggtggccagttccacctgagctccatcttctttgaaggtgtactttcccgtaacatctgcctttctttctcatcttattaaaggagatttgtcactaggaactacattacccatatccttttgtgcccttcaatgtctgttagcggttgcatcaattttccattgattcccactccgttttttgccaattctccaacccttaaatactgctcaaactttattaattattttcattattttcctttattttcaac

SEQ ID NO: 51040 - DNA, 444 bp, Zea mays
  Clone ID: MRT4577_146547C.1
tccacgcgtccgctttgttatacaaatcttccatttttttgcttgtagcatctgcccgggttttccctgacaaacgtgtcatcaattaatttgtaaaaaaaatgatagattaagcggcgatcggcatgctctgccgtagcgccgactcgacacacgagacagcgtgtgagcagaagaccgaggtgagatttcgtacacactcatcccaaacggtctgaatcagaaggggaatcgctggcgcgtaggctatgaatactgtgagccaaagagatttgatattttattgctagctgcagatcagagaacctgaagtatattgatttcataggtggttcttgctggatcatgttaagctccatctcttataatagcttgaacttatacatatttggtacttgttttaaatttataatgcacagattattgatattcgtatagattgag

SEQ ID NO: 51041 - DNA, 308 bp, Zea mays
  Clone ID: MRT4577_146548C.1
aatcacattatgaaccatactacaggaacaaaaaaattctccaaagcgaaaaaggacacacaaaatttggggacccccttaatttaccaaaagagcgggaaaaaccagctcccccttccatgtaaaaagacaaccgcgggggggggaagctccactgattccgaaagaaaccaacgcggggggacctaccatcgaacaaggggccccccgatggggaaaaagtcaagggaaaaaaaagggggacggggggggagctcaccaaccagtacctttaaaccccggggttgggagccccccaacacaaagcc

SEQ ID NO: 51042 - DNA, 453 bp, Zea mays
  Clone ID: MRT4577_146549C.1
gcaaaaatggataccatgtatccaaataatcttgctcattgatgcgtttttactgggggattctggctaaaaacagggatgcttcatgtatcaaatgatgacaaacttgacaaacatttggggggaacacgtttgctggtggtgcctccctccctcggattgaaaaggagctccttcataattcctcggaaacaaactcgagggggcaagaaccctcgtcaacgggggccaacgggtcaaacatgtcggaactggggtccgggcatcccctcacaaagtccaacttgcaccgaacccccccctccttgagggaaccctccatgggccaactggggaaggcaatgttctcctccgggtaaatggccaggtcccaagccccctccctgttgagttcgtccgccaggcccttgttaaaaaaactcaacggcttgttctgccatgggttggggaccc

SEQ ID NO: 51043 - DNA, 410 bp, Zea mays
  Clone ID: MRT4577_14654C.1
tttttttttttttttttttttttttttttttttttttttttttttttttttttttttttttttttttttttttttttgggggggaaaaaaatttagggggggagaaaaaacagaaatgatgggccaactttgttttcacccaaagaccaaacttgaaaaagggtaggggttaaaaaagcggaagttggggatacatgcccatacaaaaaagcaggggggtttttaacttgttgggcttggcaaaggggggaacggggtttggaacacaatttaccaaattggaaattttacttgacgttttaaaagaaatggtccttttaaggggtttacgggggccaaatgcaacggtagagggggttggcaccaacaaatggggttttattaaaccgaaggagccccccccccccccc

SEQ ID NO: 51044 - DNA, 469 bp, Zea mays
  unsure (1)..(469): unsure at all n locations
  Clone ID: MRT4577_146550C.1
aacccggacgggcaagacgagcacccncgaggcggaggcggccgacaccanggacaacgcgaaggccaagacccaggacaaggagggcctccgcggggggggggagcggcncanccgggccggcggacagccggaggacgggcgcacgcgagccgcccacaacacccagaaggagagcacccgccaccccgggcgccgncggaggggcggcacgcagagcgcggcgaagacccgggccgacaagacgagcacccgcgaggnggaggccgcggacacccnngacaacagggaggcccngagccagcacaaggagggcacccccgcagaccagccgcggcccancngcgccgggaagcagcgcgaggacgggcgcacgcgcaccgacnacagcangcagaaggagagcaccccncacccggcgcggcgccccaggggaggcangcagaccgccgggaagacccggaccggc

SEQ ID NO: 51045 - DNA, 369 bp, Zea mays
  Clone ID: MRT4577_146551C.1
cgaattgtgtaccgggccgccccctctacgcgagcgctatatttttttcgagtcacaaaaaaggtggagattgaaagggaaataggggtaaccttttcctataattagttttggtagttgatcgtcaacacaaacacatggactaactagtttgccaagaattcatgtattacaggtgcataaggttcaacacaaactaataaaagattcaagttagggactaaattgaaatggagcaaaggcttgagtgtgctgtgaactggcgcaccggacagtgttcgttgctccattcccgtacaattttgaagtagtcattctcgtgaaaacgcatgctagctccgttataatttaccggtctgtctattgtgc

SEQ ID NO: 51046 - DNA, 959 bp, Zea mays
  Clone ID: MRT4577_146552C.1
ctctccgtaactcctgtctttggggagttctttactgtagcttttgcttcacttcgacatgaagaatcgaagacagtttaactgcgttgtactagtgcgtagtgacggttgccaccacaaatttacagtttacatgatttttttttatgaaacaggagggggcgaaaagcccctactggatacatttgacatgaatcaattcaagaagagtctctctctctcactcacacacatcaaacgagacattcgaaaaggcggcctcacacgaggtggctgcaaagctacaatgcacctcgtgaaatgcttcaacatcgagcaaattggggcgacaaacatagccatcatcttgtttgccacgctgcccttcacgccattgccaggcgccttcgactaagatccctaccttgcaagattaaaaacactagcctatatgggtacttcgcaaccctcctgatatgtccatcggtccatgccagtatgccacgaccaatgcttctgctcatttcaccgtagaaagtcgaggaacaataactgatgcgccacgaactcttccaagggcaaaacttattcgcaatggccgccctagcataccttcccatccatagcatccttggcacacttagcttcattatcatttgagaaatgaacaaatccaaagcctcttgaccttccagagtttttgtcatacattattctaactgccctcatcatgccaacaaacagctcagctgactcatggaacagcccgctcctcgcatgtcggtaaattgcagctgagcaggtgaccacgtccctaacaggaatttcgtcgaacaggctgcaggcctgggggcgatggagtggctcacggcctccacggcatttagccgaagacctaccctgtgcaccatcttcggtgacggtgccgaaaaaggagaaggcgtccgtgagggagcgctcgtccggacgcgtgggcggac

SEQ ID NO: 51047 - DNA, 284 bp, Zea mays
  Clone ID: MRT4577_146553C.1
agggggaacctaagcaggggaaatgtaacaaattttttttcaaaatgaaacatgcagaggcccgttagccggcccattggcctggtttttatccggacaccacgctggaggtttgtgtaagacccacccgacccccgagagacctggaggggactgccccaaataatgcaattggccaatcaccatacaaaccccgtgcacattgggctggcccgttttggactacacaaaacggggcttatttattggggcacacagacacatttcacaccaccggggacact

SEQ ID NO: 51048 - DNA, 845 bp, Zea mays
  Clone ID: MRT4577_146554C.1
gttctagatcgcgagggccgccctttgtttttttttgttttttttttttacaaaacgggagggggcgaaaagcccctactggatacatttgacatgaatcaattcaagaagagtctctctctcacactcacacacatcaaacgagacattcgaaaaggcggcctcacacgaggtggctgcaaagctacaatgcacctcgtgaaatgcttcaacatcgagcacattggggcgacaaacatagccatcatcttctttgccacgctgcccttcacgccattgccaggcgccttcgactaagatccctaccttgcaagattaaattcaattcgaacgactaaattagcaaagtgtgacataaaccaaacagacaaaaacactagcacacttgggtacttggcaaccatcctgatatgtccatcggtccatgccagtatgccacgaccatgcttctgctcatttcaccgtagaaagtcgaggaacaataactgatgcgccacgaactcttccaagggcaaaacttatttgcaatggtcgccctagcattaccttcccatccatagcatccttggcacacttagcttcattatcatttgagaaatgaacaaatccaaagcctcttgaccttccagagtttttgtcatacattattctaacttcggtgacggtgccgaaggaggagaaggcgtccgtgagggagcgctcgtccacggaccacgacagcccggcgacgaagagcctggagtcggaggttggcgccggcgcgccaggaggcaactcgtcaggtagtttggcagcggcggcggagagagagcgtcgcaggtggtggccgtcgtgatgagaggggt

SEQ ID NO: 51049 - DNA, 586 bp, Zea mays
  Clone ID: MRT4577_146555C.1
ctcgaggccggcctggccgggatgacaccaaccgactgtggttcaggatactacaccacctccgctcgggtgagcttactctgctcttccgaagactcctatatctgctggatctatatccgctcttctctttccgaaactacggctgccacgatgttgaaacgtccggcgaacgaatcatacagcgctctgaaggtcacgaagctaatcttcgagattgtaatgattcgccccgtggactagatctgcatgtgcataaacttcttatagctcgccgaaataatattcgagcgagaccgtgacaacccctctgccatacatgagaataatgtctttagaaacttggtcctagacagcaatgttttcatgctcatcataaagacccgagtgcttctgcatattcttcatgactccgacctaaatgttgtttagctatctggatttctggatgatctgatcatactctagcggctgcggactgcttgatctccataaaccttttatccacagatatatgtggtttagcgcatactgatatgaacttattgactcgcacatagcccttatctatctctgatggtaccac

SEQ ID NO: 51050 - DNA, 346 bp, Zea mays
  Clone ID: MRT4577_146556C.1
agtcctgcgcgcggagccttcatggccaaccacttctgacctaccactactgccgtaagggagggctcagatacggataccaccagccttattgggaagcccctactttgtcacggtaccgaacatggcttgtgtctctaagaggacctcacacccgttatgctcagccatgatggagacgtccaagaagtctttgaacataacacctgaagctgtccagatcactcgtaggttgaatgaaaacatataatgctaatatacgccctgtaagacactggagcctattactgaggtcagcaatgatcctgttctaggggttgacgctgacaacgtccacgacttccgc

SEQ ID NO: 51051 - DNA, 522 bp, Zea mays
  Clone ID: MRT4577_146557C.1
gagcggccgcccgggcaggtacaagcttttttttttttttttttttttttttttgtttttttttttttttttttttttttttttttttttttttttttttttttttttttttttacaaaaaacgattttttttggaaacttttcgatcatgcccaacaaaaagggggcccttccggccctacctcaaaattcgggtttaccgggggaagcaactagcccaaattctcccatctaaaacaggtgggacccccaagggggggaagaagcttttagccggtgaacaaacccgcttgaaattgggggggggggaaacaatgggccctttgaaccccacttcttggggggggtcattcaagccgttttggcaggggctgaaaaaaccggcctttaggccccataaatacgttcgtttttaccccaccccctgggccccccctggaagcaaatgactttgcaagaggatcttcatccttcccatgcctttttttaacaaaaggggcgggtttcacccccccagtttaa

SEQ ID NO: 51052 - DNA, 919 bp, Zea mays
  Clone ID: MRT4577_146558C.1
ccagatccatggcacccaacaccttgagcgcccctgccgctgctcctccaccgggatctcctcctccactaggcgtccaggcttgtcccaccgtggctgcccctcctccatctcctccctccccaccaggttacccagattccatggccgccgccgccccagccatctccctggtggccgacctcgcccctgccccagccacagctcccccttcggccctgctgctgcaagcactcagcctctcccatggcacacgccccatctgcaacaccgtcgacccccgacgagaaatcccatgatttgggggaagacgaagtccaagcacaacccccgccaatcgctcgatgaaaaatctaaaccaaaaccctcagcgttttcatgggttccggagggattttatgttggtaaggtgttgtgcggtgtgatctccaattccctattgctgatgtcttactccatcatgaccttagggaaggatgttttcctctaaattactcgtaataattatgcttggtgtatgtgttgttttagctacttgatgaaatgttttagttgtgtgcgataatatggttgccgttcgagtggaaagtagatgtgttgtatgacctgagttggagttgaagcaagtatgtgtgtctcgtattacgaaactaattagagatatgcatgatgtttgtagatggattatgtgtagagtgttttagtacaagtatttttttaggtatagttgaaccaattattgtatatgaattgtgcgatatcaaggttgttctaatgttcttttaacatcttgctaataaggtgttagagtattctaaatgccaaacataggataattttacaagccaaatagaagttaaattgaaggtattgatgtttagggctgtaggtatagttttagttatgcagctagtccaat

SEQ ID NO: 51053 - DNA, 360 bp, Zea mays
  Clone ID: MRT4577_146559C.1
aattggggcccggggggggacgggtttcctttgcttttggggggggggggcagggcattggtcaccctgcccctgccccccaggggggggcgggacccctttttacccaaacatcgccgggaaagggcccaactggctagctggcccggggttttcccccagcccatagtttctttggggggggacccccccgggagcagcggaggggcctggggtggggtggtgcaggccccacatccccgctgggtggtgggctttttgggcccccaacagccccgggacctggcccctttgggggtgctgttgcaggatgggctgggggaccaagccggaaaacggctgggcccggggctgggggtc

SEQ ID NO: 51054 - DNA, 410 bp, Zea mays
  unsure (1)..(410): unsure at all n locations
  Clone ID: MRT4577_14655C.1
gtaaagaaaagaaggcacacgcatatatatatktctytctacttgcagtcagtyaataattcggatctaccaagccakgcataacaataatcaaataagcacgcaactkagccagckagcactagcaggacatgaggtgcatgcatcgcgcgckggtcagcgaaggccatggtcagakggcytttacgcygcccttkcncggcgaccycatcgcctcctccagcttctkcagctcggccagcaccggggccgcscacgtkggcagcacggccacggccagctggtgctggtgggckgcgaggggcagcyccatctyykcytccagcggctgckccacggcggcggcggccgtcgtcgtcggcaggacgaccacsgacgccggctttcgcytccggtagcagcagtagaac

SEQ ID NO: 51055 - DNA, 757 bp, Zea mays
  Clone ID: MRT4577_146560C.1
cattgggaccctcgaggccggccgggatctctgctggattaccattgtccttgcttgctcataatgagttcatctccaaacaacatactatgacagcgaagttagagtgcctcctacctctggccatgctagccatcggccttgtgccttgtacggtccataactgcgccgaaggactacgagggacccgcacaacgccgcgcgcgccgacataggcgacggcacgctgcactgaaatgacatcgcgcaccgcgtacgctttcagctacacggcgcactgacagcgcgactggcagctgatccatcgtccggggggccctacagggagaacctcttctgggattccgacggcgacaactggtcggagtcacacgccgggggctcctgcctgtatcagaatcaggactaccaccacgaccccctctagctgagcgcagggggacgtgtgcggccactacacgcgagtggagtggggtgactgcaccgacttctggtgtgcacgctgagactgcgacaatcacctcccgggcttcatcatctgcagatacaaaccgcctgcacacgtcatcggttagagaccctactaaactgctatggatactacaatcagatacatatacgcttaatattaatgtcgacacggatgtatattatgagaacgggtggcaagtctgtgatatctgtatatcacgatgaatatgttgttgatgagcttactgattcagtgagaccctggaagagaaatgtgagtcatatt

SEQ ID NO: 51056 - DNA, 497 bp, Zea mays
  Clone ID: MRT4577_146561C.1
aaaaaaacgactaatctgaatcaggttccaaacaagcaaatacatgcagcctcaaatgcaacctttcaatacatagggtcacaacatttgcgtgaggcgctaagaacataggctccagaggacgacataggtaccgttcgcgggagcgaaatcaggagggctatgagatgtccacacagccctcctaggctaccaagttgggctctctagcaaacctggttagggaaggggcctcaataagcaggctccaaactctaatgaataggatgctctgtcaagcaaaataaatcctattaaccatgacgctttgcatattgaaaacagctataaccacataacccactactagaggcgcgggcactgaattcgctgaaagccgcctattctacatgaggtacccgggagccaccataactcccataattgccagaaggaatcatcttatccgaggctcgaatagcactcgattataagtcttgtccaccaggctctttgcc

SEQ ID NO: 51057 - DNA, 190 bp, Zea mays
  Clone ID: MRT4577_146562C.1
agccttttaaaaaattttttaaaaaaaaattttggggttttaatttaaccataatcacaaagtttttcatcaattccaattccatcatacgtaaaaaggactctaaaggtattgggaaacgatattataaaggacaatttttaatggggggggaaacacctacatgttatctccttatcctaaacagaaa

SEQ ID NO: 51058 - DNA, 332 bp, Zea mays
  Clone ID: MRT4577_146563C.1
tgcggtcacagaggagaaagaaagatggtttgttactgttaataatacaccaggggatgctacatttgtctcatttaattgttcacacgcacaagagtttcaattttgtgagaaactaaaggcacatctagagcctgaagcttaccaagagctcttgaaatgccttcacatatacaaccaagatattattacatgaaatgaactaaatagattggttaaaggatattacttcaacattacccatattttgtgaatggatgcaatgacttttttgtgacactgttaaaatatagacggttgttttggaaggatccttcaataaaaggcaaaca

SEQ ID NO: 51059 - DNA, 308 bp, Zea mays
  unsure (1)..(308): unsure at all n locations
  Clone ID: MRT4577_146564C.1
gtaaaatttatattgcaactgatagtactccggtggatatgcagacctatgatgttgctgtgattctcagncgtggttattgacatctcctgtatttatggtctcaaagaagatggagcaggaaccccctatgacaaggaatccacagccatcataaagcttaataatacaaccgtgctttatttaaaagaggtgacaaagttcctggctctcgtttgctttgtcagagaggaaagctttgaaagaaaagggctaattgactatagttttcattgcttccggacagccattcatgaagtttttgaggt

SEQ ID NO: 51060 - DNA, 238 bp, Zea mays
  Clone ID: MRT4577_146565C.1
gacgaccccacatcttcctttcccacgctaatagcttcccctcctccatggctccaccaacccatcaccaccctgcaccgaccccttccctctccctctccctctcccgacggcggcggcggcggcaagggacgccactcctcaatccgtcgacgaccgctggtcggcctctgccaccgtctcgcccgcacctccgaaacctgaatctcatccgtcgaggatcgccgagagcatctgg

SEQ ID NO: 51061 - DNA, 209 bp, Zea mays
  unsure (1)..(209): unsure at all n locations
  Clone ID: MRT4577_146566C.1
ccgacgcgttcgntttcaaatctcatttttcccctccccttgccattatctagcccgtccctttccagagccaagatagtcgctctctttacccaactctcccaaaatcatcctcccggacgcagcccgcaatgtagtcgccatcataggaaatgtcaactaggtggggctgttcttgtcgccagtgccgaccgtctggcggatctaca

SEQ ID NO: 51062 - DNA, 476 bp, Zea mays
  Clone ID: MRT4577_146567C.1
gggcgggccgggattcacacagacaaacgagtgtgagttcgtattctcctctccttccacctccgatggacacaacggagacaacgatggcgccggtgtcccagctggtgggcagagccaacctggaacctacaccaacagctctgtgtaggcgtgctgtcatcccacctcatctccgggcgatttccaccttgggccgcgtatagacagaggctcctcccaccccctcgtcttctaccgccatcagcggcacagtcgtagggatgagatccatcctacatcagcaccgcagcttagtcattcagcgtggttctcggtcgactcctccacgacagggagcgcacggctcttgacggaggtcttcgaggggaacgccgccgcggcattaggtgtgcagaagcccgcacgtgaacaagtactagcgcataatccttgatacggaggtgcccgtcacggaccgaggtcgacagctcaca

SEQ ID NO: 51063 - DNA, 230 bp, Zea mays
  Clone ID: MRT4577_146568C.1
gatcttcttggaaaccgagttgttctacaagggtatccgtcctgccattaacgtcggtctctctgtctcccgtgtcggttccgctgcccaggtgaaggccatgaagcaggtcgccggttccctcaaactcttcttggctcagtaccgtgaagtcgccgctttcgctcaattcggttctgatctcgatgcctccaccaagcagaccttgaaccgtggggagcgccttactg

SEQ ID NO: 51064 - DNA, 551 bp, Zea mays
  Clone ID: MRT4577_146569C.1
catgaaatgaaagcaagagaagctcagagtcgggcagctgaagagcatggagatttggctcttatcactgttgaagctccccaggttactgtgagtgaaaaagtatcattgaggccaccaatgttgcaggttgttcgtttagcctcctttcagtacgctccatcgataccaccatttatagtaccaaagcaatccaagttcgatggagatgattcagtgtttcagaaagaactggatgacagaagaagagacctatcggacctcttgttgtggttggtgtaagagatggagttctctggcttgttgacaggtatatgtgtgcacatgccttatcactcagccatcctggtataagatgccgttgccttgcagcatatggggaccctgttagtgctgtgaaatgggcaacgagacttggcagagagcatcacgatgacctggctcagtttatgctaggtatgggctatgccactgaagctctccatttgcctggaatatctaagaggctggagttcgaccttgcaatgcagagcaatgaccttgaaagagca

SEQ ID NO: 51065 - DNA, 427 bp, Zea mays
  Clone ID: MRT4577_14656C.1
ggcgccatacgcaaatgccctgaagaaactcgagaaagatatcaaggacaaacaagcaagcgtgaacgagaagattggcgtcaaggaatccgacacgggtctcgcgcctccccatctttgggatgttgccgccgaccggcaacgaatggccgaagaacagccgctccaagtggctcgttgcacaaagattattcaggatgagaaagattccgacaagagcaaatatgtgatcaacgtgaaacagatcgccaagttcgtagtgaacctgggagagcgcgtcagcccaacggatatcgaagaaggcatgcgagttggtgtcgaccggaacaagtaccaaattatgctaccactcccgcccaaaatcgatcccagtgttacgatgatgacggtcgaggacaagcccgatgtcacttatggtgacgtgggt

SEQ ID NO: 51066 - DNA, 2573 bp, Zea mays
  unsure (1)..(2573): unsure at all n locations
  Clone ID: MRT4577_146570C.1
gacacagttatttgctagtcaaagctatatcttatgttcaatcgatgcccttatcaggttttggtccaagtggatcatcttttgcatctgatgatccattttcctctaaggaagggcctccacaaaatttccaactgtacagctgggagacctatcagcctgttagtggcctacttgcacaacctgagtggactgtgtgggaccaaactgttgagtattgtgcatttgcttatcagcagtatatagtgatttcttccttgcggccccaatttaggtaccttggagatgtttcaattccctttgcaactggtgccgtttggcatcgaaggcagttatttgtgtctacaccaacaacaattgagtgtgtctttgttgatgctggagtggcagcgattgacattgaaacaaaaaggataaaacaagaaatgaaagcaagagaagctcagagtcgggcagctgaagagcatggagatttggctcttatcactgttgaagctccccaggttactgtgagtgaaaaagtatcattgaggccaccaatgttgcaggttgttcgtttagcctcctttcagcacgctccatcgataccaccatttatagtgccaaagcaatccaagttcgatggagatgattcagtgtttcagaaagaactggatgacagaaggtatgctgaagttgctgtcgctggaggaggtgtgtctgttgcagtaactcgcttccctcctgaacagaagagacctatcggacctcttgttgtggttggtgtaagagatggagttctctggcttgttgacaggtatatgtgtgcacatgccttatcactcagccatcctggtataagatgccgttgccttgcagcatatggggaccctgttagtgctgtgaaatgggcaacgagacttggcagagagcatcacgatgacctggctcagtttatgctgggtatgggctatgccactgaagctctccatttgcctggaatatctaagaggctggagttcgaccttgcaatgcagagcaatgacctgaaaagagcacttgcttgtctattaacaatgagcaatagccgagatgtgggacaagaaacagctgctgctgatgccactgacgttacccagattcttagtttggcagtagctaagcaagctaagcaggaaagtcttacagatgccgtgcagggaatagtgaaattcgtcaaggagttttttgaccttattgatgcagcagatgccactggtcaatctgacattgctcgtgaagttttaaagagattagcggctgcagcttctgtaaagggagcactccatggacaaatgctgcgaggcctggcactccgtcttggaaatcatggggagcttactagattgtcgggtctggtaagcaatttgattacagctggccatggacgcgaagcagcatttgctgccgcagttttgggagataatgccctaatggagaaagcatggcaggacacaggaatgttggctgaggctgttttacatgctcaagcccatggtcgtccatcattaaggaacttggttataacgtggaacaagatgctacagaaggaactggatcacacaccgactgtaaaaaccgatgccgccgccgcattcttggcttctctcgaggatccaaagctcacaagcttgggggaaactgagaaaaagcctcccatcgaaatacttcctcctgggatgcctcccctatctgcacctccgatcgtgattaaaaaggctggagcaaaacctggtctccctaatgcagcaaaggcgtcaaatgggcctataggtgctcctatggctcaaggtgctcccatggctcatggtactcctgggccacaaggggtccccatgaatcaagttactccatcacagggcagtcatgacgaggcaaggccatcagatgctacagtggctgatgcagctgccgcggttgcagaaggtacagcagctcccccggctgcagaaggtacatcagctcctccggctgcagaaggtacagcaactcccagcagtgaggaagctaaagcagcacctggtaatgaggaaggcacatcaaatccaatcaacgaggaagccacagcagctgcagtttcagttgctgcaggcagccctgactctgctgctgctcctgcagctgatactagctcggacgcacctgctgttaatcccacggaagataccgtctctgccccctcaacggaggcaccaccagagttgacggataagccatcttcagcagaggcatcgttgccacctccacccagtgtttctggtgtataaatatttctgattctcttttagcagtgtgccgaattttctgtattctggttcgttcgttccaccacgcgcgctggtataggtatttgttgcctgtggtatacagatttcgcagacgccaggcagtatgtgagtagctttgtacatctgctgtctgcgtctcacgagaacgtgctaccgttgtgtcactgacactgtgtggccatatcttatgttgttggtgaccccagttcaattcttgcttgatgagttgatcgagctgcccccccnnnnnnnnnnnnnnnnnaaaaa

SEQ ID NO: 51067 - DNA, 612 bp, Zea mays
  Clone ID: MRT4577_146571C.1
ggggttgcttgagaattttggtgtttcagtttctacttggacttttcttttgtctaacaatacatgtgctattagtattgctcgtgatctggtcaagcatgagcttactaagcatataggtgttgatgcctattacacgtgtgcacagatttagtatgatacgattgaccttcgttgtatgtttatagagctttagttggctgatttcttcacaatggcgcagaccagggctcagcataggttttatatctctaaactcaatgtgtttgatccactttaagtttgaggggtgttagatgcctatgcatttgcccttgtacacagtccctatcctatatcagtgtatatattcaggcctagtgccctcatattgaacatagtgcaattcataacactcttcataatggttatttatcacaatcaatcatcaaatatacattcagcagattatgcatttcaacagaagatattgccagagctcaataactcattcacccttatgggacataggtgtatctcaattgtcctcagcataaaacttataatagtcttgtgctcaaacaaatgcatttcatataacaaatgagtacctagtaggtatatggagcattt

SEQ ID NO: 51068 - DNA, 363 bp, Zea mays
  Clone ID: MRT4577_146572C.1
ctgtcgtcctttttttttttcttttttttccaaatcaagcccctcgaaagggcttttggtccaacgttaaaaattggccggtagcctctttgtttgaaccataccattccacattcctggtcccacccttaagggcacccctgaactccaataatttgcccctgggcctgcaacaagaacggctcggtggcggaacacgaaaccagcagttcttttacatatcctagtacaccatgttgcacaacatggcacctccaacaactgattatttagggaacgtccggcttttgcataatgcttttcggacatttgatccttcaccacctccatggtgcagtctgggctcgccctttccaacccttg

SEQ ID NO: 51069 - DNA, 357 bp, Zea mays
  Clone ID: MRT4577_146573C.1
atggcggcggtgctctgcgtgcgcgcagcgagggggagagagggtctactgggcgcaaatggggggagagagggtgagggcgagtggggctcggggcacaagtggccgagggcgaggtggggcgggttccacgcgcgacgtgggcgcggggaaggtgggcgcgagcagctcggcggcggttacgcggggacgacggggctgacaagccgggcccgcgacgcagagggagagaagaaagcgggtgcgggcgcgagagaagcggggctgacgggttgggcccacgggcagagagagagcgagggagcgggcgcgcgcggggaaggcgggcgccgacgggtggggccggacgagcagtga

SEQ ID NO: 51070 - DNA, 295 bp, Zea mays
  Clone ID: MRT4577_146574C.1
actggacagcggcggaggcgccgttgcggaggatgcatccctggagtgtgacgcttgatgccatatgtgagacagtgtttgcgaagcagtggacaagtgatgcagctctcaggacttagatttaatctcaccgcacgaaatttcacggtcgcaattcacagtccatatcccacatgatacattggtgactactacacatcgtagagcatctctacatactcatgagcctcaccccataactgagttgtcaactcacacagtgttgtcatccagcaaatcttccttccaaaagatc

SEQ ID NO: 51071 - DNA, 145 bp, Zea mays
  Clone ID: MRT4577_146575C.1
ctggcaggaaattccggcacgggggagagcaagcgagagcaactgctccggccgtgctccgtgttctaccacacgcacccaggggctgctgctccggaccacagggctgcggcccgccaacggcctggctgtgcggaggggatgt

SEQ ID NO: 51072 - DNA, 286 bp, Zea mays
  Clone ID: MRT4577_146576C.1
ggtaccctcccgggccggccgggaagcgggactcgccgatcaatgtacagattgcccgtccgggcacaaacatccagaatcgtcgacagcctcgccacccccgcgccgtcctcctcctccggctgcggccgccccaggctcaggctcatccggaacgcccacgtatagaacgcccccgccaccgtcttgcgcatggaccccaccgtctagcgcttgaagagcgggttacataatttcaagaccgaggtctatgacaagaagccgaaccatgccgaccctctaaagt

SEQ ID NO: 51073 - DNA, 174 bp, Zea mays
  unsure (1)..(174): unsure at all n locations
  Clone ID: MRT4577_146577C.1
ctttagcaaaaaccaaaaattgtgtttaattccctatatatcactgcatcgacaaacanngcgcgtgagatgcgcctcatatcatgagacataaaccaaaaatgatcacggcttatagtatgggagcgactagcacgcgcaccgtaagtagaaacagggaaataaaccaacctt

SEQ ID NO: 51074 - DNA, 190 bp, Zea mays
  Clone ID: MRT4577_146578C.1
cctcctttccttcttgggggcttattaacttcagggggtgtttacttcgaagcccaaacaccttactaagaggagcgcattatactgactatgacacacttcgtttttttcaaaatgtgtcacagctcaagagctcggaatgttctgacaaagtggcgaaagtttgtctccacagacccgcctgtgtcgg

SEQ ID NO: 51075 - DNA, 978 bp, Zea mays
  Clone ID: MRT4577_146579C.1
caagacacgaggacagggggggaagctgcaggagggagacgagcagccggcggtgagagcaacccggccccgccccgccccaatggagacgcaagtggcggctccgccacaccaccaccagcagcagcagcagaaggcggccaacctggcgcgtaccttcaccaagctgctccgccgcaagcgcgccgaggccgcggcgcagggcggcgcgcccgaggcgcccgcttctgtggctccgggagacgcgttggaggaggagcggacggagcctccgcccgccatcccgtccctcagcaagctcaagctgtcggggaacctcgccgccgcctactcgttcgacgccttcttccgcaacgccgccgagaagaaggcggcggcggcgggagggggagcggtccggcaggctgcgggtgcgggggaggtgacgctggaggccgcggcggatgcgctgctggccaacctcttcgcgggggtctcggcggtgaaggcggcgtacgcgcagctgcagctcgcgcagttcccctacgacgcggaggcgatccagtccgcggacgccgccgtggtcgccgagctcacgaggctctccgacaccaagcggaggtacctgagggaccccgccgccgcggcccggggcgcggcggcggcgggccacaccgcgctcgcggcgcacgccgaggagcagcgccacctcctcaagacgtaccagatcacggcgcgcaagctggagtcggacctccgggccagggacgccgaggccgagcgcgccaggagctccctcaccgccgagctccgcgccgagcgcgccctggaggcgcggctccacccggggcggaccctggcgtcgctggacgagctccacctctccggcctgaacccgacccacttcctgaccgcgctgcggcacacggtgaagtcgatccggtccttctccaggtcgatgctgagctcgatgcagtccgccgggtgggatctgggcgc

SEQ ID NO: 51076 - DNA, 440 bp, Zea mays
  Clone ID: MRT4577_14657C.1
gcggggtggggggttttttttttttttttttttttttttttttttttttttttccaacaagatataaatggtcaaattaaagcattacagctagctgcaaaccctgttcaagaaccaaaagcaacaaatcttgtttataaaacctcttgggaggggggggggggtggccttgcagataaaaataaaactagacataccaaaaagctccaagcagcacattcagagaacttatgccttggcagcaccctgggcagaaaagtcccccctcctctgctcctcaataatgctgagcttgatccccttccccttgggcaggctcacccacggttttttgcccttgccaatgggaaacacttttcccatccgggtggcaaactggtggcccatggattcctcaacctggatggttttaaacccccccttgtcctttctcctttttt

SEQ ID NO: 51077 - DNA, 198 bp, Zea mays
  Clone ID: MRT4577_146580C.1
tgcacgcctgcgaacataggttcactgtttgcgatccactcgggaatgatatagatcgaggtactcatatgcctattataaccgatgcgtacccatgcatgaattgaagctatcatgtgagcgaaagcacactgagggctaggttggaacaatcacagcttgtgaataataatttgctaagaaatcgaaatgaataac

SEQ ID NO: 51078 - DNA, 675 bp, Zea mays
  unsure (1)..(675): unsure at all n locations
  Clone ID: MRT4577_146581C.1
cattgggtacctcgaggccggccggggtctttctccatctcactggagatgagcctgttctcccttccagactacgcacgcagtatgcagaaccgacaaaatgacgtatactatatcctgaggacaaaacaatagatcgaaactcacccttcataagagatgagaacaggagcatgaggcacggtactgttcgacgccatggactacgtatgttctggtccacttcaccgagttcctcggctaccaccttgtctctgccatcctcgcctccgtcaacgtttccgacaatgacgaccagaatacgaggatctctcatctgtcttgcaagtttgcttttttgtgcaatgtcatgcctgaggtactgccggactcttgtcagaaggtgctcgtgtctgatcccatcgcgaactcatgccgctcccttgtagactgtcgagtatggatgtaccgacaacaganataggagcagtgaaggcacgggccctgaggaactcnagcatgccgcgatacatgtctagtgtaacacaatggagatcaacccagagaaccctatcatggatgagctccgcaagcgtgccgaggctgacaagaatgacaagtcagtcaaggatctcgtgatgctgctgatctagactgctctcctgacctcgggcttcaagactggatgaccccaac

SEQ ID NO: 51079 - DNA, 675 bp, Zea mays
  Clone ID: MRT4577_146582C.1
actgttaacgccgctgctgcatcctattgtcgctcgactatgcgtcttggccggtggacagccctagcgtccttgtcgtcgcctgatgcgacactccaggtcactgccatggattccatgccctcccgttagaaggcgatctcttcatcggcgttgccgtactggaggactcctccgatctcggctcaagagagctaccaccgaggtggacgagatgattaccaaggatgcggagataggaccagatgccgtcccagattgctgaatctgctgccaagacgcagctagggacatcctcgcttgtcgagattgtgatgcgtctaccaagatcctctcgcatcctcaaggagcatgggatggcgacgtagatcccatgggatatatacttgctcataagcaaagcgtggacgattaggaagcatttgaacaggaactggatagacaatgactccaaattctgactcattcttgatgacagaacaatgcaccgacatgaccgctatctactagcgtaccacgaagatcccacccacctggtagtacgagtcaactgcggcaaagcactctgcatgcgctagctgatatcctccgacgtcttggtctttaccccctatgagctggttctagacatggatttatgtaatgctaagcatggctgcagcagctgaatgcaca

SEQ ID NO: 51080 - DNA, 232 bp, Zea mays
  Clone ID: MRT4577_146583C.1
gggtgacccatggtaaaccatgtggcagcttaaactgtgtgaggaagaagggctgagaaactgaggaatgagacaatgtgagtaccctgcaaattggagtggtttcggtatgaagcagaatgggaattatgattcacggctaaggtactaatgtgctctgctgtaggacacgactagatgtgcttttctcgggctagagacgggggatgctgtaatcagaacattcttcccc

SEQ ID NO: 51081 - DNA, 191 bp, Zea mays
  unsure (1)..(191): unsure at all n locations
  Clone ID: MRT4577_146584C.1
cactgctgcatgggctaaggatctgannncaggaagacttccagctgctgtgccnntgatggtaccaagaagcctgtaaccgagttcgccacctgccacctggcccaagctccaaaccatgncgtggtctcacgaaaagagaaggcagcccgggttagcactgtgctgactgcccagaaggatttattttg

SEQ ID NO: 51082 - DNA, 1613 bp, Zea mays
  Clone ID: MRT4577_146585C.1
ccgggaagagctagcagctagctagcagccactttgatcagtaatttactcgagctgtcggtcatccatgatcacgctcatcagatgcatgggtgcattgcaagtcctaacgacgaccttacttttactagttggctcacggcacagctcggcggtgtcaccgccatcgggctaccgctccacgctcacccacgttgactcccatggcggcttcaccaaggcagagctcatgcgccgagccgcgcaccgaagccgccaccgagcattcatgatgctgctgccgcgttattccacaatgtccaccagctcgaacgcgggacccgccaggctccgctccggccaggccgagtacctcatggagctcgccatcgggacgccgccggtgccattcgtcgccctcgccgacaccggcagcgacctcacgtggacgcagtgcaagccgtgcaagctctgcttcccgcaggacacgcccatctacgacacggccgcgtcggcgagcttctcccccgtgccgtgcgccagcgccacgtgcctgcccatctggcggagcagccgcaactgcaccgctaccaccacctcaccctgcaggtaccgctacgcctacgacgacggcgcctactcggccggcgtcctgggcacggagacgctcacgttcgccggctctagccctggcgcgcccgggcccggcgtctccgtcggcggcgtcgcgttcggctgcggcgtcgacaacggcggcctctcgtacaactccaccggcaccgtcggcctgggccgcgggagcctgtccctcgtggcgcagcttggggtcggcaagttctcctactgtctcaccgacttcttcaacaccagcctgggtagcccggtgctgttcggctccctcgccgagctcgccgcccccagcaccataggcggcgccgccgtgcagtcgacgccacttgtgcagggcccctacaacccgtcgaggtactacgtctccctcgagggcatatcgctcggcgacgcacgcctgccgatcccgaacggaaccttcgacctgcgcgacgacggctccgggggcatgatcgtggactccggcaccatcttcaccgtcctcgtggagagtgctttcagggtggtcgtcaaccacgtcgccggcgtgctcaaccagccggtggtgaacgcctccagcctggacagcccatgctttccggctactgcaggtgagcagcagctcccggacatgccggacatgctgctgcacttcgccggcggtgcagatatgaggctgcatagggacaactacatgtcctttaaccaggagtcgtcgtcgttctgcttgaatattgctggtgctccgtcagcttacggttccattcttggcaatttccagcagcagaatatacagatgttgtttgacatcaccgtaggtcaattgtcattcgtgcccaccgactgtagtaagctatgaagccatatcatatacatagtactttctctgtattagttaaaaataaactagcagacgacaaatattcgataacataagtaatagtgaatctcttttataatactagaaatcacttatcactctataacataaaattactattgctttatactagtattattaacag

SEQ ID NO: 51083 - DNA, 1115 bp, Zea mays
  Clone ID: MRT4577_146586C.1
cattgggtacctcgaggccggccggggaaggaagagaaagagcgcttgttggctgaaggtactgcagccatggaggcttgtagagccgaagctgaagctgaaaagaagcgtaaacggaattttgagagggagaaggctcgtcaggccctacaggagatggagagaactgtagaaattaatgataacctccatctcaaggatttggaattgcttggaacagccacaacagaacatattgtaagctctgttgatgagactagtccagaacgctctcatgatggcatggccggctatcatccaggagctgtcaatcctttggagcaacttggactgttcataaaggtagacgatgaggaagacgacgagcagtgttccctgcattaaagaaagcagagaaaggagaaatcagctgatggtgctgtgtttttccatgccctgtcacgggctaggggctggtgccaacctattgatccaaagtgatcacctgttgcgggccatcatgtgtggcaatggttctaaactggggtggtgagagccctccattttgttaaaaatatgcatgggaaggatgaagatcatcttgcatagtcatttgcttccaggaggcgcacaggaggtggagtaaaggtggagtaaaaacgaacgtatttatggtgcctagaggacggttttttcagccactgccaaaacggcttgaatgacgccaccgaagtagtggagttcaaatggctcattgtttgccgcaacctcaatttcaagcgggtttgttcagcggcttatagcttcttctctccttttgttgtctcatctgttttagattgtagaatttgggctagttgcttcctgctgtaaatccgaattttgatgtagtgacggaagtgctacctttttgttgagcatgatcgaaaagtttacaagaaaaatcgtttttttgtagatgaacgtccagtcttgtctgtagctacaatttcttgcgcaatcagtgtaacatccgttgtgtttatattctgctcgacaacgagtacggatttaagcacgtgatatcagtgaataagacagacattagggtctaaaaaaaaaaaaaaaaaaaaaaaaaaaaaaaaaaaaaaaaaaaa

SEQ ID NO: 51084 - DNA, 293 bp, Zea mays
  unsure (1)..(293): unsure at all n locations
  Clone ID: MRT4577_146587C.1
nctctctatctctatcttcttctactccaancaaaagcaagacccacatataattatttagagcancacnacnncaanccttttccctatctactcaaacctcacacccactcatctatactcatatgcattctctttcataacttccacatctataatattcatctcacctttctccctacttacaatacttcaatatccatctccccatctcaatctacactcactcaccaccctcaattctttcttccactccttctttcacgagatctacaccancttctcctccattt

SEQ ID NO: 51085 - DNA, 560 bp, Zea mays
  Clone ID: MRT4577_146588C.1
cgcccacgcgtcctcccactcgtccggcgagcagcccttttgatgatcctttatgctgaagtgattgtcaaagggggtggggttcttattcagggtggagacaaacattacgagctggaaaagctacagaaggaagagaaagagcgcttgttggctgaaggtactgcatccatggaggcttgtagagccgaagctgaagctgaaaagaagcgtaaacggaattttgagagggagaaggctcgtcaagccctacaggaggcaagtgttgaccttacccaccagcagttgcaatttctcattcttattgttcctataagaaaataaatcctttatgcagatggagagaactgtataaattaatgataacctccatctcaaggatttggaattgcttggaacagccacaacagaacatattgtaagctctgttgatgagactagtccaaaacgctctcatgatggcatggtcggctatcattcaagagctgtcaatcctttggagcaacctggactgttcataaaggtagacgatgaggaagacgaccagcattgttccctgc

SEQ ID NO: 51086 - DNA, 3234 bp, Zea mays
  Clone ID: MRT4577_146589C.1
aattcggcacgagggttcgcatcgcttctggttcgggtctcacctctcgcgatcaaagcagtagcgggttcagtggcttggcgaaggaaaaaaaaggaggaaaaaaaaatagcaaggctgtgcagcgaggagacgactcgactccaactgggaggcgaaaaataaaaaagaggataaggcgaggcccgaccgggcggccaccgcgctcccagatccgctccgctgccgtggagatccagctcccttgcgcgcctgagcgtggacgccggcgtctcgctcccggatcccgaccttggggttgcagctgcttcagatccagcgttaccagatctgtgacccgctggcgcctgggcacatgacaccgacggttttaatggagtttgggcagcagaggccaatgaaacggggatacgaggaaatggtcttcagggcagcctcttcccgtggttatgcagagactgttggcgagtcgggagttgcagctggtagtcctcttcgtgttgattctgaggactcatctgtgccaaagcgcaagtgcatcagcctgaacagcgttggctttgatgtgaagcgggagatcttggtgccctctaagatgtcgtcatctgaacggcggtaccttcgaaagagattccgggcagagcttgattcggtgcgggatctcctcaagaagccagagtttgcagcccctgttcctctcaatcgggcacctgctttgtcatcctcagctgcacctcgagctaagaagccacagaagtctcagcgtggtgggaccaatgttatacgtggtgcaaagggacgattcttgcctacaaaaccgcggccggagacttccactgtgttatctgaagctgcagcgtttaagcagtgtgaagctattttgaagaagcttatgactcaaaagtatagtcatatattcaatgttccagttgatattgtgaagctgcaaattcctgattattttgacattgtgaagaccccaatggatcttggtactgtcaagaaaaagcttgaatctggttcatacacaagtccatcagattttgctgctgatgtccggctgacctttaacaacgctatggcttataatccgcgggggcatgctgtgcacgacatggccatccagctgaacaagatgtttgagagtcgatggaggccaattgagaagaaattggcttctgctgccactgagaaacatgttgaggttgacagggctgactcgaagaggaggaagacacctcctgtggaccgcagtgatgtgtcaatggagtgtgcacgacagacagagccagaaacaccgaagatgacagctgaagagagggaagcctttgggaactgcttggcatccatatctgatgagttacctcctcacatatttgaactgctacaacaatgcatcgacagcaatgcagatttgtctggggatggagagatagagattgacatccatgctgtcagtgatgacttgttatttgagctgaagaaacatgttgacaagtatttgcaagagaaagagcagagccagcaggtgaaatctgagccctccgagaatgaagctgtgaatgtatctggccttagccactcttctacaaatccttgcaaaggcggcgaacctatcgaagaggatgtggacatctgtggcaatgcctcacctatcatgctagacaaagatgcacaaatcaggaatagcaagtgtggtagtccaagtagttccagcagcgactctgaatcatcttctagcgattctgattcaggcagtgactctgaaagcgaatcagaaaaagttggcagccctggaaagcttgcgaaggggactaagaaacctgatcagctggtggagcaagaaaagagtgatgttattagtccagctgatgccaaccgtcctgctgctattgtggggcttcatggggaggacagtgagtcaaagcctgcaccagggggggaaaactcagaacccgatacacaagtctcaccagacaggctattgcgagcagcccttttgaggagccgttatgctgatgtgattgtcaaagctcgtggcattcttagtcagggtggagacaaacaggaggagctggaaaagctacagaaggaagagaaagagcgcttgttggctgaaggtactgcagccatggaggcttgtagagccgaagctgaagctgaaaagaagcgtaaacggaattttgagagggagaaggctcgtcaggccctacaggagatggagagaactgtagaaattaatgataacctccatctcaaggatttggaattgcttggaacagccacaacagaacatattgtaagctctgttgatgagactagtccagaacgctctcatgatggcatggccggctatcatccaggagctgtcaatcctttggagcaacttggactgttcataaaggtagacgatgaggaagacgacgagcagtgttccctgcattaaagaaagaagagaaaggagaaatcagctgatggtgctgtgtttttccatgccctgtcacgggctaggggctggtgccaacctattgatccaaagtgatcacctgttgcgggccatcatgtgtggcaatggttctaaactggggtggtgagagccgtccattttgttaaaaatatgcatgggaaggatgaagatcatcttgcatagtcatttgcttccaggaggcgcacaggaggtggagtaaaaacgaacgtatttatggtgcctagaggacggttttttcagccactgccaaaacggcttgaatgacgccaccgaagtagtggagttcaaatggctcattgtttgccgcaacctcaatttcaagcgggtttgttcagcggcttatagcttcttctctccttttgttgtctcatctgttttagattgtagaatttgggctagttgcttcctgctgtaaatccgaattttgatgtagtgacggaagtgctacctttttgttgagcatgatcgaaaagtttacaagaaaaatcgtttttttgtaaaaaaaaaaaaaaaaaaaaaaaaacctacaaaaaaaaaagaaatcagtgtaacaaccgttgtgtttaaattaaaaaaaaaaacgaattttttgttaagcacgggccagtcgtgactgaaacagcaatttgtttcgcaatcagtgtaacatccgttgtgtttatattctgctcgacaacgagtacggatttaagcacgtgatatcagtgaataagacagacattagggtctaatcgtttttatcaaaa

SEQ ID NO: 51087 - DNA, 1203 bp, Zea mays
  Clone ID: MRT4577_14658C.1
cacacgatcgttatgatggtggatcctacgaatggaatcggtaaccaaggaaagcattactactctatgtggcagaccttatttgagatagacaccaaatatgttgcccggtgcaagaactgctctttttgaattcctgaccccccacgcgtccgctcttttgaatcctgacccttgctcgaatcctacaattgtgctcaagaagactctctcatgttcctatccaaacttgcctttcaatgaggccctccgaaaggaaagtgagaagcttcaggttgaacttcaaaggtcacagagcaacatggatctgggttcgtgtgaggttatccaacacctgcttggagtaaccaaaactgtggaatctacaattccagagaaagaaacaaatgttaaagctccagaaaagaagggttcaaactacagtgaatccaaaggagagactgcaaaatcgtttgatgatgatgacgactatcctaagaagcaaaacgatgagtatcctaagaagcaaaaggatacctgcagcacactacgatgctctttacaagttccatatggtcatgatcttgtctcaagtagaggatcgtacagtgatgaatggcatgcagatttacttggtcgagaattgcttcaatcgccaaggacaggccaatcttctggggaggcttgcaatgatattatggcgtactccctaatattgtcctgctgctgttatacatgctgtgtaaggagaaagcttcgtcaaaagttggacattgcgggaggctgctgtgacgacttcctttcacatctgctgtgttgttgctgcgcgcttgttcaagaatggcgggaagttgagattcgcggagcttatagcgaaaagacgaaggttacaccaccagcatgccagtatatggagcactgaacagctgtatgcccgtacgggtagacccgaacttctgtaaagatattaacagaatatctgatatcgtactgcaagagcagtggtactacactgctcctgtgtagtgtttattcttactgtctattgttcgtcctggtcctggaacttgcatgtatatgttggggcatagcagcagagtatgtactctgtaaaaacacatcagttacaggctggtagagcctaacatcggttaacaccgtcagttattggcaaaaaagttctttgtgcgtgtgcctgaaaaaaaaaaaaaaaaaaaaaaactc

SEQ ID NO: 51088 - DNA, 1143 bp, Zea mays
  unsure (1)..(1143): unsure at all n locations
  Clone ID: MRT4577_146590C.1
cctcttattagctgctcgagcggccgcccgggcaggtacaagcttttttttttttttttttttttttttttttgttttttttttttttttttttttttttttttttttttttttttttttttttttttttacaaaaaaacgattttttttggaaacttttcgatcatgcccaacaaaaagggggcacttccgtcactacatcaaaattcggatttacagcaggaagcaactagcccaaattttacaatttaaaacagatgagacaacaaaaggggaaaaaaagctttaagccgctgaacaaacccccttgaaattgagggtgcggcaaacaatgagccatttgaaccccactacttcgggggcgtcattcaagccgttttggcaggggctgaaaaaaccctcctctaggcaccataaataccttcgtttttaccccacctcctgggcccctcctggaagcaaatgactatgcaagatgatcttcatccttcccatgcatatttttaacaaaatggacggctctcaccaccccagtttaaaccattgccacacatgatggcccgcaacaggtgatcactttggatcaataggttggcaccagcccctagcccgtgacagggcatggaaaaacacagcaccatcagctgatnttctcctttctctgctttctttaatgcagggaacactgctcgtcgtcttcctcatcgtctacctttatgaacagtccaagttgctccaaaggattgacagctcctggatgatagccggccatgccatcatgagagcgttctggactagtctcatcaacagagcttacaatatgttctgttgtggctgttccaagcaattccaaatccttgagatggaggttatcattaatttctacagttctctccatctcctgtagggcctgacgagccttctccctctcaaaattccgtttacgcttcttttcagcttcagcttcggctctacaagcctccatggctgcagtaccttcagccaacaagcgctctttctcttccttctgtagcttttccagctcctcctgtttgtctccaccctgactaagaatgccacgagctttgacaatcacatcagcataacggctcctcaacccggccggcctcgaggtacccaatg

SEQ ID NO: 51089 - DNA, 573 bp, Zea mays
  Clone ID: MRT4577_146591C.1
cattagaacattcttaacgatgatcaattatgctctctagaatagaatacctcatgtgctcattggcctatatatatggttttaacttttaagaagaagattgattaaactgatgggttttcagttcacacctctaaaaaccaaaggatgtgaagctgcatctgccggtggggcccagggcccagacaggtaggtcccagagattacccccctgggcccagtcgtcagtgtcctccatatcgccctcccacactggcggcggggccacgagcatggcctcggccagctcatcccacatcttgggcgactccaccacctccacgtcggtcccgagcaagacgtcccacgccacatcgtcctcgcctgcagccagcggctccgggctgccggtgtcgtcgctgccgccggcgccgccgaagcggcagccgccctccccgccggaggcctgcattgcgacgaggtcgggcctgaaccggacctgggccgcggcctccagcgcggcggcgcggacgtcgtcgggctcggcggtggcccggcggcggaagcggtggaccaggcccgggaagttgagcc

SEQ ID NO: 51090 - DNA, 376 bp, Zea mays
  Clone ID: MRT4577_146592C.1
gggaaccacaaatttttggcattggcggggggggatttgggaatgttcacccggtttggaattggtttacacggaacgggggggtgtgggaaaaaaaggggccattactttggttaaatggggacaccggttttggggggtaataatggtccttcttacgcctcgggatttggattggtttgggaaatttggagatgggacattgggggggactaaattttggggtttggggggaggtggggacttggttttcggcaacggttaactttaggtttcaaaatttttagaaagggtttattttggtggagtggcccctacacattcggtcaaccgaacatgggaaaattggggggaaacaaggtttggcttttttttt

SEQ ID NO: 51091 - DNA, 387 bp, Zea mays
  unsure (1)..(387): unsure at all n locations
  Clone ID: MRT4577_146593C.1
tntttttttttnttttttttttttttttttntttttttttttttttntttttttttgtagcaaacattcttaattgcctaaattgtgtttggtgctgtgccggactttggttccaatctttatccgggggggccaagaacaaaacaaacgggtgggaaagaagggtaccaacaaaaggcacccggaaacgaaacccccaagattaaggacactatcccacccccagggtaacaccatacactaccaaacgagtttataaagggaaagggggcccctacaaagccaccagaaccttttgggcacaagacgaaccgggggacgacgaaattgccttgggggacccccacggcaccaaaaaggggcaggggaccggggtaacccccgaaa

SEQ ID NO: 51092 - DNA, 321 bp, Zea mays
  unsure (1)..(321): unsure at all n locations
  Clone ID: MRT4577_146594C.1
gggggnntnaaagaacggggattcatgggaaaaatttcttcaaaaccccatcaaaacccccgggtttcatccccccctttgcccgccccccccctaataaccttattttttccccccaaggggcaggggccccggatcaaaaaacccccgcccccattggtcccccggcttttggcccccagagccaccccctggaacccgggcctggcccgccgtccaagggttcccccccacccattaagccccctccccctggggggggcccccgcgggaaccatgccttggcaagggttgttggccccccaggggaccagccctcca

SEQ ID NO: 51093 - DNA, 438 bp, Zea mays
  Clone ID: MRT4577_146595C.1
agaatgtaacgtgcgcggcatcgcatccaccacccggaggatcaatctgtctaacaattgggatggtttgtcaacacgacccaacccaacccaacccaaccaaaaggtacagcttcttctctctgcatttgcgtgcccattgccaccaccactccctgctgcctgctgcctgtccttgggaactccttcaatggaaaaggggtgatccagttattgatggcctgcagtacagcttgaccgctgggcactgcttgctcctacggcaactacaatgcctctgctcttgaccatcatccgcttgtaagaaggcatgcgtcacacatgttcaacctcgccatcagcgatgcgtgtctcgtaacagaatcagagcaagcatcatgcagcagcagcagcagccaggactagagggcgccgtcatgaagccatcagagcctgctg

SEQ ID NO: 51094 - DNA, 375 bp, Zea mays
  Clone ID: MRT4577_146596C.1
cttaatcaaaaagggagggggtttttttatatgcaataccccacacagccccaatatgcgaacaaaaccacaataaagccattcccacagacacaaaccaaacagggtgatgctcacgcaaaccccaaaatcacagaacaatgcatagctcatgcccactatataattagaaaaaacaacttttaacccaacccccacagaccgggaaaccttcccactaatcctgtggctacccccacagctcaacaatagttaacttgacaaacaaatggccaatagtcggctctgctaaaaaatcttaccaacacgcacagccagagtccaaacttgcaggttgtaaaaagactccatccccgtgtgcaaaacgttttccca

SEQ ID NO: 51095 - DNA, 407 bp, Zea mays
  unsure (1)..(407): unsure at all n locations
  Clone ID: MRT4577_146597C.1
gtggggggtttttttttttttttttttttttttttttttttttttttttttttaggtcaaaaaccctctccactcggcattcattactgggtggtcaaaatcggcatcgaacagcttttacaaaagccgcccccgatagattcggggggggggggggggggaacccccatttaagcctatgtttagctttttgcctagcccccatgattcagggggaagggtccctgggggggggcgcctcagtccccgcccttcctgatcttgccaatccagctggccccccccggggtcagggcccccggcggggggaacctgttcggggacgcggccttgtgcccggggggggccaccgcgaaggtcccgcccttccctccgggttcccctgtcccgttccccncctctggggg

SEQ ID NO: 51096 - DNA, 351 bp, Zea mays
  Clone ID: MRT4577_146598C.1
attccctggccgacccactcatacgcttacaacccttaatacatcaatcctttttaacaccttactttaccccaaccatggccgacctttttcaatctgtggaacgctcttataaaccattaacctttcacttactacccaccaatcttccaaacctaatacactactatctctacaacattcctacttacatataacctaataccaattcttccacatcttctaccacaattacattcccaatcatctactccttcattctcaattcatcctacttataaactaaccatattcttactccatctccaactatactataacactgaactaaaccatcatctcttacatcta

SEQ ID NO: 51097 - DNA, 693 bp, Zea mays
  Clone ID: MRT4577_146599C.1
ccggccgggcctccccttgtttagcggcgacagtggttctcctctctccttccgtcgcgcgctcgtccggaccaaggaagtctccttcggcggcggacacagcaagttccggcttgccgtggcgccgtcccactctccctggatgctatccatgagtgccggatcttgctccggcgcaaccgaagccgtgcatgagcaatcttcgtccgatttattgccccgccgagcagttcgggcggatccaaggcagcggcgatttggaagcaagcgacgacaaggcgcgtgcaccggcgacccaggaacggcggcgtcgccagcaggcctcggcggggaaggagattcgtctcgccgagctggaggatccgcctccgtcttggttggctgacaatcggagaagggacggtcccaagcgtcgccgccttcgttgtcgaccgtacctcatctttgttgtcccaagacggtcctaaaccttcttaccccaagcggcgtaggcagcaccaagatccatccgcattgcacacctcattacgccgttcctcatctttggatctgcagcatattggaaaatcgccgccctcgtgttcgtgtttcttttttaagcataggatggtccggttaatagaacgatgaaacatttattagtaagggaaataaaaattaatttgcaaaaaaaaaaaaaaaaaatttgcggcc

SEQ ID NO: 51098 - DNA, 588 bp, Zea mays
  Clone ID: MRT4577_14659C.1
tagctactacatcccgagcggacagctctcataggatcacagcgtactgtactcgtgcatactggatcgtacctttcatctggtgcatcctatatgtaaaccactgaccgggattctactacgtcaacgacatgcaaaagccattcccttactccatcttaatcgacttaactaacatatttctttttgcctctgggatagtagcgaataggttttgatctgagcattcttcaccacgaaaaaacattctgactgactactggtactctcactattatgtgatcattaatcacaaccaatcctactacttacgcgtcagcggtgacctcctacacttgccaaaaaccatatcgcccgtattgatcaatattattgcgacccttgctggatatcacttttccctctgccaagtaagctcatatttataatgtttctataggcaacagattaaacactgtccataacctaataccatgtgactcttgaggtacaacattgattacgaaatgatccatctacatctgaggctattagtgctacttaggcgttgatgagagcaatgttagtgattgacactggaactaatct

SEQ ID NO: 51099 - DNA, 3110 bp, Zea mays
  Clone ID: MRT4577_1465C.1
aattcggcacgagggagatgtacaagaaggctaaagaagcttgaaaattggcatagctaccttgactttatcgagaaggaagaagacattaataaggtatgcttttacacttctaggaaccccttgtcctttttatttagtagtttttatggaacacttggaattttataacttacaatccagtcttattggctcaactatatcctttaacggctagtatttggacgaagcttcctttgtaatgggatgttgaactgaggatagagcgtggacataatgtttggtttcgatgaggctaagtactccaaactttcatttggcagtggtcgttctgggttcatgatatatggtaccaaataccagttttgaatttttaatctcatatgcaggtatttgcttaatgctcaccttcttaaccatctatctatcgagcaggatggtccctcctttcttatggaggggcctccataatcagctaatggagtaatctgttatcaaattgtatgaaaggtgtgtgattgcatgtgctagttattcagaattctggatccgctatgtgcaatgtatggaggataaagggagtctagacctagcaaacaatgccctggctcgtgctactcatgtgtttgtcaagaagcagccggagatccatctatttagtgctcgctttaaggagcttaatggggatatttctggagcacgtgcagaatatcagcatctttactcagatttatgtcctggctttctagaggccatcgtgaagcattctaatatggaacaccgactgggagataaagaattatcttgttcagtttatgaaaaggccatcgctgctgagaagggaaaggaacagagccagctcttgccgacgttgcttattcagtactcccgtttcttatttttgacgagccgagatttggagaaggcaagagaaatattaactgtgctgcatgagcagttaaatgtaacaaaaacagtgcttgaggctgtcattcatctagagtcaatttttccatgcgaaaagcgtattgattttttagactcacttgtggagaagtttgttacacctgaatcatctcagggagaggtggcaagtctagttgacaaagaggaaatatcttccatatttttagagtttttggatctctttggggatgcaaagtcaatcaagaaggctttaactcggcatacaactcttttttcatgtaagagaagcattctgccatcaaagaaacggaaagcagatgacgctgttgtctcagacagggacaaatttgctaaaactgtggttactcagtcagccacgggaactgatccaaatgcttccaatcctcctgtttggcctgcaacttctgaagcatctgggcaacaatggggagcttcttatgcacagcaggctgcatatcctgcatatggaacttacgactacagccatcaaatgccccagcctgctcctcaagcagctgcctatggtgcttatcctccaacatactctgcacaggcttatacacaacaaagctacccacagcctgcagcaattccagcagcaccagtaccagcacctacagcgccgtcagcttatcctcaacaacctgcggcagctcaaccttattatggcacaacctactactgataagtagagtagtcgtggatggtgatccgatgagcctgttaatctaccttttcgcatgtgtgtggttcctctgtactgccattgtttagctcgcctttagacgaatgctagcgacgagatgatcacttgagaacaaatatgagatttgtacaatcagcatttttgtcgctaggagttgccattgttttcatgcaatagcataatctactgtagacgaggtagcgttgttaaccatgaatatgaacataatcgacataattcagtgttcacgcctccaacaaaaaaaaaaaaaaaaatgttcgcttgaaaacaaatttgagattggtatagtctgcatttttgtcgttagcatgtgtcgctagggattgccaatgttttttttgtaaaagcaacaccccccctgtaaaaaaggcagggggtgttaccccatcctttgaacatataatttcccttattaaaaaaaaaaaaaaaaaaaaaaaaaaaaaaaaaaaaaaaaaaaaaaaaaaaaaaaaaaaaaaaaaaaaaaaaaagagatggaaggatcagaagagattattgaggctgatctcgtcctcctagctatgggattcttgggtcctgaagcgacaatagctgagaaattgggtttggagaaggacaacagatcaaacttcaaagcgcagtttggagacttcgctaccagtgtcgatggtgtgtttgccgccggggactgcagacgtggacaatcactggtggtttgggccatcacggaggggcggcaggctgctgcagcggtagacaagtacttgtcaaggtatgatcagaatgctgctgctacaggcgacagcactccctccgggacagggctcgttcagccggttgcggcatagtagcataaactggagcaagttttacgtttgtcagtgtatcctgtgggttccacacagcaaacaccgttcttgtagttgtctaaaagaaacagagaaatccgggctcattaaggaatgaaagcccttctatatttttttttgacgatagataaacagttgaaagttttggtggctattgtctcttttttttttctccaatttagtatgttttgcatgtctgctgcatgtggttttgtagtccaaataatgtacagtttcccctttgttaaatccccgttaattcgtagggcgacaacgagatgatcacttgagaacaaatttgagattggtatagtctgcatttttgtcgttagcatgtgtcgctagggattgctattgtttttcttgtaatagcataatctttactgtagaagaggcagcgggtgctaaccaatcctatgaacatataattaacattattcgctgtttcatgccaaaaggtaaatggtctacttgccccgggggctccacacggcgaccaccgctcgtggtgttctgctgcatgtggttttgtagtccaaacaatgtacagtttcccctttcttaaatagatgtaaatttgtcgtgtg

SEQ ID NO: 51100 - DNA, 320 bp, Zea mays
  Clone ID: MRT4577_146600C.1
acatgcagcatccatgttcaaggtcttcaccctcgtcacggtcgccaaggagaactccgaggaggattgctggctcactcatcatctggcaaggtgtatgatgtgacgaagtctttggtagaccacccacgaggtgatgttgttctggtgtcctcaactggcaaggctgcgactgatgatttcgaggatgtcggtcactgcaacactgcccgcgcgatgatggatgagtacttggtgggcgaaatccacgcgtccacgttcccttgcaggacctagtatgtccccccgaatcaacctgactacaaccaggacaagactcc

SEQ ID NO: 51101 - DNA, 362 bp, Zea mays
  Clone ID: MRT4577_146601C.1
gttaccaaagtattattactttatttttttattttcattttacgtactttattgttgtccggggcacaaaaataccccacccttttgaccaagggcattttcaaaacgggaaataccttgcccttttgcaaaaaacccccccccccaaaaaagaggcaaagtgcttgggcgctattttggcggggcccgtgcaagaaaacaggattttttcttgggccttggggggtttgaacacgatgggggctcgccggggaatctggttataaaactgccccggctctttccgggggttattcttgagccgccccgcgggggggaccacctgggagttttgcccccaccccccccaggggaagccccac

SEQ ID NO: 51102 - DNA, 611 bp, Zea mays
  Clone ID: MRT4577_146602C.1
tacctcgatgccggccggggcagatctccctatccgacataccggaggtacctccgactccagagtaccatgggaggcacagatggagctgcgacgggcgctcctcagatcggccgacttctcccgcgacaggaaagctgcaattagatacttctatcctttctcaaaggcaagtctgcttgctctctcatggtgatggtctttgccctgctagtagatcatttagcacccaggctgccactacgtctagcacaccacagcctccacctccaccaccccctccagagaagactcactgtggtgcacccaaagacgaggatctcattgtcaccaaactctatggtcttcatgacccttgtctaaaaagggcaatgtagagacatgactggcatatgaccagagacctggcgactaagggcgcagaccggataagggatggattgaagaaatcaggtccccgaagtcgtagaagtgcacgttccccctctggcgtgaaatggtcccttacgcccagagtttctgatggacgcacctcttatcctagcgtgaacgccgaggagagcgagcccgaaactcgcagaagagagtaatcatgcgacatgacccccact

SEQ ID NO: 51103 - DNA, 352 bp, Zea mays
  Clone ID: MRT4577_146603C.1
acccaggcgtccgcgtggacgccgtcagcgacgctgatatcctcgcgcatctcttgctggtggtgctgctgcccgctgagctgctcgctctcggcgcgctcctgttcgtcagtatattcaggtgcttacataggctcacacgccggttcatcactccgttcgttcgttcgtaagccgtctacatacacgattcttttgtcccacacacacacatacacatacacgtctgcaaagtacatgcgacattgcagctgcttcgcatgtatgtatgatgaatgaaatgaaaactcaaacacattctctaattctttggttccgtccaaaacaaaatcattcggaatcaccatcaacc

SEQ ID NO: 51104 - DNA, 194 bp, Zea mays
  Clone ID: MRT4577_146604C.1
gaataaccgggctgacccacgcgtccgcccaagagctcgcgcgcgacggccatcaacctgctccgtccgctcgcgctcctcggggccgtgctcggctgcgcactgagtccccacgccgatgccaccgtctgcgacgtcggcggccacgacaggtggatccagccgacggtcaaccacagcggcaggtacaacca

SEQ ID NO: 51105 - DNA, 202 bp, Zea mays
  unsure (1)..(202): unsure at all n locations
  Clone ID: MRT4577_146605C.1
gcgcgcacgcaagcgcggaaaacggcncgagagcagaaccggaccgggaccggcccccaccgggaagaggaagcagggggggaggaggcnccncgcgcacacaccaacagccnnacgcggagacccncggacaagcccggcacaccgagggaaggcgccaaacacacgcgggacaaccggaccagagcccgagccgacaggc

SEQ ID NO: 51106 - DNA, 306 bp, Zea mays
  Clone ID: MRT4577_146606C.1
gagctcacctgacggcggccgccctgcttttttctctgggggactttaaaaacacatgaggcattactgacactgaaccacaggaagaatggcgccagacaacccaaacaccagggatagctcacagaggacacgaagacctcgaacaccaatggaatggcaatcccaagcgacagccagggcaaagagagagctaggctcacccagccgcactcgatgacacataccaatccccactgatgcatgtacagtgacagagccaaacggaaaaggcccgccacaactggaaacagcaggaagcacaca

SEQ ID NO: 51107 - DNA, 348 bp, Zea mays
  Clone ID: MRT4577_146607C.1
tgctatccctccaccaaaaaaaattttactgttaaccagcgaggcagcctaggaaaaatgcgcgaaagcaaagaaaacaatctcccacgctcacaagcagatcggcgcgcattactgcagcccagtgcgctcgcagaccagcagatcgagaggcgaggatccggggggacgacctgggtcatggccgcggctgccgcggcggcgaggacgccggactggtactgatgttgctgctgctgctgctgcagcgcctgctgcatcaggagcgcctgctgctgctgctgctgccggagcctgtgctgctgctggtggtggctgcccccggtgccgttcatctcctccagctcc

SEQ ID NO: 51108 - DNA, 960 bp, Zea mays
  Clone ID: MRT4577_146608C.1
aaccgcagctgaagctgctggccatgtgggcgagcccgtttgccctacgggcgaagctagcgctcaacttcaagggcctggcctacgagtacgtagaggaggacctccgcagcaagagcgacctcctgctgagctcgaacccggtgcacaagaaggtgcccgtcctcatccacaacggcgtgcccgtctgtgagtcgcgggtcatcgtggagtacctcgacgaagtctacagcgccacgggcccccgcttcctccctgccgacccatacgagcgtgccatggcgcgcttctgggcctcattcatcgacgaaaagttcttggcgtcgtggctaaaggcaggaaggggcaagacggacgaggagaaggccgaagggttgaagctgacactcgcggccgtagaaaccttggaaggggcgttcatggagtgctccaaggggaagcccttctttggaggcgatagtgtcggctacctggacatcgcgctcggggccctggtagcgtggatgcgcgccaccgaggcgcgtcatggtctcaggctcttcgacgcctccagagtccgctgctggagaagtgggtggagcgcttcagcgagctggacgaggtcgtggcggtcatgccggacatcgaccggctagtagagctcggcaaggtgagggaggctgctgcggctgcagcagctgccgtaaacagctgaacggaacgcatctcgcggtattgaggcggtcaataagtcggagaaagatcttgatacctgtgtgtaacaagcgaatggtgtaataaagaatacaattagggtgtcgtttagttcacatgtcggtaacgtaatggataaccgataacattaaatcatgtttgttataagtccaatcgtaatcgatctcatactacaaaaaaaaaaaaaaaaaaaaaaaaaaaaaaaaaaaaaaaaaaaaaaaaaaaaaaaaaaaaaaaaaaaaaaaa

SEQ ID NO: 51109 - DNA, 3168 bp, Zea mays
  unsure (1)..(3168): unsure at all n locations
  Clone ID: MRT4577_146609C.1
ttgcaaggggattctaatgatataaccttatctcaatnntgacatctggnaaaacatacctgttggtacaatnggcttatcatgggcaatgtacaatantctgatgcaatgcaaatgtgctgttaacacagctgaagattggcttaaccctgttgccatacaagaggcgtttgaagccagggctctcaggatggcagtaaactgtgcccagaacataggccaagcagcaaaccaagaagaaggtagtactaacgatgaccgtattgtagttgctgaattggaattactgtactaacgatgaccgcatgccttgcaggtttctatgagcggtcccctgatttgctagaggctgcagtagctcacatccagttggtcattgtaaccaagttcatttcgaaggtgcagcaggacattcctggacctggagtgaaggaacagctccagaacctttgcaatgtctatgccctctacattctccacaagcacctgggcgacttcctggcaaccgggtgcatcacacccaatcagggagcgctggcaaacggatgttttcacgaaacctgaccagtagccgtcctcgtcttccacgttgtgtttctcgcccacctatctatatttatcataaaaaacagccaaatcgagcgaggcgacgagggcgagtagtagttggcgagttggagcaggtctgggtctggccgtgtgagttatttcccagccaggcatctgagagctttggtcttgacctcgacagagatcgccatggacgcatcggcggaggtggaccacctcgccgccgagaggtcggccgcgcgcttcgacgtcgaggcgatgaaggttgcatgggctggctcgcgacacgccgtcgaagtcggcgaccgcatggcccgactcgtcgcgtccgaccctgtcttccgcaaggataacaggaccatgctctccaggaaggacttgtttaaggacactctaagaaaggcagcccatgcatggaagcgtattgtcgaactacgtctcacagaggaggaagcaggtatgctgaggctatatgtcgatcagcctggttatgttgatctgcattggggcatgtttgttcctgctataaaaggtcaaggtactgaggagcagcagaaaaagtggttaccaatggcttacaagttccaaataattgggtgctatgctcagactgaactcggtcatggctcaaacgttcagggccttgaaacaactgccacatttgatccaaagactgatgagtttgtcatccacagtccaactctgacctccagcaaatggtggcctggtggcttggggaaagcttccactcatgcagtggtgtatgctcggctgataactgaaggaaaggactatggtatacatggtttcattgtgcaactgcgaagcttagaggatcactcccctcttcctggtgttactctgggtgatattggtggaaaatttggcagtggtgcatataacagtatggacaatggtgttctgcgatttgaccatgtgcgcataccaagggatcaaatgttgatgaggctttcacaagttacaagggaggggaaatatgttcattcagatgtcccaaagcagctgctttatgggacaatggtttttgttcgccagacaatagtcgcagatgcttctaaggctttgtcccgtgctgtttgcattgctgtacgatacagcgccatccgaaagcagtttggctctcaagatggtggccctgagactaaggtccttgattacaagactcaacaaagcagactctttccgttgctggcttcagcatatgcatttagatttgtgggtgactggctgaagtggctatacatggatgtcactcagaaactggaagctaaagactactcaacactgcaagaagcccatgcctgtactgctggtttgaaggctgtgacaacatctgcaacagctgatgccattgaagaatgtagaaagctctgtggcggacatggttacctgaacagcagtgggcttcctgaattgtttgctgtctatgttcctgcttgcacttatgaaggagacaatattgttctgcttttgcaggttgcaaggattctaatgaagaccgtatctcaattgacatctggaaaacaacctgttggtacaatggcttacatgggcaatgtacaatatctgatgcaatgcaaatgtgctgttaacacagctgaagattggcttaaccctgttgccatacaagaggcgtttgaagccagggctctcaggatggcagtaaactgtgcccagaacataggccaagcagcaaaccaagaagaaggtttctatgagcggtcccctgatttgctagaggctgcagtagctcacatccagttggtcattgtaaccaagttcatttcgaaggtgcagcaggacattcctggacctggagtgaaggaacagctccagaacctttgcaatgtctatgccctctacattctccacaagcacctgggcgacttcctggcaaccgggtgcatcacacccaagcagggagcgctggcaaacgagcagctgggcaagctttacgcacaggtgcgtccaaatgctgttgcgctggttgatgccttcaactacacagaccactacctggggtctgtgctggggcggtacgatgggaatgtgtacccagcgctgtacgaggaggcgtggaaggaccctctgaacgagacggtggtgcccgaggggtaccacgagtacctccgccccttgctcaagcagcagctcaagctctccaggctctagtctgatcggctaccccccctggaattctccatggcggctgccttctcagaaaatctcacgcgacctccgaatgaaagtgatgtaagctactaacgattcttgttagagccaggaaagaggctctccagccaattataaatttattcctcaagctctgaggatcaagttcaagctgtggattatataggaagcacgtttaataattaataaagagggagaggatgagcatctctctgttgctgctcaagtgttgtgcgcagtgcgagtagtagaatgaatatgtatgtacgagtgcgtgtattgtatggtgaattgaagttccatttgtttgctaaaagtatatcagaaaacaatggcttgatttgcctaagtccaaaatgaaagccagattccgagctagaacac

SEQ ID NO: 51110 - DNA, 279 bp, Zea mays
  Clone ID: MRT4577_14660C.1
gtgacttaagacgggtgccacgataatattggggaccaacaaaaggctctcacgcggatacaccgggacgacgacgataaaccgagcagcgactgggccagccagccactggaacacacacacgggactgacacaaaccgcttagtccaccttctagatcttggggccagggccaccgtttgcagccggagcgttctcgtgcatgcccacggagccttccatgtcggcacccgcgccctgacacatgttggccatgatggggttgcaaaggctctccag

SEQ ID NO: 51111 - DNA, 628 bp, Zea mays
  unsure (1)..(628): unsure at all n locations
  Clone ID: MRT4577_146610C.1
gtggctatacatggatgtcactcagaaactggaagctaaagactactcaacactgcaagaagcccatgcctgtactgctggtttgaaggctgtgacaacatctgcaacagctgatgccattgaagaatgtagaaagctctgtggcggacatggttacccgaacagcagtgggcttcctgaattgtttgctgtctatgttcctgcttgcacttatgaaggagacaatattgttctgcttttgcaggttgcaaggattctaatgaagaccgtatctcaattgacatctggaaagcaacctgttggtacaatggcttacatgggcaatgtacaatatctgatgcaatgcaaatgtgctgttaacacagccgaagattggcttaaccctgttgccatacaagaggcgtttgaagcccgggctctcaggatggcagtaaactgtgcccagaacataggccaagcagcaaaccaagaagaaggtagtatttattacaaacagtcaataccattctttttcctttttttccatattgtagntgctgaattggaattactggactaacgatgactgcatgccttgcaggtttctatgagcggtcccctgatttgctagaagctgcagtagctcaca

SEQ ID NO: 51112 - DNA, 725 bp, Zea mays
  unsure (1)..(725): unsure at all n locations
  Clone ID: MRT4577_146611C.1
tccgggacgcacgccacaattacgcttcaagtgtcgcctcgagccagtcgccatgaacaaggaagcacctctgcctcgccgcatgattcctctttctctctgcccaccttctccgtcgacaccgacaacgagtactgcactaacaactactacccaggcgcacgtgaccgtgctgaagatcctgcccaatccgaacgaacccggcaagtccgccactttcaggatctccccttatagtgatatgaacatcgacaaactgaacgtggttatacacatctagcatttcttcttctacccgcactcctacacctgcgacatctgcggagagacttcctgcccaggagaccgtcgacttcaagctgtacctccagcagatcctgtcccgcttcactctgctgggctcctacacgatgctacatgcaacattgatggtcgaccacaacgaggagctgagctgcatctccgtcgggttcaacatcggcttccacatgttcagctaaacgcgtctgaacttgctcacgaaacccagcctcaccatggatgtaaattacctggatatcactctgtatcctatgactttcatgtatctacggccagtgtatagctttttgtcggtgtctgggctcaactgagacgtttttatgctctagtccaacatcaaaataanacacagtcgctgttaccgtgtaccccgaggccttcgccgagctcaggtcaaggagctc

SEQ ID NO: 51113 - DNA, 898 bp, Zea mays
  Clone ID: MRT4577_146612C.1
cacgcgtccgcccacgcgtccgatggcggaagtggaccacctcgctgccgagagggccaccgcgcgcttcgacgtcgaggagatgaaggttgcgtgggccggctcacgccacgccgtccacgtcgccgaccgcatggcgcgcctcgtcgcatccgaccctgtcttccgcaaggataacaggaccatgctctccaggaaggagttgttcaaggacactctaagaaaagcagcgcatgcgtggaagcggattgtcgagctacgtcttacaggtcccaaaatcacccccatatattttcatccactgctacatacatacagcactcttagctatgtaataatgtctcgatcaacagaagaggaagcggatttgctgagacaatatgttgaccagcctggttatgttgatctgcattggggcatgttcgttccagctataaaaggccaaggaactgaggagcagcagcacaagtggttaccactggcttacaagttccaaataattgggtgctatgctcacgtgtaccttggtcatggctcaaacgttcagggccttgaaacaactgctacattcgatccggagggggatgagtttgtcatccaccgactcatcaagcagcagcagctcaagctctcgaggctctgaatcctctctctctctctttctctgatgtggaagccagccaagatgtgtgtacgttagacatgtgtggtgggtttcagttgatacacgagggagtgagtactaaagagcgagcgagagatggaacaaagaactgaatttgtatcgtacaacaaagaacttaatttgctgttactgaccacgtgattggttgttaggatccgcagatcctggtcgaaacctagatgcaggctggacttagcctgtatgcattgatgc

SEQ ID NO: 51114 - DNA, 1285 bp, Zea mays
  Clone ID: MRT4577_146613C.1
agtcaatcgagcgaggcgacgagggcgagtagtagttggcgagttggagcaggtctgggtctggccgtgtgagttatttcccagccaggcatctgagagctttggtcttgacctcgacagagatcgccatggacgcatcggcggaggtggaccacctcgccgccgagaggtcggccgcgcgcttcgacgtcgaggcgatgaaggttgcatgggctggctcgcgacacgccgtcgaagtcggcgaccgcatggcccgactcgtcgcgtccgaccctgtcttccgcaaggataacaggaccatgctctccaggaaggacttgtttaaggacactctaagaaaggcagcccatgcatggaagcgtattgtcgaactacgtctcacagaggaggaagcaggtatgctgaggctatatgtcgatcagcctggttatgttgatctgcattgggtatgcctatcaacctttattgcatcagtatatgttcatatcaatatatcataccacggcgaatcctttgttgtccatgctgtgtgctaaggtcttctggaattggtgctgctggatgctcaacatatggttcttgggtttctgtaaaaataagggcctgtcatttaataagaaacaaatataagattcctgccattgaataacatatagtttttgtacaagcttcatcaatattttcaccttacaagttacaaaaacaatgtcatcttgcagggcatgtttgttcctgctataaaaggtcaaggtactgaggagcagcagaaaaagtggttaccaatggcttacaagttccaaataattgggtgctatgctcagactgaactcggtcatggctcaaacgttcagggccttgaaacaactgccacatttgatccaaagactgatgagtttgtcatccacagtccaactctgacctccagcaaatggtggcctggtggcttggggaaagcttccactcatgcagtggtgtatgctcggctgataactgaaggaaaggactatggtatacatggtttcattgtgcaactgcgaagcttagaggatcactcccctcttcctggtattactctgggtgatattggtggaaaatttggcagtggtgcatataacagtatggacaatggtgttctgcgatttgaccatgtgcgcataccaagggatcaaatgttgatgaggctttcacaagttacaagggaggggaaatatgttcattcagatgtcccaaagcagctgctttatgggacaatggtttttgttcgccagacaatagtcgcagatgc

SEQ ID NO: 51115 - DNA, 2907 bp, Zea mays
  Clone ID: MRT4577_146614C.1
attcggctcgaggggcaaagtacagtatttgatgcaatgcaaatctgctgtcagttcagctgaagattggcttaaccctgatgccatacaagaggcatttgaagcgagagcgctcagaatggcggtaaactgtgcccagaacataagccaagctgcaagccaagaggaagctgcaggtttctatgagcggtccccagatttgcttgaggctgcggtagctcacatccagctgattatcgtgaccaagttcattgagaaggtgcatcacgagattcctggatacggagtgaaggaacagctccaggccctctgcaacgtgtacgcgctatacatccttcacaagcacctgggcgacttcttggcgactgggtgcatcacgcccaggcagggagcgctggcaaacgagcagctgggcaagctgtacgggtcgccgacccgctctcggcaccaccgcccgccctatatgtacgtcatcgtcacagggacggaccccgggaaggcgaagaagttagctgtgaggtctttaaagaggagttgttgcattgcagttgcaggttgcacagccgcggaagccagcacctcaaagccatggcggaagtggaccacctcgctgccgagagggccaccgcgcgcttcgacgtcgaggagatgaaggttgcgtgggccggctcacgccacgccgtccacgtcgccgaccgcatggcgcgcctcgtcgcatccgaccctgtcttccgcaaggataacaggaccatgctctccaggaaggagttgttcaaggacactctaagaaaagcagcgcatgcgtggaagcggattgtcgagctacgtcttacagaagaggaagcggatttgctgagacaatatgttgaccagcctggttatgttgatctgcattggggcatgttcgttccagctataaaaggccaaggaactgaggagcagcagcacaagtggttaccactggcttacaagttccaaataattgggtgctatgctcagacggaacttggtcatggctcaaacgttcagggccttgaaacaactgctacattcgatccgaagactgatgagtttgtcatccacagtccaactctcacgtccagcaaatggtggcctggtggcttggggaaagcttccacccatgcagtggtgtacgctcggttgataactgaaggaaaggactatggcatacatggtttcattgtgcaactgcgaagcttagaggatcactccccacttcctggtgttaccctcggtgatattggtggaaagttcggtagtggtgcatataacagtatggataatggtgttcttcgatttgaccatgtgcgcatcccaagggatcaaatgttgatgaggctttcacaagttacaagggaggggaaatatgttcactcaaatgttccaaagcagctgttgtatgggacaatggtttacgttcgccagtcaattgttgcagatgcttctaaggctttgtcccgtgctgtttgcattgctgtacgatacagcgcagtcagaaagcagtttggctctcaagatggtggccctgagactcaggtccttaattacaagactcaacagagcagactctttccattgctggcttcagcatatgcatttagatttgtgggtgattggctcaactggctatatacggatgtaactcagaaactggaagccaaggacttctcgaccctgcaggaagctcatgcatgcactgctggtttgaaagctgtgacaacatcagtaacagctgatgcaattgaagaatgccgaaagctctgtggtggacatggttacttgaacagcagtgggcttcctgagttgtttgcggtctatgttcccgcttgcacttacgaaggagacaacgtcgttttgcttttgcaggttgcaaggattctaatgaaaaccgtttctcagttggcatccgggaaacagcctgttggcacaatggcctacatgggcaaagtgcagtatttgatgcaatgcaaatctgctgtcagttcagctgaagattggcttaaccctgatgccatacaagaggcatttgaagcaagagcgctcagaatggcggtaaactgtgcccagaacataagccaagctgcaagccaagaggaagctgcaggtttctatgagcggtccccagatttgcttgaggctgcggtagctcacatccagctgattatcgtgaccaagttcattgagaaggtgcatcaggagattcctggacacggagtgaaggaacagctccaggccctctgcaacgtgtacgcgctgtacatcctccacaagcacctgggcgacttcttggcgactgggtgcatcacgcccaggcagggagcgctggcaaacgagcagctgggcaagctgtacgcgcaggtgcgtccgaacgctgtggcgctggtggatgcgttcaactacacggaccactacctggggtctgtgctggggcggtacgacggcgacgtgtaccctgcgctctacgaggaggcgtggaaggacccgctgaacgagacggtggtgccggaggggtaccacgagtacctccgcccactcatcaagcagcagcagctcaagctctcgaggctctgaagtctgaatcctctctctctctctctctctctctctctctctctctctgatgtggaagccagccaagatgtgtgtacgttagacatgtgtggtgggtttcagttgatacacgagggagtgagtaataaagagcgagcgagagatgaaacaaagaactgaatttgtatcgtacaacaaagaacttaatttgctgttactgaccacgtgattggttgttaggatcagcagatcctggtcgaagcctatatgcaggctgggcttagcctgtatgcattgatgcaaactaaaataaattctcttgtttggttgtttgtc

SEQ ID NO: 51116 - DNA, 314 bp, Zea mays
  Clone ID: MRT4577_146615C.1
aggggaaaggaaattaaatctcttacatagttgattcagagtacagacctaagacatcttcaaaaattcataatgcaacagcctatgaccaagacccgattttgaagcaatgacccccctttctagagcaagcaggctgacaaaagtttgaacactatccccacaagggctggtttgaggaccccaacaccacttgagaagtcccagatacatttcacccagcctcttttatattgggaaccccgccacccccaaaaatatttttagggtaccaacaaaacactttcttaggttcgttaaacaagggaggatcc

SEQ ID NO: 51117 - DNA, 1330 bp, Zea mays
  Clone ID: MRT4577_146616C.1
ttgttgtcagttgaagcactgcatcagtgcatatcttcattttcattctggccatcgcacacgtgatttcctgtgtcctgactatgcttctagaaagcgtgaggattcgtcaatggaaacactgggaggatgagattcagaagggtgctacagacaatgggcctaggaaggtgacctatgtgcatcaatctgaatttatcagggaacattccaagggcattggcagagataccacaatgttgagctggctgcattcttttctcaagcagttttatgggtcggttactaaatcagactacactacaatgcgacttggcttcatcacgacacattataggtcaaacccaaaatttgatttccacaggtacatgatgcgagctttggaggctgactttaagaaggtggttggcataagctggtacttgtggatatttgttgtggtattcatgttgctgaacatcaatggttggcacacatacttttggatctctttcattccccttctgcttctgttggccgttggcaccaagctagagcatgtcataactcagttggctcaagaggtcgccgagaagcactccgcagtagagggcgacttggtggtcaatccgtcagatgaccatttctggtttggccggccaaagatcgtcctgtacctgatccacttcatcctcttccagaacgcgtttgagatcgcattcttcttctggattctgactacctacggtttcaactcctgcatcatggaccacgtccccttcattgtgccgaggctcgttgtcggggccatcatccagctcctctgtagctacagcaccctgcctctgtacgcgattgtcacgcagatggggactttcttcaagaaggagatcttcgatgagcacgtgcagcagagccttctgggctgggcgcagaaggccaagaagaggaaagcgctcaggaacaatggcaatggcagcaatggcgccgcggccgggtcgtcacatccatctgcgactgcgaggctcgaactgatgagacgagctgtcgctcttgaagaaggcagtgccggtggcaacgggagtgaggctagtgcggccgagctacacgacacgggcccgaagctctgaacgctgtagaaaacgcccggcagagcgtcagaagatgcagtgtttctgtacgcgagccatatgtcactatgtcgtgtggctgtttagccaggtggtgtagtgtgatactgcgtatcatgatttgtatgcttttctggattgagcttgaagcgtgttatggagtggggagctttgtgtagtgttgtgctcaaaaaaaaaaaaaaaaaaaaaaaaaaaaaaaa

SEQ ID NO: 51118 - DNA, 747 bp, Zea mays
  Clone ID: MRT4577_146617C.1
acgcagctcgcaccccggtcgtcctccccttgccctggatctctctgccgaatagccatcgacgtgcagcttggcaacctcagccacatctctcctccctcgatctgggtgataggatcgtaggcggaggacgtcgacggcgcgtgctgatgggcaccgcgctcctgccacagatgccacaccctctccttccatcggcgccacaccacaacctccttctccagccattctattatctggcaccgcaccccaatccacccccaacctcctccgccttgccttccgcctcctccacctcgatccaggctgattatggaacgaggcaagtgggttttgttctttcttgacatgcttcttcttggtttgtgctcttgtgtatatgtgtatgattgtgcatttaaatgtatgtccttgaagtgtaatcaacggtggccggtgcctggtttcttagcaaattacgattatgtcaaaagaatttggtggtttgggtattggagacctaatagcacacaatagggctctaatttgcaaattaggaacaatgctgcttcaagggagtgatctaacttgctataactggttcaaggacgcatacgctagtattttcaatcctggtaggcaccggctggacacaactatgtggcaaaatttgaagtcaataatacgtgtagtcatgaacgctacaaggtgcagactgggaagtggataaaatattccttctggatggacgcttggtgcatggagcaa

SEQ ID NO: 51119 - DNA, 1589 bp, Zea mays
  Clone ID: MRT4577_146618C.1
cctagatctacacatattctcgagagccactttcgccaaggtccccataagccataggtacctcgagcctgcgggctgcttttacaaaccgcgaataaaaaaaatcacctgctcaacggcggcatcatcggcaagacggcgggtttctgtaccaatctcagccttcgtgtctatctgattccaggaatcaagcgtattgtggtgaacatgaactccacatcttctcagcgtggttaccctgccaagaggtggtgtgcagcgaacatgagctccacatctatgcgtcactctgcatggaagtctgagccctggactcaccttacccacaaacagagacgaccacaatggattgcttataatccaaggacaatgaggcctccaccacttagcactgataccaattctatgaagattctgtcctggaacgttaatggactgcaagctattgtacagtcagggttttctgcagatgaattggttgccagagagaactttgacgtcttatgtcttcaagagacacacttggaggagcgcgatgttgacctttttaaaaacctggtacatgaatatgattacacctgttggtcatgcagtgttgcaaggcttggttattcaggaactgctgttatatcacgggtacaaccaatctcagttcaatatgggcttggcataccagagcatgatcaggaaggcaggcttattaccttggagtttgatgatttttacttggtcaatgcttatgtcccaaattctggacgtggtttacgtagactgaattacaggatcaatgattgggatccatgctttagcgacttcataaagaaactggaatgttctaaaccagtaattgttgctggggatctaaactgtgctcgtcaaagtattgacattcacaatcctcaagcaaaaaccgaggctgcaggtttcacaattgaagagagagagtcatttgaggtcaacttctcaagaaaaggcctcgttgatacattccgtaaacaacacccgaatgcagtggcctacactttctggggtgaaaaccagcgcattaccaacaaaggctggagactggattactttcttgcgtcagagtctattgccgacaaggtccatgattcttacactctgccagatgtagcgctcagcgatcacagtccaattggccttttgctgaagttgtaggcacttatacatctctcagctatttgacaactaaagcaggaagttttaacatcgtcctagataaaagacttgtagaaagattttgcttatgtaggctgaaaactattcaaactcgggtggtacttcgcgtggtctcctgtcgtctgtggaggttgtggatagactattcacgttgtgttcgagaagttaaaacatagcctagaacaattagctgatgttctatagcttgtgaatacatctgtttagtcggcgtaaccggcgaaagagcatctagccgaggagcatctagtcaagttagttaggtggtctaagtagcccctcttaagtgttgagtttgactccccgtggcaacaaattttaggcttggggtaaaaaaacctcttgtttatcccacgctaaagcatatgtct

SEQ ID NO: 51120 - DNA, 258 bp, Zea mays
  Clone ID: MRT4577_146619C.1
acaaacaacaatattttactgaaaaaacgcacatacgggtttctacacgtgcattatcaaccagcaaactgattctagaacttatccaagggaggaatccctctttcatcaaaggcataccatcaactctttattcaaaggctcacagggaaacctttataatgtgatattcaaaaaatactcctccaacttcgcatagagcacccatatgatgcacaacctcacaattgaccactgtgaacttggtcatcctataaa

SEQ ID NO: 51121 - DNA, 1797 bp, Zea mays
  unsure (1)..(1797): unsure at all n locations
  Clone ID: MRT4577_14661C.1
ccccgcgtccgggcatcacccgggcgcggtgggggagaccggccatcgctcgccgctcctcaagctccgcgatgccgcgcttcaagctccgcgaataccgcgcctcccccgcggcgaatcccacccgcacctcaagcaccacgaatcccgcgcctccccagccgtagaacccggggggggggcgcgctcctcaatcagccgcgaatcgcccgcctctcctccagctccgcttaccgcccgcccgcatttcgccctcacgcagcgtcagaacgcaaccgcggctccgcgctcgctcccccgcatgtcgcgcccccacaccgtcatctacagatttattctatctctcgcagatctgctcagtcgcgccctgttcaccgggaattctggagctgagggcgcaggttcgagcagaagctcggagcatggctatggccgagggggagaagcaccatgcccggtgccggtggtaggtagggctctctgatctcgcaggcctttcacgcggcccggtccaaaggcttcccgtccgttccgtcggttagccgaggacggaaacagagatcgggtgattgcttgactcgggagctgagccgaggtcgcaatggcgtcgtgggacaacctcggagagctctccaacatcgcgcagctcacggggctggacgccgtcaagctcatctccctcatcgtcagggcggcgtccacggcgcggctgcacaagcgcaactgccgccgcttcgcgcagcacctcaagctcatcagcggcctgctggagcagctccgcgtgtcggagctcaggaagtacccagagacgccggagccgctggagcagctcgaggacgcgctccgccgggctaccgggagatcgactacctccgcctcgtcccgctcatcgctcgtcgacaatgcccgcattcgggatcggcttgagtatattgagagggactgtgaatattcctttgacgaggaagacaagaaagtgcaagatgctctgttgaatcctgacccttgcacgaatcctacaattgtgctcaagaagactctgccatgttcctatccaaacttgcctttcaatgaggccctccgaaaggaaagtgagaagcttcaggttgaacttcaaaggtcacagagcaacatggatctgggttcgtgtgaggttatccaacacctgcttggagtaaccaaaactgtggaatctacaattccagagaaagaaacaaatgttaaagctccagaaaagaagggttcaaactacagtgaatccaaaggagagactgcaaaatcatttgatgatgatgacgactatcctaagaagcaaaacaatgagtatcctaagaagcaaaaggatacctgcagcacacaacgatgctcttcacaagttccatatggtcatgatcttgtctcaagtagaggatcgtacagcgatgaatggcatgcagatttacttggctgctgttcagaaccggctttgtgtttgaagaccttgttcttcccctgtggaaccttctcgagaattgcttcaatcgccaaggacaggccaatgacttctggagaggcttgcaatgatattatggcttactccctaatattgtcctgctgctgttatacatgctgtgtaaggagaaagcttcgtcaaaagttggacattgcgggaggctgctgtgacgacttcctttcacatctgctgtgttgntgctgcgcgcttgttcaagatggcggggagttgagattcgcggagcttatagcgaaagaccaaggttacaccaccagcatgccagtatatggagcactgaacagctg

SEQ ID NO: 51122 - DNA, 677 bp, Zea mays
  Clone ID: MRT4577_146620C.1
gagacgtgatagcctattgggacctattttcttctggtcaacatttcaggaattgatgaaggatcagtttggtaactatgttgtacagaaagtccttaagacatgtgatgaaagatacctagagatgatcctctcgagcatcaagttacacttgaatgaactgaagaattacacgtacggaaagcacattgtgacacgcgtcgagaagctaatcgttacaggagaggaacgagcaaggatggcctccctgagcggccagcgtcagcagcagccaccaaactgtacagctgtcgacgcacactaatccttttttttatgcattggcgtcaaatgcgacggcacattggttccttttaacgcattgtggcgtcaaatacgagtagctagatgagagctaggtttttgggcactgtaaattcttttggccatgtgcaagttcatttacagtggataatagatgtacattgtgctggagcgttcgttagctttggtgtggtaggtgatcgagagcagtgctgtgtaatataaatatactcttgttgttcaccgtacgacgtacagttgctcttttgtagcactgatctcgtttttcattcatatgtaatctctaattcattcgtaaggctgctttcaagttccatccttctggccatgtacaagtttattacagtggataa

SEQ ID NO: 51123 - DNA, 300 bp, Zea mays
  Clone ID: MRT4577_146621C.1
gtcaaattaaatttgggcctggatataaaattgggattctgtttcaagtgtaccatgtactaaattgaattgttacagaacaaaaaaaaaaaaaaaaaaaaaaaaaaaaaaaaaacaaaaaaaaaagggcagccaataacctacgtgaaactcaaaaaataaagaataaataaaagggtcgataccaacaagtggaccaacttaccctaaaataaatcgaacaacagtactgcggactaaagaatatatctatggcgggctctattggagctccctttacaatttcacacaacatactaa

SEQ ID NO: 51124 - DNA, 974 bp, Zea mays
  Clone ID: MRT4577_146622C.1
gaggaagatgaattggtaatgaggagaatggaaaacccgatgagcacattgacgaagaacaaaaatataactcttctgatgtagagaaggagaagcacattactctgtctaccaatcgattcccacgcgaaaaggctcttacattggctgttggtgatgaagatactgacatgcttgctgatgtgaaacagatggcagctgcagcagctgcagcaggacaagcgagttcatcatttgagaaccagctccggccaattgatagatatgcaatgcgctttatggaactctgggatccagtaattgacaaagctgctttaaatcatcaagtaaatgttgaggaggaagaatgggagcttgatcgtattgaaaaattcaaagaggatttagaagcagaaattgatgaggaccaagaaccactttcttatgaatcatgggatgttgattttgctacgacagcctatcggcaacatgttgaggctttaactcaaaagcagttattagaagaacaggaaaggcaagctcaggaagcaacaaaagagttggaggagaagaatgataatatgagcagtcaccacagaaagtcaaaaaagaacaaaaagaagacaggcaaactcaagcccctgaaaagagtgcgtctgtcgcctgaatcagaagtcatactggaggaaacctctgtagataatgcaccctcacctgagcttacaagtgatgaatcgccacaccattattgtaacaagcgtaagaagattacggttgccactgaggaaaatagtaacagcagaagtttaaagaagctcaagaaaactactaaatcaagttttatttctgaagccttgtcacctaggctgaaggaggaccttaatgattcagattcaaaatcagtgggtagaactaaaagtgatggcagatttttcatcccttgcatgccagtgaaacgtgttattgtaataaagcctgagagattgaaaaggaag

SEQ ID NO: 51125 - DNA, 357 bp, Zea mays
  Clone ID: MRT4577_146623C.1
atttgttgtttggcatctgacgagcttaacattatgtttaatccaaaggatgcgaaacgtgtggtgaatgaacggttaaaaaaaaaaaaaaaaaataaaataatcagaacataaaatgcaaaactattaaaaagtgaacaatatctttgaaagttgaaaaaaaaaacatatttgtaaaaatggggcggcggccgacttttgaatttataaaacccggaattaattcgcgacctgttcccagagggggaccaattttccatttaaatggctttattaaaggcaggcataattttggtaataggtggcttcttggaaaaaattttatccgcttgaagttttattattgtacgtgaaagt

SEQ ID NO: 51126 - DNA, 500 bp, Zea mays
  Clone ID: MRT4577_146624C.1
ttttttttttttttttttttttttttttttttttttttttttttttttttttttttttttttttttttttttttttttttttttttttttttttttttgggggcccggggcccttttttcttaatttaccttggtcgggggggggggggggaagcaaggaaggttgcagtcccagggggggaaaattgggaacggggtcaggaattaaagttacattggccccttttttttttttatttacacacacccaaccaaccgagggggggggaaattaaaaagggtggtcaaccaattaatttaaaaccggtttaaaggggtttacattaaaaaagacaggggctttaaaaattaccggggggggccccccggggggtttttttgggggtttggggggaccccttgaaggggtcccaaatttttgggggggggtatggcttggttggttggacccccaacccggggggatccgaggggggggacttgggcttccgcgggggcgg

SEQ ID NO: 51127 - DNA, 2666 bp, Zea mays
  unsure (1)..(2666): unsure at all n locations
  Clone ID: MRT4577_146625C.1
acacacagcctgtagcaccttggttcttgggcaacactgncgacactgtttctttggcagctccggtgcgtttatctcagtgaacagttgggcgggtgcaagatttttttatttacgcgctaatgaaatatctcattacggtcagacatgatcaaacacgtttcaaccccacggctgctatttttcagccctgttcctttgctttaattatcaacaccaaaactatgatcagtacagattaccctctttacacaaaattatttctatgtgtgctggtcatggatcatcctccatgcttatgtacatatatggtcacagccagcacaatgaatactgcagatgccgactgcattgctaacctctgcaggataaccctcgcctctaaaaggcaacccctgtcagcttattgtcactgcccaccgcactgacggcttaatcacccgatttcgctgctttccgtatgattcccatgccttcagtcagtagaagtctcctcccaagttcagcataataaattacttgtcttgtcatttagcatcttggtgttctcatcttctgtcagtggattaggctggagtgttctcatcaccttgaacctcttctctatcataatcatgggctcagtgattttccgcttcatttaccggtttctcatgatccgcacagcagtatccttgcatcagtaatgctcttcatcagttttgatctttttgagctcgatgtttctttttgctggtcgttttgtcttgatctacagcttctgcagtagcatcatccaagtcttcgagcgtcaaatctccttctttgtcaaccttgatgcccttcgctcgtctcctcttttgtcgatccttcgcctgcatggatatttctttcaacttgtgtgcaatctgtgtgtcatcaataagtaatgaaacaacatcctcttgtctcattaaatgatcgtcctggacatgtttccccttcataactaactcttgcactgcatttttctgctttgctctttgcaatattttctcctcaatggtatctttgcatataagcctgtacacagttacctcctttgtttgaccaagtctgtgtgttctatccattgcctgctggtcttgtgttggattccagtcaatttcataaaaaataacagtatcagcagcagtcaaattaataccaagccccccagctcttgtgcttaacaagaaaacaaatatgtcattcctgttctgaaaatctcggaccatgtcacggcggtctgagattgcagaagacccatcaagtctgaaatacttgaattttctgaaattcatgtaatcctcaagaatgtccagcattttagtcatctgagcaaaaagaagcacacgatgaccttcagctcgaaggcgtcgtagtagcatatccaaggtgtggagcttcccagaatcagtgagcattttagctggatcaaaattactcatcggtggagaagacccaaatatcctatagggtagctgcagcatcggctcaatgatgggcaaatcagtattaagttcttgtatcaaagatgaggagcaattggttgtctaggaccattgaactcagaagtacgagcaaatcccaggaacagtttcttggcccaaggatcatacatctcatcggtgaacttataggcaaaatttcgatcagcacaccaaacatttataggtggtgctctagctggcggaataaaagcatatgctgaacgaagaagcctaatgtttgaagcgagcctgtcgcgatgagaaagcaccagtgcttcatatgggccatcaattggcccagtcccaatctttgtcctaagcaaactgggcttggcctttgtagaagaaagcaacaaacgggcaactgcacgaacttttgtggaatcattctgactggactggatgccggtatcttctgaatcaaggaattcatccagaatttcagcagtgtagttcctattccattgcattactgaaaagactagtctctcaaacaatgaagcagtagccaggaaggaagcttcaactgggcacagatttgacaaacgtgtaaagccaaatgcaccagatgatagaagagactcttttgatgaactaacttctggaatggctgagcgatagatattgctgggcaaaaatatattaaacagcctgttcaaatatccattctgaaatccacagatgtttccagaattttccatgttggagatgattccctcataaactaactttggaatctcaaagattatgggatttctcttgcctgcatagtgtacatcttgcaattccccaaatgggggagaaagaagtgagtttgggatttcagcaaagttgaagtaagagcttccctcattccgctcaaacagctcggggtgattgcagaccttccgtaactgcatgacaatattcatcaggctaagtaacttcttgtcatttagactgccacgacttccagcaagcaactcgttaagcgagatcttattttttatggcttgatagaaaacttgttgacgagaactcaatttgcagggaacaatttcttctttctttttggtcatttcagcaatgacatcaatcttaacccggcggagcataaagggcttcaaaatcgggcgcaatctactaagttcccggccgggcacgtctactaaggttgagtgcctcggtgccgaatgt

SEQ ID NO: 51128 - DNA, 934 bp, Zea mays
  unsure (1)..(934): unsure at all n locations
  Clone ID: MRT4577_146626C.1
tataattcaattcgccgtttggcagatgcataagtctgtttcgacnnnnncaaaccatgcgacatgcccctgtttataagatgcacatatatacgcgctaatgaaatatctcattacggtcagacatgatcaaacacgtttcaaccccacggctgctannnnncagccctgttcctttgctttaattatcaacaccaaaactatgatcagtacagattaccctctttacacaaaattatttctatgtgtgctggtcatggatcatcctccatgcttatgtacatatatggtcacagccagcacaatgaatactgcagatgccgactgcattgctaacctctgcaggataaccctcgcctctaaaaggcaacccctgtcagcttattgtcactgcccaccgcactgacggcttaatcacccgatttcgctgctttccgtatgattcccatgcctnnnnnnnnnnnnnnnntcctcccaagttcagcataataaattacttgtcttgtcatttagcatcttggtgttctcatcttctgtcagtggattaggctggagtgttctcatcaccttgaacctcttctctatcataatcatgggctcagggattttccgcttcatttaccggtttctcatgatccgcagcagcagctagttccttgtcatcagtaatgctcttcatcagcctttttgatcttttaggtcttgattcgggcatctgttcgttttctgggtactactccccggatgatctcccacatcggcctctccattcttgtctatattgtcattatcatgactattcgtatgtttcttgtgggagctcttcttctttttgctggtcgttttgtcttgatctacagcttctgcagtagcatcatccaagtcttcgagcgtcaaatctccttctttgtcaacctttgatgccgatcgattg

SEQ ID NO: 51129 - DNA, 348 bp, Zea mays
  Clone ID: MRT4577_146627C.1
ggaaaactggcccttatttttttattacaggggtccaaccaaggtttcggtttcccaaacaacaggcttttggcaggtccttgttttaatttatttaacacgaaaccattttgcttaaaaggctagttttttacagcagggggaccggaggtttggttaattaacctttttacttattttttaatccgtcgatccttggggattgggccgacaaagggcccaaaattcctggggctgttggtggcttaatctggagtccaaagaaaggagctgagctgaggccttttgttactttggcaaaggtgggcaccgacggggcatccaacgcgtccgcccggaaattccgga

SEQ ID NO: 51130 - DNA, 392 bp, Zea mays
  Clone ID: MRT4577_146628C.1
attcggctcgagccgcatattctagctttttcggcaggggacatgcatactgtctgagcgtatgatgccggaggaaccgttgactaatccttgcgaggcatcactgattatgacctcaggtcttggataaaatccgagcacagtgagaatccatccatggttgcgtaagattcctataaagcgtaaggcggcaggactgtcgcactttgggaggactatgactacggagatctttgttatcgataggcttagcggccgaggtcgaccatctcgcactgtcgcactcattcgcagctaaggttgcgatttgagggcatgcattccaccccaatagttcagagagggaatgaggacatgctgagacttgcatgatgcttgccagcgacctaaaa

SEQ ID NO: 51131 - DNA, 1134 bp, Zea mays
  Clone ID: MRT4577_146629C.1
ctcgaggccggccgggccgggcccaacaggcttattcttcttccgttccccccctccctctctctctctgtcctccttgcggcggggacgagccgagcgccgccgccgttctcgtgctattcgcctctcacgagcagcacccaccaggtcatccgtctgcttgcttcacaatccatctaatggaaggccattcatcatgggactatcttccagttgagcacattagaactcctgtattcaactctggagttgtttccgaagctagcaatggaggcaacgacttctcaatatcattggatgccgtcgtccctgatgatatcctggagaggattttcacattcctgcctatagcaagcatgatgagggcaacatcagtgtgcaagagatggcacgacattatctgttcaaggagatttctgtggacccacatgctgcctcagcggccatggtacttcatgttcacctctaataaaactgctgctggttatgcttttgaccccatcctccgcaagtggtatgatttagagcttccttatattgacaagagcagctgctttatctcttcttcttgtggcctagtttgcttcatggacaatgacaacaggaacaccatttctgtatgtaaccctataacaaagcactccaggaggcttttagagccgcccggtgagacattgccagactacagtaccattgccatgaatgtggatcggctgtcccataagtactccattgcattggcaaaatctaagcagattcctgaagattttgtccgatgggacttttcagtatacaagtacgactcatcgagtggttcatgggtaacttctgtgagggaagtgttcgttggttggagaggaggtgataatagtgtcatatgtgacggtgtcctgtactgcttgattcattccactggtgctcttggcaatgtcaacccccgtcatggccttatcatgtatgaccttgccggtgaaccatccgagacttcgttgatgcaaacgtcaatctcagtaccttgttctctcacgtgtggccgtctggtaaacttgaaggagaagctggttctggttggtgggatcgcaaaacacaacagacctgatatcattaaaggcataggaatatgggagctccatg

SEQ ID NO: 51132 - DNA, 2193 bp, Zea mays
  unsure (1)..(2193): unsure at all n locations
  Clone ID: MRT4577_14662C.1
ctcgagccggccgggattggagtgaaccggtggtgggcagtgcggagtgccagcccagccagcagtaaccgccgaagcaaccggtgaggagggaggagaggggctggccgcatccactctccccttccacttgcaggcattgcctgttctccactccagttcccagctccgcagctcgaggacggaacggagggagatagggccaggggaagggacggagagccccgtctccaattcacaacactgccacggccggagccggaggaggaaggcgccagccgtagtccacaggcaacgcaagggaatgccactgttctagtctcgctctcgcagatctgctccgccgcgccctgttcaccgggaattctggagctgagggcgcaggttcgagcagaagctcggagcatggccatggccgagggggagaagcaccatgcccggtgccggtggtaggtagggctctctgatatcgcaggcctttcacgcggcccggcccaaaggcttcccgtccgttccgtcggctagccgaggacggaaactgagatcgggtgattgcttgactcgggagctgagcggaggtcgcaatggcgtcgtgggacaacctcggagagctctccaacatcgcgcagctcacggggctggacgccgtcaagctcatctccctcatcgtcagggcggcgtccacggcgcggctgcacaagcgcaactgccgccgcttcgcgcagcacctcaagctcatcggcggcctgctggagcagctccgcgtgtcggagctcaggaagtacccggagacgcgggagccgctggagcagctcgaggacgcgctccgccggggctacctgctcgtcaactcctgccaggaccgctcctacctctacctcctcgccatgggctggaacatcgtctaccagttccgcaaggcgcagagcgagatcgacaattacctccgcctcgtcccgctcatcacgctcgtcgacaatgcccgcattcgggatcggcttgagtatattgagagggaccaatgtgaatattcctttgacgaggaagacaagaaagtgcaagatgctcttttgaatcctgacccttgctcgaatcctacaattgtgctcaagaagactctctcatgttcctatccaaacttacctttcaatgaggccctccgaaaggaaagtgagaagcttcaggttgaacttcaaaggtcacagagcaacatggatctgggttcgtgtgaggttatccaacacctgcttggagtaaccaaaactgtggaatctacaattccagagaaagaaacaaatgttaaagctccagaaaagaagggttcaaactacagcgaatccaaaggagagactgcaaaatcgtttgatgatgatgacgactatcctaagaagcaaaaggatacctgcagcacacaacgatgctcttcacaagttccatatggtcatgatcttgtctcaagtagaggatcgtacagcgacgaatggcatgcagatttacttggctgctgttcagaaccggctntgtgtttgaagaccttgttcttcccctgtggaaccttctcgagaattgcttcaatcgccaaggacaggccaatgtcttctggagaggcttgcaatgatattaatggcgtactccctaatattgtcctgctgctgtttacatgctgtgtaaggagaaagcttcgtcaaaagttgacattgcgggaggctgctgtaacgacttcctttcacatctgctgtgttgttgctgcgcgcttgttcaaaaatggcgggaagttgagattcgcggagcttatagcgaaaagacgaaggttacaccaccagcatgccagtatatggagcactgaacagctgtatgaccgtacgggtagacccgaacttctgtaaagatattaacagaatatctgatatcgtactgcaagagcagtggtactacactgctcctgtgtagtgtttattcttactgtctattgttgttcgtcctggtcctggtcctggaacttgcatgtatatgttggggcatagcagcagagtatgtactctgtaaaaacacatcagttacaggctggtagagcctaacatcggttaacaccgtcagttatgggcaaaaaagttctttgtgcgtgtgcctgtactacaccgtcagttatatgtaacatcggttaacaccagcagtaaaaaaagagctttagtc

SEQ ID NO: 51133 - DNA, 285 bp, Zea mays
  Clone ID: MRT4577_146630C.1
gttctaaattatttaccaaaccaaaaatgcttgaactgtaacacatgatctaccgccgtggtttggggccatgccctctaaccaggtgaatacagggcggagatctggggccacacttggccacgttctggtgaggcgaagggtcccaaagttaaagctattggtgtactgtactaaagcctaccggggtgcctaacacgtgataaaaagacggttatctggaggggcccgcggcttttggtttttgtcggaaggccggaacagattggcccctttccaccttaa

SEQ ID NO: 51134 - DNA, 280 bp, Zea mays
  Clone ID: MRT4577_146631C.1
tagataacgaacagagagtagaatcaactaaagaagatggcaagatgagagcagagacccctcagaaagacgacgatctgctaagggtccaattaaccacggaccatttgaatggacaccatgaacagatgcaagaacataaaactggattgataagcacaatggcacccagtccaagtaccttcggcaacacttattagtgtatttgtgacctgatcacggtgccagttggtgcagcattgaggctggcctaaagttttgagatatcccccccttccct

SEQ ID NO: 51135 - DNA, 331 bp, Zea mays
  Clone ID: MRT4577_146632C.1
gtctcattgtgctcgagctcacagcctctccgcacgccccagcccttgctcggaggtccctggcgccgcgccccatctcaaatggcgcttggctgcccagctccctgcttttctagagcgccggcgatctctcgtggctctccggtgcccagctcgctccagacttcaatcgaaggtcgtcgttgttcgtgcatccccaagaaatcccaagcatcgggtgaaggcgaagctagtcgggtgatattcaccaagtgctcgacaaaagctcgaaccagtcgtcaattttgtggtttcaagtcggatgtcataagggtaagttaattcatattct

SEQ ID NO: 51136 - DNA, 3112 bp, Zea mays
  Clone ID: MRT4577_146633C.1
cacagttcgcaataatcaactcgtttaattcggctcgctcctccgagtccgagactccgttctctcccgcatccaccgccgtctcatccccaatccgagcaacgcctcccctcgcctccaaaaccctacccctcctgtcaccggcgggggcatgaaccggtgatcgcttacctggtctcgtctgtctgcgcacgcgcgaggtcagtgagtgagcattgcggtggtccgatcgcccgcggggggccatggcgtctgtggcgggatcgggcggcggggcaagcgcgggggccggtgggttgaagacttacttcaagacccccgaggggcggcacaagctgcagtacgagaagacgcactcccccgccgtcgtgcactacaaccacaacggcaagaccgtcgcccagatgacggtggcatatttgaaggagaagccagcaggccagggttccacgccttcaacaccaagtgctggtagtgggatgcggtctgcagctgcaagactgcttggcactgggaatggtagccgggcacttagcttcgggagcaatggtaccagcagggctgtctcaggaagcagccgcatgggtggaggaattggtgtgtcgactagtgcaagtggatcgcaaggcatggcaaactatgatggaaagggcgcgtacatcatatttaatactgcagatacactcttcatcagtgatctcaactcacatgacaaagatccaataaagtccatccacttcagtagctcaaacccgctttgccatgcatttgacccagaggccaaggatgggcacgatctgcttgttggggtgttctcaggagatgtctattcaatgtcactgaggcagcagctgcaagatcctggaaagaagcccgtttcatatcagcattttgttaatagagacaaagataaagacaaagatccaagtcaaggtggcgctgccagcagtcggagcacttgtgttgcatgggttccagagcgtgaaggaatttttgttgttagtcatgctgatgggaatctgtacgtgtatgacaaatgcaaggatggaaatactgattggacatttccaactgtaaaggatcaaagtcaggtgctgatttcacatgcaaagtcgagtaagagcaatccaattgcaaggtggcacatctgtcaaggtgcaatcaatgacatttccttttcaccggatggtgcttacttggcaactgttgggcgtgatggccatttaagagtatttgactttgctaaagaacaactaatatttggtgggaaaagttactacggtgcactgttgtgttgctcttggagtgcggatggcaaatatttgttatcaggtggtgaagatgatcttgtgcaagtatggagcatggatgatagaaagatagttgcatggggtgaagggcataattcatgggttagtgcagtttcttttgatccgtattggtccccaccaaattctgatgaaacggaagaaaatgtcatgtatcgctttgggtcaattggacaggatacccaactgcttctctgggatctggcattggaagagattgctgtccctctacgccatccgtctggtggctcaccgacattcagtagtggaagcccatctgcacagtgggataatgcgtgccctccagccggtgttctacagccttctccacggatgcgagatgtgccaaagctctcacctctcgttgcacaccgggtacatgtagatcccctatccggcctggaattcactagtgaatcaatcctcactatatgccgcgaggggctgataaaaatttgggcccgacccatccatagcgaaagcaaccagcagccggattcttctgaacaggttgtaggcaatgccactgctaaggataagatgttaacatcgtcaaataaagcaggtgcttccagccccagcttcaagcaaccgccacctgttcttttcacatgattgaagaggctttgctagcatttttatcatgctcgcttggccatggccattcatctatcttttgttactaacttgaggttaaatggagcggagtagcttgggaaggcttgcagtaaaggattgaagaggctttgctagcatttttgctagccatttcttttcctgcttcatcggcaacgtttctagttacagaagtgtcattgttgccatcaatgttggcgaaagaaaataacagaacttgctcctgtacatatacagacattgccataagatgaaatattacaagcttactggtttgatatttttttgttcttctataactttctacttgtagactagagtatacccatttttggtgcaagtcttgttactcctgatggtgggcagccaatggattctctgcaggtaattttttcctcgctcggaggaaatatttggtttttgttgtgggacactagaggccatctcagcgtgcaaaacactgactgttctacgttgtaaatgtactgtttacagagtcgagtttgaaaacaaacactgttttgtattgtaaatgcattactataaatgcaaaatactgtttacagggcaggttcctagaagttgatataagattttttttaatctcgagtttttatggtggtttttactatagtatctcagaatcatgccaaaagctctagtccccaattgttcttttactttctgagcttctgcatcccgagaagagtagaagccagaagagctgtaaatgctacttgtatctagaactttatattcttgctagttgttggcctcttagcagtttgtgttgcccttgctgctagaaagagaggatgatgctccggctgtctttttggtcgcttggttaaaaaaaaaaaaaaaaaaaaaaaaaaaaaaaaaaaaaaagggcggccgttatacagcaattcagaattcatttcttatatttatccaatttcctatgcattacgtcaccctcactttttcatcgtctgtttaggcaatgcaggaaatatctccagtagattacctgttctatcttctatctcatcatctatttcatgcttcactctacaaacaatatagtctataatgttttgcataaccatgtgcatgatgtgcaggaaacaggcctatgatgagtggattccctcttgtgaccccat

SEQ ID NO: 51137 - DNA, 298 bp, Zea mays
  Clone ID: MRT4577_146634C.1
gaaaacgggaatttaagttctaaaagcattatcaaaaattcaaaaaaataacagggaaaacaaaaataaagcaaaggcccctgggggttaaaaaatccacaccaaaaccgttaaataaaactgggagcgattcattaaaaactaaaaccccccctaaaatcaccacctttttatttaaatccaaaggaacggccccggggggagtctactataacgggggggggggggccgaacaacccaaattagagagtttttggaaagttgtccgaaaaaaaaaactttgaccactttgggaacc

SEQ ID NO: 51138 - DNA, 1026 bp, Zea mays
  Clone ID: MRT4577_146635C.1
acagtgcaaaacaatgtaaaacagtgttttggataatcatatgaaaaagctgctggacacggtctgagatactgacaaaagtaacgataacccatatgcatggaagatactaagttcttgacttacaacttgtagtgcatgcatcagcgaagacgaacatagtgtgttagatgtgaagtgacagcttcattgtattttggctgtcccactccaatcttgctgagttgcagctcttgtatcttttcactttgcttgcacttaggatacccaactgcttctctgggatctggcattggaagagattgctgtccctctacgccatccgtctggtggctcaccgacattcagtagtggaagcccatctgcacagtgggataatgcgtgccctccagccggtgttctacagccttctcggacgcgtgatgtgccaaagctctcacctctcgttgcacacggggtacatgtagatcccctatccggcctggaattcactagtgaatcaatcctcactatatgccgcgaggggctgataaaaatttgggcccgacccatccatagcgaaagcaaccagcagccggattcttctgaacaggttgtaggcaatgccactgctaaggataagatgttaacatcgtcaaataaagcaggtgcttccagccccagcttcaagcaaccaccacctgttcttttcacataattgaagaggctttgctagcatttttgttatgcttgcttggccatggctattcatctatctttagtcactaacatgaggttaaatggagcggaataacttggggaggctggcacggaaggcttgaagaggctttgctagcatttttgctagacattttcttttcctgcttcatcggcgacgtcttagttacagaagtgtcattgttgccatcgatgttggcaaaagaaaataacggaacttgctcctgtacatatacagacattgctgtaagatgaaatattacaagcttaaaaaaaaaaaaaaaaaagcggatttaggtgacactatag

SEQ ID NO: 51139 - DNA, 636 bp, Zea mays
  Clone ID: MRT4577_146636C.1
tatgccgtgaggggctaatcaaaatttgggcccgacccatccatagtgaaaacaaccagcagccagattcttctgaacaggttataggcagtgccactgctaaggataagatgttaacatcgtcaaataaagcaggtgctttcagctccagcttcaagcaaccgccatctgttcttttcacatgattgaagaggctttgctagcatttttatcatgctcgcttggccatggccattcatctatcttttgttactaacttgaggttaaacggagcagagtagcttgcggaggcttgcagtaaaggattgaagaggctttgctagcatttttgttagccatttcttatcctgcttcatcggcaacgtttctagttacagaagtgtcattgttgccatcaatgttggcgaaagaaaataacagaacttgctcctgtacataagatgaaatattacaagcttactggtttgatattatttgtttctttggtgcagtcaggtgggcagccgatagattcccgcctgagaacagtattttttcctcaatcaagcaatatttggtttttgtcggggcacacagtaactgctgtaaacgctacttaagtttatacgttatgcatcaattcagaattcatttctt

SEQ ID NO: 51140 - DNA, 390 bp, Zea mays
  Clone ID: MRT4577_146637C.1
tatcttttcatgccacacagaatacaacccgggagcctctctcggtgggcaggcgccttctcctccaacaccgtacgctccacgcctcctccaataaagcgagagcttcttcataagaacaacaaatcaaaagcgcgatcaactcactgccaacaaaacctcaacaaccaatactcatatctgatctcgaccaacagcttccatcttcctttgatccgtatgctcaggcaaatgctgtagactatcttgctcaccctggaacgaatgattatctgcatgtacgcatccagcagcacagacctagacagactctcactaacactcaacgtctgaagaaagagttcagctataacaagatcctcaaggatctgaagaaggaattctcctgca

SEQ ID NO: 51141 - DNA, 785 bp, Zea mays
  unsure (1)..(785): unsure at all n locations
  Clone ID: MRT4577_146638C.1
ccttttttttgtcacgggggggggggggggggggggggggngattgncttgtagccncgaagagaatagtggcaataatnntagaanngataaaagcaaanngctacggtgcgnntatcataattagtctagggtaggaactaagattttnatttagtgacnngattgactannactagtattanntatcaatttgnntaaatgcatnncacgattgannatactcagattaacccaanngagtagagtgcgatttaacttnnatgctcnncacaagcccatggnnaccgtgtngnngttgtggtngnngttgttgnnttgttnngtcgattgttnngtagttnngtcctacgccctnnagttgccccgatgcctgnncagatgntcctntnnattaccgtnnncggtagccggattgnntgtgcttgntnnccgcaatgnnnttagtgntnnagttagattnnntgtcttgnncgcgatttanncgctaacaaaaacttgnngttgttgcnannatagcctnntcgcaattgcctgtnnctgcatctccnntccaatagnnntgtggccccagccaccggnnncacggcttaatncaagccgccacccaatagtggtaccttttaaggccgccaagccgtatatatatggtcatngnngtatcggcggccccagttatgttatcaacgaccaacacggtggcggtgctatcggtactagtgcggtagttatggttggccnctgtagtgggttatccaatagactaaagctttncaaccgatcct

SEQ ID NO: 51142 - DNA, 2388 bp, Zea mays
  Clone ID: MRT4577_146639C.1
tccgattgctcctccgagtccgagactccgttctctcccgcatccaccgccgtctcatccccaatccgagcaacgcctcccctcgcctccaaaaccctacccctcctgtcaccggcgggggcatgaaccggtgatcgcttacctggtctcgtctgtctgcgcacgcgcgaggtcagtgagtgagcattgcggtggtccgatcgcccgcggggggccatggcgtctgtggcgggatcgggcggcggggcaagcgcgggggccggtgggttgaagacttacttcaagacccccgaggggcggcacaagctgcagtacgagaagacgcactcccccgccgtcgtgcactacaaccacaacggcaagaccgtcgcccagatgacggtggcatatttgaaggagaagccagcaggccagggttccacgccttcaacaccaagtgctggtagtgggatgcggtctgcagctgcgagactgcttggcactgggaatggtagccggacacttagcttcgggagcaatggtaccagcagggctgtctcaggaagcagccgcatgggtggaggtattggtgtgtcaactagtgcaagtggatcgcaaggcatggcgaactacgatggaaagggctcatacatcatattcaatactgcggatacgctcttcatcagtgatctcaactcacatgacaaagatccaataaagtccatccacttcagcagctcaaacccgctttgccatgcatttgacccagaggccaaggatggacatgatctgctcattggggtgttctcaggagatgtctattcaatgtcactgaggcatcagttgcaagatcctggaaagaagcctgtttcataccagcattttgttaataaagacaaagacaaagataaagatccaagtcaaggtggcgctgccagcagtcagtgcacctgtgttgcatgggttccggagcgtgaaggaatttttgttgttagtcatgctgatgggaatctgtatgtgtatgacaaattcaaggatggaaatactgattggacatttccaactgttaaggatcaaagccaggtgctaatttcacatgcaaagtcgagtaagggcaatccaattgcaaggtggcacatctgtcaaggtgcaatcaatggcatttccttttcaccggatggtgcttacttggcaactgttgggcgagatggttatttaagagtatttgacttcacgaaagaacaactaatatttggtgggaaaagttactatggtgcactgttgtgttgctcttggagtgcggatggcaaatatttgttatcgggtggtgaagatgatcttgtgcaagtatggagcatggatgacagaaagatagttgcatggggtgaagggcataattcatgggtgatattatccttacaattgtttttggctatcatcacataggcatttttaattgaaacttgcattttgagtcaaattaatttgcgattatacaggttagcacagtttcttttgatccgtattggtcccaattaatttgcaattatacaggttagtgcagtttcttttgatccgtgttggtcccaaccaaattcagatgaaactgaagaaaatgtcatgtatcgctttgggtcagttggacaggatacccaactgcttctctgggatctggcattggacgagattgctgtccctctacgccatccttccggtgggtcaccgacattcagtagtggaagcccttctgcacactgggataatgcatgccctccaaccggtgttctccaaccctctccacggatgcgagatgtgccgaagctctcacctctcgttgcacaccgggtacatgtagatcccctatctggcttggaattcaccagtgaatcaattgtcactatatgccgtgaggggctaatcaaaatttgggcacgacccatccatagtgaaaacaaccagcagccagattcttctgaacaggttataggcagtgccactgctaaggataagatgttaacatcgtcaaataaagcagagtagcttgggaaggcttgcagtaaaggattgaagaggctttgctagcatttttgttagccatttcttatcctgcttcatcggcaacgtttctagttacagaagtgtcattgttgccatcaatgttggcgaaagaaaataacagaacttgctcctgtacatatacagacattgccataagatgaaatattacaagcttactggtttgatattatttgtttctttggtgcagtcaggtgggcagccgatagattcccgcgtgagaacagtattttttcctcagtcaggcaatatttggtttttgtcggggcacactaactgctgtaaacgctacttaagtttatacgttatacagcaattcagaattcatttctt

SEQ ID NO: 51143 - DNA, 1979 bp, Zea mays
  unsure (1)..(1979): unsure at all n locations
  Clone ID: MRT4577_14663C.1
gggtaggctgggatacagacgaacacctcacaaggacaaccagtcccctcactcaggaagcttcccggggaaagaatgtgcgggtgtgcggccctcgtcgccggagcccggccgccacggcccgtcctcccccgcaggctccgtcgccgtcgagggagctccgtccgagcagaggtctcaccaggcggtgagtcccagccgaagaaggtcaccgtcgcaggcgccggctgggccggctttgccgccgcgcaccacctcattaaacaggggtacgatgtcacgcttcttgctgcggagagtggcccaacggaggaggttggcctcagaggattctggcaaccgtatcgcaacatcttcgctttagtcgacgagctggggatctcgcctttcacgggctggaataaagcagcatactattctacggagggccttgctgtcgaatttcccatatttcataaccagccccgattaccagctccctttggagtctttgcatatccagaattccctaatcttcctttgagtgataggctgacatcaattcctgtcatagctgcagtcattgacttcgacaacactgacactgcttggaggaaatatgatgcaatgactgcaaaagagctttttaagatgtatggttgctctcaaaggctctacaaggaaatttttgagctagttactcaggctgccctgtttgctcctggtgagcaatgtagtgcagctgcaacactggggatgctgtactattatgtgttgtctcatcaggaaaattctgacttcttgctgtgccgtggtgaagtagaagaaaaaattttctctccttggctgcaatcattggagcttaaaggcttaaaatttgtagaaaataaagttccaacaagtttgactacagatgtggatagcggatgcatctcttctattgtttgtggtgatgatgtgtacgaggcagatgcatttgttttagccatgggactctcttctctacagtccatcgtcaaaaacagtccattcctacggtctgatcgagaattcaggaatcttcttcacctatctattggattgtcaaccgacatgggtccttttctaaagaaaaagaatatgtgaccggacttgaagctggtaatagggtagtatactattttgacattggggacattcttagaccttacctcagtatatgatgattattgtgaagaatcaataaccattgtggagtataatgctagccatttggtactcttaagcgatgatgatattgtctatgaagcttcatcacatcttatcaagtgcatacaagattttgagggcgcaaatgtgataagatattcaatcagaagatctcctaattctgtaatcaactttcttccaggctcgtacaagtacacacttagaggatcaacttcctttccaaatttgtttattgctggtgattggattgtcaaccgacatgggtccttttctaaagaaaaagcatatgtgactggacttgaagctggtaatagggtagtagactattttgacattggggactttgccaaaataattgcagttgaaggagatgagccccatatagagacattgcgaagtctcaacagaagagccaatgaactgaagtcacaaatcccattctcagaattctttctccaataattttgttaggatttttctgtgtttgttgagcattgccattgttgtaggcattgttattaaggcggtaaggtaaagcatggcggcccagccctttgagtcgactagacgcttaaggcgtgcggcgaggtgtcgccatacatatgtcctatcctacaggagagcaatagaaacataccttgttgatgccaattttggagctccagtttcgcttgttccatgtagcatgtatcccccttacagattgcaacatgaacatgttgtgaattataattaatgtaagaaacaatttataatgcaatgattgaatgaagcatctgtgtaaatatnna

SEQ ID NO: 51144 - DNA, 231 bp, Zea mays
  Clone ID: MRT4577_146640C.1
tcctcttcccactatccatctaccttctactttaccaattaccacggctaatttcaccaggggattttttacaactcactccggaatcaaaaccttatccaaacaataatcagcacttctacacatacaatctatataatcattctcttcgttcatcgatctatcatgaaaactactcacgtactcactcctactacttcctccaaacattcctctcttaaataccacaac

SEQ ID NO: 51145 - DNA, 689 bp, Zea mays
  Clone ID: MRT4577_146641C.1
ctcgaggccggccggaagacacttccgcgtagcacagtccattattgccgtctcccttttgcgtgagcaaagaaagagagcgagaagagcagtcgccatgtctggcatcatccacaagatcgaggagaagctccacatggggggcgaccacaagaataaggaggaggagcaccacaagaaggccgaggagcaccacaagaaggaggagggggagcaccacaagaaggacggcggggagcacaaggaaggcatcgtggagaagatcaaggacaagatcaccggcgagcacggcgacaagtccggcgaccacatggagaagaaggacaagaagaagaagaaggataagaagaagcacggcgagggccacgaccacgacggcggccacagtagcagcagcagcgacagcgactgagatctggtgtcgcaggtgcaacacatgtatgcttgctggatggaggatacataccagctgatgtgcgctgatgtagtgtttcacgggtgtcatgcatgtacgtactattataatcaaaaaaaggaaaagaaataacagtcagggatggtttgtttgccatgtgatcttgtacactcctacttaaattatggctgctgcacggtgctgctagctagcttgtactaataaagtgttgatctgcatgcttgaaaagaaaaaaaaaaaaaaaagcggccct

SEQ ID NO: 51146 - DNA, 657 bp, Zea mays
  Clone ID: MRT4577_146642C.1
tccggccgggaagaccaccgacgcgtacgtagcacagtccattattgccgtctcccttttgcgtgagcaaagaaagagagcgagaagcagtcgccatgtctggcatcatccacaagatcgaggagaagctccacatggggggcgaccacaagaataaggaggaggagcaccacaagaaggccgaggagcaccacaagaaggacggcggggagcacaaggaaggcatcgtggagaagatcaaggacaagatcaccggcgagcacggcgacaagtccggcgaccacaaggagaagaaggacaagaagaagaagaaggataagaagaagcatggcgagggccacgaccacgacggcggccacagtagcagcagcagcgacagcgactgagatctggtgtggcagcacagctgcaacacaagtatgcttgctggatggaggattcataccagatggctgatgctgatgtagtgtttcacgggtgtcatgcatgtacgtgctattataattaaaaaaaagaaaaagaaataacagtcagggatggtttgtttgccatgggatcttgtacactccttaaattatggctgctgcacggtgctgctagcttgtactaatgtctaataaagtgttgatctgcaaaaaaaaaaaaaaaaaagcggcc

SEQ ID NO: 51147 - DNA, 740 bp, Zea mays
  Clone ID: MRT4577_146643C.1
cctcgaggccggccgggccgggaagaccaccgacgcgtacgtagcacagtccattattgccgtctcccttttgcgtgagcaaagaaagagagcgagaagcagtcgccatgtctggcatcatccacaagatcgaggagaagctccacatggggggcgaccacaagaataaggaggaggagcaccacaagaaggccgaggagcaccacaagaaggaggagggggagcaccacaagaaggacggcggggagcacaaggaaggcatcctggagagcatcaaggcggggatcaccggcgagcacggcgacaagtccggcgaccacaaggagaagaaggacaagaagaagaaggataagaagaagcacggcgagggccacgaccacgacggcggccacagtagcagcagcagcgacagcgactgagatctggtgtcgcaggtaattaattgatctggggctgtatttttttttcctttttgtttcgttccgtttattttgttcagctggttttgatcttttgctggatctgaagatgtcgatgctggcttataatgcagcacaggtgcaacacatgtatgcttgctggatggaggattcataccagctgatgctgatgtagtgtttcactggtgtcatgcatgtatcgtgctattataatcaaaaagaaaaaagaaataacagtcagggaaagtaaaattgccaaaaaaaaaaaaaaaaaaaaagtacctcggccgcgaccacgct

SEQ ID NO: 51148 - DNA, 530 bp, Zea mays
  Clone ID: MRT4577_146644C.1
gccggccggtccgggaagacacaccgacgcgtacgtagcacagtccattattgccgtctcccttttgcgtgagcaaagaaagagagcgagaagcagtcgccatgtctggcatcatccacaagatcgaggagaagctccacatggggggcgaccacaagaataaggaggaggagcaccacaagaaggacggcggggagcacaaggaaggcatcgtggagaagatcaaggacaagatcaccggcgagcacggcgacaagtccggcgaccacaaggagaagaaggacaagaagaagaaggataagaagaagcacggcgagggccacgaccacgacggcggccacagtagcagcagcagcgacagcgactgagatctggtgtcgcagcacaggtgcaacacaagtatgcttgctggatggaggattcataccagctgatgctgatgtagtgtttcactggtgtcatgcatgcatgtatcgtgctattataatcaaaaaaaaaaaaaaaaaagcaccctagcatgtgttggatgc

SEQ ID NO: 51149 - DNA, 147 bp, Zea mays
  Clone ID: MRT4577_146645C.1
tgaggagaggagccgcgaaaccgcgggaaggacagggacaggaagggaaaacgggagaagagagggtgacaggcaccggctgagaaaggaatggacggacgagagcgaccgctcgacgcgcgtcagagaaatgtagactgacgacca

SEQ ID NO: 51150 - DNA, 707 bp, Zea mays
  Clone ID: MRT4577_146646C.1
ccggccgggaagagcgccgacgcgtagcacagtccattattgccgtctcccttttgcgtgagcaaagaaagagagcgagaagagcagtcgccatgtctggcatcatccacaagatcgaggagaagctccacatggggggcgaccacaagaaggaggatgagcaccacaagaaggccgaggagcaccacaagaaggaggagggggagcaccacaagaaggacggcggggagcataaggaaggcatcgtggagaagatcaaggacaagatcaccggcgagcacggcgacaagtccggcgaccacaaggaaaagaaggacaagaaaaagaagaaggagaagaagaagcacggcgagggccacgaccacgacggcggccacagtagcagcagcagcgacagcgactgagatctggtgtcgcagcacaggtgcaacacaagtatgcttgctggatggaggattcataccagctgatgctgatgtagtgtttcactggtgtcatgcatgcatgtatcgtgctattataatcaaaaagaaaaaagaaataacagtcagggatggtttgtttgccatgtgatcttgtacactcctacttaaattatggctgctgcacggtgctgctagcttgtactaataaagtgttgatctgcaaaaaaaaaaaaaaaaaagcggcggtgctgctagcttgtactaataaagtgttgatctgcc

SEQ ID NO: 51151 - DNA, 241 bp, Zea mays
  Clone ID: MRT4577_146647C.1
aaaccatgtatgccttacattcgatgttccataaaaaaaattaaggtttaatagcttcacggtttcaacgaatggaattattctttatgaccaggcaaacattgccattatatattacttggttacgcgacatctgcaagggtgtcaacatgacgagattttttaagctttcacgaggttaccaacaagcaatctcagtaccagccacatagtttttttttttttggtagatgcctttgtt

SEQ ID NO: 51152 - DNA, 767 bp, Zea mays
  Clone ID: MRT4577_146648C.1
aaactcggcagcggtctctttcttccttctctctactttcttcctcaccaaattcggatcaaacaaattcgttaaataatctcagaaaacacacggttaacgggatcgaagggattaaaacgaaaacgttccgatcctgtggccaggtctcggtgctaatcgtgtgttttttttggggtgggattttgtgatctgttgttagggtttcggatctggaggattagttctccaagttccgagtcagaccatgaatgagcagctgatgcgaccaccggcgccgctgccgttccaccagatgtgggcggcggtgccggcgatggagcctcctttcaagccggtgcgggcggcgtggaagcgggcggtgcggacgccctggaagcgcaaggcccagcctccggcgtcgggcggcgcgaggtggggcggtgcggcggccccgcgcaacacgacgtcgttcctgatccgcgcgaagcgggcggggggcgtggcgtcgctggtgtccccgtgccccgtgacgccggcggtgctcccgacgcccgtgctgtcgccggcgcgggaggtgctggtggagatggccaaggaggcgtggggcgtggacgggtacgggtccatgaagggcctcatccgcctgcgcgccgacgcccgggacgcggccggcgacgactcgggctccggcgagagcgacgtggaggggcacgtcgaggtggagcgccgcctggaccacgacctcagccgcttcgagatggtccacctcccggcccggggccctt

SEQ ID NO: 51153 - DNA, 743 bp, Zea mays
  unsure (1)..(743): unsure at all n locations
  Clone ID: MRT4577_146649C.1
gccggccggttcgaaggagggccccttcaaaaccgaaatctaggcgtcgccaccgccatacgctcccgcgccgcattccccctcaatccacttcatagagccgatggccatgcaccgcgccgccgagctcgaactccgccgcctcgccgacgacaagaataaggaggaggagcaccacaagaaggccgaggagcaccacaagaaggaggagggggagcaccacaagaaggacggcggggagcacaaggaaggcatcgtggagaagatcaaggacaagatcaccggcgagcacggcgacaagtccggcgaccacaaggagaagaaggacaagaagaagaaggatggtaacaagcacggagagggccacgaccaggggcggccacagtagcagcagcagcgacagcgactgagatctggtgtcgcaggtgcaacacaagtatgcttgctggatggaggattcataccagctgatgctgatgtagtgtttcactggtgtcatgcatgcatgtatcgtgctattataatcaaaaagaaaaaagaaataacagtcagggatggtttgtttgccatgtgatcttgtacactcctacttaaattatggctgctgcacggtgctgctagcttgtactaataaagtgttgatctgcatgcttgcgtcttaaaaaaaaaaaaaaaaaaaaaaaaaaaccaaaaaaaaaaaaaaaaaaaaaaaaaaaaagtactctgcgttgttaccacctgnt

SEQ ID NO: 51154 - DNA, 1357 bp, Zea mays
  unsure (1)..(1357): unsure at all n locations
  Clone ID: MRT4577_14664C.1
ccggccgggngtcccctctttcaggaagcttcccggggaaagatgtgcgggtgtgcggccctcgtcgccggagcccggccgccacggcccgtcctcccccgcaggctccgtcgccgtcgagggagctccgtccgagcagaggtctcaccaggcggtgagtcccagccgaagaaggtcaccgtcgcaggcgccggctgggccggctttgccgccgcgcaccacctcattaaacaggggtacgatgtcacgcttcttgctgcggagagtggcccaacggaggaggttggcctcagaggattctggcaaccgtatcgcaacatcttcgctttagtcgacgagctggggatctcgcctttcacgggctggaataaagcagcatactattctacggagggccttgctttccctaatcttcctttgagtgataggctgacatcaattcctgtcatagctgcagtcattgacttcgacaacactgacactgcttggaggaaatatgatgcaagaaaattctgacttcttgctgtgccgtggtgaagtagaagaaaaaattttctctccttggctgcaatcattggagcttaaaggcttaaaatttgtagaaaataaagttccaacaagtttgactacagatgtggatagcggatgcatctcttctattgtttgtggtgatgatgtgtacgaggcagatgcatttgttttagccatgggactctcttctctacaatccatcgtcaaaaacagtccattcctacggtctgatcgagaattcaggaatcttcttcacctatctacagtcgatgtgatctctgtaaaattatggtttgataaaaagatcataattccaaaggttgccaatgtgtgttctggttttgatgattcatctggctgggcattctttgaccttacctcagtatatgatgattattgtgaagaatcaataaccattgtggaggctgaattttataatgctagccatttggtactcttaagtgatgatgatattgtctatgaagcttcatcacatcttatcaaatgcatacaagattttgagggcgcaattgtgataagatattcaatcagaagatctcctaattctgtaatcaactttcttccaggtgaattgaaagaatattattatttcaatataaatgcttaaaggaactattaaaaaaaaaaaaatatcggccgtaataaacaagttttttttaaatgttatgtatgatttgtaatgctatactctanatcatttcagtgcatattgtcctaaattaatgttgtgcacctgtgacaaggatcaagaatcataataataaaattatacttttttagtaaaaaaaaaaaaaaaaaagcggcc

SEQ ID NO: 51155 - DNA, 222 bp, Zea mays
  Clone ID: MRT4577_146650C.1
atggcgcggagaggagaggagctagacttgggagaccttgccctgcctgtcctcctgtctactcccttgattttcgtgaggtatatgctcaagaaacaacatggaattgatggtggaatagcagtagtcttctcattggaataccaaaggcaaatcttcttccttttcaggcttcataagaagaggaaactccttcagattaccagattgtacatgatataa

SEQ ID NO: 51156 - DNA, 784 bp, Zea mays
  Clone ID: MRT4577_146651C.1
ggaccctcgaggccggccgggccgggaagacacaccgacgcgtacgtagcacagtccattattgccgtctcccttttgcgtgagcaaagaaagagagcgagaagcagtcgccatgtctggcatcatccacaagatcgaggagaagctccacatggggggcgaccacaagaataaggaggaggagcaccacaagaaggccgaggagcaccacaagaaggaggagggggagcaccacaagaaggacggcggggagcacaaggaaggcatcgtggagaagatcaaggacaagatcaccggcgagcacggcgacaagtccggcgaccacaaggagaagaaggacaagaagaagaaggataagaagaagcacggcgagggccacgaccacgacggcggccacagtagcagcagcagcgacagcgactgagatctggtgtcgcaggtaattaattgatctggggctgtattttttttccctttttgtttcgttccgtttattttgttcagctggttttgatcttttgctggatctgaagatgtcgatgctggcttataatgcagcacaggtgcaacacaagtatgcttgctggatggaggattcataccagctgatgctgatgtagtgtttcactggtgtcatgcatgcatgtatcgtgctattataatcaaaaagaaaaaagaaataacagtcagggatggtttgtttgccatgtgatcttgtacactcctacttaaattatggctgctgcacggtgctgctagcttgtactaataaagtgttgatccg

SEQ ID NO: 51157 - DNA, 822 bp, Zea mays
  Clone ID: MRT4577_146652C.1
agaggatgacggtggatgctactagatggaacgggacgaagaaggagaagaaggcagcagggacgggagacgacgacgacgacgaaggcagagactggagggaagaaacgagaagaggatcccggtggatgctactagatggaacgggccgaagaaggagaagaaggcagcagggacgggagacgacgacgacgacgaaggcagagactggagcgaagaaacgagaagaggatgacggtggatgctactagatggaacgggacgaagaaggagaagaaggcagcagggacgggagacgacgacgacgacgaaggcagagactggagcgaagaaacgagaagaggatgacggtggatgctactagatggaacgggacgaagaaggagaagaaggcagcagggacgggagacgacgacgacgacgaaggcagagactggagcgaagaaacgagaagaggatgacggtggatgctactagatggaacgggacgaagaaggagaagaaggcagcagggacgggagacgacgaccacgacggcggccacagtagcagcagcagcgacagcgactgagatctggtgtcgcagcacaggtgcaacacaagtatgcttgctggatggaggattcataccagctgatgctgatgtagtgtttcactggtgtcatgcatgtatcgatctattataatcaaacagaaaaaagaaataccagtcagggatggtttgtttgccatgtgatcttgtacactcctacttaaattatggctgctgcccggtgctgctagcttgtactaataaagtgttgatctgcatgcttgcgtctt

SEQ ID NO: 51158 - DNA, 449 bp, Zea mays
  unsure (1)..(449): unsure at all n locations
  Clone ID: MRT4577_146653C.1
agggggccaaaaccgggggcaaaaaaaaaaccaagggggctaagaccaaattttaaaaaaaaaaaaactcatgggacaaaaaaaaagcaaatttttactaaaaaaaaagagttctgtataaaaaaaaaaaaaaattacatcatataaaaaaaacaatccaaaaacccaaaacttactgggaaaaaaaggtttaaaactttaaaaaaaaaatttaaaaatcctccaagcccctaaacctggggaaaaagtttttgacctgggacttaaaaatccaagtaccaacttgtttttaaagggaatcgggaactcacgtgaataaaagcttggttggggccagccaaataccaagcaaaataacggggtaaggaaaaaaaacgggaaaaaaataagggcctcaagggggaatttcccccaaacgaaaagttttggncccgttttggtaaacccca

SEQ ID NO: 51159 - DNA, 267 bp, Zea mays
  unsure (1)..(267): unsure at all n locations
  Clone ID: MRT4577_146654C.1
tttgatctggcatcctncntgnccanattttncnacccttcntcctntnncncanccctcccacccaatcctnttctnnncttccttntacctttgaccntgcncatgacggcatgacctttcatcnatggacatatcttactncttgatnctttgtcatnatancctccctgtagcggcntcncctttngtacgtcgattgttatctatcttncnncagtttctactatatctcacttcttgtcttcatatcttgcaaatacctnc

SEQ ID NO: 51160 - DNA, 213 bp, Zea mays
  unsure (1)..(213): unsure at all n locations
  Clone ID: MRT4577_146655C.1
gccggccgggtacggtacctgacctcgncgcatcccccctccccatcttcgcagcgcgggcggcggcaatggcgatggcctccacctacgcgtttttcgccggcgcgcgggcgctcgcgcagggtagatgcagggtccgcggtcccgcggggctgggctacctcggcccctccaaggccgccggcttcccccgccagctcgacctcgccctcg

SEQ ID NO: 51161 - DNA, 173 bp, Zea mays
  unsure (1)..(173): unsure at all n locations
  Clone ID: MRT4577_146656C.1
cacaagctttatccgacccgatgttttcaatgttcttctgtgtgcacaataagaggtttgcgttgtccgattatagctatctgagaacatttgtttgtcagcagagggtgtttatctcctatttaacgggagcaagtgggggaggcggggcgagcctttactntttttattgt

SEQ ID NO: 51162 - DNA, 1492 bp, Zea mays
  Clone ID: MRT4577_146657C.1
tggttatgtcagcaggaaaagacacaagagctaggcatgatgattttgttacagcaatcggctatcgcatattagaggtcgagaactacttgaaagaatccaatcttgcggacgggagggggccattgagctgggttcacttggatgaggatgaaagggacgaccttgcagctttcctatctgccagtccttttcaacagaaagacaaagtggtcacaattccttcagcaggtgacattgaagtgggcagcaatgcagcaaggatgaaaaatgatatatcaactgacagctccaaggattcagctggttccacagatttgatatcaggcagagcaaaggaagatttgcatcgtgggcacagaagagcagctagtgccagtgctgatataggctcatggagcatgtcaatccctaatgaatgtgaaggaactacagaacagttatctgatggctcagacaaattgcctttgcgtaagatagtgaaaacatgtgctttgacaagtaccttgcaatctaagactagaacgaagtggaaaaatggagctgttaggtgggcaggcagtaaccaacaggatgttgaagaggctatccctctgaatacttctcagttgagtcagggcttagaggaatgctttgaaaggaacaagagttgcttaagtacatgtgatgagcatacatacaataagaaacttcatggttggctcggagcccttcgtagacaacttcaaagttgtatgcatagtgaggacaatctggtgactatatttatttgctcatgattggatttctagcctcacaagatcagcagcttgtatggtaaattcactggcagttaagttactcttggtcaacttgatcctgaagcatgcatatgaggcaactatggtagaccattttggtagtcaaggttcaaaatcacgtataatgatctggttggggccacttatcttgccacatgttcagggcaggctgcctcgtccttggaagaacatctacaggacaatccttgcagcacggttgcttcgccacacttggatatgctcccgaatggtgccttgaacaattgatgcacctcgagaactcaatcctccgtggtgagttggtgactgggtggcacctatgcaatggcccagtataaattagtggtgcagtgggctggcgatcatgctgctagcaaccgaaattgcaagacttgtatcatacatcaacgctattgcttttaccgcctgacacggaagggtggtgatcatgcatcaatgctattgcttttacaacctgacacagaagggtgtcattttttttttgtaggagttgccatctgaactgtagagctccataggggataggttctgatcggaatgtgaatggcactagaaaattacttttactgtatctgcttgtgttgtcgagaaccgaatgaggtgcctggcagccttgactgtaccctctacactaaaattcgagaatgttgattgttgaagccctcagcagt

SEQ ID NO: 51163 - DNA, 462 bp, Zea mays
  unsure (1)..(462): unsure at all n locations
  Clone ID: MRT4577_146658C.1
gccgcncctttctttttttttttcttttttttttctttttctttttctttggttttttctttggggttttcttttttttcttttctccccgcaaaggtgccatttgcatttgctttaaaggggtcccgtatgtccccaacacattatttaaacgggaggaggggtgggtctttaagatgcaaaatagccactgtttaaattttacacccgatgacccccccccatgtgttacacttaaatcatttaacaggggggggggtggatctaaagcggagaggccccacggacctccccgttcctcgttgagggcaaagggggtataatggggcaagagggcaccaaataagggcccaaaacaccccaggagagaccccccccagcaggtgtgttgtctgagcccgtaggctacaacccggggccctccggggacaagcccccgtccacaagcgccagcgggggccc

SEQ ID NO: 51164 - DNA, 2220 bp, Zea mays
  Clone ID: MRT4577_146659C.1
cattgggtacctcgaggccggccggggctggtccgccccgcgagcccagcaccaggaaggaaatagcggcgagcaagagctggcggaaagaagaggaaagccaggcacgccgctcacccaccgcgccaccaaccgcagatcctaaatccgatctctctctctcctccctccctccctccctctcgaggttttcggtttcgatccggcaagcgggcgagatcttcatggcgacgtcgttcgaccgctgggagaaggaccccttcttcctcgccgccgaggaggtccaggaatccgccgatcggatggaatcggtttatcgggtatgggtgcaggagaggagcgggggcgattccgaggcggcaagcgtcactggaggccctacagctgcgcagcttcgccgcgagctgcacacggcgcttggtaccgccaagtggcagcttgatgaactggcgcgggcagtcagatcgaacgatctggttatgtcagcaggaaaagacacaagagctaggcatgatgattttgttacagcaatcggctatcgcatattagaggtcgagaactacttgaaagaatccaatcttgcggacgggagggggccattgagctgggttcacttggatgaggatgaaagggacgaccttgcagctttcctatctgccagtccttttcaacagaaagacaaagtggtcacaattccttcagcaggtgacattgaagtgggcagcaatgcagcaaggatgaaaaatgatatatcaactgacagctccaaggattcagctggttccacggatttgatatcaggcagagcaaaggaagatttgcatcgtgggcacagaagagcagctagtgccagtgctgatataggctcatggagcatgtcaatccctaatgaatgtgaaggaactacagaacagttatctgatggctcagacaaattgcctttgcgtaagatagtgaaaacatgtgctttgacaagtaccttgcaatctaagactagaacgaagtggaaaaatggagctgttaggtgggcaggcagtaaccaacaggatgttgaagaggctatccctctgaatacttctcagttgagtcagggcttagaggaatgctttgaaaggaacaagagttgcttaagtacatgtgatgagcatacatacaataagaaacttcatggttggctcggagcccttcgtagacaacttcaaaggtctcagtaccaaattcaatatgggcatcatattcaattgattgttttggcacttgctgcccttgtaatcattgtatgcatagtgaggacaatctggtgactatatttatttgctcatgattggatttctagcctcacaagatcagcagcttgtatggtaaattcactggcagttaagttactcttggtcaacttgatcctgaagcatgcatatgaggcaactatggtagaccattttggtagtcaaggttcaaaatcacgtataatgatctggttggggccacttatcttgccacatgttcagggcaggctgcctcgtccttggaagaacatctacaggacaatccttgcagcacggttgcttcgccacacttggatatgctcccgaatggtgccttgaacaattgatgcacctcgagaactcaatcctccgtggtgagttggtgactgggtggcacctatgcaatggcccagtataaattagtggtgcagtgggctggcgatcatgctgctagcaaccgaaattgcaagacttgtatcatacataaacgctattgcttttaccgcctgacacggaagggtggtgatcatgcatcaatgctattgcttttacaacctgacacagaagggtgtcattttttttttgtaggagttgccatctgaactgtagagctccataggggataggttctgatcggaatgtgaatggcactagaaaattacttttactgtatctgcttgtgttgtcaagaaccgaatgaggtgcctggcagccttgtctgtaccctgtacactaaaattggagaatgttgaagccctcggcagtaatcggctggacttgtaaggtgccagtgtgtgttgagcctgcatattacggctaaattcggtgaagattatagcactttactgtgcatcctaatgtcaaagcccccaaccaatgtttggtattccaaactccgaagtccgaaaaaaagcccttttggttgagtcctaaaaacagattcgtgtttatgaga

SEQ ID NO: 51165 - DNA, 1887 bp, Zea mays
  Clone ID: MRT4577_14665C.1
ccggccgggactcactcgttgctcccttagtcccctcactcaggaagcttcccggggaaagaatgtgcgggtgtgcggccctcgtcgccggagcccggccgccacggcccgtcctcccccgcaggctccgtcgccgtcgagggagctccgtccgagcagaggtctcaccaggcggtgagtcccagccgaagaaggtcaccgtcgcaggcgccggctgggccggctttgccgccgcgcaccacctcattaaacaggggtacgatgtcacgcttcttgctgcggagagtggcccaacggaggaggttggcctcagaggattctggcaaccgtatcgcaacatcttcgctttagtcgacgagctaggaatctcacctttcacgggctggaataaagcagcatactattctacggagggccttgctgtcgaatttcccatatttcataaccagccccgattaccagctccctttggagtctttgcatatccagaattccctaatcttcctttgagtgataggctgacatcaattcctgtcatagctgcagtcattgacttcgacaatactgacactgcttggaggaaatatgatgcaagtaaggaagttccattgtctatccagttagttcagattagtgtacgtgtcacttgtactacatgtcttcataatgggttatctttatcaaattattgttggtatcttcatctgtagtgactgcaaaagagctttttaagatgtatggttgctctcaaagctctacaaggaaatttttgagctagttactcaggctgccctgtttgctcctggtgagcaatgtagtgcagctgcaacactggggatgctgtactattatgtgttgtctcatcaggaaaattctgacttcttgctgtgccgtggtgaagtagaagaaaaaatttctctccttggctgcaatcattggagcttaaaggcttaaaatttgtagaaaataaagttccaacaagtttgactacagatgtggatagcggatgcatctcttctattgtttgtggtgatgatgtgtacgaggcagatgcatttgttttagccatgggactctcttctctacagtccatcgtcaaaaacagtccattcctacggtctgatcgagaattcaggaatcttcttcacctatctacagtcgatgtgatctctgtaaaattatggtttgataaaaagatcacaattccaaagttgccaatgtgtgttctggttttgatgattcatctggctgggcattctttgaccttacctcagtatatgatgattattgtgaagaatcaataaccattgtggaggttgaattttataatgctagccatttggtactcttaagcgatgatgatattgtctatgaagcttcatcacatcttatcaagtgcatacaagattttgagggcgcaaatgtgataagatattcaatcagaagatctcctaattctgtaatcaactttcttccagttgaaggagatgagccccatatagagacattgcgaagtctcaacagaagagccaatgaactgaagtcacaaatcccattctcagaattctttctccaataattttgttaggatttttctgtgtttgttgagcattgccattgttgtaggcattgttattaaggcggtaaggtaaagcatggcggcccagccctttgagtcgactagacgcttaaggcgtgcggcgaggtgtcgccatacatatgtcctatcctacaggagagcaatagaaacataccttgttgatgccaattttggagctccagtttcgcttgttccatgtagcatgtatcccccttacagattgcaacatgaacatgttgtgaattataattaatgtaagaaacaatttataatgcaatgattgaatg

SEQ ID NO: 51166 - DNA, 1079 bp, Zea mays
  Clone ID: MRT4577_146660C.1
tggcgcctcgagctgccgggacccctcctcacggctgcgcgccttttgcttcctcaacccctcatcatggaggaggatccagcaggcggcgaagacctctcttccacggccgccagcagccgccactcctactccggcgacgacggcgaggagagtggctggacgtcctacatcgactacttcatggagacgcagcagcgacgacgacgacgcaagcagggggacgtgagccgtgctgctggtgatggtccatccaccgacgacgatgctgggcgccgccgcagctctacggcggagtgcagtagtggcgctggagtgggagcctcgtcgtcatgcctgcccccaccggtgctcgtcgacccgccagtggtggtggtgtcgagaaggttgagcctcagggagggctggaggaggaagaaggtcctgcacgatgagtccttggaggatactgccacgtctcctatcagtagccctaagttgattgagttgagggatcccgacgacgcgacccaccaccagacgaaaacgagttgctgtgctgagatttcgcgttctaagcggaagaacagtacaggcggcgatgtaaacaacggggcaaacagtggaacagatcacacggcggctgtagctgaagacaaagcagcatatggcaacgatgaaggactaagcaatgcctgcttctcgtgtatagctgattgcgatgccaacaaattcaatggttgctagctgaaaacaacaacaccctacgtacgtacacacatgcatatatacatgtagtacacactggcacacatgagaaaattaaaggtagcagctagagagtcttgtgaaggttagccattccgttcctgtttgtgaaaagggtacaaaagctactagctttcacttcacacatgagagaagaagctaaggagaagagggtacaggctgctgtgggtgggttcgatggtaggtgagacatcgcaatgctatgttagatatggggtctattccatctatcttgtgaccaagattgttatcatcagttacacttttctgttctgttcaaaaaaaaaaaaaaaaaaaaaaaaaaaaaaaaa

SEQ ID NO: 51167 - DNA, 353 bp, Zea mays
  unsure (1)..(353): unsure at all n locations
  Clone ID: MRT4577_146661C.1
cnnnnttatattatatttaaccacacagagacaccaagggggcggtttaaatttaaggatccgcgtcggccaaaaccccaaaaattaaacttttggaattaaaatgtgggaccaatatttccgaaaaaagaaaaaagcgccccgatctaaaaagaagggagtatatataacgccagcgtgggataaaagaaaaaggaaataaaggacgtttgttttataatcaccacaaccccgattatagggagggaagaaagcaactgccagttggggaacaagaccacccaaatatccaacccaaaaactgttagttcggagggactttgggggggtacaagaccggtggggctacccgg

SEQ ID NO: 51168 - DNA, 648 bp, Zea mays
  Clone ID: MRT4577_146662C.1
cctcgaggccggccgggacttattacgagctcgatctccctccgccagtccatccatctcctcgttcgcagctcgcgggaagcatgcagctcgtcacctgccgcgccacaatcgcgacccttcatccggcgtattgatcactgcaagactccgtcaagcttactatgaccactactactctatctacgacgtacgcgagtcttccacaaggtgcagatctcaaagggtagagaaagagggtagcggatctcgacgaacttccctctccttgcatacctcgactgctccatgagcgtcaagacaatggcttcagacagtagcacctgtgatatcactctgagaaactgtgatacctccagcaagtactgcatggtgatctgacgcccgctgcatgcctgtgacttgcatcgagaagatcatcactgatacgttgcaaatgactgttgttcattatcattgactccaccactgctggaagtgagagtactatctcgccagatgcacacagccctgagaatggtctccttgggttcactacttgagtatacgacatgatttgctgatgcaaaaagatggatgcgaccactaccaaatactcctagggacgttatgaatgaattgtgaagaaagtctcatcctacctcaaga

SEQ ID NO: 51169 - DNA, 239 bp, Zea mays
  unsure (1)..(239): unsure at all n locations
  Clone ID: MRT4577_146663C.1
gggtccggcccacgcgtctcgcacacaggatgaacgggtgtgnggcatgtgtgttgttatttctgccgtgtgtgtatgtatacagggtgcggctgtatgggtagatcaggctatatatataacagactgtgtgctggtctattattgccctcatttcaaatacttatttttttcgccggtattaataatattattacatggagtatggcattagtataaaaaaactatgataacaaaaa

SEQ ID NO: 51170 - DNA, 496 bp, Zea mays
  Clone ID: MRT4577_146664C.1
aaaaacgaacccccttgcggggggttttccagttgtttttgttaaaacgttttttccctttaacctccctttaagttaaggtacataccagtcattcttaagccttcgttcctttaaaaccatgcttgctttgaaacccggcccaaatttgtcccctccagatggtttaacccccccaacttgttccaaaagggaacttagggtttcaatgtttgttttccagcccatttcagctcaccagggggggatggtttttttcttggaccttaattaaaccggaaaaggtttggataatggttttgccccatgggtaaaacaggtgttgcaaaaggttgtaaaagggccctttgccggggactttgtgttggtatcaggaagcccagaaaccccagttttcccggcctcccgttggggagttttttttttttggcctcaagcgggggcccaaaattaaccggtttaaaaaccctgcccgggaagcccaatttgggcgggg

SEQ ID NO: 51171 - DNA, 133 bp, Zea mays
  Clone ID: MRT4577_146665C.1
actgatcacaccccgcacacaaccgctatgaggggttttggttctggaggccgagcaagggtccctggtccggacacctcgatgtgaccatcatgcaaccaggggggagaccagagcactaagggatggcttg

SEQ ID NO: 51172 - DNA, 466 bp, Zea mays
  Clone ID: MRT4577_146666C.1
aattattacttatttgcttgccctacaaattcctgcgaagggagggcaaaactagtgcataacgtgccagtaggggaaacgcacacagggggggggaaaagaaacggaccaaacaccaacaagaaaaacgagggggacaagacattggccagcccccaggggggcaaaaaagcaactgaaggcccccaaacaaaagcgaaaaaaggggctggggaggtgaaaagtaacccactcccccaggaaaactgggggcccccaacaggggaacaacgaaaaggggggcccaaaagacccagaggcaaccccccccaaaaaggagagggggaccggccccaaaaaccagacggccacctccgggaacgtaacggggacacccactaacatcagggggcctatggggtgcacggccaacccaacgaagaggggggccaccacccccccaaaagagaaaagggcgcggggcccc

SEQ ID NO: 51173 - DNA, 357 bp, Zea mays
  Clone ID: MRT4577_146667C.1
ttgtgccacataattcttgggagaactgtggctttttatgtttttttgtcacatctgctgttattgtaaaggggaaaaacccgcctcagctggtcttgggggccccaaactttggatgccaacgtcagcagagcttgtgaaaaaaaaatccacctgctctcctaggggggggttattgccaagatcaaaaaaggcacgcgtccttagccggggctttttcatgatcatcaacagtgggggaagagatgccataaatatggtgggggcggggcgcaggccctttaacaccactcctgaagcgagccacccaacagggcaaaaccgagtgcgcaacccgagggacgatctcccctgatg

SEQ ID NO: 51174 - DNA, 335 bp, Zea mays
  Clone ID: MRT4577_146668C.1
aaaaaatgggcagagccttaaaaaccctttctccttttttttttttggacagaacatttgggaaacaagcgagggatggattatgcagtttaaatacaattttaggataaacaatcccccctaatttttaaaacaggccgcaagggaaaaatacaaaggattggaacattaggacaaggaaaagagctttcaacaaacaaccagaaaaatttacccaggggttccatttggaattcacaacttgcctatggggggttattgggctaccgggtacttgtaatttggagggatccatttttttggagtttaaggcttaggctggggaaccgtttttt

SEQ ID NO: 51175 - DNA, 830 bp, Zea mays
  Clone ID: MRT4577_146669C.1
cattgggaccctcgaggccggccgggtcgcccgagaaaccgtcgccggtgcctaccgttcccgtcgccgcccgtcctctctacggagcctatatcgctagggattggtgagttgtacggttcagagcgcttctacctgagttttctggtctttgatcagctgtgtgtaagggactaaaatttggaaagtgtcattcttcgaagttgacaaccaaccaatgtagcatgtttgacagcccatataaaagttgatctcatgaattcgggaagaacagcggcatccaacgtttcctgttcagcgggaaacagcggcagcttccctccctgcctccttccaggatttcttgggttcccaattgttttcgtcaatttccacttgttcaaggccattgttcgcagccctgcatcttccgttgtcttgggaatgtgtggaaggagccttccttaaattgtggcccaagacttcctagtcatcttgcggaatctcataggttctcgaagatggtttcctctgagatgacctctgtcacagtgacgcgtgcacagggctccaagctttttagagggaagatccttctgccagggggatcctcagatgttgtgccttctgaaaatgttgagttcgatttttctgatgtttttgggcctagtgctgtccatacacacacaggaagtgagtgttctcactctgggcagtccagcacctgtggctgagtccaacgatgaggtttacaatgaccctgatgtcattgtcaaacgatcccatttcccttggtggtccatcatctcttgttagtcaatctttgccatttagcaagcttacattacaca

SEQ ID NO: 51176 - DNA, 497 bp, Zea mays
  Clone ID: MRT4577_14666C.1
aaaaaaaaatacgcggccatattcaagtccaccgagccgaagcgcgccttcgtcgtacgccccagcgccacgtgggctgtgcgagcctggtaaggattactgcatgctgaccgagctccagcgcccgacccccggcatggacacagtgctctcaggtcgaaagaagacgggtgctgccgaaggctacaccaagacggagcgcagactgatcaaggggaacggctacctgatcgagctcaacggccagggatgctacggctaggactggagcccatgctgctggcgctgaacctccaggatgcacagacatcgacatgaggatccgagtctcgagccggagccactacatcaaagatctaccccattacccgggccggggcgaggggctcgcgacctactaccagatggacgtcgacatgctcgccgagaaggagggcacgacatccaaactggcggccacccgccacttgctgcgcctggagccaagacagtgtgag

SEQ ID NO: 51177 - DNA, 2435 bp, Zea mays
  Clone ID: MRT4577_146670C.1
cctcgaggccggccgggccgggaatacagccacgcgtccctccccgccctcggcctcggagccccgcgtccccagcgtcgctgctagtataatagccccgcgcggcgcaaccgcacgagctcgcccgagcaaaccgccgccgctgcccgccgttcccctcgccgctcgtcctctctacaagccaatagaaaagttgatctcatgaattcaggaagaacagtggcatccagcgtttcctgtccagcgggaaacagcggcagcttccctccctgcctccttccaggatttcttgggttcccagtcgttttcgtaaatttccacttgttcaaggccattgttcgcagtcctgcatcttccgttgtcttgggaatctgtggagggagccttccttagaccgctgccctataaggcattatttctggtctgggaattggccattgggagctgcatagctaaattgtggcccaagacttcctagtcatcttgtggaatcttataggttctcgaagatggtttcctctgagataacctctgttacagcagcgcgtgcacagggccccaagctttttagagggaagatacttctgccagggggccccccagatgttgtgccttctgaaaatgttgagttcgacttttctgatgtttttgggcctagtgcagtccagactcacacaggagtgagtattctcactcctgacagtccagcacctgtggctgagtccaacgatgaggtttacaatgaccctgatgtcattggtcaaacgatctcattctcttgttggtccatcatctcttgttagccagtctttgccatttagcaagcttacattacacaagacagagagttcattggaactttcagagtgcccttccaaaggaaaacaaatcaaccaagggtcccttagcgatgatgagtttgatgatgtaaaaaaggagaatgagggcgttggactagatgacttcgaagttctgaagctcgttggccaaggggcatttggcaaagtatatcaggtgagaaagaaaggtacatctgaaatatatgcaatgaaagttatgaggaaggacaagattgtggagaagaatcatgctgagtacatgaaagctgagagagatatacttacaaaggttgaccatccttttgtcgtgcagctgaggtactcctttcagacgaagtaccgactttaccttgtcctggacttcattaatgggggccatctcttcttccagctttaccaccagggtttatttagggaggagcttgcacgcatctacactgctgaaattgtatctgcggtcgcccacctccatgccaacggtattatgcatagagatttgaagcctgagaacatcttactggatgctgatggtcatgtaaggatctgttgatatattctctgcccatcctacatcatcttctgctcatatattggaagtttgaaaaaaaatgccccttcttgacttgtcgacgtgtttaggctatgctgactgactttggggtggcaaaagaatttgatgaaaacactagatcaaattcaatgtgtggtactgttgaatacatggccccagaaattgttcagggccgaggtcatgataaggctgcagactggtggagtgtgggagtccttctttttgaaatgcttacaggaaagccaccgtttgttggtggaaacagagacaagattcagcagaagatagtaaaggagaagataaagctgccaacatatttatctagtgaagttcactcaatgttgaaaggattattgcacaaagaagctggcagaaggctgggaagcggaccaggcggcagtgacgaaatcaagaaccacaagtggttcaagtctgtaaactggaagaggctggaggcccggcagatcgagccaagcttccggccgaatgttgctggcaagacctgcattgcgaactttgacgagtgctggacgaacatgcccgtgcttgattctccggtggccagccctgttgcggccaacagcaactttgtggggttcagttatgtgaggcccgcaccgttcctccagaagccgagtccccttggctaaagaactacttccgtgatctgatatctaccccagagttcaaataactatctttgagtccgaatcctatgtatttcttcaagacattagtgatgggaatctaaccttattgttgtgttgtgggtaggccagccaagcgcctattgcttgagaacaacagcttggcaagtgacattgtgcaatattgccagaagttcttattgaagcgccataattattctcctacgtcaatcgcttgctaggtctatctaattgcggccttataatgtaaggtgtcgtttggttcacatattgataacataacgggtaactgataatgtttaaaaaaaaaaataaaaaaaaaaaaataatttttaaatatttatatatattaatata

SEQ ID NO: 51178 - DNA, 2282 bp, Zea mays
  Clone ID: MRT4577_146671C.1
cctgggaagcggaccaggcggcagtgacgaattcaagacccacaaggggttcaagtctgtaacctggaaaaggctggaggcccggcagatcgagccaagcttccggccgaatgttgctggcaagacctgcattgcgaacctcgaggccggccgggcatgcgccgcgtaactgccgagctggcccgagcaaaccgtcgccggtgcctaccgttcccgtcgccgcccgtcctctctacggagcccatagaaaagttgatctcatgaattcgggaagaacagcggcatccaacgtttcctgttcagcgggaaacagcggcagcttccctccctgcctccttccaggatttcttgggttcccagttgttttcgtcaatttccacttgttcaaggccattgttcgcagccctgcatcttccgttgtcttgggaatgtgtggaaggagccttccttaaattgtggcccaagacttcctagtcatcttgcggaatctcataggttctcgaagatggtttcctctgagataacctctgtcacagtgacgcgtgcacagggctccaagctttttagagggaagatccttctgccaggggggtcctcagatgttgtgccttctgaaaatgttgagttcgatttttctgatgtttttgggcctagtgctgtccatacacacacagaagtgagtgttctcactccgggcagtccagcacctgtggctgagtccaacgatgaggtttacaatgaccctgatgtcattgtcaaacgatctcattctcttgttggtccatcatctcttgttagtcaatctttgccatttagcaagcttacattacacaagaaagacagctcattggaagtttcagagtgcccttccaaagtaaaacaaatcaaccaagggtcctttagcgatgatgagtttgatgatgtaaaaatggagaatgagggggttggactggacgacgtcgacgttgtgaagctcgttggcccgggggcatttggcaaagccggacagcaaagaactatcgttgagtctgaaatctatgtaatgattcaagacattagtgatgggaatctaaccttaatgttgtgttgtgggtaggccagccaagcgcctattgcttgagaacatcaccttggcaagttacagtatgcaatatagccagaagagccaaattaccgactttaccatgtcctggacttcattaacgggggtctcctcctcttccagctttaccaccagggtttatttaggtagttagtttcatctactttgtgcctatcaagattttactggttttagttttattaagttaccacttatcttgtagggaggagcttgcacgcatctacgctgctgaaattgtatctgcggtcgcccacctccatgccaacggtattatgcatagagatttgaagcctgagaacatcttactggatgctgatggtcatgctatgctgactgactttggtgtggcaaaagaatttgatgaaaacactagatcaaattcaatgtgtggtactgttgaatacatggccccagaaattgttcagggccgaggtcatgataaggctgcagactggtggagtgtgggagtccttctttttgaaatgcttacaggaaagccaccgtttgttggtggaaacagagacaagattcagcagaagatagtaaaggagaagataaagctgccaacatatttatctagtgaagttcactcaatgttgaaaggattattgcacaaagaagctggcagaaggctgggaagcggaccaggcggcagtgacgaaatcaagaaccacaagtggttcaagtctgtaaactggaagaggctggaggcccggcagatcgagccaagcttccggccgaatgttgctggcaagacctgcattgcgaactttgacgagtgctggacgaacatgcccgtgcttgattctccggtggccagccctgttgcggccaacagcaactttgtggggttcagttatgtgaggcccgcaccgttcctccaaaagccgagcccccttggctaaagaactacttccgtggtctgatatctaccccggagttcaaatatctatctttttgactccgaatcctatgtatttcttcaagacactagtgttggagatctaaccttattgaggacaacaacttggttggtgattcccaaaaagttcctattgaagtgccatgattattatccaaaaaaaaaaaaaaaaaaaaaaaaaaaaaaaaaaaaaaaaaaaaaaaaaaaaaaaaataaaaaaaccacacacaaaaccac

SEQ ID NO: 51179 - DNA, 242 bp, Zea mays
  Clone ID: MRT4577_146672C.1
cctcgagccgccggaactagttcataactgcacggccgccacaccaccccgaccggaccctccacaacaatggccaccgtcctgggcagcccccgcgcgccggccttcttcttttcgtcgtcctccctccgcgccgcgccggcgcctaccgccgtggcgatgcctgcggccaaagtggacatcatgtgccttattgccattaggaactgaaaattagatatcgtaggcagatcaactctgcc

SEQ ID NO: 51180 - DNA, 261 bp, Zea mays
  Clone ID: MRT4577_146673C.1
atggcgcctgggtcgaccacatatccgaccctcaccaagactaactacaacgactgtgttctgctgatgaaggtgaaaatgcaagcacgcgggctttgggaagctgtggagatcggcgacgtcgacgagcgcgacgaccggatggcactggatgtcatctgcagcgccgcgccaccagagatggtggccacactggctatcaagcccacggcaaaggaggcgtgggaaacactaaagacgatgcggatcggcgatgaatga

SEQ ID NO: 51181 - DNA, 484 bp, Zea mays
  Clone ID: MRT4577_146674C.1
ctgtaataaactatttttttgtttttttttcatttttaatgtttgttcatttttttgatgactactatgccaaacgtttttttttgatctccgtatactacgtacaatgcattgcaaactcataaccaccagaatgctaagagctgaaacaatacattgaaggatcatgatcagtatgactaagacgttccattgctcgctcttcttgagctgctaattgtactccaaccagttgatcccgtcctcgcctgcgaggatcaagcatgatgtacgcgatgcccttatgcatgcccttgagcccgcacatggagacccacgtgcgggccttcttgagcaggtaaacagttgctccttgtactccgccatgcccgtgtggatgtacattttttgccgggccgggttcgtttgctcccggctcaaaaccaagtccatccgtaagttgtccggcgccattttcttaatcttctccagatcctggttgtac

SEQ ID NO: 51182 - DNA, 360 bp, Zea mays
  Clone ID: MRT4577_146675C.1
ttggggttgtgctcttttctttttttccttttttctgggggttttttctttttttcgctttttttctttttttcttatttttcttcttttcttcttttttttttttcttttcttttaaaaacaactacctgggcgcacagggccgctcaccccgaaacaattttgaggggggggaccagcggtcttttactaacagggcatgaaccccgataaacccaaaaaactacaagacccccgggggggccagtcactggtttgacacactgccttaaaaaaaaaaaccaaggtcctttttaaaaacagggtttaaaaaacagggcccaagaccccaacataaaatggtcccccctatccccttga

SEQ ID NO: 51183 - DNA, 355 bp, Zea mays
  Clone ID: MRT4577_146676C.1
tcttgccgtcgaaacgccagtgagaaacagggctcttaggcttacaatggaggcctgatccattatgcccttcatgccttcgctggacgtaacggcaaccgtagatgaagccatgtgaatgggaacatacaataacaggcatgatatgcttatgagaggttaccacaccataattacaaactcgctgttcatgccctaaataattatcaacctggtcagttctaatgtcaaggatacagagtatcaaaacaaaggattcttagtgattattgggataggaaagagttatctacacttaaactttcaaaaagtatgaagcggaaaaaccaacaagtttataaatatttcaaaaagg

SEQ ID NO: 51184 - DNA, 999 bp, Zea mays
  unsure (1)..(999): unsure at all n locations
  Clone ID: MRT4577_146677C.1
ttgggtacctccaggacgccccacactgacatttcactctcggctgctggagtgtcggccgctgccatctgcctgccgctcactcccacgcgccgcaatgtgccactccccactcggcgccgccaccaccaccgcgggggcgctagcgctcctcttcctcctgccgctagcctcggccgccgccgccgccgccggcaccgcggcgaaggcgacgcccaacatcacggcgctcatgtccaagggcgggtgcaaggcgttcgcgtcgctgctggacaagtcctccgacgcgctgtcggcgttcgagtcggcggtgggcggcggcgtgacggcgttctgcccgacggacgaggccgtgcgcgggttcatgcccagctaccggaacctgcgcgcggcccgcgtgcgctcgtctacgacagggaccccgtcgccatctacgccgtggacgcggtgctggagcccgtggagctgttcgaccccgtggcggacgcgccgacccctgcgcccgcgccggcgccggcgctggcgcctaggtccgccaagcggacgcggcaccagcggcggcgcggagcggacgcgcctggcccggccgccgccgacgcctcgccggccgaccagaggaaggactacaagaagaacgcggcggccccgtgccgcacgcggtggctcgcgaccgccgccgccgctatcgccgtggccgccgccttggctgcttagggcggggtggtttaaagattgctcggccacccagctgttgtctttggatggagacgccatgcctttttggttcttggtcatgctcggttgcttattacttcatcgattactgccgttgttagtatgaagtatgaacaaggtcgatatgtgacctggtggtgtacatcaaaactcaaatcttgttgattcgtaagggcgtggccaggtttggttatgctgaaaaaactcacacagagcgagcagttcattcttcaaaanaaaaantcatctacgcaaaaataaaaa

SEQ ID NO: 51185 - DNA, 218 bp, Zea mays
  Clone ID: MRT4577_146678C.1
gcagcgtcaacagcggcaggcgcataacattgaatcacataagccaatcttacaaaccaccagtcgcgcaacgcagtgaaactggccagaagaccgaggcgcgaccatcgtacagaaagagggggaggggaacacgggattataattcgacgccggaattatctttgtgcaacgtccgggcctatctacggagcgtggggcccctttgcctgacccag

SEQ ID NO: 51186 - DNA, 883 bp, Zea mays
  Clone ID: MRT4577_146679C.1
gccggtccttcctctagcctggtttctttgtggcgatgagctgagcaacaagtctggtttgtgtgaaggtatttggctcgaggccccgggttctttctgtaaaatcacaaagccagcccatcacctcagtcctcacactgacatttcactctcggctgctggagtgtcggccgctgccatctgcctgccgctcactcccacgcgccgcaatgtgccactccccactcggcgccgccaccaccaccgcgggggcgctagcgctcctcttcctcctgccgctagcctcggccgccgccgccggcggcggcaccgcggcgaaggcgacgcccaacatcacggcgctcatgtccaagggcgggtgcaaggcgttcgcgtcgctgctggacaagtcccccgacgcgctgtcggcgttcgagtcggcggtgagcggcggcgtgacggcgttctgcccgacggacgaggccgtgcgcgggttcatgcccagctaccggaacctgagcgcggacggcaaggcgtcgctgctgctgttccacgcggtgcccgtgtactacacgctgcggggcctgaaatccagcaacgggcccatgaacacgctggccaccgacggcgccgccagcaactacaacctgacggtgcagaacgcgggcgaccaggtgacgctgcggacgccggcggccgacgcgccggcccgcgtgcgctccaccgtctacgacagggaccccgtcgccatctacgccgtggacgcggtgctggagcccgtggagctgttcgaccccgtggcggacgcgccgacgcctgcgcccgcgccggcgccggcgctggcgcctaggtccgccaagcggacgcggcaccagcggcggcgcggagcggacgcgcctggccc

SEQ ID NO: 51187 - DNA, 513 bp, Zea mays
  Clone ID: MRT4577_14667C.1
cccacgcgtccgactttgggaagctaacatcacttcacttccatgcttggtccaagggcctgaaaactggaatgtactatctacgcacacgagctgctgctgatgcgatcaagtttacagttgataccacacttctaaaggagaatgggaatgtggtgagtaatggaaagcccacagaggaagacgtagaagctaaaatggcacaaatggtctgttctttgaacaaccgggaagagtgcatggcgtgtggaagctagactggagctccatctggagttctggacaccgcacttccttatttgtgaccacaacattatataccaccggctgattattggagctcaataaccatagcgaattctgtgatgtaggttgaattaaaaattcccataatgggaaatatcttgttccctggatacagctacggatctctggtttgtattgctctactgagatttatgctgccggcctgcagccaatgtatatatctacttctatcaacgacattgccct

SEQ ID NO: 51188 - DNA, 645 bp, Zea mays
  Clone ID: MRT4577_146680C.1
tgggaccctcgaggccggccgggactccttctatctggatacccttcctctcctcgcttctgctctcaacaaatacccttatcgataccttttatattctactctttcatatacttctctaaatgcttgccatacaactcctcattaatgctcgttttgctgctcgctgagcgcgtcgcccgggtgctcgcgtaccaaacctccatcaccgtgcccaactcccacgctatgcagtcaaccctgacagactgctccaaggaaatcggggaccagaacacactgccgcagctgccgctgcttccgctgctcttgcagtcatgacagtatgctacatcttctatctacaatcagcagctacgcacgatgtctcgtacctcatacactgtacgagggtacgtgaagtcaccattcatcttagatcaaggagaacacccccgagtcaaaccagacgatacaatgccttcaccaattcgctcaaagttatgctgagctaatccccttcgtcaagagctacattgactctgtctgtgatgacctctatgtgatacgagagaaacacgtggactaacaccacagcattgcacttcgaatcatactcatgagatgcgaccagatctgatgaagggcgacatgacccttgtcact

SEQ ID NO: 51189 - DNA, 581 bp, Zea mays
  Clone ID: MRT4577_146681C.1
gtggtgtggggggggggtgttttttaaatttttttttttttttttttttttttttttttttttttttttttttttttggggggaaaaaggccccggtcccctaaaagccttagaggccacaaggccccttccccgggggaaggggcctttcccggggggggggggggggggttttgatacgggggggggcccagcaaaaaccccaaaacaaaaacggccccaaaacgggccccaaaaaaaaaacccaagctaaaatattcacgggggggaaaacccccagggcctgcccgagcccacgggttacaaaaccaaaaggggggcaaactttggggcccaaatggccaaaacagaacatggcgaacttttaaaagccccggtcggacagggaaatgccgggcccctcccccaccattttgcattgccccggagaaaatgggttgggcaaaacaccaaaaaaaaaggacaagccgggttttttgatagaaaaggcccccaggccctctttttctggggggaaaaccccagggtcacctgggaaacccgggccctgggccccccaagaaaaaaaccggggggggagg

SEQ ID NO: 51190 - DNA, 510 bp, Zea mays
  Clone ID: MRT4577_146682C.1
atggatgttacagacagtagatctactaggaaggtaaacaagatagtgatacctaataagataaatgcacctcaccacaacctccatctcggccacacgctcaagcccatcgtctggcacgcgctccgtagcagcgggctggacgagtccggcacgagcgatggcaggggcggggctcggtggcgaggtcaggaggaggcagggcgtggcggacttggaacaagagagaagcatgtgttggcacgtgcacagactcctgaccgcgagaagcgtagaggccctgaggaagacgacaatgatgagatggctggggcccagggaggtggccgcaacctccatctcggtcgcgcagtcggccccctcgcctggcgcacacttggcatcagtagactccacgagtccggcacaggcgatggcggggacctaggcctagtggcaaggtcgagaggaggaggcagggagtggcggatctggaacaagagagagatgcatgtgttggcacgtccatag

SEQ ID NO: 51191 - DNA, 803 bp, Zea mays
  Clone ID: MRT4577_146683C.1
gcgggcgggtagacagctagcttcatcagtaggatgggcagcgacgaggaagcggcgctgctggtgccggcggtggaggagggttgccccgggtgcgtgatggagcggcggaaggcgagcagcaacggcaggatcccctacagcgagctgttcttcgtcgccgccacctccctcgcctcagctttaccgatcacgtgcctcttccccttcttgtatttcatggtaagggacttccgcgtcgctgaaacagaggaagacatcggattctatgctggttttcttgctgcgtcgtacatggtgggcagaggcttctcttccatcttctggggcgtcatcgcagaccgcgttggacggaagcctgtcatcacgttttcgatactgtccgtgtacggtcgtattcagcgcgctgtttggtctgagcacgacgtactggatggcgatcgccacgaggctcgtgctgggcgctctcaacggcctgctcgccccgataaaggtcagggtccggtgtttcagcaagaactcatctcgtctgctacattaactcgtgtgtttatttggaaaaagaagaagtttgcatgcatgctgaatctgatcgaattcagttgcgtctgtatgtatgtatgtatgtatgtatgtatatgtctacgaacaatttcaggcgtactgcgttgaagtttgccagacccagcaccaggcgcttggactctcgcttgtaataatctcatcaacgaccgagctcttcatcgtttaataaacaactcttccgtttttttttcaaaaaaaaaaaaaaaaaaaaaaaaaaa

SEQ ID NO: 51192 - DNA, 389 bp, Zea mays
  Clone ID: MRT4577_146684C.1
gtgaaaattattacataaaggttgggctccatggcgaactatacattaatatagatgtttgcattaataggtattttatacactgacaatcaccttattctccttcttgagggctctattattttatagtacaggacatgcatgcgcacataatggattatactcacgaacacaaatattggtagcgctagccgaaacacacgactacagaagaactaacatgtgcaccgcatcctccaacccaaggtcgcttcactgctcacttgccgtgcccactgccagcgtaagagccagcacgagccccatcacacgagccagcgccagaacccccatatggaccagtgccagagccagcgtacgagccagcctcagagccagcgtacgagccg

SEQ ID NO: 51193 - DNA, 695 bp, Zea mays
  Clone ID: MRT4577_146685C.1
cccacgcgtccgcaatgcctctgatgtgtgctggattcaccgtatatatgcccatgatttggcacagcatgaaccaacagagtaaatcacttagcgtagtcgtaattggactgggtggattgggccacatggacttcaaatttgggaaggcattttggttgaaggtcaccgtttttagacgagtgaatcgaagagagctcaagccattaatctcctcagataattttgtcatatcatttgacgagaaacagatggaggccctaaaaagctccctgcacttcattattgacactgttgtgggtaaccacccgttcgatccctacctatcgcttctgaaagctggtggtatattgacgatggttggctttccaagtgaattcaacgtgcatccttggaggtggaggaaccaatgggatccatgaaatgctgaacttttgtgcatcaaacaaaatatatccaaagatcgaggtcattaaaatggacaatatcaacgaggatctcgagacatatacattattggaaattatggtcatcaacagctcggcacacaccaagagtgcactgaactgaggaagtattagtgcaatgttcctctataatgtcacattggcaccaccgtccttatgcacaaggatatttgttctcatattggtaatgtaaaattttgtttgtaatttttacatacgaataattcc

SEQ ID NO: 51194 - DNA, 313 bp, Zea mays
  Clone ID: MRT4577_146686C.1
tgcaacagaagcacagcactcgacacccgcctgccccggctcggcccggcggcgatcgatcgatttccctcatctctggcgtggcactgggttccgggtaaacatgtgcgagggtggaaggccggaagcagcatccatggcctcgcatcgccggccacagtcggcggggctaagcagcggcctcccggtcccggagcaagaggctgcgggcggtggcggaggaggagcggcggaggcgacacggaggcccagagggtggcgagccgtcgccttcatcatcgggttctacgcggcagcatctatagcgggcaat

SEQ ID NO: 51195 - DNA, 574 bp, Zea mays
  Clone ID: MRT4577_146687C.1
cccacgcgtccgtccacgcgtccgcccacgcgtccgagacgaatggcgacactctagagtatcaaaaggtcctgaaccaagaaatgaggcccgcactcaaggaaatagtgtgggcttggcaagaaaagtaaagaacaaagaggttgcaatgcgattggtagctttgttcacgagacgaggaagacggttcatgattaagggatgtaaaaaaaacatgtgtcgcagatgatccgagcccatcagtgttgtcttgacttaatccccaagaagaaaaataagtaaatttacacagaccaggggaaaaaccgtgggtgctcagctgtatggaatcatagacgtcaagtacaaagcatttttttaattctgttgttcttattttacttgtatgattgcttagcaaacccattatttggttgttgttttgctttgctttcctgtgggcagcatgaccaggacagttcaccaacccaacccggcctacttataattccaaaagacggctctttgacattcagttttttttaacatcctgtaatcttcgtactacgaaacattcagactgtttcatataaac

SEQ ID NO: 51196 - DNA, 287 bp, Zea mays
  Clone ID: MRT4577_146688C.1
cgaagccaggatcctcagagcggcctgtcctaacaagtctccctcccaacaaaaagcaaaaccgacaccagcgggccgaattaaagagagagccccaaggacacacaaacacaagacagcacgacaacacagaaccaaaaagccaaggcaccgcagaacccggcaacacaagcggagccggacacacagacaccgaacgccacaccgaggaacacaccccggaccgcaccgcaaaggagacccagggcgagaaccaaccgcaagcccacagaccagccacgccggag

SEQ ID NO: 51197 - DNA, 280 bp, Zea mays
  Clone ID: MRT4577_146689C.1
gttatcgcctaatcttgcattcatacgaggtcattctctggattgctaatcacaactcaggtcaggtttacacttactcgagcctgaacagagctcagctcgatgataccctaagtctgggattacctgaatctccaaggacataacaccatatttttaaaattcttaggagcatctaccacacttgaaaccttattactactaatgtcatagcgagagctttcagtatcatatcatgcactgaatactgcatcacatatcaactcataaacactgtcta

SEQ ID NO: 51198 - DNA, 812 bp, Zea mays
  Clone ID: MRT4577_14668C.1
aaaaacgccccacttccgtaccttcccgaccaggcgaccaccgcctccgctctccgtcgacgactccaactccaactcgaaacaaaccccaaagccgacgccgccgccggccccctgccccctgcccccgccgaccgcgccgaaaacatggactcgcttcttgccacctacgcctcttccgacgaagacgccgacgagagcatccccacacccgctcccgcgacccgccgcagcgaggccagcggaaagcccgccggcggcatcttctccgcgctcccgcaacccaagtcggcgcctatcttctcctcgctcccggcgccgaaatccgccccgaccttctcctccaccccgcctcccaaatcctccgcttcctccggaaaccctaagcgcgtcgtccagttccgcccgccgccgatccgccagaccaccggggtcagctcggacgaggaggatgacgccgagaagcgccgtcccagcgctagcgaggcgcccccgcccccgctctgctggatcggggccggtgtcttcgttcctcccggcgcccaggcactcgcttggcttcggctccggcgcggccaggaggtcggccgtagacaccgccgggccggagaggtcaaatcttggtgctgctggcccctctagctcggctgtcaacagaggagcgccagaaaggtccgatactggccctgcggacgaggacgatcctgagggaagcagcgatgaagacggcatgcctgctccggagcagcagcaagaaccacaggatcttggtgctggagctggagacgtccaacaccagggctatgatgctg

SEQ ID NO: 51199 - DNA, 334 bp, Zea mays
  Clone ID: MRT4577_146690C.1
aagcgatgacgtcgctcaccatgatggagcccttcgacgtcgaggaggaggccgtgccatcgcgacgagggagcttcaccgagaacagcgccgcccaggacgatcgctgcaaggagcccgaaacgctaaaagcaaatgaggacaggaccgacgacgacgagagtagcgacgccatgctcgcggctgctgcgacggacgtgccaaaaatcggaggccccggcgccgccatggcgggccccaagaacgagacccccgaggagaagaagaaagacgcggccatctgtgccataatgcccaccgccaaagaaagccacaaccgaaaacaaccgcgccg

SEQ ID NO: 51200 - DNA, 796 bp, Zea mays
  Clone ID: MRT4577_146691C.1
aagaatgaacaatcttgtttccttcaaacctgtacatgtgttggctatctaggatctttccccacaaatcttacacttacaacatcactgacaatcaccttacagctgaaatggacaccgtagtttgcaactgtattgtcgtcataggcgcatgtaaccttccttgtgacctttgaagagtttcagatgtcttctgttctgagagttgctccgggtcagctcacggcgggttctccatgccgtcacatgagaatataatgaaggaaacaagaaacacagcaacagaagtaacaagattgcaacacatattagcatgacattcatgaagccatcccggtttttagggttcttgttctgccctgtccacggcacaccaccgacgttcatcccgaaaactccagtgacaatggaaagaggcaggaatattatggagagaaatgaaaggtagtacaagcttttgtttatctgctccgattgccaactgtccagactagcctgaagtgtggtgattctatttgtaatgaaccctaggttttctttgagccttctgagacgacctatcagatcttcaagggctgctatatctcctgttgcgaaccaactcttgctcgagccgaattccgagcttacgtacgcgtgcatgcgacgtcatagctcttctatagtgtcaaattgtagcgtctagtctgtgacttatgttccatatactaactggaattaagttggtttaagttaacagtatttgtagttcggtttatgttatcttatgtttgttgcaaaattttatgatctttat

SEQ ID NO: 51201 - DNA, 411 bp, Zea mays
  unsure (1)..(411): unsure at all n locations
  Clone ID: MRT4577_146692C.1
cggcgaccannnncccacaaggcncacaagcnccnanagcnncccttcnncccccgnaccncncaccaacggngncnncggnangagaaaacccaangcgggagcccgagagganccaacaggcaancgcagcnggcancncaccnnaaacacccnngngccnccaacaancagcagcccaaaaacagcagnnaccnnnggngcanngannggcacaaaacagcagggcacaacaaccacaacaacnggggccagcaaaccnggcngccaacncncagcaacagcnagggcgnccaggcaaccaacnagcngcagngaacgcggcnncnaaagagcaacaacaacaacgaccangcagccagcgagcagccgccaacccccagcaaccccgaacagccaaccaacggacag

SEQ ID NO: 51202 - DNA, 524 bp, Zea mays
  Clone ID: MRT4577_146693C.1
ggtggggggggggttttaaaaataaaacaagatcgaccaaacagttcattcaccacctagaaatgtgttcaaattggagtctgcgcaaaaataacacggggtttacctagattattactgttcacaaactgtcttccgtaacactttaaaacaaaggactgggggggggccaaaactgatgacaaagcacagctcctcattacttgataggggcaagaatctgcaactgagaccccaacttctcctgggctgccttttcggctcttgacacacaccttggccaattgcttcttcctctctttggcgaccttggacttctgccttgctcttctcctcaagtgctctaaccgtggtatgcacgctccacccgccgacttagagagctctccgaggaggcggcacttgtgtccaggctggtagcctcagaaccttacgcgcgtcagggatgaccatacgcttggtctcgtcgtccggcgggcgggccccctcgtacctcttgagccttcccagagggcgctccccct

SEQ ID NO: 51203 - DNA, 1870 bp, Zea mays
  Clone ID: MRT4577_146694C.1
gcgccggctcctcgcccaccaatctgtacacactccgacgccgacgcgaaatcgaaaggaccaccaagctcaaaaaagcgccgcccggcgccgatgttgctgcggcggatgcgatggatgtcggagggggacggccggtgggagctggatgcggagaccccggtgacgatggagggcacggcgcgccccgtcccgggggaccccctgccgctggggctctcacggggctaccgcatcacccgtcccaagcagctagacttcttccaccggttcatggcgtcccctctggtacccaccttctccgccatgcgcgacggcctctccgtcaaccacgcccacattttctacatgacagacaactggtcttctaccatcttggagaaaatcaatgttaagaagcttgtgtctgtcgtgaaagagaaattagcaaatcggcaggaagaggcctcttggaccaaagatttgaagaaccacttgcatgatgttatgtctttaggtgtaggcacggaaatcttgatcacaccagacaccactttgctgctggagttatttgatatcaagaaaggcaatcgaggaaaagcgatatttcaccacgagcttcctcatcataatattacattccaagcatcttggcctggattatttgttgataagaagggaacatattgggatgtgccattatcattatcagctgaccttgcttcagttggctccagttctggattgagttatcatctattattgcagcagaatagtggggaaccaaaatgttttgggggtgatgaaacagatgatgttcctactgctctgttacctggcctatgtgctaaagtggctatttccatgaagaaaagcattgatgcttggaggaaaaaagaagataagctaaaaaatgttcagccatatgatgtatttctctcggattcacatgtttctctaactggtattgttggtggagtagccagtggatatttgggagactgttcaaggagagtggctatacgagatgaaacacacaagagtaatgcttttataatgtttgacgagaggaataaacgtgctgcctttgcagacctctttgcttctgttactttcactgctcaatacgggaattttcagaggctttttctggatttgactaaggcaagtgcccgatttgatatcacctctggttcattgttcttatgtggtgcttctcgccttgcacaagatttcttcttctctagaagacctgatgtagagacattctgcgatatttgtcctgatgtgacagtttcctttcaacaacagatagttgggcccttcagttttcgtgttgaatcctctgtagccattgaccccagaagccaggaccattttgttcgagtggatgatccgatcttcgcaattgattgggctctcaaagtcctgggttcagcaaaggccacagcgtggtattcacccaagcatcaggaggccatgatggagctccggttctacgaaacctgaagctgttcatcgtgaacgttgtataaaataatgcctggacttcatgatcgctatggtcgctgatttcactaggatcagattgtatgaatggctgacgccgtgatggtcaaatgaatcaacccccgtgtaatatctattcatatcctgctttaccggtttgagtcatcagtttttttttgcttcaggtgatgtagcttgtgctgttctcggcgttaacagaggaagttaatactgtttgagtctttagtgaacttgctaggtgaaccagtctgagtttctgattgccttttgtcagtgtacaaaaaccatgcccccaccatttttatttttttaaatatatgaattttagggtgagcttattaaataaaaaaaaaaaaaaaag

SEQ ID NO: 51204 - DNA, 114 bp, Zea mays
  unsure (1)..(114): unsure at all n locations
  Clone ID: MRT4577_146695C.1
agtgtcaaaagagtcacttgtgatgttatatcaaatnntcagaagtgtgcataacacgagtggtatatggaaccgatgtgggaaggcatagtctacanaaacnntctggtttca

SEQ ID NO: 51205 - DNA, 561 bp, Zea mays
  Clone ID: MRT4577_146696C.1
ggaacaaacaggggacacaaatggctccataggttacaaaagggaaggggcagccggaaggtatcctgatccatcgccattggtttacacacagacaaaacaaatagtaccgaccctaggcttgaagtcgttggcagcataactatggctagcaaaaaaaaaaaagagacggtacaggcttccgggcccagttgaaacccagcacaaatttttaaacaatcaccagccacaaacatgaaacccccccttaatttatttcctccggagcttcgccttaaacctttcaaccggggcccgaagggggccttcgtccttgttgaaggggaacctaaccaatttttttcccttttgggggccgaggaaaaacacgctgggcggaatagcgcaaaccccgacttcggggatcaagtactcgaaaaactttacgtcgttgtcaaaaccgaaggggggggggccaaccatgaggtagtatgccccactcgaggggaaaacaaagaaccctgcggtttcgagtccttccagaaggatagcctttttcgggctgaagccccttttaagttc

SEQ ID NO: 51206 - DNA, 587 bp, Zea mays
  Clone ID: MRT4577_146697C.1
tccttcctcgttatctttcaccatgccttcagcagcttcccgactcgtgcggatcggccgtgccgctcgctcagctgcggcgaccacatctcgcttcgcccaattcgttgaagcagcgatcctctccacgaaggcggtggcgaccaaacctcacgctatcttaggttcagatcgtgccgcctccgtagatctgcgtatgaaccaatccactgtccatgctcctccacgcgccatggcacctgcctccctgacactcagtcacccagaagaacaaaggcaggaaggtaaggtgaagtttgtggtagaggagaaagaccttgagtcagaagcagccctttgggccttgtatgagcgcaggtgcaaagatttcaaccaaaagcgtgatcatgatgagatggttcactggttcaacacattcaaggagactgtcctgcttgtccaccgtcggaacaatgctaatctgccctacaaattgggaataaacaaattcgcggatgggaagctaaggaagctctgttgctgtcatgatcctattcttaaaaagattgatgaggagtttggcgacaaaccaggtgaatttattctag

SEQ ID NO: 51207 - DNA, 268 bp, Zea mays
  Clone ID: MRT4577_146698C.1
ctctgttatttatattcactaacgaatttaacaaatgttcttacatttcaggttagatttgttctgtcatttgtacattggaggatggtgccgcaatggtagtcatattctgtctcttatggtttggttgcaggaacaaatgttgtgacccgtctagatattgtttggttaccttgtcatgcaatagtatatttgcttggagtgtcattttaattgcaaagactaaagctctgtttggaagtgatctttatatgcttgtctcatctac

SEQ ID NO: 51208 - DNA, 282 bp, Zea mays
  Clone ID: MRT4577_146699C.1
tcgttcctgtccccctcccgagtcccgggccgtctgcctaacccacgacgagacgtctcctatccgatccaagccgccatggatttcttcaagtccatcctcgccgagcccgatccggacccggcctctccgacgcctgatcaggagcctgatccggagccggaattcgccgtatccgtcttatcctccaacttcggcgggtgcggcttttgtttcccgttcttttttgtctctttgtataattatcgttatcttttttattatatcctcatttcttttttt

SEQ ID NO: 51209 - DNA, 609 bp, Zea mays
  Clone ID: MRT4577_14669C.1
taggggccttttttttttttttttttttttttttttttttttttttttttttttttttttttttttttttttttttttttttttttttttggcccccaaaaaaacgggcggaggccccctttggtttaaaggaattggacaacaaaaggccgggatggaaggggtacaaaaaaaaataaaaggggggactaaacgggcccccaattgggactatggcggcaaaaatttaaaccaaggtcaaacccccccttgggacccaaaattcaaggggggaaaaccccccccccccggaaaagggttcggagaacccaaaacggaggctgggcgggttgggcaaaaaaaaaggaaccactgccggtgggaaggggttggggtgtcccccccccccaggttggaaaaaaaaggggggggggaaacccttccggggccctcggggggaaaccaaaaggggcccccccagggaaaaaaaaaacccttgggtttgggagggccagaaccccacccttaaacccccgggttccccccctttggggggggggaaactttggaaaaacctgggggaaaacctgggggccaaatccacaggccggattttttacccggaacttc

SEQ ID NO: 51210 - DNA, 642 bp, Zea mays
  Clone ID: MRT4577_1466C.1
gcgcttaaagagccacctaaagaggagcaaaaaatgaccagcgtcacagggctaccacgagaacgtccacttcatcaccaagcacgaaatcaatatgctagctcagatgtactacactgaactgcattatcagggattatctacgaagagaccctggtgagcctctacgatcttcctccagaacgacatgccgtccacctctgaatctacatcgagcgccgacacttcaagacagctaccggcatgtacttggaatacacacgtcaaaggccaaaagcaaatgctactacttttgccacgattcatgctgaatggcatactgtacttgatgaagtgaaagactggatggagttaggaccacatggactagatccatgtcatgatgaggtcgaggactagtgcataggacgcatacttgaagctctatctctagtgccataatactgtataaggcaaccaaagaaaggagtattagacccggatgaaatcaagtactagagaaacctcatcaacatgttgatataatacggcatatagccatatgtaacaattttccactgggatgtatgtcaagtactagaatacaagtacggagtgttcctagatcagagtcctaacagcattgtagaagattacacatac

SEQ ID NO: 51211 - DNA, 1176 bp, Zea mays
  Clone ID: MRT4577_146700C.1
ggacgcgtgggcagccatctcgtcgtctcgtcttctctaccaccaccaccactgctcgttttacagaaaccggaaggaaccaaacgcctttccgccccgggccgccgctacccaagcccagcaaccaccactcgttgtcgtcgactactaggcggcaagcaggcgtcctgtttttttttttggtcctcgtcgtcgtccggactccggacaggacaggacatgggcgcggaggcggcggagcgcgacagaatcaggggcccgtggagccccgaggaggacgaggcgcaccgacaacgccgtcaagaaccactggaactgctccctcaagcgcaagctcgccggcggcgccgtcgcgtccggttcggcggtttccgctgaagacgccgccgaggccgaggcgcgccggggcaagatgatgatgagcatctcgccgcccgacagcccctcggggtcggggtcggggtccgaccgtagcgacctcagcagccacggcgccgggtccgggtccggccagatttaccgccccgtggcgcgctccggcgggttcgagccggcggactgcgccatgagccgtccgcaggaggaggacccgctcaccgccctcagcctctcgcttcccggcacggaccagcggtttcaccaccacagcgccgccgccgacagccacttccaggagctcccgccgtcgccctccccacccgcgccctcggcctccccgttcagccccgagttcgcggcggcgatgcaggagctgatccgcaccgaggtgcagcggtacatggcgagcgcgggcctgcgcgccggctgcggcgccgttggcgcggccgacctctgcatgccgcagctggtggacggcgtcatgcgcgctgccgccgaacaggtcggccggatgcagtagccccgcgcccccggcgggggcatcaaaccgtcagtgctcccaaatcgtcgtctagctagggcgaccgcaacgcaacggttgttggagtagcaaacttggttttaaggtggagggaaaaattggctgggctgaaagcagaaagccttgtaatgtacatgaaagaaacggaacggatggcgcgctacaatctgagctcgccattgccgcatatatctgctttaagagagcattgcgctgccttgcctaatcgaaacgaaacgacacgaaatgttgcctgc

SEQ ID NO: 51212 - DNA, 890 bp, Zea mays
  Clone ID: MRT4577_146701C.1
tttttttttttttttttggaaaatctctacttcatagacaataacattaacaaaagcatagaatgaacaattacaagagctcgcatacaaaaatgtaagacacgaactcagcatacgcaattatgtaaatacactcgacattctgtattcttctttgaagcatccatcatctgctttccataacatatgtgaagactcgggaaatagatggctcgccaaagaaatatgccacaaaggatagaacaaagaatatgatcagatggtttttatgctaattttcgcttttcttcttcagcagaccaccgaatctcttgagagaaagcttcttcttatgctgctggtgctgtttagttggtgatgtcctgccactgctctgcttagttgggagcaggccgttgctgtcaacacctgcgtcgcccctgtttgattccaaatcaacctgcgagtcgccatcgttctccttaaccttagatgaatcgtagtcagcaaagttgctgttctcccatactttggcaactaccacaacaggttcgtcatccttttcggtgtcgcccttctcattatcttcttccttggctttaccattcatcgtgccatctcttgcattggcaagctgggaagagagttccttaatcttctcagaagcagccgatacctttgcctgcaggtcgtcattctcctgttttatgttctgcaattcaccgacttggtctaacactttctccttccattggatagttttagcgttggcttcctccctgattctgttagcttccattagctgagactcaagctgcagcagcttctcctgcaactcagtgttttcattttctttctccttaacaacctccaaggtcatgtccatctgaactttgacagcgacttttctt

SEQ ID NO: 51213 - DNA, 1403 bp, Zea mays
  Clone ID: MRT4577_146702C.1
attgctctccaaccaacaggcaaccaaacctcgtctcgtcttctctccgctaccaccaccactgctcgttttacagaaaccggaaggaaccaaacgcctttccgccccgggccgccgctacccaagcccagcaaccaccactcgttgtcgtcgactactaggcggcaagcaggcgtcctgtttttttttttttggtcctcgtcgtcgtccggactccggacaggacaggacatgggcgcggaggcggcggagcgcgacagaatcaggggcccgtggagccccgaggaggacgaggcgctgcggcggctggtggagcggcacggcgcgcgcaactggacggcgatcgggcgcggcgtcccgggccggtcgggcaagtcgtgccgcctgcggtggtgcaaccagctgtcgccaagggtggcgcgccgccccttcacggccgacgaggacgcggccatcgcccgcgcccacgcccgcctcggcaaccgctgggccgccatcgcgcgcctgctccccggccgcaccgacaacgccgtcaagaaccactggaactgctccctcaagcgcaagctcggcgccgccgccgccgcgtccggttcggcggtttccgctgacgactccgccgccgccgccgagaccgaggcgcgccggggcaagatgatgatgatgagcatctcgccgcccgacagcccctcggggtcggggtcggggtccgaccgtagcgacctcagcagccacggcgccgggtccgggtccgggtccgggtccggccagatttaccgccccgtggccgcgcgctccggcgggttcgagccggcggactgcgccatgagccgtccgcaggaggaggacccgctcaccgccctcagcctctcgcttcccggcacggaccagcggtttcaccaccacagcgccgccgccgacagccacttccaggagctcccgccgtcgccctcctcacccgcgccctcggcctacccgttcagccccgagttcgcggcggcgatgcagcagctgatccgcaccgaggtgcagcggtacatggcgagcgcgggcctgcgcgccggctgcggcgccgttggcgcgaccgacctctgcatgccgcagctggtggacggcgtcatgcgcgctgccgccgaacaggtcggccggatgcagtagccccgcgcccccggcgggggcatcaaaccgtcagtgctcccaaatcgtcgtctagctagggcgaccgcaacgcaacggttgttggagtagcaaacttggttttaaggtggagggaaaaattggctgggctgaaagcagaaagccttgtaatgtacatgaaagaaacggaacggatggcgcgctacaatctgagctcgccattgccgcatatatctgctttaagagagcattgcgctgccttgcct

SEQ ID NO: 51214 - DNA, 277 bp, Zea mays
  Clone ID: MRT4577_146703C.1
cccacacgtccgcccacgcgtccgcccaggtcttggaggtgctactcagaagccttaagcactaggctagaagccctttcgctgaaggccaactgaatacaacagtgaaaattagaaatgacgggcaaaggagcagttgactagcgagtgatttattgtttcggtgcctgatcacaaaggggacaacgagtaggatgaggaaagcttctcttctcgtggcaaaggagcaactgaccagcaaccgaacctctcaatttagtggtgcctcataatggtt

SEQ ID NO: 51215 - DNA, 262 bp, Zea mays
  unsure (1)..(262): unsure at all n locations
  Clone ID: MRT4577_146704C.1
tttttcgaatgggtacctcgnagccggccgggatcctattcccagtctcctcaccgcgcgctctctactgcttgtccgtttcttcctcttccgaggtagcaacgtgagtgagcgacgcagaccgctgctgtgctgcactagctgctgcaggaggcccaagccgcaccggcgtgatagcacccgctcctatgggcggcaggaggtctggaaggtcggatcgctcttaagcccccgccctgctctctagccgcctttatacccc

SEQ ID NO: 51216 - DNA, 1865 bp, Zea mays
  Clone ID: MRT4577_146705C.1
aagttttgcttcttcgagatctggtgttcagtgcccgccgttacaagcactggtgcagtacaagataattatatcgacctatacaagttcatatctgctgcaggctgagggcattcgccaagggcattctcacacattttcttggatgaggctggtcaagcctctgaaccagaggcgatggttcctttgtcggggttgtgtggaagagacactgcctttgtgttagcagtgtggaagagacaaattagggccggtggtttattgcagggaagcggagaaatgtggtctggggacatcatatctggaaaggctgctaactggcttcgagcagtaccaaacagggaatcctaactatgtgacaaagctggtgaggaattatcggtgccatcctgcaatcctagagctaccatcagagcttttctacgagggtgaattgtttgggcgggggagaaggagaatcatctgcttacgactgcatcggccttcctaacaagtcgttccctgttctcttcgtcgggattcaaggatgcgacgagagggaaggcaacaatccatcatggttcaacaggattgaagttagtaaagtagtatctatcatcaggaacctgacaaggggtgaggatgttcatgaatctgatataggagtgatcactccatatcgtcagcaagttgccaagataaagaaagccctggaggcatttgaaatgcccagcttcaaagtcggaagcgtcgagcaattccagggccaagagagggaggtgataatcatctccacagtcaggtcgaccgtaaagcacaacgagtttgacaaattttttaacctgggattcttgagcaaccatagaaggttcaacgttgccatcactcgcgcaaaatcgctgctcgtcatcatcggaaacccttacattatcaccaaggaccgtcactgggataggctcctgcggtactgcgctgacaacggctcctatcaaggatgcccccttccaccaccagagtctccttattcagacgacgccagattcttttccaagtacgacgaagaccaaggtggaccttctgggcaggactacagccaagagcctgcctactgcaactacaaccaagagcctgcctactgcaactacgacgaccaagagccttctgacttcggttcggggcatgacactggtgttgctcaacctgaacctgcttcggagaatcaagagtcatggtccgaggagttgcctgaagacgagagccagccattcagcaacccccaagcagatgttgaggagacgccgaagcaggacggcgaggaaggggctgcagctgcacagggagacgcgcaggccgaccagtcgttgaccaacgacgacagtcagctccaggacgcaggcgcggggaagtacaccttccctcccggttggtgcgacgtttcgagcatcccggcaacgggctggggcgactgatcagacccgcaaccgcaaccgcccctggcaggggggtacgttgggagaataactgaggctgatggcctttcaccctccttccatcaagcctccactcagctcactgctgaacagttgttgtagcgagtgagctgcgtccgtgtgtttaggccacgtgtgccaggtgctggcaacgtgcaatatggtgggttagctcgcgtgccattgagcgtgtgctaatggtttttaaatgcttaggccttttcggttacaagggataaaattctaccatggatttaatccgaccagaattaagtaaattcatacctcacatccaatcacatggtgggattaaatccattaattaatccatgtatatctcaaagatagttattcttttaatccatggattttaatataaacttgtgcaatatcgtc

SEQ ID NO: 51217 - DNA, 232 bp, Zea mays
  Clone ID: MRT4577_146706C.1
gtcgacccagcgttcggttaagttaaagcaacttattgactactattgaaggttgatctcgggagacggggaattaatccggtgttgctttcatgcttaaattggatcttatagtcttattccaacacctaacatgtctcttgttcaatcttcctctgtatcatattgtatgcatagatttttgatgggtcctgtgaaaccttggcataatctatacacatgaaataaggga

SEQ ID NO: 51218 - DNA, 184 bp, Zea mays
  Clone ID: MRT4577_146707C.1
atggatcccccggcgctgcgaggaattcgatagtcaagcttatcagataccgcgcgacactcagaaggaggggaccgagaacccaattacgcccctatagaagagatcaaattacgctgcgcgtcactgggccgctcgggtttacaacgtgcgtgaactgaggaaaaacactgggcgctaccca

SEQ ID NO: 51219 - DNA, 515 bp, Zea mays
  Clone ID: MRT4577_146708C.1
gaggcgcatatgtattacatgaaggttagactcatatcaatcactgtcaaactgccttgcggagataatcaaccgggccgctggtaatgaacgtatgcaaggatcctcataaaaacacgtactagtgcacaggtgctaaagggttcttgctcttgaactacagacgcaaatttaacaggggctaatctacgaaattcactgagaagtcttcttggccatcaactctaacttggactaggttttagcctacgacttggagcccatcatggcaatcttcccactaaattcctgacttaatgaaacttgtaattcaatgtggccttaatagactgcaagatcttggtgaactcaaacttgaacttggtcttgacaggggccagacacaacactgttgcaagcttattcagaaccatcaatccatggctagcctttactttaacaatgcaatatgggacctacatcttactgacctaggctggtagccacacaaacagtgcaatcctatccacatgatg

SEQ ID NO: 51220 - DNA, 208 bp, Zea mays
  Clone ID: MRT4577_146709C.1
ccttccaccttgcctagcccttgcgccgctactcctccgccacccagcgctcgagctcctctcgtcctgggagcgccccgcgcaacgccaccctgcagccctatctggagctggctaggcgcacgtgaagcagcagcagcagcagcaggagcagcagccacagcaggcggtagcgctagccaccggcgtgcggaatacggacaagccc

SEQ ID NO: 51221 - DNA, 459 bp, Zea mays
  Clone ID: MRT4577_14670C.1
aaaaaaaaattccagggattaaaagggagtaggggggggagggaagtcttaaggggggggaaaaataaaggggtatttggggggccaaaaaaccggaaaaaaccgggggggaaaaaaaacccttttgattaaaaattgaaaaaaagggggattttggcccctcaaaaccactcgggatttggggttccaaaattatccctaaaaaaatattgaaaagttcgctacgggaaaaagggggcttttttatacaaagttaaaaagttcgggggtaataaaaaaggtttttaaaaaaaaaaaccagccttgtttttaaagggggccttgaaaacaaaaaaatacccttccccccttggaaccttttgattttaaaacacccaaatttcctgagggacctggtggaaaaaccaaaaaagggggttaaaaaaaaccaaaccaccatcccacttatttaacgccttt

SEQ ID NO: 51222 - DNA, 1233 bp, Zea mays
  Clone ID: MRT4577_146710C.1
cccacgcgtccggctgcgctgctgcctacagctagagatgcatcgatctcagttgccctcctcctgtccgccatggtggcggcggcctcccgcgatccacgacacgaaggcgtccatggtgcccgcgtccgaccggtagtgcttctgcgtgaactcgaggaactcgcgccacgtgaagtccgggaacgcgcgcgggcggcccgcctgcttgttctcctggaggagcgcgcccggcgggcggacgacgcggtccagcggcgggttgaggaagaaggcgagcgaccggcgggagccgccgccggtcaccacggcgcggtgcaggcagctggtgtgacgcccgtcggtgagcgcggcgaaggtgtcgccaatgttgaccacgaacgcgtccgcgcggggccgcaccgcgcgccacggcccgccgccggcgcgcacctgcagcccgcccacgtcgtcctggtgcagcagcgtcagcgacgtcgggtcccggtgcgggcccgtccccagcgtcaggtgcggctgccggcacgccgggtagtggttcagccgcatgacggagtcgccgccctcgaagaagccgcgcagtgcgccgcggtccagccccagcgctgccgccagcacctccgtcacgtccagcgccagacgcgtcatcgcgtcgcagtactcctggtacacctccctgcatttttttcccgtttcagttcgtgcggcatgacatgcacatgcacgtaaaaaaatagggtagagaagtagagaccccatgtggcggtagtcctcgccgaggacgtcgacgaagtagccgacgacggcgcgcgcagtcccggcaccggcggggcagttgaaggacagcgtctccttccacggcaggcagcagtggaagcggcccgtgaagctgctggcgtagccgtggttctccccgtgccggcgctgcgcgcgctgcttgtccgcgagcgggagcgcgtaaaaggcgtcgcaacagcggtaggcctcggcgagcagcgcggcgcccacgccgtggttcaccacctggaagacgccgtggcgctcgcacgcctccgccacgccgcgcgggagcaccccgcggcggaggaactcgccgaggtcgaccacggggatggcgacctcctccacgccgcccgccggcgcccgctcctcggtgggccacacgaactgcgccgggatgtgctcctcccggctcagcgcctcggcgtcgaacaccacggccgccgccgccat

SEQ ID NO: 51223 - DNA, 575 bp, Zea mays
  Clone ID: MRT4577_146711C.1
ggccgcttttttttttttttttttctttttttttttttttttttttttttttttttttttttttttttttttttttttttttttctaagggaaaattcagcatttttccacacgcaagcatagttacatatttaactcgccaaggcaacaccgttaacaaacccggcaggcccccaaaagaggcaaaaaaaaaaggccccccaaaaggtacaagtttactcgtaagaagaggcatacgatccgatcatgagccccccacattggggagcacgtcccacaccgttttttggagcagttggtccagaatttccgcctccacgtccccagccagggggtccgggtcctcggggaacgcgccgggccacgccgacacgttaaggtaacggccgatcagcacgtccacgggggcagagctcgccgtcctggggtcgctcgggggttttatccacacctggagggacttccacagggcctttagaagggccttgccaccgggggctttctttggggccatggcggggcacttgtcaaacgcccacagcgtcgtggaggcccggacggttcccggaagcgcc

SEQ ID NO: 51224 - DNA, 1097 bp, Zea mays
  Clone ID: MRT4577_146712C.1
gcattggaaaggatgataaagaatgttatgaatggcagaggggaaggtgctgataacgttgaacaaccaagtgctgattcacattctgaacaggagagtctaacaggagtattaggaaggggaagtgtatctggccacaagccacggccagtccgccctggaacattccttgagactgtttccaaggtcctgggtggcgtatatgcaagtaacacatctggtattacagctcaacatctggaatgggtacatcagacaacactcaaaattcttcaggaaatggccttctagcattgttatcagggttcactgatatagtttgtaacataagaagtataatgctgcacatccgtagctattgaagagcctttttaagtggtcacatatctttttgttgagaagtggagtggaagaaacgataatgggttatctaaagccatagatcactcaggggaagaatgttgccacgttgtgcagtccagaagtaacttacaggcttggaattgatatgaccatgtggttgcccttgccaattgactaattttaagtactagactcagtaacatatttgaggcgtaatatcattattattgacattagtcttgttccttggcaatctgtcttatcttttcgcacatttttctggacttgtgattctttattcgtcatgggtgatatatggttagaagaagctacaattaacagtggtatattggaatacgatataatgtggctacatgaatataacctcaggtcttttctccagtcggcaacaggcaaataatgggggaaatatgtgtgtgggaggggctggagagaccacatcttctgtacaaacatagaaactaattcaggataatgcacttgtgtaactcaaggttttgtaacttggcatatttacggttcacacatatatacacacacgaaaaagttgggatgcacaagcagtttggaagaattcttattacttctagttaaaagcccctgggaattggagctccctccgcgcttcgcgctcgcacgctatccgcccagccacgcgtggcccgcgctcccggctctctccagtacccctgtccctgcttagtttttttctc

SEQ ID NO: 51225 - DNA, 406 bp, Zea mays
  Clone ID: MRT4577_146713C.1
accaccgcccgcccgctcgtcatcaacaaagacgcggacagcgtgagctacaagcggtcgcaatccatgccttcgacccctattacgcccgttacgccgtggtcgtccttgtagaaggcgacgccgagcggcaccccgcaacgttgtggacgcagcgaccttccacccgcacgagcaagcctgcccaccgagggcatggacgccaactctcttaaccggccgcaacccatgtacgggaccgttaccactggctttactgttgcatgacctgaatcaactacctctagatcgaacgagatggatggacacataacaggccatggttgctgctccttgtggttatctaaaacgcacgcttgctctattatagctaggcatcactgtatatatactagtgcatgtgtat

SEQ ID NO: 51226 - DNA, 239 bp, Zea mays
  Clone ID: MRT4577_146714C.1
ccgagacttccgaaaccttcacgcgctcgtacgagggagttgcaaactgcccggcggcggacgacgactagaccgatgatgccccctacaacgctgccgaatcagcggggggccatatccgatcaagcgaggacaccaccagagaccgaccggatcccgaccgcgctggctgagatcggtgggcggttcatgagctatgatctgcctgatcacatattacgaccgccgattttgggttc

SEQ ID NO: 51227 - DNA, 155 bp, Zea mays
  Clone ID: MRT4577_146715C.1
gccattcgtcagggtcctcggtgcctacccaagaaaacatatatctgagagagagagacatgccagcatcgctgctctctggggaagcgcatgctccgaaaatatgctactttatgtctattgggcgcatcattagctggcaatatggagcacta

SEQ ID NO: 51228 - DNA, 3134 bp, Zea mays
  Clone ID: MRT4577_146716C.1
cctcgagggcccggcccgggaatcaaaaaaaaaaaaaaaaaaaaaaaaaaaaaaaaaaaaaaaaaaaaaaaaaaaaagggcaccggttgtggcttaatttaatatatgtactaaataagcacatgatatgttttcataaataagtggagtggaggcaggcagcgagggacgctaggcaccgttgtggctgtgcggaactgcacaagagcgtttcgcctcggccaccacgaacggagaaggcggcagccatggccatggaggaagcggggaagatgacgtgcaggaagaagggtggtctgagaacaatgcccttcatcttcgccaacgaggtggcggagaagctcgccgtggtgggtttctcgaccaacatgctgacgtacctgaccactcagctgcacatgccgctagcgaaggccgccaccacgctcaccaacttcggcggcacctccgccgcgacgcccctcatcggtgccttcctcgccgacgcctgcatcggccggttctggaccatcgccgccgcgtccgtcgtctaccaagccggcatggcgctcctgacggtgtcagcggcgctgccgcggttccggccggcgccgtgcaagccgggcggcgcggtggcatgccaggaggccgcgccgtggcagctggcggtgctgtacgtgtccctgctcctgaacgcggtgggcgcgggcgggtaccgcccctgcatcgtggcgttcggggcggaccagttcgacgagtcgcgggcggcggagcgcgcgcggagctggggcttcttcaactggtactacttctgcaacggcgcgtccatgctgctggccgtcacggcggtggtgtacgtgcaggacaacgtgggctggggctggggcctcggcgtgccggccttctgcatgggcgtctccgtcgccgccttcgtggccgggtacccgatgtaccggaggctggagcccgcggggagcccgttcacgcggctcgcgcaggttgtcgtcgccgctgtcaagaagcggcggctgccggcggcggacgtcaaccccgcgttgctgtacgaggacgacgagctcgacgcgcccatctccatgtacggcaagcttgtgcacacggatcagctcagcttctttgaccgcgcggcgatcgtcaccgacggcgacctggtcacgctgacggacgcggactccggcaagccgtcgacggcccccgtcccggacctgtggcgcctgagcaccgtgcaccgcgtggaggagctcaagtcggtgatccgcatgggtcctatctgggcggcgggcatcctggtgatcacggggtcgtcgacgcagaacaccttctctctgcagcaggcgagcaccatggaccgccgcctcgcgccgggcctctccacgttcgagatccccgcggggtccatgaccgtcttcgggctgctggccatgctcttcaccctcttcgtctacgaccgcgcgctcatccgcgtggcgcgccgcttcacggggctggaccgcggcatctccttcctgcaccgcatgggcgtcggcttcgccatcagcgtgctcgccaccctggtcgctggattcgtggagcggcaccgcagggacgcggcggcggcggccggcgccacggacgccggcacgtccccgctgtcggcctactggctggtgccgcagtacgcactgcacggcgtggccgaggcgttcacctccgtggggcacctcgagttcatgtacgaccaggcgcccgagagcatgcgcagcacggcgacggcgctcttctggctgtccatctcgctgggaagctacgcgagcacgctgctggtggacgctgtgcaccgctggagcgcggggcccggcggcgccaactggctgccggacaacatcaatcacggcaagctggattacttttactgggtcgtcacggtactgcaggtcatgaaccttgtgtactacgccatttgcgccaagcggttcacgttcaagccagtgcagctccacaagaaagaggaggaagaaggcggcaaggcacttgtggagttgcaagagaaggtttaatttgagcagcatgcactttcatcagtgctaggaagatcctcagaaaaactcccaaggtattactatataaatctatgtgagcatctgtattagtcaagtagatcaagaatgcaggaaggttgttcaggcaagcaacctcagaagctatctggtctggtcctgagacttggcacaggtcaaaaacacaactcgactatatttgtaactagaaagcaggcacgaggcacatgtctgaactctgaaacttgacgttaatgcatagtactgtataagactctgtttgtacattagagtctagggataaacacacagatattgttcaggcaacagtcttcgaaaagttgtcacgcaacacatctctcagagacagaaatatttcgatctgaatcctggcatagcttattaatattccgacttggacactaggtagtaaggaaacaggtttgcacccacaatctggcatgaattccaacccaagcagatagcggagcttttcaggtaaacagactacggtacattagatgtcgcctctgatctttaatcgcagattcgcagtagtagtgcacgaatagaccgtccaagaacgcgcggcgagacgcgaacctgtcgcgggacggggggatcagacggtgaacttgatctcgaacccggtggacggatccacgggctcggccgtggacgggacgacggcggtgacggtggcggctggggggccgacggggaggcggcgggttatcatgtcttcgatcttcgcggggtctccggagaggagggcctccacactgccgtcacggcggttgcggacccagccggcgagaccgagcgactcggccgtggacgccgtccagtcgcggaaccccacccccgtgacgctccccttcaccaccacgcggactgccttccgtgcgggctccggctgcggcgcggatggtggcgtggcggcatcgggatcggcggaggacgccatggcgcggtggtgctggtacggttgtggacttgtggaagcagcgagactggagaccggagacggagagggacgaccggacgagacgagacggccgaagcaaggaactgctccccggccggccccgaggtacccaa

SEQ ID NO: 51229 - DNA, 1369 bp, Zea mays
  unsure (1)..(1369): unsure at all n locations
  Clone ID: MRT4577_146717C.1
aattcngcacgcgcccgcacgccggtggccccctcacgtccgtgcccaccaccctcgctcgtcggcgtcgtccccctctttctctctcctgtgccccggccaagaaggcaaggctgcctgcctactggttggacctggacgaaggaggacgagaggctcgctcgtcgctggcggttggtacgtgcgcgcgcgatggacaggggaacggtggaggacctcatacggcggttgctggacgggaagaagcacaaggcgacggggaagaaggtgcagctgaccgagaccgagatccggcacctctgcgtcaccgccaaggagatcttcctctcccagcccaacctcctcgagctggtggcccccatcaacgtctgcggtgacatccacgggcagttctcggacctgctgcggctcttcgagtacggcggcctgccgccgacggccaactatctcttcctcggcgactacgtggaccgcggcaagcagagcatcgagaccatctgcctgctgctggcgtacaagatccggtacccggacaacttcttcctgctccggggcaaccacgagtgcgcctccatcaaccgcatctacggcttctacgacgagtgcaagcgccgcttcagcgtccgcctctggaagatcttcaccgactgcttcaactgcctgcccgtcgccgccgtcatcgatgacaagatactatgcatgcacggcgggctctccccggacctggacaacctcaaccggatcagggagatccagcgccccgtcgacgtccccgaccagggcctcctctgcgacctcctgtggtccgacccggaccgcgacagctccggatggggcgacaacgaccgcggcgtctccttcaccttcggcgccgacaaggtcaccgagttcttaaacaagcacgacctcgaccttgtctgccgcgcccaccaggtcgtggaggacggctacgagttcttcgccgaccggcagctggtgaccatattctcggcgcccaactactgcggcgagttcaacaacgccggcgcgctgatgaacgtcgacgccagcctgctctgctcgttccagatcctcaagccgtacaggggcaaagcacaaacggagtgacgacgacaggctgcgaccgagacacaggaaggagacgtcgattagaggcttcgtttaggttgcaaggagagtatgcctgcgcgtcttgcattcctctcgcaattttttttttgctccccctccgagagctgtcgatcaagtccgcagttcttctgaatcttttgcatgtatgtaactgattcaatacgtgagtgtctgtatatataaaagactatagtttctgaaaaaattctgagggggggacaaaaaaaaaaagcgggcc

SEQ ID NO: 51230 - DNA, 898 bp, Zea mays
  unsure (1)..(898): unsure at all n locations
  Clone ID: MRT4577_146718C.1
taggggccttttttttttttttttttggtttttttttttttttttttttttttttgacggnaatgcatagtactggataagactctgtttgtacattagagtctagggataaacacacagatattgttcaggcaacagtcttcgaaaagttgtcacgcaacacatctctcagtgacagaaatatttcgatctgaatcctggcatagcttattaatattccgacttggacactaggtagtaaggaaacaggtttgcacccacaatctggcatgaattccaacccaagcagatagcggagcttttcaggaattcaggtaaacagactacggtacattagatgtcgcctctgatctttaatcgcagattcgcagtagtagtgcacgaatagaccgttcaagaccgcgcggcgagacgcgaacctgtcgcgggacgggggggtcagacggtgaacttgatctcgaagccggtggacggatccacgggctcggccgtggacgggacgacggcggtgacggtggcggctggggggccgacggggaggcggcgggttatcatgtctncgatcttcgcggggtctccggagaggagggcctccacactgccgtcacggcggttgcggacccagccggcgaggccgagcgactcggccgtggacgcagtccagtcgcggaaccccacccccgtgacgcgccccttcaccaccacgcggactgccttccgtgcgggctccggctgcggcgcggatggtggcgtggcggcatcgggatcggcggaggacgccatggcgcggtggtgctggtacggttgtggacttgtggaagcagcgagactggagaccggagacggagagggacgagacgagacgagacggctcccggccggcctcgagggacccaat

SEQ ID NO: 51231 - DNA, 1258 bp, Zea mays
  unsure (1)..(1258): unsure at all n locations
  Clone ID: MRT4577_146719C.1
ttgggtacctcgaggccggccgggagttctaatcatgtatcagattcgaattttcgatagtataaacttccactccaaatttaagttcaactgacaccgtttgcagcttctttgaccgcgcggcgatcgtcaccgacggcgacctggtcacgctgacggacgcggactccggcaagccgtcgacggcccccgtcccggacctgtggcgcctgagcaccgtgcaccgcgtggaggagctcaagtcggtgatccgcatgggtcctatctgggcggcgggcatcctggtgatcacggggtcgtcgacgcagaacaccttctctctgcagcaggcgagcaccatggaccgccgcctcgcgccgggcctctccacgttcgagatccccgcggggtccatgaccgtcttcgggctgctggccatgctcttcaccctcttcgtctacgaccgcgcgctcatccgcgtggcgcgccgcttcacggggctggaccgcggcatctccttcctgcaccgcatgggcgtcggcttcgccatcagcgtgctcgccaccctggtcgctggattcgtggagcggaccgcaggacgcnnnnnnnggggggcggccggcgccacggacgccggaccgtccccgctgtcggcctacaggtttggtgccgcagtacgcactgcacggcgtgggccgaggcgtcccacctccgtgggggcaccttcgagttcatgtacgaccaggcgcccgagagcatgcgcagcacggcgacggcgcttcttctggctctccatctcgctgggaagctacgccagcacgctgctggtggacnccgtgcaccactggagcgcaggccccggcggcgccaactggctgccggacaacatcaatcacggcaggctggactacttttactgggtcgtcaccatgctgcaggtcatgaacttgatatactacgccatttgtgccaagcggttcaggtacaagccagtgcagctccataagaaagaggaggaagaaagcggcaaggcacttgtggagctgcaagagaaggtttgagcagcgtacactttcagctacgtgcaggtacatgtcttaaggtagaaagaaagtgcttccactactccattagtgctaggaagattgtcagacactccctagctaatactatatgtatgtgagcatctgtattagtcaagtagatcaaggaatgcagggagttgttcaggcaagcaacatcactcagaaattgtcaatggtcacttgacagctttgtg

SEQ ID NO: 51232 - DNA, 610 bp, Zea mays
  Clone ID: MRT4577_14671C.1
cccctctcgagttttttttttccttttttttttttttttttttttttttttttttttttttttttttttttttttttttttttttttttttttttttttttttgggcggggaaaattttttttaggatttaggggcccggggttaaaccccccttacggggggggccggctttttttttttttttaaaaaaaaaatttttcccttgcccgttttaaaagccccggggggtttcccacagggtttcctttcccaaaagggaccgggggccatcttctagttttttaaaacgaatgggttttcccccacaaaaggggccgggggggggggggttcttaccccgggacccaaccccttgggggggggaaaaccccgaaaaggggggttggccggttttggttaaaaatttaaaaccccggccttcccccaaacccttttaaaaagcccaaaggcccccaaggcccaatgttgcggggggggtttccccccccgggcccccaaaaaaaatggaaaaaaaacctgccctggaaaatcctttttccagggcaaaaaaaaaggtcccctcccccgccgggggccttttgttgaaggttttggggggagaggtttttt

SEQ ID NO: 51233 - DNA, 367 bp, Zea mays
  Clone ID: MRT4577_146720C.1
catcatagaatgcggaatccagtagcgacaatctagctacaatggcgaccacaacagtgggtatcaatatgctagttgttcttgctacatgtgccgttaacgcgaccgcaacacatgcgtgcatacatgcacatagctcacttgttcttactgcaaacataccataaattatagcaccaatatctgaaatcggatctcaacaactatataggctagaatacgcgatagaaccaggcatcatacctagagcgttacagcagccacatcaatcatcggcactacaatccttgcaacaattgacactacccatcatggcaccacagctgcagcaactggtgctaccagcaatgaaccaaatagatgtggc

SEQ ID NO: 51234 - DNA, 702 bp, Zea mays
  Clone ID: MRT4577_146721C.1
tctccactccactccacctccgacctctctcattattccatcccggcggcggcggcggcgcgcggcgtgcgtgtcacactcactgatcagtatccccgcgggccgtactccttcccttgtccgttccgctgcgcagcagacggcgcacggcatggccagcaggaacaaggtggcggcgctgctcctctgcttcctgttcctggccgcgggcgtcgcctccgccgccgagatgatcgccggcagtgggatcggcgacggcgaaggtgaagagctggacaagggcggcggcggcggcggcggccaccacaagcacgagggctacaagaacaaggatggcaagggaaacctgaagccctctcagtgcggcggggagtgccggcggcggtgctccaagacgcaccacaagaagccgtgcctcttcttctgcaacaagtgctgcgccaagtgcctgtgcgtgccgcctggcacctacggcaacaaggagacctgcccctgctacaacaactggaagaccaagaaaggagggcccaagtgcccgtgagaagatggcggcccaatacgcggttttcccggcggctacgcgggcgggccgccggcccaacgtaacctaccaccgtagttggaagcgtcgtaggttaggttaggaataacagtctctctttttttttctctccttgtttcggtgtttgtttgggccgggcc

SEQ ID NO: 51235 - DNA, 866 bp, Zea mays
  unsure (1)..(866): unsure at all n locations
  Clone ID: MRT4577_146722C.1
ttactgggtcgtcacggtactgcaggtcatgaacctggtgtactacgccatntgcgccaagcggttcacgttcaagccagtgcagctccacaagaaagaggaagaagaaggcggcaaggcacttgtggagttgcaagagaaggtttaatttgagcagcatgcactttcagctatgtgcaggtacatgtctaatagaaaggaagtactcatcagtgctaggaagatcctcagaaaaactcccaaggtattactatataaatctatgtgagcatctgtattagtcaagtagatcaagaatgcaggaaggttgttcaggcaagcaacctcagaaattgtcaaggatcacatgacagctttgtggatggcagaagctatctggtctggtcctgagacttggcacaggtgcaaaacacaactcgactatatttgtaattagaaagcaggcacgaggcacatgtctgaactctgaaacttgacgttaatgcatagtactgtattttgtacattaggatctagggataaacacacagagattgttcaggcaacagtcttcgaaagttgtcacgcaacacatttctcagggacagaaatatttcgatctgaatcctggcatagcttattaatattccgacttggacactaggtagtaaggaaataggtttgcacccacaatctggcatgaattcccccccaaagcagatagcagagcttttcaggtaaacagactccggtacattagatgtcgcctctgatctttaatcgcagattcgcagtagtagtgcacgaatagaccggccaagaacgcgcggcgagacgcgaacctgtctcgggacgggggggacaggggatcagacggtgaacttgat

SEQ ID NO: 51236 - DNA, 247 bp, Zea mays
  unsure (1)..(247): unsure at all n locations
  Clone ID: MRT4577_146723C.1
ccggcggtnccgctcgctctgacccacatggtctccgccgctccgctcctncgcancnagctcgctcgcgctccgtgcgcacttctcttcgccttcttcgtttccgcggagggcgtcgtcgctgctcctttgcttccctccacacggtgtgccgccgttctgttgtcctncgtctgtggttcggttcgtcgttttattgcatctcgcccccacgcggtccctgttttcctcctctctgtttggtggt

SEQ ID NO: 51237 - DNA, 474 bp, Zea mays
  Clone ID: MRT4577_146724C.1
gggcccaaagggctttttttaaaatcccttaaacaggggttacaaaaaaggggactttttttttgaaatccaaagggcttttaacgggggaaaaccaagtccgggaacccataacaaaccccccatacctgggctagctgcttcctggggttatgggcccggaccaacaggatcaggccccccgtcatgtttcattggttggcaaacaggccacccatttttattattgctcccaggcccaaataaactatttattggccctcttccttccttttttttgaactgaggtatgcctctgaagggggaaggcactggctcactgggcactcactggtagtttgccctgccactaccaactccagggcttgtttttgttgccccccgcgtcgggggcccgcggcaactgggaataaaaaccctaatccaaggccccctgcctttgcctcctttcgctggtgccgaaaaaacggggcc

SEQ ID NO: 51238 - DNA, 363 bp, Zea mays
  unsure (1)..(363): unsure at all n locations
  Clone ID: MRT4577_146725C.1
ccggccgggcccattattttatcggtgctcgaggttcaggtttcacgcagtgcggcgagagctggcagccatgaagagggggagcccatggtcgctgcggctgctaatttgctgcgcggcaatggtggccatcgcgcttctcccccaacaaggaggccagctgtttcttgctcatgtgcggtgggtttcttttccggacgttcatattcaggccgcttgtttcgtgccgacgccgggtccagctccggcaccgcccggctcctccgcgacgaaacaacgaacgactcctccgctgctcctcggccagccaagcccagcgcattcccacccccaatgtacggtggntgtcaccccccggcagtc

SEQ ID NO: 51239 - DNA, 333 bp, Zea mays
  Clone ID: MRT4577_146726C.1
atggcctctaccgcaaagtcatcgcaatcatccacaaggacttcgacgccacgataataatcagctgctttggcgctacaatcatcgtcgatgtcatcttctctatgaaagggtgaatcaaattcttctcccattcctccatataaatcgtcactgtcattagcgtcaacatcatgtaaaacatctactatgtctaactctcaacatgggaagactaatacgtcgtcttcatcgtcttcatcgtcagatcatacagctgcagtgataactggccttgtacttgacgtcgtgggcttcgatctgctcatgttaaatccaggtgtacgtgtgttg

SEQ ID NO: 51240 - DNA, 1244 bp, Zea mays
  unsure (1)..(1244): unsure at all n locations
  Clone ID: MRT4577_146727C.1
ggttgatggctctgctctcagcgccgatctccattcccaatgcgatcaacaactacgaacgacccggaacgacctcgcgcccaacgaacaactacgaacagatgatcgccggcagtgggatcggcgacggcgaaggtgaagagctggacaagggcggcggcggcggcggcggccaccacaagcacgagggctacaagaacaaggatggcaagggaaacctgaagccctctcatccgacaattagtgcttgcggtgcaatgctccacggccatggtggccatcgcgtttctcccgctgcaaagaggccgggcggcgttgaatcgaaagtggtggttcagccgttcaggagctaccaccggcactctccttcactccttccattattttatcggtgctcgaggttcaggtttcacgcagtgcggcgagagctggcagccatgaagagggggagcccatggtcgctgcggctgctaatttgctgcgcggcaatggtggccatcgcgcttctcccccaacaaggaggccaggccgcttgtttcgtgccgacgccgggtccagctccggcaccgcccggctcctccgcgacgaacacgaacgactcctccgctgctcctcggccagccaagcccagcgcattcccgcccccaatgtacggtggtgtcacccccggcaccggcagcctccagccacacgagtgcggcggccggtgcgcggggcggtgctcggcgacggcgtaccagaagccgtgcctcttcttctgccgcaagtgctgcgcggcgtgcctgtgcgtgccgccgggcacctacggcaacaagaacacctgcccctgctacaacaactggaagaccaagcggggaggccccaagtgcccctagtagccctccctctcggtctacttgatgagatcttctgttcaaaaaatcaaaaggaataagaatctgtttaaccatctttagatttcacaaataaaacaggtttcaatttatctttgtagtgaaacgcttgcaactcatgtgtgaatctcatccaatattagtgacagatccctagctagctgattgattactaaaaaaaaaaaaaaaaggggggggcggaaacaaatacgcggtttttccggcggctacgcgggcggncccccggccccaacgtaacctaccacccgtagttggaagcgtcgtaggttaggttaggaataacagtctctcttttttttctctcctgtttcggtgttgtttgggcacgcc

SEQ ID NO: 51241 - DNA, 137 bp, Zea mays
  Clone ID: MRT4577_146728C.1
ggtggggttatttgatattaggaagggaccgcccccaatagcacctaaaattgtaaaaaaccgagttgcctaaacgggtgtacaccgcaatgtgaaaaatcaaaaacaggtatgaaattcaaccttttaacaagaaa

SEQ ID NO: 51242 - DNA, 596 bp, Zea mays
  Clone ID: MRT4577_146729C.1
ccgggtgtccggctcctgaggctcattttgcagttgctgaaattgtccccgcagttttcaatcatgtctgaaccaatcagagtccttgtgactggagcagctggtcaaattgcatattcactgctgtacagtattggaaatggatctgtctttggtaaagatcagcctataattcttgtgctgttggatatcacccccatgatgggtgtcctggacggtgtcctaatggaactgcaagactgtgcccttcccctcctgaaagatgtcatcgcaacagataaagaagacgttgccttcaaagacctggatgtggccattcttgtgggctccatgccaagaagggatggcatggaaaggaaggatttactcaaagcaaatgtgaaaatcttcaaatgccagggtgcagccttggagaaatatgccaagaagtcagttaaggttatcgtggtgggaaatccagccaataccaactgcctgactgcctccaagtcggcaccgtccatccccaaggagaacttcagttgcttgactcgtttggatcacaaccgagccaaagctcagattgctcttaaacttggtgtgacttctgatgatgt

SEQ ID NO: 51243 - DNA, 377 bp, Zea mays
  Clone ID: MRT4577_14672C.1
aaaagcttagaacccattctggaaagcagattgtatggcaacctggagggtggaaattactttgttgggatgcaaacgaataacatagactaacatgcatatgtgcttgcacaaggtaacaatgcaaggggcggcgctgtcaaatacaacatgatgctatatgcacaaagaaggaatgtactgtggcattaaaaactcaaccattagcatagaaagtgataatatcaatactcacacatcacaataccatctaacctcatatactataatcagactagaggatcaaactcgacatctgaaccgtgctcatatgccatacatgtgctagcaacaattgctaagcacaaaaactctacatatccactctcgtacaataa

SEQ ID NO: 51244 - DNA, 379 bp, Zea mays
  unsure (1)..(379): unsure at all n locations
  Clone ID: MRT4577_146730C.1
gcggcgacggcgcctctggnaacggcgagcctgtcgtcctcgtccggggacggctaccgcggggcgggtgccgagtcggggggcgatagcaccggcacgagcaccacgagcgccttcgcgacgccgacgccgccgccctcgtcgaagaggggcgaaaacaagntgccgcggaggctnactaagggaggtggcgtcaggcgctggctatgggagcccatagtccaggggcgggagatgggcttcctcctgctccagctcggcttcgccgtattcgcgctacgcatgcttcgaccggagatcgcgttgcctggctcagagcccgggccgcataccacgtacggcagtgtaccgtacagcgacttcctggcaagcatagaca

SEQ ID NO: 51245 - DNA, 682 bp, Zea mays
  Clone ID: MRT4577_146731C.1
ggtcgccgaacacacgggtccgccgcccacgccagcgctgagctcaccaggaaaccgtcttcttccactggcgcgggctaggagcgtcgccgccgcgtcgcggttatgggtacggcggctgtcgtggaggacacgatacgcgtcgtcctcacctgcctccctgatccgcccttccgcaccaccggttcctcccgtccctaccagagtcccagcggcggcggcggcggcggggaccgcatcagccgcctctcagacgcggtgctctctaacatcgtggcgcgtctccccgccaaggacgcagcgcgcactaccgcgctctccaggcgctggcgccgcgtctgggcctccactccactcgtcctcgacgactccgacctcctcgtcttccacgacgacggcggctgctctacgcccaactggttagccgtcacagacaccgtgtcccacgtcctctcctcccacagggggcccatccgctttgtgcgcctcacctgctgctacatggcgctggcctcgcacaacggcgcgctccagtactggctccgggtcctcgctgcggggggagtcgaggatctcgtcctcgtcaaccgcccattacccacctccgtgggcctccccatcgacgtcctccacctcgcctccctccgcaccctctacctcggtttctggtgcttcccggaca

SEQ ID NO: 51246 - DNA, 368 bp, Zea mays
  Clone ID: MRT4577_146732C.1
cccacgcgtgcggactcacttaacgcttatctaacttcgatgcatacgtgcaaattctgagacaggtccttgacaatacccacattgatgacttcaagcttaatattgatcttaacagctaactacgaagctatcagcaagaacggatcaactggcttgcattcctacgtcggtctaagttacatggaattccatgcgacgacatcgtgctcgctaagacgctccaagcatatactatcgcctcaagtgacattgctgaaccacgtgcacagaatgatgaacaaattctcacatctctgactatctgcacttctacattaatgcaccactgtgaatatgacatagagaaatacatagacagctctatc

SEQ ID NO: 51247 - DNA, 232 bp, Zea mays
  Clone ID: MRT4577_146733C.1
tttaggaaaactggcatggagatttggagagttctgggtacagagagaattggtaataccaatacatttcgccagggaaccggaagttccctctgtttgcaggcgaatacatacaattagctttgtttgggtactctattattaggcccaatccacatgtgttaagggggattagggtgtaaaactgtagctgattcacactcatacagcccactaacatgtggggtgcggg

SEQ ID NO: 51248 - DNA, 158 bp, Zea mays
  Clone ID: MRT4577_146734C.1
gttcagaagacgatgaagcacattctggttctaggtgcatacttccacgaggcaccattcgtgatagtatgccgaggaaggaagtggaagagagacttccagctatttggtctggaattccaatctaccgggttgtcctgaaaaaatccaaccttttt

SEQ ID NO: 51249 - DNA, 310 bp, Zea mays
  Clone ID: MRT4577_146735C.1
atctcctccgcgtgctctccggctgcagcatctgtatcccacaacgaaaaactaccaacggaattagaaatccccaaatccgcgagatctatcagtatcgagcgatttaccgatccgattgctagggattagtttcgaaaaagaaactctgaaaaaaaattctggtcgttgggaggctacgatggcagcgcaattagcggcagtagtggaggcgaatgagagcccaggcgctgtcgccgagatgtgtgtcgcagtaatcggtcggcgtcggactcggcgtggcgcacagatcccgaccacgtcgctctat

SEQ ID NO: 51250 - DNA, 573 bp, Zea mays
  Clone ID: MRT4577_146737C.1
agccaacgggcccggcccttataaaaaaagacttttgcaaacttttaaggcccggggggaaatttattttcttacggaacaaacgacgggcaaaacccaaaaccccaattcccattttttttgggtttttaaaaaaacagttttatggtttttccccccccacaaaggacatttttttttaacggaagggggggaaaaaaaactggaacaaaacctaaacgaaacccctagcccccttttttttggcaacaaaagctgcctttgaaaaaacgagggcccgagctagggcaacacccttatttccccattcacggggttcgcaatgggggctacggggggaaaaaaggccggccccaccctgaaaaagaccgccccccccccgacccctattggggtttttggaagaaacccccgggggggggcccggcccttttaaaaaaacaagggggcggaaaaaaagggcaatttggatggccccataaaacgattttcccccaaaacccccactaaagggccccccccccgaaacttccaacttaaaaaacaaccccagggccttaaccttgggggccc

SEQ ID NO: 51251 - DNA, 1054 bp, Zea mays
  Clone ID: MRT4577_146738C.1
cattgggtacctcgaggccggccggggcacagcccacaggcataagtaagttatcatccagtaccagaacagaaccatcgatcgagcttggttgctcggcagcagctagcaatggccgccaagggaggtgatgagctgaagctgctgggcgtgtgggacagcccgtacgtcaacagggtccagatcgtgctcaacctcaagggcctcagctacgagtacgtggaggaggacctcctcagcaagagcgagctcctcctcaattccaacccggtgcacaagaaagtgcccgtgctcatccacgccggcaagccggtcgccgagtcgcaggccatcgttcagtacctcgacgaggctttccccagcggcacgttcccgtcggtcctcccagccgaaccctacgcacgcgccaccgcccgcttctgggccgccttcgtcgacgacaaggtcgggtctccatggcacacggtcctgttcgcgcgggagcacgggaagaaggcggacgcggcgtcgcggatcgtcgcggcgctggagacgctggagggtgcgttcgaggactgctccggcgggagggactacttcggcggcgacgccatcggcttcgtggacgtggtcctcggcagctacctgggctggttcaaggtgttcgagaagatggtcggcgtcagggtcctggacgtggcgaggacgccgctcctcgccgcgtggggggagcgtttcgcggcggcggaagcggccaaggacgtcctgccggatgacgttgacaaggtgctcgagttccttcagaagttcctggactagactaggtgcgcgccaccatgtgctcggtgctctggtgtccaactcccaatgtttgtttgctttggtcattttcggtgcgctgttaatgggcctcggatgtttgccagttgattaacttgattttatagaatcttaataatattctaaaacaagtagtcaggcggccacgtctacaggaaaacttctaccgtgtgatcaagacagcgagaaatatggtgcctcagattcccatcagtatccagagtcttccagtgac

SEQ ID NO: 51252 - DNA, 684 bp, Zea mays
  Clone ID: MRT4577_146739C.1
gctggggggtgccgcggcgcttcycctcctcctgctgctcctggsggtgtccttgggtgggcatggtgatcacggcgcggcggctggcggcgtcgccccggcaggcggcaacggcatgasggmgctgmaraagcacgtggsgttcttcgacrgaaacaacvacggcwtcttcaccttcgacgagccctaccaaggtctgcgggacgtgggagtcggcgctgtaacggccaaagccagcgccgcgttcatmcmcggcgccctggggcccaagmccagmcctgacaattccmactcytcamgcatggatwtctacgtagagaaaattcagcvgggcamacatggaagcramamagggcctacracgctcaaggaaggttsgttcccgcgaagctggacgagatgttcmcaaagaacgccaagmccgtaccgaacgytctgacgaaagacgagctcgacgagatgctcaaggataaccgggagaagatggmcgtsgcaggmtsgctgggmsccmagtcggagtgggmgatgctgtacamgctggccaaggamaaggaggggcgcctgcccaaggacmccgtragggccgtgtacgacgsctccctcttttcccvgctggcggcgcaggcgaagaagggctgattcgtttacmgyttaatttcagtaatmaataacaagcaacgtttt

SEQ ID NO: 51253 - DNA, 796 bp, Zea mays
  unsure (1)..(796): unsure at all n locations
  Clone ID: MRT4577_14673C.1
gaaatcacgagctaatcacccgcaagcctgttcacagtagtactaatgctataagcagacacaattagctagcacagagccgcgtccccagtcctcactcactactatcagattggcagcaggaggcgatgagcatgagctgctccgaggaaggggagaggcccgggaggagatgtgcacctctccacgtcaacgccggcttcgccgtcggcttcctcgctccgctcctcgtctatttcatcttccagcagcaggctgccatcagcggcttcggcgttgccactagggccgcagtagcacaatgggtcacggacaaacaactgactagagctcctggtgaaacacccgtcgcctccgatgtgcaacggaacgcagacacacagctgatccaagattcagttaatggcaaggtggtgtgtaacacggggggccgttcccgtgactggtccgtgacctgcgaagtcgagggcgacgtccgcaccaacggtactgccctatcggtgaccctggtcacggcgagtcgatcagagcagcatgagtggataatctcaccgtactcacgcagtgacggagcgagcaaatcaagtctccaagccgtcaccgtgacacagcttcaggaccagtccgctgccccgccgtgcaccgtgacccacactaatcccgccgtcctgttcgggttgggggggatacgtgggcaactactggcacgactacaccgacgtcctcgtgccgttgttcgttgcctcgcgccggtaccatggncgaggtgacgtttcctggtcagcaacatccaaca

SEQ ID NO: 51254 - DNA, 470 bp, Zea mays
  Clone ID: MRT4577_146740C.1
ggaagaggggaaggggacagaatttaaaaaccaaaagcttgggaaaagggtaaaaacccggggggaaaacctaaaaaaaaaaactacattttaaaaacagttcccccccaaagaaaagggtaaaaaaacaaaaatctgcaaaaaaaaggggaagggtttgccaaacccaaaaaacccaggggaaagggcagggacaaaaagggaaaaaaaaaagggccctgacagcaaggcaccacccaaaaacccgggagggaacagggagtaaaaaatccaggctttataaccttggtggccgggggtttgcccctttgctctacggggggaaaggggaaccacccagcctttcccttggattcaccttaaaacaaaccatttgaagccaccggggggaccaaaaaaaattcacccaccggggagaatgagctcaccatcagcctgagcatcgaaggggagaaaaaccccccccaaaa

SEQ ID NO: 51255 - DNA, 295 bp, Zea mays
  unsure (1)..(295): unsure at all n locations
  Clone ID: MRT4577_146741C.1
gggacctcgagccggcgggtacgaacagcgatcagaagaaaccacaactttgcttttccagtctctgggaacgtcgcgaaaacagttccacgctctccggacaagaacgcgcccatggatcgcagcaacgccggtgcggtgtccgtcgaggtgcgcggcggcggcggcggctcgccgccaggcgcgggaaggaagcgccgcgcggtggcgaggggcgtgcagaagacgctctcncagacgtccatgctgggccacttcctccccacggcacgctgctaaccttcgagatgctact

SEQ ID NO: 51256 - DNA, 433 bp, Zea mays
  Clone ID: MRT4577_146742C.1
gattcatcgtccatagcaaaaaaaagggctggctcagggaccgacatacaacccatccaacatttgggtccatgaaaacccaggggggggggggggactaggctaacttagtccaggaccccaaaattaaagagggtctgcataggaaaaagctttgtttcttaccatttcattcattccattattcccgattgagaaacatgaaaccaccgaaatgccacccaaggcaaatggatggatggatggaaataacccccgaaaaaaaggttcactcggatctggcggcgtatcgtcccaccctggggtccttgaggttgatgcccaccatggcccccccaatccccgtgctgacctcggccaaaatgggggggtccctgtagggggggactgcctggaccaaggccccggccccgcccccggggtcccccctctt

SEQ ID NO: 51257 - DNA, 101 bp, Zea mays
  Clone ID: MRT4577_146743C.1
atggacctcagcggcagcagagtcagagaacgaaagtcactggatcgacagaatcgctgcatctcgttcgatatgcctgagatttcacgaattcgagtttc

SEQ ID NO: 51258 - DNA, 637 bp, Zea mays
  Clone ID: MRT4577_146744C.1
gtgctcatcttctactctcccctggcctaatccatccaatctttcggttcagaaggcgaggagggtgcggtgcctggtccagatctcgtggccgccatggcggagcagttcgcggagtcagcgaacaatgtaatcatcgaagaggtgaacaagggcctgaaccctggaatgatagtcctgcttgtggttgcgaccaccctgctgcttttctttgttgggaactatgcgctgtacctgtatgcgcagaagacgctccctccgaagaagaagaagccagtctccaagaagaagctcaagagggaaaagctgaagcaaggggtttctgcaccaggggagtgaagagacccatcgatttctcatgtcgattgctttatgctgggctcctttttttacctgataaaaaatatataccagctggagctgcagtgtcgagcgactgtttatgtagaagccttgtcttgagtggtacatcgtcggtattggacaccttatttaagcgactgataaaccttagcctaaattgagccgttatctggtcatagttttttaatttaaagctttgatgggcttcatctgtggcgaacttgtgaaacctgtgtatccgtttgcagtttggtatgttgtgttgcattgtggt

SEQ ID NO: 51259 - DNA, 492 bp, Zea mays
  Clone ID: MRT4577_146745C.1
cagtgtcagtgtgagcaatgacctgaatgaacaattgaaatgaaaagaaaaaaaaataaaaaaaaataaaaaaaaaaaaaaaaaaaaaaaaaaaaaaaaaaaaaaattgaaaaaaaaaaaaaaaaaaaaaaaaaaaaatgcttgtacctgcccgggaggacgcccgggcaggtccaagtttaccttttccacaaaataacggagtccaaaaaagttgccgaagcataaaaacctatggttatggggggaatttttgaaataacaaaaagtcgttcctaagggagcgcagcgtaagttttttgctcaaaagtcgttccgaagggaatgcaaagcttacagcgaaaaataaacgctgattccgttgaaagtaaaaggcaaaaaagctcttaagggaggcttacagcgaaaaataaaccctgattccgctgaaagtaaaaggcgaaaaagctcctaaaggaggtttacagcgaaaaataaacgctgattccgctg

SEQ ID NO: 51260 - DNA, 382 bp, Zea mays
  unsure (1)..(382): unsure at all n locations
  Clone ID: MRT4577_146746C.1
ctgagcggcctaggcataccatcgtactctacacgtatctaagatgtgtggcagtggtgtggctagctggatagcggtgaacatgcaatgataaggcgggagtctgtgcagatgtgaggaggtgggagcacccccgctgacgctcaagactagactgggctgtgacagtgagaactactcgttgaagggggcggatcatgatgtcatcagtaggccagtggcaaggacgagcggcttaattggtcatgacagttgaacagaaacgcgcacatgccgaatgcttttgttgagtctggctgcggacaatttggctaggaggagagtcagatagaagaaggaggaggagctattgaaggtnatgtatcttagaaaatggggttaa

SEQ ID NO: 51261 - DNA, 296 bp, Zea mays
  Clone ID: MRT4577_146747C.1
tacaggaatttatgtatatactgttttgttcatactgaacttcatcgtttaagacttgacaggggcattgtatcgatggccagctttgtgctagtgcgtttattggtgcgatcccagttgtatgtaaatgtaaacattgaccaaatgcagccgaaagaaatgtaatagcgggtcataaactgctatgaatttggataaaaaaaaaaaaaaaaaaaaaaaaaaaaaaaaaaaaaaaaaaaaaaaaaaaaaaaaaaaaaaaaaaaaaaaaaaaaaaaaaaaaagaaaaaaaaaatcaa

SEQ ID NO: 51262 - DNA, 310 bp, Zea mays
  Clone ID: MRT4577_146748C.1
ggagcactgcattttttaatatgattttatttaaatacaacttccctaagctgggctgatggtagtaagcccgcggggggagattacatgacaatgccatttttttgtctactagtagaccctgaaagaccatccagagaattggcccactacacgtttccatttgcatttggagaagtccaataagcccatttttgctggcctttgaacggcacaatcttgactgggaattaaacaaaggaaaatttttttgggaaatgtgggatagtccgtaaatcatcggggaagcttattggatgcttcctccctt

SEQ ID NO: 51263 - DNA, 1545 bp, Zea mays
  Clone ID: MRT4577_146749C.1
gacacggacggcggcacggctgggacgagtgcgtgctggagttcttgggcccgccggactgcagggacggcgcggcgcagaaggcggcagcgggcgccgtcgcggctaccatcatggagcggtctggcggtggcggtctgaaggcggtcgtgataagcgggttgcaggatttggtgtttgacatcgccgcagatggcgagtgcgtgcttcggcctgatcctgtggccatggctgatgatgttcctcagcttgagctgaacggtcatggaggagacgagtgggactcggatgaggagggtctacatctggtggtagctatagctatgggtacaaccactacagacattgaagcatccaagatgcaccatgacgaacaccatggtggcgaggatccgagatcacaagttggcaagaaggcggcgaaaaggaaaggcgagaaaactgtcagtttggaggaactgcagcgctacttctctggaagcctgaaagatgcggccaagagtctcggtgtttgtccgacaacgatgaagcgcatctgcaggcagcacggcatctccaggtggccgttccgcaagctcgccaaggcgaaccgctccctggacaagatcaagcgcgtcttcgagtcggtgcaaggctcatcacaggccatggccgccgctcctgctcctccacctgccgccgctgctgcttcctattctcagcaagctccagccgtggccgctgctcgccgcgcacctgctttatcaccatgcctatcgagtgctccgagagtggcctcctcccaagcctcatgccaagcgccgccgccgcctctgaaggaggccgcatggcgcaagccttcgcgcggcggggacgccagcgtggtcacggtcaaggcgagctatagaggggacatcgtcaggttcagggtgccgagctccgcaggcgtcgcgatggtgaagggggaggtggccatgaggctggggctggcgcccggcgagttcgacgtcaagtacctggacgatgacaacgagtgggtgctcttgtcttgcgacgccgacttccaggagtgcctcgacgtcgtcccggcgttgtcaggcgcgtcagcgtcgtctggctccgggacggctcagccggtggtcaggctaatggtgcacgaggtagctgaggtccatgggagctcctgtggcagctcagattagtcacaggaaatagagctgcagagctcaaccgatgtttggtacaaccatctgtagaagctttcactactggcatgtgtctgtctctagtctctctacatgtatccatgtccaaaaactgaagtcataaatacttacaaatagaaataggagcatctcacactttttgttgtctcagacagtacagatctggtctagtctagggcatagaaaagaacaaatcattgtgatctagcactggtattcgctccatttttaagtatatgacgctcaggataggttaatttattcttcatatatttaaaaaaaaaaaaaaaaaaaaaaaaaaaaaaaaaaaaaaaaaaaaaaaaaaaaacccccccccccc

SEQ ID NO: 51264 - DNA, 2651 bp, Zea mays
  Clone ID: MRT4577_14674C.1
aacaaaaactacgtatctagattcaaattgaatggataattccgacagatatttgtatcttacaacacaattgggatacattaaaataaactgcattactcagtaaacgatctactagtgccactgccaattatagtgtcttaatttcggatcagtttcttagagagatctctctgaaaagcctagcaaagaaatacgatactttccaatgaaacaataatcgtctgagggtcaaaatgaccatgcctcgccatgtgcagatgtgcttcgtgaaacagcagaattgtccattcaggccttgtttgcaatgttgttggagagccaatcaagaccctcgtacaaaccttctcctgtggtagcacaagtgctctggatataccagtggcgttggcgcagggaatggagaccaagcttatcggtgatctcagcagcgttcattgcatttggtagatcttgcttgtttgcgaaaacgagcaagacagcatccctcaattcatcctgccagtgtcatgtggatgaatgatcaacaggttgtactaaaacagtggtcccccccccctccaaaaaaaaactgaagacatgtatttgctgccttcatacatacttccagtataactagccatttcaggttgagtgtacctactaacctacagctgcccatgacggccataactcaagctcaagataacccaggtgcctaaatattgcagaggtaccaacaagtccatatgtatactcatgttatatgtcattgcaaacttagatattaaccagccaactgtgacaaacttttttttataataaaacttcagatgtaattctggcatcaaaatgtattattgtttcccataagtcaaaaatgacaaacccagtgctggcggctcccacataagtgagctctggggatggaataaccgaggcaaactttaaccccctccattttgcagagaggttgcatctaacccaggatcttttggctcagtgcaaaggctcctcaccactgtactatgcctgtccttcattgtttcccataagtcagtctgagaaaacttgattccatgctgtggtatagataccatgcaattatctagactcttaggaattctcgcatcgcaaactttaacttaattcattatacacaggatttggcatgttcaaagtcaccggtgaagtggtgatgcatatagctactctagaagcatttaatagatcaaagcatcattctgaacatagttggaagagaagggtctgaaattcagaagtcccaagaaaattaaaaatgacagcacatattgacatgcaataaatatataacaaaaaaacatgaacatagttgatatacctcgttcagcatcctgtggagctcatcctttgcttcaacaacacgatctctgtcattgctatcaacaacaaagataaggccttgggtgttctggaaatagtgcctccacaatggcctgatcttgtcctgacctccaacatcccagacagtgaagctaatgttcttgtattcaacagtctccacattaaacccgattgtagggatggtggtcacgatttctccgagcttgagcttgtagaggatggtggtcttaccagctgcatcgagaccaaccataaggattctcatctctttcttggagaagagccggctgaagagcttcgtgaaggtgagccccatgttaccacaacttcgtggagatctcggaggtgcgcccacgcgtccgcggacgcgtgggcggacgcgtgggctggggaagagatgggtctctcctttgggaagctgttcagccgcctcttcgccaagaaggagatgaggattctcatggtcgggctcgatgccgccggtaagaccaccatcctctacaagctcaagctcggcgagatcgtcaccaccatccccactatcggattcaatgttgaaactgttgagtataagaacattagcttcactgtttgggatgttggtggccaggacaagatcaggcccctgtggaggcactactttcagaacacacagggacttatttttgttgtagacagcaacgacagggaacgtgttgttgaggctagagatgagctccacaggatgctgaatgaggatgagctgcgtgacgctgtgctgcttgtatttgcaaacaaacaagatcttcccaatgctatgaatgctgctgaaattactgacaagcttggtctgcattccctgcgacagcggcactggtacatccagagcacttgtgctacatctggtgaagggttgtatgaggggcttgactggctttccagcaacatctccagcaagtcttgaagcttttcggcagggctcctagcgagaggatgtctgaacaacttatggctgctttatttttacatattattactaagacacaagctacagcagatatagtgcttgtgaaaaaaggatcttctgagctcttttgagggattgatactagattggattgtgtttttgtttttgggtcgatatcatcgcctgtttggttccacaaaattggctgtcaactatatttacctatgttcggagattgtatgataaattaaattgacatgctttagcgtaggtctccaccgatccagtgttgtgctagatgtgagttgctagattttgtttatagatgagtatatgctta

SEQ ID NO: 51265 - DNA, 853 bp, Zea mays
  Clone ID: MRT4577_146750C.1
ttgggtacctcgaggccggccggggacctttgcaggccaggtgattctccctccccacgtgcgtctcctcggccaccatctccacgagcacctccgtcgccgcgtctcctcagccgccatctccgcgagcacctgcgctgccgcatctcctcagctgccatctccacgagcacctctgccgcctctccaacatattctccgacgctatcccctttccctcgacaagctccatccaggagtgtgtctgcacaaagtactcaatcccttggtactaattcacttgatttggatggacaagaaaccacaagcgacttcaatctatcttctgatgctcaatatggcccagtcaatactaatgaacccactgaagctcaatttgtcccatctaatcaagaatcaagccacagagaaggtggcagtgcgagaaagtgtaagcaaagccatgctggattagctcttgaaagtgatgtggagtttaaaaagatccaaaatacagaaacacttgaaactcttagagaacataagaggcaagaggatcaattttctagttagcaagtgccaggttgaattgaaaggaatggatggattaacaaccatgaacaaatcatatgctttggagcttttcgtatctgcgacaaaccgagagatgttcttaacaacaacagaacatgatgttagagaaatttggctcaaacgcaaaattaggttgcttcgggggagtgatgcatggactgaacaaatgatatgagcaacattggaacaaattttacatgtatgttgttgaacgtgggcttccaatctgggacatgactcatgaaaagcagtgttctgctacaaacattttgctgatact

SEQ ID NO: 51266 - DNA, 309 bp, Zea mays
  Clone ID: MRT4577_146751C.1
tttttgccttatatttccgttccatacaattcaatcctatggagctagccaggtaggatgctacgtatagaacacgacccatcgtgcaagacaagacacgaggagacatgcatcttatgcaccctatgctgttagatgatgtccatcgatgatttaaggacttctcgttcattgtttccacacagtttcgctgccgattataatttaccccgtttctgctttttctgcagtcaaaacggttttaatccagcatcctaacagccttaggtatgatgaaaaaaaactagggcttccactctttccttcacc

SEQ ID NO: 51267 - DNA, 878 bp, Zea mays
  Clone ID: MRT4577_146752C.1
attctacccccccacgtgcgtctcctcggccattttctccacgagcacctccgtggccgcgtctcctcagccgccatctccgcgagcacctccgctgccgcatctcctcagctgccatctccacgagcacctctgccgcctctccaacatattctccgacgctatcccttttccctcgacaaggtagtgcggctaccagagagtaaattggagcatcaacctttgttgatcttcctccaccttcagctccatccaggagtgtgtctgcacaaagtctcaatcccttggtactaattcacttgatttggatggacaagaaaccacaagtgtcttcaatctatcttctgatgctcaatatgtcccagtcaatactaatgaacccactgaagctcaatttgtcccatctaatcaagaatcaagccagagagaaggtggcagtgggagaaagtgtaagcaaagccatgttggattagctcttgaaaattatgtggagtttaaaaagatccaaaatacagaaacacttgaaactcttaaagaacataagaggcaagaggatcaattttctattagcaagtgtcaggctgaattgaaaggaatggatggattaacagccatggacaaatcatatgctttggagcttttcgtatctgcgacaaaccgagagattttcttaacaacaacagagcatgatgttagagaaatttggctcaagcgcaaaattaggttgcttcgtgggagtgatgcatggcctgaacaaatgatatgagcaaaattgcactatgcttccttgcagtacctctttccatctcctgtcgctgcctctaccatatctacctgaaggaacaaatttgagtgcatcttctgttgacagtggcttt

SEQ ID NO: 51268 - DNA, 602 bp, Zea mays
  Clone ID: MRT4577_146753C.1
gtgtggcgtcacttttgagggattttttgggtctgacaaggatcagcgctggagtggcctcgccgctgccctccgttacatggaggagttcctgctcaccctgaacccgttccggttcaagccgctctggccgacgacgactgcccccaaatccttctgaggccctaggaaatcctactcccgcccggcttcatagaatccccgggccgcccccccttccccgactcccttttttcctcagatagtcatccgggttttccgagaggcacccctcctcccctgcgaatcgagagcccctagggccgtaagcccgtaaccataagtcctcctccactttccgaggccccgccgcccgcgccccggacctgctgtgagcgtccttccttggtggcgttaagcgttgcggacggggatggcgagggaggaggacggcccgcagttcgtgcggtggagggaggagttcgtgtctcatgagcgcggcagccgcgtcgtgcactactacctcgaagacgcggccggcgtgtcacatctcggcgtcatcggcaccgagaggagcctgcgccatatgctctacgtgggtctcgaggacttcaacgccgcgt

SEQ ID NO: 51269 - DNA, 1056 bp, Zea mays
  unsure (1)..(1056): unsure at all n locations
  Clone ID: MRT4577_146754C.1
gcacgagcccagtgactccaaccctagcctctggagctcctccccaacgccatcgctcatctgccgtcgccacgagctcctccgtcgtcgcacctgatccacatcgagctctctgatgttgtccccttccccccacaagttttgaaaaaaggaagatttggaacaatgtgtatgagaaaggcttagtcgatgtgatgcatgatcacaaagataatccaaaattcaaaggtcaaaatggttggaatcgtgatggatggaatagtatcactaccaagttcaatgaaaagttccctctagctcatttctctaaacaacaactgcaagagaaggagagagagcttaaaggatactacaaggcaataagggattcaagaaaagaaagcggggttggttggaatgacaccctatgcatggtactagctgaaccagaagtttggccaaggctgattcgcgctcacccaaaggtatcaaagtttcgcaataggccattccctcttttttacagtttagaagggctatatgaaggtagtgtggctaccggagagttgaatttcacatcaaccgctgttgatcttcctccaccttcagctccatccaggagtgtgtctggacaaagtctcagtcccttgagtactaattcacttgatttggatggacaagaaaccacaagtgtgttcaatctatcttctgatgctcaatctgtccgagtcaatactaatgaacccactgaagctcaatttgtcccatctaatcaagaatcaagccagagagaaggtggcagtgggagaaagcgtaagcaaagccatgttggattagctcctgaaagctatgtggggtttaaaaagatccaaaatacagaaacacttgaaactcttaaagaacatangaggcaagaggatcaattttctattagcaagtgtcaagctgaattgaaaggaatggatggattaacagccttggacanatcatatgnctttggagcttttcatatctgcgacaaaccgagagatttttttaacaacaacagagcatgatgttaaagaaaattggctcaag

SEQ ID NO: 51270 - DNA, 445 bp, Zea mays
  unsure (1)..(445): unsure at all n locations
  Clone ID: MRT4577_146755C.1
gaccctcaacagcggccgcccccatcccnggnncagttatatattttttcaacgcaagcgcgcacaaacgcgggaagggtttaattagccactcctcaacagagaaacaatgccccacgaagggccagggtgtcgccaaactgtacggacaccaactcgacagggtcagccaacctaatcagaggcgcttactggatcatggggaacggactcggcggatctaccacgtaaacccaaaaaaactcacaaaggaacaccggccaaaaggcacaagaagcatgcccccatggcaaaggcaccctcaccccaggtcacaaatagcaagccagcccatagcttaaaacctgagagcctgtgacttccgctcacgaagacccacccaacataccatcgcggggcatcaaaagccaatgctgaggtgccaaacgagtgggccaacttacat

SEQ ID NO: 51271 - DNA, 263 bp, Zea mays
  Clone ID: MRT4577_146757C.1
atataatatacggccagcctcgaaggaacaagacagggaagacaggacacaggaatagtcaagctgcgcttggcataatgccacaataaagccttaggcgactgaatggtaatcaaggtcctatcagggagggaataatatggatagaggggagacaaaacacgagcgccaatcggtcataatggtggaaaaacagacaattcaggctgggccgctataacatagtgcttaggacacgagtgagggacggtatcgtcagggaa

SEQ ID NO: 51272 - DNA, 238 bp, Zea mays
  Clone ID: MRT4577_146758C.1
cgcctgtcgtttccgcgaactcgacccgggggccaaggtttctttctctggtgatcctcaagccggatgtcatcgcgcccggcgtgaacatcttggtggcttggagcggaaacgccagcccgttagagcttgtacagcgacacgcggcgggacggcttcaacaacctggtggggacgttcatgtcgtgccctcacgtcgccggcgaggctgcgctgatcaaggccagacacccggact

SEQ ID NO: 51273 - DNA, 270 bp, Zea mays
  Clone ID: MRT4577_146759C.1
actactcctcaggtacgccggtactggacagggacaatcgaagacacacagccagagatccgtactactgtaaagtaggtaaaaagaactgccagatggcttgataggagctacttccggacgaaagcgctgatatgggcacgcacgtgtgccaggccgcaagggactacgaggacggtctgcttgtccgctactccctgaacggcgagggcctgtgcatgccggctccgtgcgccgacccgctgaactggggcaaggccgtggagggcc

SEQ ID NO: 51274 - DNA, 422 bp, Zea mays
  unsure (1)..(422): unsure at all n locations
  Clone ID: MRT4577_14675C.1
cacccgcccctgcccagcccctgttttgtccaccgccggcgaccccgccgtcgcagcagcagcagctgcggcagcggccaccccgtcaggtcgcgcgccgaggctgccgcggtggacgcggcaggagatactggtgctcatcgagggcaagcgcatggtggagggacgcggcgggcgcggcgcgcggggccgcgcggcggcggcggcggcttctggagaggcctcggcggtggcggcgctggagcccaagtgggccgcggtggcggagtattgccggcgccacggcctcgagcggggccccgtgcagtgccggaagcgctggagcaacctcgccggagactcaagaaggtgaagaggggnaaagcgcccgctgcgggcgtcgcgcgagccgtccttctgggctatgcgcaacgacgcgcgca

SEQ ID NO: 51275 - DNA, 450 bp, Zea mays
  Clone ID: MRT4577_146760C.1
aaaaaagattttatttatttgctttaaacaataccgtgcgcttttcaatgggtgggtggtgacttaaagggcatgctgggatttataacttcatacaccaggcaccacgcgcttttttagggattaattattaaatcccttaaccattatgccctgagcgttaggaacaccaacaagggttacaccccggggtacccgaacctttttgacctttatgcattcaaaaacgttgacctttttttttttttgacaagatcggaaaatcgaccccaaaatgaaattagtcaccttttcgcaaaaacttttttccaactttttaaactttggattctgagcatccttatggaaaacctttttaaaagccttacgtgagatttgaccacaagcctgaatgttggggtgctggagcttttcaccccggggggccatcaaaccttttaaaaccccact

SEQ ID NO: 51276 - DNA, 380 bp, Zea mays
  Clone ID: MRT4577_146761C.1
cgaaggctttgggttgatcttgtgttgatgtcaaagactactgtcaaaactctggaggcggtaacatctcgcaagaatacgacaaatcgcactatctacagcctgtgagtatatctaaattctcttcaacacttcattacgcaccagctattaaatatgttttcggttcttgccatgagataggagaatagagcactgaaaaagaaagccattgatctcatgagaacgcttcgcatatctagaaactagtcttgtgatagtgataatccgctgccagtacatacacatcaacagctcatgttcatgtttacataagatgaacgttagcattgttggtgtctacaacggcaatacattaaggtcggttgatatcaaggatt

SEQ ID NO: 51277 - DNA, 567 bp, Zea mays
  Clone ID: MRT4577_146762C.1
gcggaggtttccttttttatcggatcccacaatttttcacaagcccatggcgcagaggttataactgacgcagatggggacgcccccaccatggcacgaacacgaacgactacttgggcgaacggggcgtgctctggcggaccccccatcacatgcaaagggtgagcaacctaggggcccatataaccacttgggatcgacgatgggtcgggctcacccacgggccgcctgtatgggcgagtgaatctgccgttacgctcgctttggcgcaccgaggtgagatccctgaaggctgatgcctaactgtcaagggcgccgcggacgatcttgacccaccatacaccttaatctctgcacgcctggcgaaaccatggcatgaattggccacccccaaacagggaatgacgatcggaacaactgaatgcggcgctggatcatactgcactcccgctccgacaacgacgcgcaggtcctacactgcgaccgccgccctgaccaccaaggattgagacgggagccgcacacacttggtactgtgccgcgtgtctatgcgaacctatccgtgca

SEQ ID NO: 51278 - DNA, 464 bp, Zea mays
  Clone ID: MRT4577_146763C.1
ctcctcacttatgcgccgccacccactacaggtaaggaagaggaggagggcaggatgtctcaccggaaggtggagcacccgaggcacgggtccctcggattccttcccagagaagcgctcctcccgccaccggggcaaggagaagtcatttcccatggatgaccccaagaagccacgacatctcactggcttccttggctacaaggctgacatgactcacatggaccgtgagggtgagaagccaggatccaaactccataagaaggaaacttgtgaggctgttaccatgataagaaacccctgctgtcgtcattgacggactcgtggcatatgcgaagactcctcgaggcctccgaacactcaactctgcttgagcccaacatcgtaccgaaagagtgaggagacagttctacaagaactggtgcaagagcaagaagaaggcttgaaatagaatgctctcaaat

SEQ ID NO: 51279 - DNA, 179 bp, Zea mays
  Clone ID: MRT4577_146764C.1
aaaattctgttcattgtgtttaacttttttaaaacattcatttactttttttttttcagagtcacacaaaaaatcccttggtaactcaaaacaagaaactgtttggacgggggggggggggttaaaatcagctatttaaactggggtagctgtaatccatagagacaaaaacaatatag

SEQ ID NO: 51280 - DNA, 352 bp, Zea mays
  Clone ID: MRT4577_146765C.1
ccatctcgtccgaccactcatcagagcgaccaaggtgcgatcacagatccagtgctcactttaacgatgagacgccctaggcgcaaacatcctacatgaacggccaggtgacagccgatcccatgggcgcgatgacggaggggtgaatcctgttccataaggagggggagggctggattactaccaaagagcttggcactgcgatgcgctcgcttggcctgatcctgactgaagcactactggaggacatgaccaacgaggctgatgctgatcgcaatgcgaccatagacttgcacgcgttgctgttcctagctggaaggaagatgaatgacaccttctccgaagcggacct

SEQ ID NO: 51281 - DNA, 554 bp, Zea mays
  Clone ID: MRT4577_146766C.1
ctcaggcgcgctgaataccgatacgctcgactgtgtgggcgtacatgaatacatgatcagtgtggcccggtggtataccatgcatagatgggagggtattgacacctgctgcacacactaatatactggatcatgaacacactggcgacggtggttacttcacttttgagaagcggtgggggcttggtgcataaggtgcgtgtgcaccaaggtgaaccgtcaaccgagtgacgcaccgcactataataatgggcgggtgtaaatctaggccggaatactgtggaaagctgagcgtttaaaggactgtggtttaatccagacaacctgcgccaccaagatacattaggctcgtgtcacgttggtaatgcgctgaatgacttgaccgagcattggacatgcattatgcatatgcgctggtgctacctgctgatcaaaaaagagagaacacgctcttgccaaaaaataaaaaaataaaagggcagtcgtgtatcacagagccaaccttacgtacacatgcatgcgacggcatatctcttctatagcgtgacctgaat

SEQ ID NO: 51282 - DNA, 882 bp, Zea mays
  Clone ID: MRT4577_146767C.1
cacaaacacacgggagctttaaccgcactacttgtgttaattgtcacattatggtactgcagattgtgcacgtagtgagggccctacccatgctgggatcctaggacggtagtctaattgacaataatgttgattagtgtgtagttggttcattagtcaattgttaagtattgacgtgggatcatgttcctaaattattgaatttagattctttgcaagcgcaaaatcttcttttatactctgttttaggtcaggtgttgtgcaagtgcaatgcaggcagtgtcgtttttttccctaagggttacttttctaatactgattgtttcttcacgcttcttttatcatatgtagtctctgccataaacgggctgtacatgtcactgggatcaccacttcttcctggatggactggaaatggtggagacccttgtggtgagggctggcagggtgttgtgtgtaccggctcttctataactggaataaccatgaatgctgcaaacttgggaggacagctgggaagtttaggaaacttcaatgccatcaccagcatagagcttaacaacaataatattggtggaagcataccagaggacctacctgttactttgcagatttcctctctgctaatcaaattactggaagcataccaagttcactgtcaaaactcgaaaacttatcagccatgtcagtcaacggcaaccatctaagtggaggcctaccagacacttttgattcactcaatagacttgtaaatttggatatttcttcgaataacttgactggcgtgttaccgtcgtcaatgaaaaagtttgcatctttaacttcattgaacatagagaataatattttttctggaccggggcctgccagcttgcttaacat

SEQ ID NO: 51283 - DNA, 366 bp, Zea mays
  Clone ID: MRT4577_146768C.1
aaaaaaaaaaaaaaaaaaaaaaaaaaattaataaaaaaaaaaaaaaaaaaaaaaaaaaagaaagataaaaaaaaaaaaaaaacaaaaacaaaaaaaaaaaaaactatttttaaaccttaaccggccgttttaaagaatccaactttacttacccttgcttccaacgtaataccttttctatagggccacttaatttaatttcattgcccgccgttttaaaccgctgaaactgtaaaaaccctgcctttcccaaacttaattcctttgaaaaaaatccccttttccccaattggcttaatcccaaaaaggccccaaccaatcgcctttccaaaaagttccccaccctaaatgccaaatggaaccccc

SEQ ID NO: 51284 - DNA, 438 bp, Zea mays
  unsure (1)..(438): unsure at all n locations
  Clone ID: MRT4577_146769C.1
caatagaagtctgctggagactgaaatagaagtctgcgctggatgacatattttgttgtgccgattagattcatggtacgggtgtggaagggttccctttcgggcttttgcattgtgtacgtgggagtggagggggggcctgtttgggtcggcaagctgcagtgtgcagcgagagcttgtggtttggaaaccgtccagcgcgcaatgcgaagattcattcttctggcccagctgtcgctgatgtttacctgtcgtataacagttttccaccttggaatgttccagcgtacaaggttttactccgtttttctttttctgtatgtcttctctcctttgacccaaagtctgtttttgaaaaaaaactttcttattgtttgggnccctgcgagggttccttggtttcagtttttttttttttttttcttttggtttcctttc

SEQ ID NO: 51285 - DNA, 1444 bp, Zea mays
  Clone ID: MRT4577_14676C.1
cctcgaggccggccggttggaaacttctaaatacccatttgttagagatggcttgggtgaacaagacattgtcactaaaaggaggatactatgactttgttaagggatcttttgagctctggggccttcagtttggccttgcatcctctttctccgtatgaacatcaaccattatcaatgacctcatcttggttccctaagttaaagatgtggccaccattctgcattggaagctataggggccatgcttagaggtcgtgtgtatctgcaatgaagaggcctagccaccttcatcaccatatgatatttataaaaatatatatatatgaaactatgaactgcgtttatgcatgtcggaaaatcttcttttgataagagtttggaaatcctcttgtaacaaaattttcattattcaaccttgatctttatatagcccgcaaaaaaaaaaaaaaactaccaccgcaccacgcgctcccgtttccgccgatccgagcggcgcagatcgcggaagcccagcggctcagagtccagggggagggagctcccggcggctgaggaaggcgttcaccagcgtcgcggattttattgaggaagagatggggctctcctttgggaagctgttcagccgtctcttcgccaagaaggagatgaggattctcatggtcgggctcgatgccgccggtaagaccaccatcctctacaagctcaagctcggcgagatcgtcaccaccatccccaccattggattcaatgttgaaactgttgagtacaagaacattagcttcaccgtttgggatgttggtggccaggacaagatcaggcccctgtggaggcactactttcagaacacgcagggacttatttttgttgtagacagcaatgatagggaacgtgttgttgaggctagagatgagctccacaggatgctgaatgaggatgagctgcgtgatgccgtgctgcttgtatttgcaaacaaacaagatcttcccaatgctatgaatgctgctgaaattactgacaagcttggtctgcattctcttcgccagcggcactggtacatccagagcacttgtgctacatctggtgaagggttgtatgaggggcttgattggctttccaacaacatcgccaacatgtcttgaaggagcttttcagcagggctcctagcaagaggaagacgtctgaacaacttatggatgctttttttacattttattacaaagatactccctctgtctcgatttactattccttttgggatagtggttgattcatataatatttgatgtatgtgtttaatagatgtgtctagattcaccatcatctattttaatatggacatagatataaagagctaaaacaaatactattttggaacgaagggagtatctatagtagatagtgtgggtgctctggagagaaaaaaaatctgagctttcttttg

SEQ ID NO: 51286 - DNA, 256 bp, Zea mays
  Clone ID: MRT4577_146770C.1
gcgtgccaacgctcgtgaccacgcctccgagggattacatgggcttgtagcagctcgcatcgtcgcccaggactccccagccaattccgcagttccgcgtgcgatgaacagggaccgctgctgtgctctgcctccggtccattcctgcgctcgagaaccgcgactccctccgtgcgcgcgttgttgatcttcgagctccgctctgcatatcagacgagattttcttatattttggtgaagatgaagagaaaggtgc

SEQ ID NO: 51287 - DNA, 306 bp, Zea mays
  Clone ID: MRT4577_146771C.1
aaaaaaaaaaaaaaaaatataaaaaaaatttttacaaataaaaaaaaaaaaaaaacaacaaagataaatttataaaaaatacatatcacaatcatccataacaaatatattcaatattgtacctccacattcaaactacttctacctattccttcaatttttcctctatctatcaatctccttaaccattcctgatcacctgtacatccatcctgcattctatgattctctttctattcatgacacacacaacaacttctattccgaatctttcttcaatcccatcttcaatattcatgcgatcta

SEQ ID NO: 51288 - DNA, 729 bp, Zea mays
  Clone ID: MRT4577_146772C.1
ccctttcttccgggcacgttcctgccgggccccgcgcggggggttcttcacggggctgacggtgtacctcgcgggcggccaggggcaggtcgtcggcggcagcgtggtcggcacgctcatcgcggcgggccccgtcatggtgatggcgtccacgttcgccaacgccacctacgagaggctgccgctggacgacgccgaggaggatccagggcaggcgcagctgcctcccggccccggcggagggccccctctgataatgggcgggatagccgatccctcggcgatgccaatgttcggcggcggccgcggcggtgtgccgccaagcctgatgatgccagggggcgccgccgcctccggtgcgggcctgcagctcgggcacgaggggcttgcttgggctcgtgcacggccaccgccatactaggaggggatccatgtctgagaaattcgagtagaaatggaggatcgttcatcgcaccggcagcctcaaggacgactgcgactcatcatatagttacttcaagctagaactgatgatcgaattaagcatgctgccaggagcaaataaaaggttgttcgactagctaatacactgctctggtaagaaggtaaactagtactttatactacgactacaaactgcatgcatgtgagataccatcgagcttgcactgtatatatatatatggtttagatgcagcgtgataaattagatgacgggatgattattat

SEQ ID NO: 51289 - DNA, 412 bp, Zea mays
  unsure (1)..(412): unsure at all n locations
  Clone ID: MRT4577_146773C.1
tgtcagggggaaccttaaagtggacatgagnnatcgctgatacagcacgctactcaggggnaggagagtcatgtcatggtaaccaccgacggttcctttcacacttgaggttacaacacttgctcactgtggactgaaactggcccggatcgacatggcaaatggcatatgtttgtcattcactgcatacaactgctggcagagtgcctgcatgatcctggggatgagtgtgtggagacaggtgtgcatgcatagctttcggtgctctacattctgaggataacatacgctgtcaacagttggttttacccagcttgttgcttatcattgcgcctttgctaacatacactcttgccctgccatatggtctatggtaacagggaaactgactgatgttatgttggatgcaaaa

SEQ ID NO: 51290 - DNA, 1801 bp, Zea mays
  Clone ID: MRT4577_146774C.1
accctcgacggagcagttgtccgttagtcgcttagcgttacaagcgcgttcagcactctcctcccctccccacctcgcaagcttgctcacttctgtcagctaccccgtccccgtggcgactggggacatcgtttccgtctccgggctcggcagacgcaatgctggcgcagctgctgctcgtgcacctcctcctcctccccgccgcgtcctcggccgaccaccaccgccattaccggggcagaagggcgctgcacgagccgctgttccctctggagagcacgcccacgctgccgccgccaccgcccgcgccgttcttcccgttcctaccaggcgccgcggcgccgccgacgccggtggcgacgccggaggttggctccgcctccacgccagccgacaccggcgcgggtgacgcgtcgtcgtcgccgcacccgacggcgccggccaacatttcgtccctggcaccgctgcccgtctcccacggcgcgccgctccgggccttcctctcatcccaccgcctcctcaccgtcctcgtcctggtcgtcgccgttgctgcggccgtgctcacggccgcgctcgtttacatcctcgcccgccgccagcatcgtcactcacccaaggaggaagctgcagtgtacgcaaagccctcctcccttgcaccgggcaaccccgtgccctacgacggtggcgaccagcatggccggggctcgacggccaccgtctccagcgccagctcgccggagctcaggccgatgccgcctttgccccggcaattccagcagacgcagatgaacttggcgtcgtgttcaaaatccgttcttgacgccggagcaggaggtaagcgtccatcagagggtgctcctcctcctcctcctccacctcctccaccactgctgcctccaatgccaccggtgaaagacaagggcggcgccacagcagctactgctcctccggcgccgccgcctcctctgccgcgagccggcaacggcagcggctggttgcctcggcggcactccgagcgcccagcgaccacggtgatcagggcctcggcgagcgcagttcacccagaagagtctccagagcgcgcgccgtcagagaaaccagcggacgcggacgcggacgctctgccgaagctgaagccgttgcactgggacaaggtgcgcgcgagctctggccgaccgacggtgtgggatcagctgaaggcgagctccttccgagtgaacgaagagatgattgagacgttgttcgtctcaaattcgacatggagatcctccaagagtggaatcaaggcgccaaattccagttcgtgcagccaggagaacaaggtcctcgacccgaagaaatcacaaaacatcgcgataatgctgagggcgctcaatgcgaccaaggaagaagtgtgcagagcactcctagatgggcaggcagagagccttggatctgagctcttggagatgctgctgaagatggcgcctagcagggaagaggagatcaagttgaaagaatgcagggaggacgctgtgtcaaagcttggccctgctgaaagcttcctcaaggcggtgctcgcgatcccattcgctttcaagagagtggaagcgatgctgtacatcaccaacttcgatttagaggttgactacctcaagacctcctacaaaactcttgaggcagcatgcgaagagctacagggcagcaggttgttccacaagatactagacgcggtcctgaagacgggcaaccgcatgaacaccggcacgaaccgtgggaacgcccacgcctttaagctggacgcgctcctaagctagtcgac

SEQ ID NO: 51291 - DNA, 254 bp, Zea mays
  Clone ID: MRT4577_146775C.1
caaaaaatatttttaaaaaaatcagagacgctgagtcgctgaaagtcaaaaaagtgaggttagaaaatgcaaaatggggccaaattatgacgaaaatatcggcattatacccccattaaaatttgcctggaaagtacaccaccattttgaaattatgaggccaaaaaaggattaaacatccagcatccatgggggggtcatgagcaacccgagatgggcccaaaattaatccggaatgcgggaaccaacatggg

SEQ ID NO: 51292 - DNA, 429 bp, Zea mays
  Clone ID: MRT4577_146776C.1
cgacggcggcgcagatgacgaccctcgatctgatgggagggtacgggcgggtggacgagcaggtggccatccaggaggccgccacggcggggctgcgcgggatggagcgtctcatcttgcagctctcccaggctggcaccggggagcggtcgttgtccccaccggcggtacaggcgcagcgccagcagcagaagcagctggagctgcccagccattgatttggcttcctgcctgctctgtcctgtcaattactagtagctgttgtcataagttataaaatcaaaatcgccagttcagttttagcagctccgttttccgatttttttctcttctgtcgttcgcgttagcagctttgtgaaaggattaggaaagtgttagcatcagacttggagaagggaaaagaaaacaaaaggtaatgctcttgttatt

SEQ ID NO: 51293 - DNA, 458 bp, Zea mays
  Clone ID: MRT4577_146777C.1
tggaagttcggcacgagggggtaatgcgcctgctgatcggcgcactggtgcacaggcatctgggggatctagcagctccggagcagtctgaggactaggcattagccagcgcttacatatactggcgtatcgatgcgcctgatggagctctcagctgagcggggtgcgccctccgaacgggcctgaagcgcgctagagtaccctcgccctcccataatcggcgagggcagctagggagacgaagatcgagtatgcgcgtatctgattggggcaaggcagccctgaggttcgtatcaccggatgctggtatataggggcttccatgcccacttacgagggcgactaggctgttaactaagctggatcatgacatacacacgatgtacgatcgacagtgtcatgatctcctggcctctgcacatggaacaggcggatcagaatgatcacatctatagggg

SEQ ID NO: 51294 - DNA, 1454 bp, Zea mays
  unsure (1)..(1454): unsure at all n locations
  Clone ID: MRT4577_146778C.1
ccccgcgtccgcccacgcgtccgcccacgcgtccggtcaccgcctaccaccgttttatatccacccctcccactccccctgttttttcttcttccgctgttctactccggcgtgttggtcgacggcggcgcagatgacgaccctcgatctgatgggagggtacgggcgggtggacgagcaggtggccatccaggaggccgccacggcggggctgcgcgggatggagcgtctcatcttgcagctctcccaggctggcaccggggagcggtcgttgtccccaccggcggtacaggcgcagcgccagcagcagaagcagctggagcagatccagcagcaggttgactgccgggagctcacggacatgacggtgtccaagttcaagaaggtgatctccatcctgaaccgcacggggcacgcgcggttccggcgtggccccgtggcggcgcggtcgcagtcgcagtcgcagggacctgcctcccccgagcccgcgcaatcggcgccggctcccgccgcgaggcccctgacgctggacttcaccaagtcggtgtccggttacagcagggactccgggttcagcgtgtccggcgcgagctcgtcgttcctgtcgtcggtgacgaccggggacgggagcgtgtcgaacgggcgcgcgggaggctcgtcgttcctcatgctcccaccggcgcccggcgcggccagctgcgcgaagccgccgcccgccggtgcggcgcagaagcgcaagtgccacgaccacgcgcactcggagaacgtcgccggcggcaagtacggggctaacggcgggcgctgccactgctcgaagcgcaggaagcaccgtgtgaagcgcacgatccgcgtgccggcgatcagccccaaagtggcggacatccccgccgacgagtactcgtggcgcaagtacggccagaaacccatcaaggggtcgccctacccacgcggctactacaagtgcagcacggtgcgcggctgccccgcccggaagcatgtggagcgcgaccccgccgacccgtcgatgctgatcgtcacctacgagggcgagcaccgccacagccccgcctccggccaggacccgccgccgccgtcgctcgcgccgctgccggagctgcccagccattgatttggcttcctgcctgctctgtcctgtcaattactagtagctgttgtcataagttataaaatcaaaatcgccagttcagttttagcagctccgttttccgatttttttctcttctgtcgttcgcgttagcagctttgtgaaaggattaggaaagtgttagcatcagacttggagaagggaaaagaaaacaaaaggtaatgctcttgttattagtattatttttttgtatacagcaaacaaaagcatccgcagagaaagttgtggatggtgtagtcggtcggaattttgaccgggcttggggtgttccagagccggattgaattna

SEQ ID NO: 51295 - DNA, 291 bp, Zea mays
  Clone ID: MRT4577_146779C.1
gggggcggccttttttttttttttttttgatacaaagcggcagaggaaacctcggccacagccagtgaggacaggtaaagagttccaggaggagagagcaaggaaatccgaagcccaagatactaacatgcagccaagcccagcagagataccagagccacacgctatgattccagaaccagggagcaaccattaaccgcagatagggcgcaagcgacccgcacctggtgggaggcaggggacagccacaggaccaagaaggcggcccggaggaaggaacacgccgccccc

SEQ ID NO: 51296 - DNA, 496 bp, Zea mays
  Clone ID: MRT4577_14677C.1
gctgcgcctcctgagcatgggcggggcaccgaccggcctgaataatgttgacggtttcccttcatacccgtctcctgccccagccttcagctttgaggacaaccgtgctcgctcgtccggcaaagctgttgtcgggtggctgaagatcaaggctgcgatgcggtggggcatctttgtcaggaggaaagcggccgagagacgagctcaacttgttgagctggaagactagcgggtgcttgggctcagtgttgcacatatttatgtggcgaggcaagtagaactgcaaaatgttgtatgtataatacgcttcccttttggctgcccttgcacaatatatagctccattgatattgtatattaatgggtaggggttttttcttttatgaattcaggaggggtttccccctactgtcttctattacgtggaagacttgaaggacgatcaggatcctgtcctgagctcatgagcttttacgaatgaactcacgttggttgt

SEQ ID NO: 51297 - DNA, 639 bp, Zea mays
  Clone ID: MRT4577_146780C.1
gttttgatcatccttgttctagcgaagggcagacctagtatagtggtgagagctgtctcactcatgtgggagttgccagcacttgggtctgtctttttttttttgaggtctctcattctaggcagactgatttgcacaaagaatgatgcatgcaaaatatctacatgctatcttttctaagactactaatccttgttttggctatgtttgtgtttctcatatttttttatctgcataggttgagtgtcggtcatcttgttctccttagcagaaccctctaaaaaaattcgtcctctatatcttcgccatctccagcaacgtcctctaaattcggtactctatatctacagtgataacaaaattcatatactcattttttaataatcattttttcatattaatacaatttgaacttatgtgcgtaatggaaaaatgaagttatttatttctagaaattttataagaatgaattaggaactaattataataattacattttgcaaccgacattgctaatcgttttttcataacgaaaaaactacagtctacgtacatgtctatatacatattggacataaactgataatactaatctaataatcctagttagcaaagtgctgctactattaggtttacaca

SEQ ID NO: 51298 - DNA, 286 bp, Zea mays
  Clone ID: MRT4577_146781C.1
gaaaacagcttctgtcaggcacatgatctccaagcggaacacggagctcttcttgagtaaaacataccccctgtgtgttctgggtcacgcatcggccgctgatggggaacgggactaacggatatacacttcgccgaatggtggttacgtaaatagcggcgatggccgcacggaggatattgcaccaatttttgtcacatggctgctacaggaaggaatcctgctaaagctgtgcacataaagtggaacggggtagtcaagtgttcgtgacactttggtaatgcct

SEQ ID NO: 51299 - DNA, 379 bp, Zea mays
  Clone ID: MRT4577_146782C.1
ggggcgggtcgctggagaacgccaatgcaccggggtatgatgctatgtccgtgaacatgggcgtggaccgcagcaaagctgtcgtagggcgatcatcacgacctgtatcagaagcagaatacctgactgctaggtccgacgcaggtcaagaagaaggctagtacgtgtaccgcgcttgtgtcgacgctaaacataagctgctatggtggaacttgtggtgcgttctctgcgcttacgaactactaggcctccccatcatcatcgccaggaccatcccgaataagaagccaaggacgtcgccgccagatcagtacacttaggcgatgcacaaggcgctcctcttcttcaacgccaagaaatcagggcacctttccacgaa

SEQ ID NO: 51300 - DNA, 278 bp, Zea mays
  Clone ID: MRT4577_146783C.1
aattattatttttttggggggtttaacattcaaaaaaacccaaaaccatggaaccccctaaaccaaacacccacccaaaaagggccccggccccaaaggttttaccaaacagccacaccctccggggaccactattgtgtaactcaaacgaacacctttatttttttttacaagaccacacaccggaccatgggcaccttttcaccgcaaattgccaaggacgagtggcgtgcccacctccaaatgagggaaaaagccacacaacaccttggaggttc

SEQ ID NO: 51301 - DNA, 350 bp, Zea mays
  unsure (1)..(350): unsure at all n locations
  Clone ID: MRT4577_146784C.1
ggtccgaacttcccgggtcgacccacgcgtccgggaggctccaccctgtgtgtttcccgcacagtcaatcaaaataggaatttatttattccccggaccgctcccggccgtgtccgccgccgcttcccgcatcctctcccgccgccgccgccttcgcttctcaccatgtgtaaggcggcggggagccccgcctgagctgtcctaaacacactatgaccgctcccgaaaagcccgtgaaacaagaggaaatggctgccttggacgtggacggcggcggaggcggnggcggccacggcgagtatctacagcagcagcagcagcaccagcagcagcacggaaacggcgcggcg

SEQ ID NO: 51302 - DNA, 922 bp, Zea mays
  Clone ID: MRT4577_146785C.1
aatcccccaagcaggcagcagcaatggcggtcgagcccgagatctgcgtgctctccaatggcaggatcacggcgaacatcgccagctggggcgccactatcacctccctcctcgtccccgacgcgcaaggggatctcgcggatgtcgttcttgggttcgacacactggagccgtacttgaaaggcatggcgccttattttggttgcatagttggccgagttgcaaataggatcaagaacgggaagtttgatctgaacggagttgagtattcattgcctatcaacaatgtgccgaacagccttcatggtggattgaaggggtttgacaaggttgtgtgggatgttgtagagcgtaaagatggcgagtacccatcaataacctttcaatatgagagcaaagatggcgaagaaggttaccctggcgatgtaaccgtcagagcgatgtattctcttccggaggctaccactctaagacttgacatggaagctataccagctaacaaagccactccaatcagcttggcacagcatacttactggaaccttgcaggccacaactctggcagcatcttggatcattcgatccagatctgggcaaagcacatcactccagtcaatgaaaacacgattcctaccggagaaataatgcccgtccaggacacaccttttgatttcaccacggagcacaagattggagaccgcatcagcgatgttcctggagggtatgaccataactatgtgttggactcggccgatgagaagaatggcttgaagcacgcagccaagctaaaggacccatcgagctcacgaactctggacctctggaccgatgcgcctggcatgcagctctatactgcaaactatgtgaatggcatcacgggcaaaggtggagctgtttacgggaagcatgccggagtatgctt

SEQ ID NO: 51303 - DNA, 191 bp, Zea mays
  Clone ID: MRT4577_146786C.1
atatatctccaatcatcaataatacgtaggtgtcattataaacactttcattcacagtcaaaatctttttatatattgccttcacaaaaatataaacaatcgtaaacacacactcattgtttctaatagaccaactccttaccaagggaaccttatgtataatagttaaacattaccattataaagacatt

SEQ ID NO: 51304 - DNA, 128 bp, Zea mays
  Clone ID: MRT4577_146787C.1
ctttattgaggattgtcacttacgctagcctgtattttaaaacctataaatatttgatacattgtaaatcataactattttgaataacttcattttgtaatcactcccataattgcataatgcatact

SEQ ID NO: 51305 - DNA, 361 bp, Zea mays
  Clone ID: MRT4577_146788C.1
ccggctgatatcttggactgctgtacggagtgcagccttaccatacctgacacccaataattctctgaattctcgttcggtaagtggcgacaattggcaatcgtgtgttgtgatagtctcgcaaatggaaacgtatactcatggccaaccacgctttccgagattcctgaaaccgagggctggagtccggatcgatcaccttcaggctccgggacgggactgatcgaagtcgacgaaggaggatcactctgacctaacgctgagctcatcttggatccagaataggagtcagcctgaaccaaaaccatgtatgtacatgtccaagcctgaatcgaatgcaacgaacctgctgcagtacctg

SEQ ID NO: 51306 - DNA, 804 bp, Zea mays
  Clone ID: MRT4577_146789C.1
tgggaccctcgaggccggccgggcaggatcttttgtcactttcgtttccctgtttctctcattccatacagtcgccatgttctcccacatgatccctcgcgcttcgcgcccgctgctccgctcagcaaacaacacgttccgcgcctcgccttcaaccctttaccttgtcgacaaagtgcaatcaaggagatcatatgccaccgaaaccgaggagaaggacttggtcatcattggtggcggtgttgccggttacgttgctgccatcaaggccggtcaggagggtcttaaggtcgcatgtatcgagaagcgtggctccctcggcggtacctgcttgaacgtcggctgcattccctcaaagtctcttctcaacaactcgcacctctaccaccagatccttcacgacaccaagaaccgcggtatcgaagtcagcgatgtcaagctcaacctcaagcagatgatgaaggccaaggagacatcggtcaacggtctgaccaagggtattgagttcctgttcaagaagaacaacgtcgagtacatcaagggtactggtgcctttgccgatgagcacgccgtccaagtcaacctcaccgagggtggtgagaccagcgtccgcggcaagaacattctgatcgcaactggttccgaagccactcctttccccggccttaacatcgacgagaagaaggtcatcacctcgactggcgccattgctctcgagactgtccccaagaagatggttgtcatcggtggtggtatcattggtcttgagatgggctctgtctggtctcgtcttggtgctgaggt

SEQ ID NO: 51307 - DNA, 260 bp, Zea mays
  unsure (1)..(260): unsure at all n locations
  Clone ID: MRT4577_14678C.1
tgtccggagaatacagcagcacgggcgccagcgccatcctgatctcgctatctcccttctcccccgatgcgatctcgccaaaccctaatcccgccgcccgccgcgcggccgtcgccggagccctagccccgaatgtggcggtgacgcgcgcggcgtgtcaccaccaccaccaactcagcgagcgngcgcgcccgccacgccacgccacgccaccgcccggggggggggccgacaccgagcagccangggcgccgccgaca

SEQ ID NO: 51308 - DNA, 1915 bp, Zea mays
  unsure (1)..(1915): unsure at all n locations
  Clone ID: MRT4577_146790C.1
gggtacctcgaggccggccggcatagctagggtttcttctctgccccctccggcaactcaggagagagcgcggctcctacccggcggcggtgaagccgcgacgatccaacggagcagaggcgccatggctgctcccgaagcgcccgcatgctacgtcgggatcgcgcggcagtccgccgccttccgccttatgaagcaaatgggatgggaagaaggtgaaggccttggcaaagacaagcaaggcataaagggtcatgttagggtgaaaaacaagcaggacacactaggtgttggtgtagatagccctcataacaaatgggtatacgataccacccaatttgacaacatattgaagaaactgaaagtgcaatcagctaatcctgttcaagaagaggttgcagctgtagaaagtgattcacctgacatcacacccaagaaagacaaatcagcaaaacatgaagttactaaagttactcgacctcaaggaagatacaagaaaagagagagggggaaaagtgtgaactcttattcagcaacagatcttcaaggcatactcgtacgcaaaaatgaagataattccaaagtggatcagaaacttgaaccgacatgcttggatgaacctgatcccatcatctgtccggatgcagtatcccaagctgatgatgtgaactggtgggggcacaagtttggatttttatcaggagggtttctaggagcaaaatcccgtaaaaataaatcttcacaaaaagatcctgctaatgtccgccagacatttgcagaggaagatcaagaaaatttgtacaatcttgttcaggataaagctacttctggaaagcagggtcttggcatcaaaggcctgccaatgaaagttgctggccaacgttggaagggaaacaaaacttcgtttgttgatagtgatgatgataattcagcccagtccgatgagtattcagaaatcgaagagaatggcgatgaggaagaacatatcagtgcttctgaatcaatagacacagataagaatgcagacaaagaattgcttgtggatgctagacccaaaaccaaggtcaagaaactttgcaaaagaatacttcgtcaggccccatctcagtcaatgaaattgaaggatcttaaggtcgccgttgaggaacactcaaatgttgtattttccagcttctctggtagacgcgaagccctgttgtttttgaagaaaaagcttcaaggaagcaggaaattcaatgtggacggcaagaaagttcagctcgtgtcatgaaagccaagcaaataggaattctttacgttgttggtgtccagcactcgtatttgttgttgctcgaggttccaaacagatgtaggagcacattgagctatgtagtactagtactggtatagataaatagtcaaaacctatcgcagatgcggaggtaaaattttgcaaattttcgtgaggggcagagttcctaatttgtgtgcggcgcattcgatgtaaccgtggcttatttgttttgcatgagatgtgcaaactgcaatgctatgtattgctcgtaaattatgtctatggattcacataattgagttctctctctccctcgtgccgaattcggcacgagggtttggtatcttcaaggagaccatcgtcagcacctcaagaatgtgcacccctgggcagagtggaacgtgctctcctgtaatgggcggtgcgccgatccatcacgatgtccagatggctgatggtgccccagatgacttcgccttcgggagcagcagcaacggcaacaacgagtcgcctggtctcgtgaaggcatgggannnnnaacggatacacgaggagtgcgcctcgnnnnnnnnnnnnnnnnnnnnnnnnnnnnnnnnnnnnaagactcgtgcagatccttcctgatcatgctgcaagagacaa

SEQ ID NO: 51309 - DNA, 548 bp, Zea mays
  Clone ID: MRT4577_146791C.1
cggccggggaggatgaggaggacgctcgccacccgggtgcccgcggctcgagaaaaagctaatgcacgcagatgaggattttggaaagatggcagtagcagttcctgttttagtttctaggactcttgaattgctgttaaagatgaattgatcgacctataaaatattcttcaaagtgggcaaagaacgcaatgccctccatcggagcaatatgtgaagagtaaagttcttcggatttcctacgctaggacggcccaagccatctaatttacgttggcccagattcccgagcagatcaagaaggataagcgagacaaggacaaccccagcgcagtcaccgcagagctacacgaacatgtaggacaacggcgccagcatgaacgagcaccagctctagaggacgttcgagccggcgagcgcctagcacaaatacaacctcgtctggaaagacaagagcattatcatccatgtggacgacatgacgggacccgtctttaagcactacgagagcccgtcgccccagagcaccaagcccacggagattgcac

SEQ ID NO: 51310 - DNA, 477 bp, Zea mays
  Clone ID: MRT4577_146792C.1
ggatcttaaggtcgccgttgaggaacactcaaatgttgtattttccagcttctctggtagacgcgaagccctgttgtttttgaagaaaaaacttcaaggaagcaggaaattcaatgtggacggcaagaaagttcagctcgtgtcatgaaagccaagcaaataggaattctttacgttgttggtgtctttgggttgatttccgtttcttctcgttgtgttctgtagcttcaaggaagcaggaaattcaatgtggacggcaagaaagttcagctcgtgtcatgaaagccaagcaaataggaattctttacgttgttggtgtccagcactcgtatttgttgttgctcgaggttccaaacagatgtaggagcacattgagctatgtagtactagtactggtatagataaatagtcaaaacctatcgcagatgcggaggtaaaattttgcaaaaaataaaattgggaatctaactttataag

SEQ ID NO: 51311 - DNA, 330 bp, Zea mays
  Clone ID: MRT4577_146793C.1
tgggttgttacaacagtatatgtggattataggtcaaggtccaatctcattgtagtatcataagcgatccttacaaacgagacaagcttgttctattgatgtctacgtcaccagcatctagctgaccacgagttactagtcaatctgacaccgaccgttcatggcttgtggtaaggagcaacttcggcgcgtcgagaaccctgtgcactggcaggtgacattttgtatgcgccgagcggggctgctcaagaaggcccttgagctctctgttctttgtgacgccagcgttggtattatcgttttttccgcgcacggtatgctcttttatct

SEQ ID NO: 51312 - DNA, 1161 bp, Zea mays
  Clone ID: MRT4577_146794C.1
atgaagataattccaaagtggatcagaaacttgaaccgacatgcttggatgaacctgatcccatcatctgtttggatgcaggggcggttcaccggttctcaccactacgacccacatgtttttgttagattgaagggagtatcccaagctgatgatgtgaactggtgggggcacaagtttggatttttatcaggagggtttctaggagcaaaatcccgtaaaaataaatcttcacaaaaagatcttgctaatgtccgccagacatttgcagaggaagatcaagaaaatttgtacaatcttgttcaggataaagctacttctggaaagcagggtcttggcatcaaaggcctgccaatgaaagttgctggccaacgttggaagggaaacaaaacttcgtttgttgatagtgatgatgataattcagcccagcccgatgaatattcagaaatcgaagagaatggcgatgaggaagaacatatcagtgcttctgaatcaatagacacagataagaatgcagacaaagaattgcttgtggatgctagacccaaaaccaaggtcaagaaactttgcaaaagaatacttcgtcaggccccatctcagtcaatgaaattgaaggatcttaaggtcgccgttgaggaacactcaaatgttgtattttccagcttctctggtagacgcgaagccctgttgtttttgaagaaaaagcttcaaggaagcaggaaattcaatgtggacggcaagaaagttcagctcgtgtcatgaaagccaagcaaataggaattctttacgttgttggtgtccagcactcgtatttttttgttgctcgagggtccaaacagatgtaggagcacattgagctatgtagtactagtactggtatagataaatagtcaaaacctatcgcagatgcggaggtaaaattttgcaaattttcgtgaggggcagagttcctaatttgtgtgcggcgcattcgatgtaaccgtagcttatttgttttgcaagagatgtgcaaactacaatgctatgtattgctcgtaaattatgtgtatggattcacataattggagtattaaggcatgtaaaatctaattaaacgaggggtatttagggggctaattataaaaaatcaagatgcaagctcttctctacacgaatttatac

SEQ ID NO: 51313 - DNA, 109 bp, Zea mays
  unsure (1)..(109): unsure at all n locations
  Clone ID: MRT4577_146795C.1
gggggcgtgcgcaccatctacaactcatcaagcctacccaacggacaggcaggcatngagtgcaaccttttacagcgaccaccgactgggctccttctctctccacctt

SEQ ID NO: 51314 - DNA, 250 bp, Zea mays
  unsure (1)..(250): unsure at all n locations
  Clone ID: MRT4577_146796C.1
gctctgtaccagcccacccctcctgcgccggcgcttctccgagacgcagttcgcctccgggattcgatcacttcgccgccgctctcgcctccgcccccagctggctaaatacaacaatgatggagaacaggatgactttgaatccaactgatcttgatgattttgacaagagaaaatggccatcacctattttccagtccacccttttttggggggggggggggtcatccccccctccctncctcaaccc

SEQ ID NO: 51315 - DNA, 402 bp, Zea mays
  Clone ID: MRT4577_146797C.1
attcggctcgaggaccgggcgcactccacactgtttgctcctcctgaggtcaaggaacatgtcggggactccatgatagctgaagggatatgggcacactacgggtttaaccatgggctgcatggactgcgtagcgctctctagagcatgcgggcacatgaagaacttatttatcaggcatcagatcgaaacactgagaggactatggtcgctgcttcattatgagagatcacgaccagctgactgacgattacatggctctgcataagaacgctagaagtgttctcatcctgattacagatctactgagagatgactgcggctgctgagggcaagagagtcgttttacccctcttgagtgatcgcagccatagtttcttggtgagatcctttacatgctgt

SEQ ID NO: 51316 - DNA, 346 bp, Zea mays
  Clone ID: MRT4577_146798C.1
gtggggggtttttttttttttttttttttttttttttttaaggaagaacatagctttatgaaggaggaaccgggcaatttttttgttaatttacgagcaagagatttcacttggtagaagttaaaaaccgaaaatggtgcgccaggccttttaaggtaattacattttactataggtcaccatggccaagttacatgtgggttaccaaaaacccggggggggaaggaaaatttgggtccaccaaggattcaatatgtggacattttacaacaacaaattttaccccctaaaagactttattttagggaggggggggggtcccctgtgtggttgggggaacccgggt

SEQ ID NO: 51317 - DNA, 321 bp, Zea mays
  Clone ID: MRT4577_146799C.1
aatcaaacaacaacattgcatttagcggggtagagtacaagtatcacgccggcaaactacattcaaatactaccactaaaccggcccgatacagatcccggcccaacttataaacctttctcttattactgatcacaaggttgacttctcctccaccattgaggagggtcaggacggatgactagtcgaagctacccacgcacttattgacaaaataggtattgcccatgatggagaagagctcttttcatactaagggagtggggacattggacattttattgcagcgtagcgccatgagcagggccaagggcacgaatt

SEQ ID NO: 51318 - DNA, 1078 bp, Zea mays
  Clone ID: MRT4577_14679C.1
agaccgcaccgcggccacagcctcgcgtcgtcgccccacagccacgcgagccttcgccgatccgcgagcgcagatcgccgaagccaggcggcggagagggagctcgaggcggcggaggaaggcgttcgccacagtcgctgatttccctggggaagagatggggctctcctttggtaagctgttcagccgcctcttcgccaagaaggagatgaggattctcatggtcgggctcgatgccgccggtaagaccaccatcctctacaagctcaagctcggcgagatcgtcaccaccatccccactatcggattcaatgttgaaactgttgagtataagaacattagcttcactgtatgggatgttggtggccaggacaagatcaggcccctgtggaggcactactttcagaacacacagggacttatttttgttgtagacagcaacgacagggaacgtgttgttgaggctagagatgagctccacaggatgctgaatgaggatgagctgcgtgacgctgtgctgcttgtatttgcaaacaaacaagatcttcccaatgctatgaatgctgctgaaattactgacaagcttggtctgcattccctgcgacagcggcactggtacatccagagcacttgtgctacatctggtgaagggttgtatgaggggcttgactggctttccagcaacatctccagcaagtcttgaagcttttcggcagggctcctagcgagaggatgtctgaacaacttatggctgctttttttatatattattactaagacacaagctacagcagatatagtgcttgtgaaaaaagaaacttctgagctcttttgagggattgatactagattggattgtgtttttgtttttgggtcgatatcatcgcctgttcggttccacaaaattgactgtcaactatatttacctatgttcggagattgtatgataaattaaattgacatgctttagcgtaggtcaccaccgatccagtgttgtgccagatgtgagttgctagattttgtttatagatgagtatatgcttattatcatccgaaaaaaaaaaaaaaaaaagcggcc

SEQ ID NO: 51319 - DNA, 758 bp, Zea mays
  Clone ID: MRT4577_1467C.1
cgggcacctaaaaccattaatctcagctactccctccgtttctttttagttgtcgtatgatagttcaattttgcactatcaactaaaacgaaatcgagggagtactcgtttcggtccacaagcaacagggctgaccagaaacatttctacctttttgtccatataagttttagtactgatgcccaaaatgtggcggtgagatatttcgtgtggggatagatgatagccagctcactcacgttatgtaactgtgcttcgttcttttttatttgtcgttgtttagtttaaaaacaagttaacagtaagacgtgaatcacgcacccgtgctactgaactgctgttggttagcccgtttggtggttctgaaatatttcaaatttcaatcccttgccaggtacaactacaagaagagctagcggacgtacgtctcgtctctgcttgtcttcaccgctaatatgcttgcagcaagaaatcgtattcctagtaggaacgcttttgcagcaagactagtgattgctaattagctagatttctgcgtgtctcttgtctgtttctgcccttccatcactgttcccctcctgcgctgcggttcagacgtggccaaagacttgacgcgttctgcaaccgatgtagcgtcgtcctagagtttctaggcatggcaacagacaagtacgaaccgttctattctaaccgtctaggcatggtcacagacaagcagataatcttagtcgcatatgagtattttcgtagcccatgtc

SEQ ID NO: 51320 - DNA, 406 bp, Zea mays
  Clone ID: MRT4577_146800C.1
cgtgcacggcggtgccacaacctctattgctgttcctgctggacgccgagctaggggtggccgccgttgttgacaacgccgcacacgcaaagccgctaactcctggggggcgcgtgtatcatgaccaccacggaaggcttacagtcggtcacgggaaacctcgccacgcacccttctaccgcggtcgtgacgtatactccaccacggtaggcgcattccggtacaaagacacgcgcacgcaagggtacggcgtgcacactgcggccgtgagcactgtgctataaggtgactgtgctcactgcgtagggtgctacgaggtgcagtacgtgcacagccctagccggtgcaagcttcacgcggcaccgctggtggtgacagtgaccgacctgtgcccgttcaacgacca

SEQ ID NO: 51321 - DNA, 419 bp, Zea mays
  Clone ID: MRT4577_146801C.1
ttattattaccctggtactcttcggtttttttgggggccattttaattacctttgggtctttttacttcttttgtcaatcaaatgggggccagaaaataaaccacagacccaaaatatgggaaaaaaaaaattgcgcgaaaaactttcgggaaaattaaaaaacaaaacaccctccatcgcggggttcccgtttttctttacctcaagggggacaaaaaacccattttccccccttaaaaaaaattttaaaaaagcccagggggcctccaacccaaaaaaaaaaattgtgttcccccctgggttaccaaaaacggggcaaacaaaaggaaggggcgcaaaataaactctccaaagacaaaaggtgggaagggttccccccaggggtggtaaaacccagggggggggggactttcccccc

SEQ ID NO: 51322 - DNA, 303 bp, Zea mays
  Clone ID: MRT4577_146802C.1
gctcgtgaggttctacggggttcggtctcacgggtgagcgtatccagacggcggcgtcctatgttgagtaccggctcttggtcggcggactcccctgggccacagacgacacactccttccacaacgcctataacacctacggcaagatccttgagtccaacatcatcctggatcgagagacgcataggtccctcggcttcctgtctaggacgttctccacggaggacgcgattcggaacgccatccagggcatgaacggcaaagaactccaccgccggaacatctccatcaacgagagccag

SEQ ID NO: 51323 - DNA, 235 bp, Zea mays
  Clone ID: MRT4577_146803C.1
agcagtggtaacaacgcagagtacttttttttttttttttttttttttttttgaaatttatttttttttcttcctaatataattaccccgcatttccgcttattgcgcttacaaaccccactttccaccccgatcaactcctaactccatcccatatctcgcaaatacggccgggcgaaagatccccgcgtactctgcgcagataccaccccccaagggccaatgcgggatatcc

SEQ ID NO: 51324 - DNA, 254 bp, Zea mays
  Clone ID: MRT4577_146804C.1
gtgccgtgcgcgaccaaaccctgtgcagtgctcccatccgactcttgcctcccacgccgccgccgccgccggattccgcgatggccgacccgcggccgtaccccacgatgtacgggaccgacgaccgacgcgacgccgccatcccggcctccgcctctgagcgccgcctttacaacccgtaccaggacctcaacatgccctaccggcagctctacgacctccccacctccccggagttcctcttccaggaggag

SEQ ID NO: 51325 - DNA, 226 bp, Zea mays
  Clone ID: MRT4577_146805C.1
aaagacccgggggtataatatactaaaaggctcgctttacaaaaaacatggcttgagggcaagagctcaaaacaacaaagttgtggttctcaccccggtgcaaaaacacccccctcaactaaataaattcaccctcaggaccgaattcaccccttcactccctttttttaagaaataacaaccccccatggctcccgttcccccaagtatatatatcaatgggggg

SEQ ID NO: 51326 - DNA, 340 bp, Zea mays
  Clone ID: MRT4577_146806C.1
tcgcccacgcgtccgccagtagtcatatgcttcgtaaaaaaaaaaaaaaaaaaaaaaaaaaaaggaaggaataaaaaaataaactacgcttcatcactgagatgatgcgggatgctttgcgccagaatgctactgacactgcaaccattttatctaccgaagctcaccatgacaacatgcactcaacacaccagttcacaggttgaatccatagtacgcatcagctttatgactccctagatttactagaatttaaaccattaaatgatgagagaattggcattatacaataaacttttggaaaacgtgttgacactggagtcgtattattaatcaacgg

SEQ ID NO: 51327 - DNA, 854 bp, Zea mays
  Clone ID: MRT4577_146807C.1
cttatgtaaattatccacccccccttaatatattactataaaaggtttacctgctagagttttgtgtgtccaatgtgacaagagacagcttcaaaaaaataagagaggaacttaggcgtggttacgctttgataggggtgagtctaagatcaattcaagttattttggtggtaaatggtagatttatcttaacaggtcatatcaacaaatccatgcattgcatggatcacactcatccttccagcaccatgtccgactttctcttattactggcatgcgttggtatatggtggtggtttggtccaactttctcttcctactatggtcatactgcctactgtatatggtggttattggctgtatgtagagttgggtgtatttagaagctttgaacactaagctaaaaattattccataccctatgccctatgtcaattattcaccctccctttatatattactattagatgtttaacttatcatgtattttactccacaggatcgtaacttgggagatgaacggttttctgatttcaattgtagatagaaaaggcagctgtttaatctcaaccattgaacaacaacacacaacatgagggccatgactttgattctcatttaatttggcattattagtgatgagagcgatgagtctactgatgagtccagtttatgagtcatcctttgtttgtttcatattgtcatagaaaaaatgtcaattcacacattatgtaatgaattaagttgtggatgatattttataacgacactactatttttaatatagactgattccagattaaaaaaaaaaaaaaaaataatactatttttaatacagacttatttcaaaaacc

SEQ ID NO: 51328 - DNA, 940 bp, Zea mays
  Clone ID: MRT4577_146808C.1
ataacaatactactaagataaaaagagggagttcctgtggtcgcccaaaggtagaggacgaagcaggacaactgcgggaagtgatgcaacaataaatcaggaggattatgaaatagaatattctacttcagcttcagatgaggattcatgtaaaaggcattccaacagttacggatcggaaggaagggcattgcgaaggtcaagtaggaaacggaaacaggtgacatacatggaagatggtcacgaagcatatggcaatgatgttccaatgcatcaaaacgatgaaaataacccaggccaacctgctgcagccgcagacgtggctggagaagacacaggatttaacatttaccatcaggatacaagtgaactaaacagcagtcagatgcatacaggtgcaggcattaccgaagatatcaatgaagattcccagcgttttgagttacgggaggacaatcaggtggattcaacaccgaaagactatttgttcaatggtggtggtttttgtatggagggcgagggcgagggcgatgaacaagaaccagcgtgtgatcaatctggtgcagaagtagaacctggaccaagtggtccatgtggcgccatggatgaagtttcagagagtgcaagcatatcgacggctatggagtgtaccgagaatgcaagaatggaggcacgtggtgcatcttcgtcgcagcaaagacgcaaggcaagccgaggtttgagtgccatgccgacgcttatcaagcgtaggagaaaatcgtgacttatttgcagtttcactgcatgtatagcacgccattacggcctctgtttggttcaagcgcttatgattcgcatcagtctggccaccagtgatgagcgctgttttgcggacgcaaaatgcacatctgtgatttagttcagtcttttttttcatctgattggttgcttgcatcgtctc

SEQ ID NO: 51329 - DNA, 694 bp, Zea mays
  unsure (1)..(694): unsure at all n locations
  Clone ID: MRT4577_146809C.1
cattgggaccctcgaggccggccnnnnaaaaaaatttacaaaaaaaaaaaaaaaaaaaaaaaaaaaaaagaaaaaaaaaaaaaaaaaaaaaaaaaaaaaaaaaaaaaaaaaaaaaaaaaaagggccccgatcacacattggccttgtttgctcataattagttcatcagaaaacaacaaacaagggcaccgaggttagggggcctcctagttctggccatggaagccatcgtcgtcgggccgggcacggcccaaaactcgccgaaggattacggggacccgcaaaacggggggcgcgccaacgtcggggtcgggccggtgtcctggaacaacaccggggccgcgaacgcgcaaagttacgcggggaagcgccagggcgattgccagttgatccactccggggggccctacggggaaaacctcttctggggttccgccggcgccaattggtcggcgtccaacgccgggggctcctgggtgtccgaaaagnagtattacgaccacgacaccaacagttgcgcgaaggggaaggtgtgcggccactacacgcaggggggggggggcgactccaccgccatcggttgtgcccgcgtcgtctgcgacaacaacgccggggtcttcatcatctgcagttacaacccgccgggaaacgtcgtcggggagagcccctactagactgtcatgcatactacaat

SEQ ID NO: 51330 - DNA, 1695 bp, Zea mays
  Clone ID: MRT4577_14680C.1
ttcgcagtcccgcaccgcaccgccgcaccgcaccaccgcaccgcggccaaggccaatagcctcgcctagcgctcactcgctcgccccactaccaccgcaccacgcgctcccgtttccgccgatccgagcggcgcagatcgcggaagcccagcggctcagagtccagggggagggagctcccggcggctgaggaaggcgttcaccagcgtcgcggtgagtgctcccagtcaagcgcctcttccttcgtagtgtcaacaattccgccccgcgcccgcgcggatctgattgtctcgatcgtccaatcgagcggattttattgaggaagagatggggctctcctttgggaagctgttcagccgtctcttcgccaagaaggagatgaggattctcatggtcgggctcgatgccgccggtaagaccaccatcctctacaagctcaagctcggcgagatcgtcaccaccatccccaccattggattcaatgttgaaactgttgagtacaagaacattagcttcaccgtttgggatgttggtggccaggacaagatcaggcccctgtggaggcactactttcagaacacgcagggacttatttttgttgtaggcagcaatgatagggaacgtgttgttgaggctagagatgagctccacaggatgctgaatgaggatgagctgcgtgatgccgtgctgcttgtatttgcaaacaaacaagatcttcccaatgctatgaatgctgctgaaattactgacaagcttggtctgcattctcttcgccagcggcactggtacatccagagcacttgtgctacatctggtgaagggttgtatgaggggcttgattggctttccaacaacatcgccaacaagtcttgaagcttttcagcagggctcctagcaagaggaagacgtctgaacaacttatggatgcttttttacattttattacaaagatactccctctgtctcgatttactattccttttgggatagtggttgattcatataatatttgatgtatgtgtttaatagatgtgtctagattcaccatcatctattttaatatggacatagatataaagagctaaaacaaatactattttgaaatggagtgagtacaatctatagtagatagtgtgggtgctgtggagagaaaaaatctgagctttcttttgagtgtttgctagtgtttaccttcggagatgatatggtaaattatattgacatgctttcgcgtaggtcttcaccgatccagtgctgtggcagctacatttcgttcttagatggttaacgtgtgccaacataaatccaatatgttgcttgtggtacgcaccgttttaaaatagctatggacagaccataattgacatcatcttctgtcgaactagcgttgggcttagttagsacttgggatchcaatgctagatagctagagctgtatagcatctctaaggggtatttggtttgatgttcgatgaatcatctacatattctttatttatttttatttgggttatgatgtggaataggttgatgcatcaccatctcatatctcatatattagaagataactagcaaagtgtccgttgctacagtttttatttatacttgaggataaagtataaaatataaaaatatgtttgttttattggttatttgagtgtgaatgtaagtttaaagcgaataattgtggttcaa

SEQ ID NO: 51331 - DNA, 350 bp, Zea mays
  Clone ID: MRT4577_146810C.1
cctttttattttttccttttttttttttttttttttgggggatttttttaaagaaattttcccgttttttccccccggggaaagggcacccggcaaaaaaattgaccaggggagacctcttaggggtttcggtgggtcaataattaccaaacccggcaaaaaactgggaaaaagaaaaaaaaaatttagggtcccgcccttcatgaggtggaaaagaccggatgttgcaaacaataaggttttcctgccaaccctgttaatgctcaagtaagggcttgctcgttttgggccgacccatagggatgggggggacaaaaacccctacaaggaaaaaccctttttaaattttt

SEQ ID NO: 51332 - DNA, 393 bp, Zea mays
  Clone ID: MRT4577_146811C.1
ttaatgaagcatcatccctgcttaataaagaggggatgttaagaccattggatgggatcgctgctccttgaacagagaagggcatgcaggatctaactgatccagagacaatatcctatctacgtggagcaggcaatacacaagctgatggatttccaggtccgggatagccatatatgatgccaaactggactgccaggggatggggtccaagatatgttatccctgtcatctgctgtgaggatggtggttgtctggacaggatacactaggaggtgggagctacaaggactgtcactgaacctaacaacgaggcgatggacactgatctgtatatagtggagcaccagatcaaatgcatgcaagccgaacgctctgtaaagcattcgttat

SEQ ID NO: 51333 - DNA, 1469 bp, Zea mays
  Clone ID: MRT4577_146812C.1
cattgggtacctcgaggccggccgggtcccctccggccgcagccgcttccctgccgctccggcctcctccgtcgggaccgccgacgacgcgccgcgcggaagcctgcgggtgagcgtccaggtccacccgcccccttcggcattccccgccgctccagcctcctccgccgggaccgccgccgacgcgccacggggaaggcctgcgggtgagcgcccagatacagccgcccctttggccttccccgccgctccggcctcctctgccctaatccccttaatgcgtcgcctaatgagcgccttaccgccgcctgaggcgatagggcgacgccttacgcataacttaaggcgggtcgttggacgccttggttttttccggcgccttaccgcctaagcgtcgacgcttaggcgacgcctttatgttcttcttactcattgacaagacacaaattgctgctgtacaattagggatattgggtaagcagttgtgatcctgttctcttgctcggatgccgggttactatgacatcgatgacatcctcatggaggatgagcctatttcagttgctttccaagtaactgcaaatggtgttggcctgctagatcctggtgctgaaagtaactgtgtagagaagggcgccaaggtggacctcccattttggcttgcgcatgggctgctgtctctggaacaagctgtgtcaataaaaccacctccatgcttcacacagaaagtagttttttcagtggacttttgctgcatggcttacattttggtcttggatatgcaccaaagcgtgaaagagagagtctgcagtattatggactaacaaatctgtattctgttatctccatatcatatatactgcagaacttggaaggagatccaagctgatgcggcctgtgtggatttgagggttcgttgcccgtacttttatgagctaggatgcaagattgttcctttggtgagtgacaagagcattggcctgttcttgcgatatgcattcaccagtaggtacaaagaggttctaagtaagtcccacagttcttccatgatgacagtgcccaagttcgttccacgccttacaaaagaagaaactcgggtgtttgaatctgccagagaatcgatgactggtttcaagaaatggcgagcaggtgggatgagactgcaaaaggcttccattcttggccggaagaggaagacaaagctgcctgaatgagttttaaggtgatgtgcgctgctttgatttgctagcaccgtgagcaaagagaaaagtgaatggcagattaaatctggatgtactatgatctgctgtacattgtgcacttgtgtacagcagctctgatcagtccgtcctttgtaaggaaaatgaacaccgtcttaaatcatgatatcctgtttggagcaggtgtcatgattttcagcagggtatcttgaatgagtttgaatcaaaaaaaaaaaaaaaaaagcggcc

SEQ ID NO: 51334 - DNA, 586 bp, Zea mays
  Clone ID: MRT4577_146813C.1
ccggccgggacgcggccgtctcctttgtcatcatcatcagctcagatctagcagcttcgccttctcagattcgtttgttctcgccagacgcgcccacttcgcaaccgccgctgtgcctatgctaccgcatgggcctctgcgcctgggaggcttgcggctgccaggcttaagtcacggggcagcaggagttcagatttttttttaaggctttggaaccagggttgcgcctattaacattgagaggcaagaaaggaccaatgggaaggacccggattaaaatatttttggttctaaccataagaagcaccggcattaaaataactctgggaataaaaacgaatggatataaaatggttctaaggaaccaagaagggtcccggggagaaagggggggtaggtaggcctttttaatggaaccattgggtttttcttggaataattctttcaaaacaagctcacttttttcttaaggtggaatggggcctccttagaaccaaaggcggaataccacctttctggaaaaacaccaaaatggaccccattgggaaccttccttaaaaaaaaaaaaaaaaaacccgggggcctt

SEQ ID NO: 51335 - DNA, 1670 bp, Zea mays
  Clone ID: MRT4577_146814C.1
ctcggtccggatgcactagacgctatgcctctgtcctcccctcgctcgcacatcccggtggtcctcgcccctctctgccacgcctgccgcccccttcccctgtcctctacccccgttgagtcgtagcctccacgtcggacgacgcaggtggagcgtggttcactcccctcgcgcgcgcttcgcacgtcgcgccctgctggtgtgagtacctaggagcttccaaaccctaggaccaaagcgagcgcgtagcccatgcctcgccgcccgtggggatcgagggagtgatgtgctagatctcagtcgcatgaggtgcctcatcgtcgtcgtcgcgcgcagcggccaagagggtatcatctattcccctaagaggaggatatcgtcggcgttgtggcggctggacgccgccgcagacgagccgtgtgcggggagagcggcggacaagggaccatgagatgacagcggagtccaacgaggagaggataatgagcaaggtgtcacaggtggagagggccatgagccacctgctcatgggacgcggctgacgaaggatccatctgttcgtcgtgtttcccttaccatgatgcttcctattgccttcgtttttttcttttgatgatggtcgtatgtgtgtttttgcatagctgttgagtttcacctaccgcccatctgctctctgttgttgtacaattagggattttagggtacggccgcagccccttccctgccgctccggcctcctccgtcgggaccgccgacgacgcgccgcgcggaagcctgcggggatattgggtaagcagttgtgatcctgttctcttgctcggatgccgggttactatgacatcgatgacatcctcatggaggatgagcctatttcagttgttttccaagtaactgcaaatggtgttggcctgctagatcctggtgctgaaagtaactgtgtagacaagggcgccaaggtggacctcccattttggcttgcgcatgggctgctgtctctggaacaagctgtgtcaataaacccacctccatgcttcacacagaaaacttggaaggagatccaagctgatgcggcctgtgtggatttgagggttcgttgcccgtacttttatgagctaggatgcaagattgttcctttggtgagtgacaatagcattggcctgttcttgcgatatgcattcaccagtaggtacaaagaggttctaagtaagtcccacagttcttccatgatgacagtgcccaagttcgttccacgccttacaaaagaagaaactcgggtgtttgaatctgccagagaatcgatgactggtttcaagaaatggcgagcaggtgggatgagactgcaaaaggcttccattcttggccggaagaggaagacaaagctgcctgaatgagttttaagcatcaaccaaaaccagtataaatgtggagaaacagaatgaagcaggcaggtagacaggcgatgagcgatcggggacgaaggcgcgaccacgacagccaagcccaagagccaaccccggccggccatcatctctgctttgtcgtcaggtgaccccatctgccgcaggcccacacgacacgatcaagatgtgtgggtgttgtgaacctgaaccagtccatgtccatccatcgtcatgatgatcgacgcgaactgcactatctgtttacaaaag

SEQ ID NO: 51336 - DNA, 244 bp, Zea mays
  Clone ID: MRT4577_146815C.1
cccacgcatccgatcaaacacattcaatatacccgatattaccgtaccactacaacagccagttctaacgcgatggctcacaactcggactcgaacccatctgcatatacaccgacaaacgatgaaaaagcccctaacactactgaaggtcatatacccaaatccgaaactctcctgcacgactgtaagtcctcctgcaaggacgcctgctagtataacagcaagaataacgcccataagctca

SEQ ID NO: 51337 - DNA, 871 bp, Zea mays
  Clone ID: MRT4577_146816C.1
ataattctcagccgatctctatcctctaccactctctctccctcagctcgcggagctctctcctcctagcgagcgcgtctgcgccctgctcggcctccagctctggcgcccggccgagtttctccccgagctccctgccatggccgccgtgccctctgttcctccagctccagcgtcgcggcccttcccccagctcccttgtctccatggccgctcgtcctagctgcgaccccgtcgtggagctctgcacgccgagcttctccctggtctcccatggcgcccagctcagatctcgccctgttcctcagcgcgcagctccctgacgcgttttcctccctatgccgcacgctctgctcgcccggggtcagaattcgtcgactgctctctgttcctcgcttcggtggctgcactcatctccatccatggatgtcgccatctctgcgccctgctccatgcttgctgctcgccgattttccctgcgcgaccagccggagctcgttccatgggcgcggcttccagctcgccggcgttcggaccgcgctcctccctccagctcgtcgagcttctccctgcatccatggccactgcgcgcgccctctgctccatcgcggtggttttctcctgccggtgcccagcccagccaagcccctccacgcggccgtcgatcagcctccctgctcctcccatcgtggacatcaccgaccatggacatctgattccccgatgcgctccacatgttcactgttttgttccacccgtggacaatggcactcgccactctagacatcgatattatgttcgtcgtcgcgtcgtcaccgtcaacctgctcggatccatgcctcgccatcgactctgacgtcgcgacgttcct

SEQ ID NO: 51338 - DNA, 1087 bp, Zea mays
  unsure (1)..(1087): unsure at all n locations
  Clone ID: MRT4577_146817C.1
ccggccgggttgtctatgatcgttcacacaaacacttactctatatatacacagttcttataacaaataacaatgacacagtctaatgctctgaaatcactccattctacgcactatcatttaatctttgtgcacaattcatatgtaacagataatattagtatgatgagtttgaagaaaattacaacaacatgctatttcataacagattgtaacataaattattcttatcatgaatgatagcattcgttgttattaaatctaaactatcttatgttcatattcaaacactgtattaaaattttgttgtccaacaaaatctattgcttccttttctagctattcatctttcgaaacctataactaatagacacagttatagataatattgcttcacacttttatttacatttacatttaacaaataccattactttcttgccacttctttatgaataatttttacatatacaacatgatgcaatacttgacgacgacaaggaaaatggtatagcagctacaattgaatctcccccaaaaaggttatactctgctacacaatatcttacatgtattattttctttctattataaaagtatcattccatttttctttggtaattattgcgactacaaaagtgaacttatccaaaactatatttctttcacacatattttccccatatttaacttatccaaaatttaataccacatatacatacaaatagaaaatagatattaattgtggtaaccatttatgctgaacacttctatccctttctcttctacttccataagcgaagatattaaaattctttgtttcccaactatacaggttcaaatatggacccctgcgcatcaaagaaaagttggacaccagatcttccaagaaccgaagattttctcagattattagcaacctttaagtttgtagaatgtcctctataattatatataactgttcaactcttctaaagacatttcatataaatataacaaggtagctttaaatatcgcaacaaacatattaccttcggccacaactcacttaactctatnntattttatataaaatctggtgggcttc

SEQ ID NO: 51339 - DNA, 589 bp, Zea mays
  Clone ID: MRT4577_146818C.1
aaaaaattataatacatacggttttttttttttgaagtctgaagctgcaagcagtacatgccaaggcatcgacctacataaagatggggtccataaaccgacaaagtccacgctttttttaccccaggaaaaaaagaggaaagaaggggttaaatttccaaaagaaagaaaaaaaaaaaaagaagagggaattttacccgcccctcccccaaaaaaagccgggtacttttgttttgcttaaaacaaagttgcaggggacactgttgggtgctgaaggggacccccctccctccctttggctttgggttatgcacccagttcccttgtttttcccacctttttattattttttttttccccttttttccccctttttcgttttcgccagggtccttttgttttttagttacatgacggagcaggcgttggggttttcgtcgctaaaaatctgcggccccatgggctgggggggcgggggcccttaccccgggtaccccggggctgggtacaccggttggtaaacgtaccccggggggggggcgtagtaccctcccgggaacgggaacctcgggtagggcatgtacatgct

SEQ ID NO: 51340 - DNA, 567 bp, Zea mays
  Clone ID: MRT4577_146819C.1
atcctggtcctcaaaataggatatccatcgagcaggagccctgctgaaatttgagacaattgtatttttgggaatacaaatatgacgcttcgcactaataccattctaaacaattattctatagaaatgtgactagaaacatcttctaattgattatactaccatttagcatatattcttcgttttataagtcatctccgtctattttctgcctcatgagacagatttgaccatctgctatcgcatttacgtctaatacatatgttctcgttcgtctcctgtgcatgccaccgaggaatcgcctgatcaggctgagcacgaactctgcgggctccacgtagacctcccctaccaccatggtcgtggactccacacccctgtcctctgaattggaagcgcacatgctggctagacatggccaaatggaccgcccggcccggtccggcccgagcccggtgaagcccggtccattttaggcccgtcccgtcaagcacggttacaaaaccgggccaggctgtctaagcacgcgagcttgattttctgtccggtccgtagcgggtctaaacg

SEQ ID NO: 51341 - DNA, 492 bp, Zea mays
  Clone ID: MRT4577_14681C.1
aaaaaaaaaaaaaaaaaaaaaaaaaaaaaaaaaaaaaaaaaaaaaaaaaaaaaaaaaaaaataaaaaaaaaaaaaaaaaaaaaaaatttttttttttggccgggccccccctcggggcgggttttgtggttttccttccccttggggggggtttggccttgcttttggggggccgcgttccgccttttcggggggggttttacattccattggcgggggttttacaactctcggggctgggaaaaaccatgcgcgttccccacctttaaattctttggcgttacataccctttttcgttctggtggggttttatcttaaggggcccggcccggttcgcctttccattcctttgccctgcctgtttggaaaatggcccccccctgtattggccctttaaccccggcgggggggggggttacccccagggggaccgttacttttgccagggccttaccgcccgctccttacgtttttttcctttcttttttttc

SEQ ID NO: 51342 - DNA, 421 bp, Zea mays
  Clone ID: MRT4577_146820C.1
cgaaaccagaggtggccggagctacagccaaggaccactgacatgtctgagttagagaaggccgtggtggccctcattgacgtcttccatcaatattccgggagggaaggtgacaagcacaagctgaagaagtcagaactcaaggagctcatcaacaatgaactttctcattttttagaggaaatcaaagagcaggaggttgtggacaaagtcatggagacactggacagtgatggggacggcgaatgtgacttccaggaatttatggctttcgttgccatgattaccactgcctgccacgagttcttcgaacacgaataaggaaaagaaagcagcggagctgtttctgcagcagagacggagtttgaccaggggaacacaggcagggcttgcagggctgtaggagctgagctttccgtgt

SEQ ID NO: 51343 - DNA, 312 bp, Zea mays
  Clone ID: MRT4577_146821C.1
ttatttctgacaacagctagtgaggaacctggcagagtgaaacagacaaggatggaggggctgatttttttgaagctagtgtgggtgtggaaaacgtttattattttattggcataagatgctcaggttgcagcatttccgatatttaagagctctatcattgattcattgttgagtcacttcactctattgttttcttgctttcatgggaaactgtttgttccttatagttatgttttataaaccaataaattatttactaaccatttagatgcacgagatctgtggggtttgcatggatatttattaaat

SEQ ID NO: 51344 - DNA, 385 bp, Zea mays
  unsure (1)..(385): unsure at all n locations
  Clone ID: MRT4577_146822C.1
ggcgagagnagnacnaaggagggggaccncctgggaagcccncggggngcanncccggggaaaaaaaaaaaaaaacacgggaggagaaggggggaccccagcaancccnaagcagaagccggccanccncacncgcncgagggcccgcacgaagcagacggcgaggaagnccaccggcggcaaggcgccgaggaagcagcnggcgaccaagggggcccgcaagnccgccccngcgaccggcggagagaagaagccccaccgcnnccgccccggcaccgncgcgcnccgggagaaccgcaaggaccagaagagcacggagcngccgaaccgcaagcagccganccagcgccgggggcgggagaacgcgcaggaagncaagaccgac

SEQ ID NO: 51345 - DNA, 318 bp, Zea mays
  Clone ID: MRT4577_146823C.1
cagaccattagcgatatatctacaaaggggttgataattcgattgacactacgagggtgttgtgcgagggccaccttctcctggatatgggtgggatggcgatgtcaacccatacaagcggttgatgtagctgccacccaccatctgccatttatgtatcacctgcgacgtatgtggcatcttccaccgacctgccacctgccgtggattgtccacctgccatcgacctgccatgagccgtccacctgtcatctgccggccatgtgatgccactagtttaattaaccggcccagcatgagactaaactacaaaaacac

SEQ ID NO: 51346 - DNA, 576 bp, Zea mays
  Clone ID: MRT4577_146824C.1
cctatccttccagtcttcgaccgcccttaaaacaattctttgcaggttagaattgttggaccacaaagggcatgctgattcatatttaaaccatgccccccccccttcctcaaaaaacaaccaatgtagatgtgaaatatcgaatttacaaattaccaaagtcgacacaacaagtgaaatatcaaatcaactgtagatgtgcatctgccctactttgccaattttcacgcaagtggcctgttcttcaaagccaatatctttctatctctattagtctattggtctagcatctgtgcgccatgtagctgtgaccagcccaggaccatgaagcggttgtgccatcatttttctgagggcatgcatcttactatttaacttccggcgcattcatgcttttctaggtttggttattacaatatggtcacctacttgttattgaataggattgagaagttgaagcgtggttttggcatgcacgtccctgaagagttcagataagctggttctagtgctgaatattggctttgccaattatccactccacaaggctgaccatgggggtgccaaaccaacgat

SEQ ID NO: 51347 - DNA, 340 bp, Zea mays
  Clone ID: MRT4577_146825C.1
cgggcggaacctagcctcaattacagcgtccacccatgctttcttttttttctcatttaaactaaactcggactgtgctatttttcccaggggcaggtactaaacatctagaaaatctaagctcacctgtagttcagcaacttctacctttactctaacaacttcctccatgcatattgacctaataaaatggcaaaaggacttcattccaaaaccaaaatatacactcctcctgataaaatcctactatctaatttctcgtaatttaatatttaagactaaagatcatcaaattgattaaacctttattcttgcacaattactaatctattaatcattt

SEQ ID NO: 51348 - DNA, 309 bp, Zea mays
  Clone ID: MRT4577_146826C.1
tgttggtttactgagtggcactgacactgtgcgtgtggtctcagatgttaaacctgctcgtcttccctgtgtttgcagcaccccggactacatcacgccggagatgccgcaggtggccaacgagttcgacgacgacgacaaggtggggaagatggttttttattctctttttttgagcgtgggtatatcatatatcatatatgccagtgcagtggtagtgtgctgccttgttgagctccactgtttgtttggtttcgtgcatgagaccatcccctgcccaaaatctccggagaagtcagcgaaccctcg

SEQ ID NO: 51349 - DNA, 378 bp, Zea mays
  Clone ID: MRT4577_146827C.1
aaaaaaaaggacctgaccttctttttttattccactccccaataaattgggatccgaaaaaaacccccccacttgtattccaaattccccttacacaagaccttcccccccccattacccgaaagcaaaaatctgtccccccttggccccaaaaaaaaaacaacaaggcgcgagccgattcctgcccccccggaaacaaaacagggccctatttggaggaacaaaattgaaccggtgcccaatttctggcgcgggcgggcggaacttaagcttcacccccagaggaccccgccctgggggccctggccctcaacactttccctgggtaagcgaactcaatggcgtccccaaccaaggggcccccccaaaaaacccatt

SEQ ID NO: 51350 - DNA, 370 bp, Zea mays
  Clone ID: MRT4577_146828C.1
ggaactggtggtttgtttccatttccatttttttttttgtgttattgttctaaaacgggaacagggcgctgggaaacatccccaaaaggctttctgggtcccagacggggcacccaaatttacccggggaggggggccacccccccccctttgggatcccaatgacccacccacctctttgtccacggggggaaccccatggtggcgcaccttattcccttcccccgtctcctccttcccccttggggggcctcggggggcccccccccagagggacgagaacctccgggaacaccacttccttttgggttatttgtgcccccgccgacctggcccccctttctctgtgaacccggggggctggggggga

SEQ ID NO: 51351 - DNA, 430 bp, Zea mays
  Clone ID: MRT4577_146829C.1
aattcggcacgaggcgaaagccaaaatcctacaatcaaatttcaatgacgcgcgactaaacccgtgcgcaagcgccggggggcggttgcactcgtaccgcgcttgaactcatccgttccgctcgaggcgctctggccgtcgggcttcgtaggcgaccgggccgaggccgggtagcgcgtggagagcctcctgctggactagcattgcaacagtgtccttctaaaggaggccctgacccaccaaatcttgtaggatggcgatctcttttaccaggggttagagtttgactgcgacgccactctaggactagacttctctaacttcctatacctgaccaacccaagactgagagacggctcgctgaggacgctgccagcgcgcaacatggatacagagaagctaccgcacggctgagtatgctaagaactct

SEQ ID NO: 51352 - DNA, 553 bp, Zea mays
  Clone ID: MRT4577_14682C.1
ctaagtgatctcttattagattgtgcccataaaacagaaacttgatccatgacgaccagaaactgatattgttggcttctcttagtgactcattggaatatttagctgattcagttgaaaggtaatcctattatttacagtatttttaaagcatcatgtattgtaataaccgttagagacaatctcgtttatttggtccattctatagatcttacaggccagtgcagttaggggcggggagtgaggattagggagctggctatgtagagagaatatgggagacaacagagtaaaactgcgtaggctttcccaaaatctgttgtttgttctttctagtttccccttttcttccatctttgcggctattttgctgttttccttcttggtcttgtggtggagggtggtctgaagcctgaggaggttaaggatgtgcgcttcaacgtctaggatgaaactgtgacattctgcttgcaccgaacaattgtaataactgttgtggttactgtagttttttttttctcgaacacgcaggagagctgcgtatcattatatt

SEQ ID NO: 51353 - DNA, 396 bp, Zea mays
  Clone ID: MRT4577_146830C.1
agcatagcggcagtgcgtatagaggagcgtccagcagaacataatgaagatggtcatcgctactcgtcatgtgcttggctctggcagctgccagcgtctgctggatgcatatgccctgcccctgcacgaggctggacgctttgcaccgcgctggcaccggcctgacgaccatgatgagcaccggcggtctgtacaccatacgcacagtacatgaggcagtcgcaatgcactccgctgggagcggcgccctactactccgtgtgtgggcagacgagcgccatgtaccagacgatgcggcaacagagctgccaacccctgatgaggatgatggacttgctgtccagtcctcagcagctgcagatgatgatgcaacttgagcgtgccgctaccgtcagc

SEQ ID NO: 51354 - DNA, 482 bp, Zea mays
  Clone ID: MRT4577_146831C.1
gtgtctctctcgcagagggccacggacgacgcggcgcgaatccaggcggtggagctcctcgtcgccatcggctctggggacagctcagccagggaggccgtggtccaggaagacgcctcctcctcctcgaaggtgcgggaggtggccctccgtgccatcgacgggctctgcttctcgccgcccacctccaccgaccgtctcatcgccgccgggttcctcgaccgcgtcctctccctcctccgcaccggagacaccacgctgcagcactgcgccctgaaggcggcgcaccgtctgtgcccggtgtcggaggagatcaggaaggcgatgggcgacgccggattcatgctggagctggtgagcgtcctcggcgcgtcgtccaagtcccccgaggcgcgggagatggcggccgagtcgctctgcgccttggtgtccgtgcaccgcaaccggaagcggttcgtccaggaggaccgcgacgacgtggc

SEQ ID NO: 51355 - DNA, 521 bp, Zea mays
  unsure (1)..(521): unsure at all n locations
  Clone ID: MRT4577_146832C.1
ctcccggctcagacttctgctgcagcgcctccgccgccgccgcatctaacgcagttccctccgccgcagcccgaggcaagatggttctccagaacgacattgatctgctcaacccgccggcagaactcgagaagctcaagcacaagaaaaagagactcgtccagtcgcccaactccttcttcatggatgttaagtgccgggggtgcttcagcatgaccactgttttcagccactcccagactgttgttgtgtgccctggctgccaaactgtcctctgccaacccacaggaggaaaggcaaggctcactgagggctgctcttttcgcaagaagggagactaaagcggatgtgggcttcaaggtttgctctatgccacatactatcgccctgaactggctttagctaagaattttcataagatggtctccagcagctatgtgttgcatggtggctacttccaaacttatatctggnttgggttggaatgtgaagaactaacggctctttgaatatatattatg

SEQ ID NO: 51356 - DNA, 592 bp, Zea mays
  unsure (1)..(592): unsure at all n locations
  Clone ID: MRT4577_146833C.1
gtctaactttcagttcctgaagggatgataatgagccaattacggaacacaagcaaggtcgctgccagtgatggtattggcaaggatgatatggcaaactttgcgcttatgggtggtggagcagaccacctgaggggaaacagcgtgaacacgttcagccaggctcacaacatttggaggcctcaaagaggcttcctgagcgtgcagtgtctgttcttcgctcatggcttttcgagcacttcctacatccgtacccaactgatagtgacaagcagatgctggctaaacagacaggcctaacaaggaaccaggtgtcaaactggtttatcaacgcaagggtgcggctctggaagcccatggtggaagagatccacaacctggagatgcggcagcagntgcagaagaacacgtcggcggtggacaagacccaactcggcatgcagcagctgatccagcactcgtcggcaaactcccggcagcgggggcaaagcagcggcggcacgacgagaaaccaagacgagctgcccccgnggatgccccacgacatggnaggccagggccagcagcagcagcagcnagtgagcttcgctta

SEQ ID NO: 51357 - DNA, 278 bp, Zea mays
  Clone ID: MRT4577_146834C.1
gaaactatcgcactataccggtccacacaaagccgccagagcgccgcgccaccatgtaccgggttttccttcaaaccttatacatggatttcaacgataccgacgacgacttctattcctttccaaccgcctgcaccttcatgtgctagaccccgcggcaacatcttcctgaccagctgaaccggcacatcatgaatgttccgcgcccaagcatcccgttatcccccgtactggagcaatggaatcaagaaggccatacctccaagaagctcgacatc

SEQ ID NO: 51358 - DNA, 870 bp, Zea mays
  Clone ID: MRT4577_146835C.1
tccacgcgtccggatttgcagtctacttttgttttatcgtgcaatacctcaggaaaccgtgcctacatgatgcgatcgaaaccggagacgttcctgggtcaagcttcgttccgtaaaataaataaatccgaagcacttcaaagctctacatactcgcccttgcttgtttgagacaagggcttgcgttcttgctgcatctcatccgagatgattgtaatccgaacaatgtctagttaataaaaatgtcgctttgccctgaaaaaaaaaaaaaaaaaaaaaaaaaaaaaaaaaaaaaaaaaaaaaaaaaaaaaaactcccggttcaaacttctgctgaagcgcctccgccgccgccgccgaatcaaacgaagttccctccgccgcagcccaaggaaaaatggttctccaaaacaacattgatctgctcaacccgccggaaaaactcaaaaagctcaagcacaaaaaaaaaaaactcgtccagtcgcccaactccttcttcatggatgttaagtgccaggggtgcttcagcataaccactgttttcagccactcccaaactgttgttgtgtgccctggctgccaaactgtcctctgccaacccacaggaggaaaggcaaggctcactgagggctgctctttccgcaggaaggaaaactaaagcggatgtggccttcaagttttgctctatgccaaatactagcgtcatgaactgcctttagctaaaattttccataagttgttctcaagcagctatgtgttgcatgttggctacttccaaacttatatctggtttggtttgaattgtgatgaactaatggctctttgaatttatattatgatgttgacgaaaaaaaaaaaaaaaaaagcggcc

SEQ ID NO: 51359 - DNA, 1846 bp, Zea mays
  Clone ID: MRT4577_146836C.1
ctcgaggccggccgggtgattccttccgccttgtcagcgcagcgatccagacccacccgagccaacaacccatggccgccgcgacgccgcgtctcctgctcgcggtcgcgggcctcaccctcgccggtgctgcaggacccggcggagctcctgcgccttgccaaggagccggccttcgcggactggatggtcggggtgcggcggcggatccacgagaacccggagctgggatacgaggagttccagaccagcgagctcgtgcgccgggagctccacgccatggggatcccctacaggcaccccttcgccgtcaccggcgtggtagcaacagtcggcaccggcggtccgcccttcgttgctctgcgggcggacatggacgcgctgcccttgcaggaaagtgtggagtgggaacacaagagcaaagtccctgggaagatgcatggatgtggacatgatgcacatgttgctatgctgttgggatctgctaagattcttcaggagcatcgtgatgagttgaagggtacagtagttcttgtcttccaaccagctgaggaaggtggcggtggggccaagaaaatgatagaagacagagctgtggaaaacatagatgccatttttgggcttcatatagctgactctgtgcctattggtgtgctggcatccaggccagggcctattatggctgggagtggattctttgaggccgcagcccgaggcaagatggttctccagaacgacattgatctgctcaacccgccggcagaactcgagaagctcaagcacaagaaaaagagactcgtccagtcgcccaactccttcttcatggatgttaagtgccaggggtgcttcagcataaccactgttttcagccactcccagactgttgttgtgtgccctggctgccaaactgtcctctgccaacccacaggaggaaaggcaaggctcactgagggctgctctttccgcaggaagggagactagagcggatgtggtcttcaagttttgctctatgccagatactagcgtcatgaactgcctttagctaagattttccataagttgttctcgagcagctatgtgttgcatgttggctacttccaaacttatatctggtttggtttggattgtgatgaactaatggctctttgaatttatattatgatgttgacgatatttggtgacaaaaaaaaaaaaaaaaaggctcgtaatttttccgctgcgccggcgtctgtccataaaaccctaaaacctccggctgatcggttggtgttgaggcgagtggaagcttcgagttcttttttccttttggcttattgcgcaagaagggtaacgagaggacggcggcgatggcgaagaggctgctcccgtctctgaaccgggtgctggtcgagaagctggtgcagcccaagaagaccgccggcggcatcctcctcccggaaacatccaagcagctgaatgctgctaaagtggtggctgttggccctggtgagcgcgacaaggcaggcaatctgatcccagttgctctgaaggaaggtgacactgttctcctgccagagtatggtggaactgaagttaagcttgcagctgataaagagtacctcctcttcagagagcacgacattttgggcacacttgtggactgattcagagcatcagcaagcctgtcactagtcgttggttctagacttctagtgtgagatgcgtagtatcagattctgggatcaaaatccctgagaaagaactctgaactgtcgtgatgtcatagattttgtgatgaaacatcataattgcctgcttcttgttgcaagcgaacttttgcgtttaatccaaaaaaaaaaaaaaaaaa

SEQ ID NO: 51360 - DNA, 472 bp, Zea mays
  Clone ID: MRT4577_146837C.1
cctcgaggccggccgggatttcgaattcaaagaagaggagttccatgtttgctctgctactaaatagcggatgattcgatatccacaatccgtatctatgcttccctcacggcgcgagtgcctagaactactccaggtcccccgtcgcaagacgctcacgtgccacccaacatcacaaagcggccgatatgacctctgctgctgcaacaaatacaatggacataggggaaggtgtttctggtcaccggagcatcaggggacatcgcgtaatgcattgtccacctcctactcgacgaactctacaccgaccgcctgttcctgcgagacactgctgatccggagaaaacattgcagctgacggcgtctgagggtgctaacgatatgctgtccctattgtaccatagcctgctagaagaccgctgtttcgaggatgcattccatgtactgaacactgtatataatactgtatctc

SEQ ID NO: 51361 - DNA, 476 bp, Zea mays
  Clone ID: MRT4577_146838C.1
gctcagatcgcgagcggtatctataatcacacggagctaactgtccatcctagctacattgggtagcacgcacaaggaagaagtaggtgtcctgaatgagagagggagcggtactgtactactcctgtgtcggaccgacttgcggacgggacacctcacgagcatcacatgaaccaatcacagctagcgctcagaggttcctcgacgcgctgtgctcaaggcaagttatagcactgagcgcctcatgcccagacgtaccgtcagacagctactcggccataaaatgcaactaccgactctagttgattatagcatgcgtagcctggacgaacatttgcacgacgtggctagcgaggtcttggacgcccacgacaactgttggatccagatcgctatgcggcagttcaagaactaggtcgaagggatccagtccatgacctactgctggcttaacttacgtgatgacaaggatgcca

SEQ ID NO: 51362 - DNA, 374 bp, Zea mays
  Clone ID: MRT4577_146839C.1
caagccttcggcagatcatgcgtccatatacactgtttcatgatgaacctttgcaaggtgctcattgggatgcacattccccacatgggccttctaatggctatagtgatggtcatgatcatcatcctcacctgcatcgctttagcatcgctaagaagcaagttgaaccacataggctccatatgctcactaaagaggtgatctaactgactgaagtcatcgaaggaaaggaccatgtgcttcaaggctacagcgaacacaaactcgaactcttctcaaaaatcagaggacttgcaggaaaacctcatgacacaagtgccgatcatcttgtctgatctatctgagatactgtttagatgattgaatcttatcat

SEQ ID NO: 51363 - DNA, 630 bp, Zea mays
  Clone ID: MRT4577_14683C.1
tacgcctgctgctttcgattttcatcgatttttcgatacaaatatgttggatagcactcatcaaaggtacctggtagtgtgacgtaattctctttgaatacgtcatcccctccttggatggtaatatccgtacttcctctccacccacggtctacttgcctattgatgcctgtaaagtttggatcttggagtaaatttcgctcatcactgagtcgcttcgcatgtttgactttttcggacaattctcgcttttcatccagacaaaattcatccgataaacactcaactaaattggatacttgatcaatatgataatccgtcacatctgtttttaaccctatttgattggtagaagtaaacagcgcattcaccgccttttgtgctctttctaaatcatattctgcctcaaaggttacttctgccggaacaaattcaattcgatctatataaacttcattgcctgaattgaagacatgagcacttaacgtaaatacacttgatccatttgaaaagttaaacggagtagtaaaacctacagtcctaaagcttccggaagttaaattactcccactactcatagttgctgaaaaattcccctgattaataggtcttctgttctcgaggtcgacg

SEQ ID NO: 51364 - DNA, 298 bp, Zea mays
  Clone ID: MRT4577_146840C.1
agacctagaatttattaattaattaaataaaatataggctgcctccataattaaatctaacattcataaattgggggctatctccataattcttggttttttgcgttaaaaaaatgtttcgtcttttttatacacatagggctatataacgtaaacaagaaaatggatcgaacgcgtatactttaaatcctgtaaataggaacggggtacatacatacattatggaaagccatgtgcaacgatgcgggttatggtctcgtcgaagtcgtagcgcaacacctgacctgacatgggtacc

SEQ ID NO: 51365 - DNA, 115 bp, Zea mays
  Clone ID: MRT4577_146841C.1
gctcagtgaaggacgccattgtggcgaacggtggtggctgccaccgccttgggtggcttggaaccggcccttggacggtgcagcgggtaagagttggggatgctgatcagtgtgg

SEQ ID NO: 51366 - DNA, 207 bp, Zea mays
  Clone ID: MRT4577_146842C.1
cgacccacgcgtactctcttcttcgccacccaccgtggccttctgttcaagtacctgtaagggccacaccagtgcgtcattattttaaatatacgaccgacctaccgtttacatctctaataactcctgccaaatctcccgttcatgtgtattgtgcgctagccgtctatctgcactgctgttttttaggtctcattgttcgaattt

SEQ ID NO: 51367 - DNA, 298 bp, Zea mays
  Clone ID: MRT4577_146843C.1
ttttttttttttttttttttttttttttttttttttttttttttttttttttttttttttttaagaaaggaacaattttcaaattggtcataatagacaattcacattagtttggctaaacgactttcaactttttttttccggggattactcacaacattcttttaatagcctacatttcacaatagtttttttacgggtcacaaccgaaccaattattttttaaatatcccacccaccggctcatattagggctcttgccaatttgatagccaaagcaacctatttggggtggaag

SEQ ID NO: 51368 - DNA, 362 bp, Zea mays
  Clone ID: MRT4577_146844C.1
gagctcatcagtcggcggccgccctctttttttttgggggcagtttttgttccttttacgctttacacttcccagtgggtgttcacaatttcacaggcacaaggttcctaaaaagcaggggaccatgccagggacacattctcttgataaaagcaaagcaaccactgggcgcctaagctgggcctataaaaaaacaaaaaccccggcggtatacagacgccaagatcctctcaggatttggacacgggactgccacggaacaaaacaaaagcgcccggcccatcccacaggcaaaggaaagggggtagggcagagattcatgagccaaactgccggaccggttctacagcataaacggtgcc

SEQ ID NO: 51369 - DNA, 182 bp, Zea mays
  Clone ID: MRT4577_146845C.1
gagcatgatgacgatgcacccgcgacgtctgctcggaatttggctggggttgacaaaccatttctttggactacgcaaaaggacgccacttgggggggtcgcttaacgtgatgtggcttcacgaacccaaggcctcatagcgcacagaaagacaagaacgtccgacaaacacctaccatgtg

SEQ ID NO: 51370 - DNA, 1168 bp, Zea mays
  Clone ID: MRT4577_146846C.1
ccataacaggtatattacagtaatcacatttgatacacacacatttggagatagagcggaagacttttacaaagtacactttacattccagaactcaagttttacatggtagaaagagatgtatttattacaagtcttgatagtactcaaaggacataacttattacaataattggaagggtgaagcctttccataagagaaatataaaaaccttctaagcttcaagtcctccacatgaagtaactaacccaaggataagggaataaaacttctccttgttgcagagaagattcaaaaccttattctactctggtaagtagttagatgaaactccaccgctggatcaacatgcactgaagtgaactccttcttcaaacatcacttcttctacgtgttcggatgatgacacgatgccggttcgacgagaaaattcacgaacacaagctaggagaggacgctggcgctgctgctgttctgacgaagtaggatcaacccagatggaaaggaagcgggcagggcctgagcatggtgcagttcacggctgctcaccaacttggcgaagtccaaaccaaggcgagtccgacgagttcagttggggatgcatcgggattgaagaggtgctgggcaccagggcgagcgcgctggggtcgggcgacctcgatctgagagcgagggagaagctcagtgacggcgaagtctggaggtgacaaagtgtccgagcgcgcgatggagggcgagggccagagcgcagcgtcggtgtgcaccagaaggcagatgtcgagcctacagtgaagaaggggacgatggcgttcaacgagatggacggagctcagtgcttgtaggacggtgacatgacaggactgtagggcaagcggcttcgtgacgagcgcagaggtagactatggctgggtgttgagggcactggagtcaagtgctgctgctgcaatagcgtaagggaggtcagggaggaactgtgaatgggaggctagggtgctgatggactaagcacagggttcatctcggcaaccggcaagctccaagcgctgtgatgagcggagtcttggaagccgcatggtgtgaagagcaagaagtaaacctgtgcgtggaatgtgaggtggcgtgaaggagcttgcagcctgatggcatgggataaggatcaggtagctt

SEQ ID NO: 51371 - DNA, 369 bp, Zea mays
  unsure (1)..(369): unsure at all n locations
  Clone ID: MRT4577_146847C.1
aacaaaaaccaccactattgcacaaacatggttcgatcttagtgtacaacgccaactcatcatctcgacttgcctatgcaatgcaacgtgaaacaaaagaacacatgcatctcgcagcatcaatcaattctttttcttacaccctctgcgggggggggggcagtgaanttgcatagcatagccgttgagcttaggggggggggacgaagttggtggcgtaggcccatgcgttgttgttgnctgggtctnctatgtggtcagcgtggtttttgagggggcccttttcggggtcgttggcctgtgtgatgtctcgggggggggcgcctttgtttcgtgggcttttttggattgggttcttttgtggggttt

SEQ ID NO: 51372 - DNA, 1973 bp, Zea mays
  Clone ID: MRT4577_146848C.1
gaaccctgtgcttagtccatcagcaccctagcctcccattcacagttcctccctgacctcccttacgctattgcagcagcagcacttgactccagtgccctcaacacccagccatagtctacctctgcgctcgtcacgaagccgcttgccctacagtcctgtcatgtcaccgtcctacaagcactgagctccgtccatctcgttgaacgccatcgtccccttcttcactgtaggctcgacatctgccttctggtgcacaccgacgctgcgctctggccctcgccctccatcgcgcgctcggacactttgtcacctccagacttcgccgtcactgagcttctccctcgctctcagatcgaggtcgcccgaccccagcgcgctcgccctggtgcccagcacctcttcaatcccgatgcatccccaactgaactcgtcggactcgccttggtttggacttcgccaagttggtgagcagccgtgaactgcaccatgctcaggccctgcccgcttcctttccatctgggttgatcctacttcgtcagaacagcagcagcgccagcgtcctctcctagcttgtgttcgtgaattttctcgtcgaaccggcatcgtgtcatcatccgaacacgtagaagaagtgatgtttgaagaaggagttcacttcagtgcatgttgatccagcggtggagtttcatctaactacttaccagagtagaataaggttttgaatcttctctgcaacaaggcaagccccggtgcatttgccacctcccttgtgtttacaaaattttatcacttatatgctgcattaggtgataggagttgattgattaaacaattgatgcattaccatccttgaaagattgattaccataccttatcacctgttttataaaagctagagatgcttagtcatgctgatagactaagaaaaatgtttttcatctatgactcatgtttttacaaaaagaaaatgggcttgggataatgaaggcatcaagacgttgataaattcattatccaggcatggcccctctgtcaggcgccaaaattttaaaatagtttaaaatgggaccagacgctgagcaggaaaggtcgcccgtctgtgtcgattaaggaccgtaccgattgttggcctgatgatctaggaccttttaactggccacatacctcgtcatgggtaagcctgaacccggctattccatacgtgaaaagacaaccgcgcactgggcgtgggagatggtgggagtagcagttaccctcctggcaagaggctggatggtagggtaatgtgctcccgggtagcgcggaccagttcatgtggtggaggatccgtgggaatggttgacatatgcaagggttaagtgctacatatgtcgtgtggttagagatccccagctgggtattaatcgattcggatcgccgttacttctcggatatgaagactggatcgctgcccttcatcgtagataacaagtgaaacaaaaattggattttaaaagcaacctagtgtaggtcaagtgaatgatctagattagaaaaatgctagattcaggctagaagattcaggtaataaactaacttgtgaaataaaacttggcttaaggacccacttctagtaagcttttctgcaaaatgagtccttgaactttgatgagctttaccttgattcccaaaagccagcatacccttgaaagtcttttctttagtcgggtaagtcttgctgagtaattgcgtactcagggttttatcccttgttgtttttgtaggagaagttttattcccttatccttgggttagttacttcatgtggaggacttgaagcttagaaggtttttatatttctcttatggaaaggcttcacccttccaattattgtaataagttatgtcctttgagtactatcaagacttgtaataaatacatctctttctaccatgtaaaacttgagttctggaatgtaaagtgtactttgt

SEQ ID NO: 51373 - DNA, 1636 bp, Zea mays
  Clone ID: MRT4577_146849C.1
aattcggcacgaggggagaaactttccggtgttggagggcgaagagctcgaagttctaaaggtaacgcccgccgggtgcttggtggaacgtctcaaccggaggttgttgtcgatctctcgggttcgaggcgatttagttgtggtacgttaattaatcacgtgatgtggagggcaagagttggattaatctcaagtgaagatgatgaatgaacctgaagcttggatgatctgatcaagtaccaggatcggatgagagatgctccccaagcggacgtcatctaacaacactgacttagtgttatcccaggcaagccccggtgcatttgccacctccttgttgttttaaaacttttatcacttatatgctgcattaggtgataggagttgagtgatgaaacagttgatgcattgccattccttggaatttgattatcctccttgatacctgttttacaaaaagaactaatgaggcatagccttgcctagagaattaaaacatgtttctttttaaaagaatgatgtgtgacactgggtatgggtttgttttatgaaaaaggacttgtaatggtgagcgcatcatctgcagtgatgaattcatcattcaagtatggtacctctgtcaggtacatggtttgggtgttaaataataagatgagaccagacgttgagcaggaaaggtcgcccgtctgtgtcgattaaggaccgtaccgattgttggcctgatgatctaggacctttaactggccacatacctcgtcatgggtaagcctgaacccggctattccatacgtgaaaagacaaccgcgcactgggcgtgggagatggtgggagtagcagttaccctcctggcaagaggctgaatggtagggtaatgtgctcccgggtagcgcggaccagttcatgtagtggaggatccgtgggaatggttgacatatgcaagggttaagtgctacatatgtcgtgtggttggagatccccagctgggcattaatcgattcagatcgccgttacttttcggatatgaagactggatcgctgcccttcatcgtagataacaagcgaaacaaaatttggattttaaaagcaacctagtgtaggtcaagtgaatgatctagattaggaaaatgctagattcaggctagaagattcaggtaataaactaacttgtgaaataaaacttggcttaaggacccacttctagtaagcttttctgcaaaatgagtccttgaactttgatgagctttaccttgattcccaaaagccagcatacccttgagagtcttttctttagtcgggtaagtcttgctgagtaattgcgtactcagggttttatcccttgttgtttttgtaggagaagttttattcacttatctttgggttagttacttcatgtggaggacttgaagcttagaatgtttttatatatctcttatggaaaggcttcacccttccaattattgtaataagttatgcacttcgagtactatcaggacttgtaataaatacatctcattctaccatgtaaaacttgagttctggaatgtaaagtgtactttgtaaaagtcttccgctcgatcttcaatgtgtgtgtatcaaatgtgattactgtaatacccctgttatgtgggagatcctt

SEQ ID NO: 51374 - DNA, 464 bp, Zea mays
  Clone ID: MRT4577_14684C.1
aaaaaaaaaaaaaaaaaaatagaaaaaaaaaaaaaaaaaaaaaaaaaaaaaacaaattaaaaaaaaaaaaaaaaaaaaaaaaaaaaaaaaaaaaaaaaaaaaaaaaaaataaaagaaaaaataataaaaaaaaaaaataaaaataaaaaaaagaaaaaaaaaaaaatttttaggccccaattcaccccctttgggggggatttttgttttttttttccgccggtgttaacaccgttgggccttgtttaaaaccggccctaaccccccttagggagatttggattaaaatccagggtggccccatttttaaaaaaagggaaggggaaaaacctgggggcccttcccaaaatttgtggggaatgaaaacccctttgacgcgccttttaaaagcgcattaagcccggcctttgtggcgtttacaacgattggtacgcttgaatttgaaagggccctccctcccaatg

SEQ ID NO: 51375 - DNA, 354 bp, Zea mays
  Clone ID: MRT4577_146850C.1
gctcactaatccgcggccagccctttttttttttttttttttttttttctctttttttttcttttatattttcatttacgctgcttttatttattttatcgacagtaaaacacctataactcgtaagatgagcttccgatgcaagctgaattaggtatacagacatgactttcaaagtactcagattctgattaaccctcaaatcacagctaacaaacccaataacctgcagctgcagctaaaaccatctattttgataccggaatgttttatctgcttatttcagaccgtgtcttccgctactgcaaccgagccttgataacttgctatcttgcattaaaggggaagaaaacg

SEQ ID NO: 51376 - DNA, 382 bp, Zea mays
  unsure (1)..(382): unsure at all n locations
  Clone ID: MRT4577_146851C.1
tgtttgctgccgccgcggtttccattgcttctcccgtcgctagggcgttcgtgaatacgtgatccatcgtctccatctccgtctggtgtggtgtgttggtttgagagactcgaggtgtgggcgtcgcttcgtctggaatcggctctcccatttgttagatagatccttcatatctccccacgtctgggcgtcgcttcgtcggctgcgacctgcgagacgccggcgccgccggcgacggtggacgaaggcgatcaaggattaggcgatccgatccgatccgaaccaattctccattcttcgattccttccttgggtgggcggctcccctcagattccttccacatggctcgttccccggcgacgncaccccctttcccggcgc

SEQ ID NO: 51377 - DNA, 141 bp, Zea mays
  Clone ID: MRT4577_146852C.1
cccacgcgtcaggcgtgttgccagggacagcggtggcattgtcccatgctctgcaattaatactagccctctgactctgaggctattcattgtgatactgtcatcggtgctgcctgttagcacgcagggctgtccgtgacc

SEQ ID NO: 51378 - DNA, 192 bp, Zea mays
  Clone ID: MRT4577_146853C.1
aattttgttttttttcctgcaccaacacacgggggcgttttaataatgagcgacgcgcgcttctcacccggataacccatggaaacacaactgtccaccaaaaggagtatatctggagcagcctcattttacatatgaatgaaatttgtgaaaatgcacatctctaccattcatcttaaccatttattaaaa

SEQ ID NO: 51379 - DNA, 710 bp, Zea mays
  Clone ID: MRT4577_146854C.1
gtaatataggcaaataagcttaggctgcataagttcgtgcgagtctagatacaacgaactaggacacatgttgaaccatatgtgggggaggagagccagacatgcggaatatgaattcataaattagaaagtggggttatgcattcacaccatgtcaccgtgtaaataagcattttttaacttgcgataagtttggtagttatctagggtcttgaacaaatatttttggtctattttttaaataaaatcttactgactttggcttggcaaaagccggtccaactggggataaaacccatgtatccacacaagtcatgggtactcatggatatgcagctccagagtacattgcaacagatgatgaaagcttttaaagggagatgtcaataatacttcctagtcttctacaaagtgtgttggcaaaccaccaaaggagacctcatggctgtaattgaatccttccaaaaccagcgctgcaacgatctaaacctcctaaacaaagcaaacatagttctcatcctgaaaaaagaaggagcaaatgcatcacggactaccgccctatcagcctcatccactcggtggctaaggttataacaaagatcctagcactccggctagaacctctcatggataaactaatctcgcaatcacaaagtgagctattatcatcatgacgtggtgcatctggaggtgcagaaacaattggatct

SEQ ID NO: 51380 - DNA, 379 bp, Zea mays
  Clone ID: MRT4577_146855C.1
cattatttttttttttttttcttccttggaccaatagcccattaaaatttggaaatttaacttcttatttttaggaggccacatacatcaaccaaaaaacttccttattgaatgacaactcataagcaatctaaaagagggcaccccccatgatgtgtttttgaaaaaaggctgctgggttatgaaaaacacgttgtacaaagggcctcaactgttgcacttgtaaaaaggctgcggggttagccacaaactgctggtaaaacggaagcaattgttgttgtgtcaaaaaggaaacggggcttattatacctagctggccaaatggtagaaatatttgccgctggaaacaaacaaaggggttcagcgcggcgaattggct

SEQ ID NO: 51381 - DNA, 244 bp, Zea mays
  unsure (1)..(244): unsure at all n locations
  Clone ID: MRT4577_146856C.1
cacacagatacacacacactcacacccatggtgccgtagtctggggacccgacgacttccngagggaaagccaacgcagcgcgatcccgaacactcgcagtcacaatgcgcagacgcgttggactccagacccctctgattgacactctgcctcgcggnangagnancagtcaaaccttgcagcgggagtatggacgggcccttcaggaggcaggaagcccccatagcaacgaaggccagcctg

SEQ ID NO: 51382 - DNA, 205 bp, Zea mays
  Clone ID: MRT4577_146857C.1
ggaacaaacacaacaattacacggggggcaaaatgcaatactgaacacgggacgttcctatttccaaaaagagagagagaagcacatccataccccgaggaaaaatggacagctatccacctattcttcctcctattagacgccatccagcggcaaggggcacatccaagctcttgacgacccctgacgtccttgctcccatctt

SEQ ID NO: 51383 - DNA, 309 bp, Zea mays
  Clone ID: MRT4577_146858C.1
gtaccatgtgcgcacttacactcaacgcattttcggtggtgatcagcatagaggagagagtgggtatgatccatgagggggtgtaactagtcatatttatgacggagaacttgatcggtagcaggcccaagaaggtggtcgacgtttctgatgatgcatgtgagactatcaatgactgtaaacacttggtcaaaatgatcggcaaccacgagtacctcaatgacatggatggcctatgacgggctgtcaatgacgtacttcaggatgtctataccaagtcatacacagtatccacagtgctatagatgt

SEQ ID NO: 51384 - DNA, 246 bp, Zea mays
  Clone ID: MRT4577_146859C.1
gttcactaagaacacaaagcgagccactgcacaacacacggggtgctattatcctcgcctctgcctatggagccacaatctgatattacatgctatactataggctattcaattctccacagtcttaatggctcaacacctacttgcagccacatccaacagccttgcgggcgttaacaccaatggcatgcacacaatctggcattacatacagcaccaccacacacacagtctacaccgaccact

SEQ ID NO: 51385 - DNA, 382 bp, Zea mays
  Clone ID: MRT4577_14685C.1
ctcacgcgtccgcctctctctctcctccctggggtttatcttttcctcggccctgcctgctttttaccacttccgcccgtcgccttccacctctcgcactccctccctccctccctccctttcactccaactcaagcgcagcgctgtaccgtacgtccccgactccccccttcttctactccactcctggccgcactctccatgcccaccccgtgaaggcgaagcgaaaaccaaaaacccctttgctacatcactttactagctagtcgtccccgttctctccttggtcgcggcgccggacgagggcgacggcattgagagatatggactaagagaggcagcagggtttcttcgccgcgctcaaggaggaggtcgtccggac

SEQ ID NO: 51386 - DNA, 427 bp, Zea mays
  Clone ID: MRT4577_146860C.1
ttttatatttttttttttttttttttttttttttttgctttttttttggtacatttttttttttttttatttttatatgttttttttgttagggccaaaaaagattccggccttcgttgcgtatctaggaataaaaggaggcattcttcggccccaaaaaaaccccccgaccagatgtttaaaccctaacggggggataaccctttttgggtccaacactcattattttaaaaccaaaacacgtggcatgcggggttttgaacaaaacaagggggcaaaaaaaaactaaattattccccatagaaaaacaagggggactggggatttctttagccccattgggacaaaatgttccccaaaaacctcaaaaaaataaaaggggcccggtctttgggcatttggggggacataaaccctttcccatctg

SEQ ID NO: 51387 - DNA, 242 bp, Zea mays
  Clone ID: MRT4577_146861C.1
cgggccagacgcacgcgtacgcgtacgaatacgagacaagatggtgatagttgcatcaaggccgcagctccatgatgcgggggccgttggcaggaagctcattcgcaccatttctatctgattatggcgggggctcagcttagacatactgcttatttgctgtgggtgcagctgagcatgatatatacaggagatgaacagtattcaatcccatcatctgcatgatgcttgagactaaatcc

SEQ ID NO: 51388 - DNA, 285 bp, Zea mays
  Clone ID: MRT4577_146862C.1
cccacgcttccggccacagcctgcgaaagaaaatacggtggtaggtcgcataggcaacggctgcatcttgctactatcgccttgatggcagagacaaaatacagcggtggcgccttctacagctaccaacgcaagctacactatagtacgatgtaactacagctatagctaccctcgcaactgctactgcaactccgacgttaaacagaggaactaatgcgaaaaccctgcgcggtcaaattatactgaacgctaacgagatgcccaccctattacatagggttt

SEQ ID NO: 51389 - DNA, 291 bp, Zea mays
  Clone ID: MRT4577_146863C.1
cgctgaaggcctcaccaacttgccgcacacagacttcactctgtgcccgtgcatgatcgaccaggcacatcaagaagaacggccaatccgacagattttgtacctcggggacctactggagacctgccatttccaggccttctggcaagcactggatgacaacatggacctcttggaaggtataactggctttgaagactctgtccgaaagtttatctgccatgttgtaggtatcacttaccagcacattgaccgctggctgctaagcgagatgctcggggatctgtcgga

SEQ ID NO: 51390 - DNA, 2795 bp, Zea mays
  Clone ID: MRT4577_146864C.1
cgcctactctgttttctgattcactgaaccgagcgagttctcgtcgcatcgtatgcgcctccttctctgattccccaaaaatattccctgttttgctgttcttttcttcctcgtaatccgctcggcttccattgttgccgccgctaccgacggcgacggcagacatcaagtgtcagtcctccttccgccgaagtcttcttttggttggactccgactctccgacaggagttgcgctcctcctccccctctactctactggattacactagcgtggagatccatctctatttgtttttggtctcttctttgcttggggcaaggtcaatcacagttgataagataccacttgtactctaatctgtcagtctccacgtgcggctgcatatatactgtttcaaaatttcggagtaaggtctgaagtctgaaccctcatgctgcttcagagggattgaggctggttgttggtcgcacttgcacatggcgcagccacagcagcgggtgtaccaagcttggaagggggataacctctcctacatgtttgagagaaagaaaatgattcgtgcctcatttgcagaggttcttctttggtgggcggttgatatttggaccaaatgttaaatctctaggtgtttctgttgccctcattgttatcccagttgctgttttttgtgtgtttgtcgcacaccatctccgtcatcagtttcatgcatatgatgcaggatatgcaattcttgtcatagcaatagtgctcacaattagggatgaaaacggtttcggaatttttcggaattccggaaaccgatttcgaaatttttcgatcggattcatcggtaacggtatttttcgaaaacggaatcggttttcggaattttctatcggaatcggtatcggaatcggcgtggtgttttaccgaccgtttccatcggttaccggtttttgtcggaaattaccggatttatgtctcggaaatttccggaattgtgtttcggaatttttttcggaattttccagcatgtgattttttcgcatcgcctgtacatctctggataaggattacttattttgtattttttggacgctttaagatttttttgggttagatggtgttggaaggcagttgagattaacgatttggtctctcgaacgaatccaccattttctatgcacatgttatgtattagtaatatataacgatagagagccgacagtctgtcttttccacacactagattttagggttttcctgtgaggctgtgaaaaaaccttttatgtaaggaaaaaatatttcatgagtaagtatgtcacgtcaactaaatcgagtggatattgtgaattgtgaactttgaatatgttaacttgtgatctttatgaacttgttatactgtgaacttgttatattgtgaacttatgatctttgtaaactttttatattataaatttgtgatccttgtgaacttgttatatcatgaattgtgaacttgtggtatttgtgatgttttgtcaattttgttttattgtgaagtttgatatgtttaccaatcatattttagatttcgaccgttaccggtgtattttccgcaccgaactttcgtttccgatgtttccgaaataccgatatcgtttccgtttccggagttaccgttttcgattttgtttccgataaaaaatatgaaaacggtaatggttttagtgtttaccgaccgtttacgaccgttttcatccctactcacaatctatgtgcttctattactcttaaccactgccgctcgggatccgggaattgtacctcgtgcttcacatccacctgaggatattcactatgataatttgtctcttactgacacacctggaatactacagttcccctgtgtaaaagaagttatagtaaatgggatgcctgtgaaagtaaaatattgtgaaacttgtatggtttttcgcccacctcggtgttcacactgttccatttgcaacaattgtgtggaacgctttgatcaccactgtccatgggtaggacagtgcattggaaagcgcaattgccgttattttttcctatttgttgtctcttcaagtctcctctgcatttatttgtttgttatatcggccttgtacatcaagtttctcatggatggagactatcctacagtttggaaggcattgaaacattcccctgcttctctagcactaatgatatactgttttatctctctctggtttgttggtgggctcacaggatttcatacatatctcatcagcactaatcagaccacatacgaaaattttcggtacaggtcggatggcaggcttaatgtctatgatcaagggtgtctgagtaactttcaagaagtagtgtgtgccaagatagagccttctaaacataagttccgggcgcacatacaagaggaagtgcgaggtccaccagctaaccgtgctggagagactgaagaagaacaagttggtggtcctcgagcaaaagcgggggatggcctcgatattgatggtgatctgatgaagatttcacataggcataaccatgaggacatcgatattgaaataggatgtggggatgctaatgaggtggaatgctcagtttcagattccaaagttaaagacaatatggatgcacatatgtgatatgtagagttagaaataaggtaaatggagaacagtcgagttgggttccagcggttttctcttgtgcattccgaccagcgtgtgtgttgaattcttaccctcggatccttcagaagacgtttgtgtatagtgtcttggttgagaaatcccaagatggtgtatg

SEQ ID NO: 51391 - DNA, 716 bp, Zea mays
  unsure (1)..(716): unsure at all n locations
  Clone ID: MRT4577_146865C.1
ccgaggggaagttcccagaagcgctgagacagttcctcagcatcttgcataccattcccctgatcgtggtagactcacggagagaagttgatgaagtgaaggagttgatcgagatagtgagggaatatgttcttggtctaagaatggaactcaagaggaaggaattgaaggacaacatcaaccggcaacaggaactggcggcctacttcaccaactgcaagctccagagggttcacatgaggcttgtgctctcaaacgccatggctctatgctacaagcagaagaacttcgcgaccgcagagcactttgcaaggctgctcctcgagaacagccccaacgaggtccaagcgaagaaggctcggcaggtgcagcagcagtgcaacggcaagcaggacagccatgagctcaactatgactacagaaatccgttcgtcgtctgtggctcgacgtatgttcccatctaccgcggccaaaaggatgtctcgtgcccatactgcggatcccggtttgttccttccattgaagggcagctttgtaccatatgcgagctttctgtggttggcgcggacgcctcgggcctcctgtgctcccctacacagacgagatgagcggaagaggctagtcgttagagctcccctatattctttctagtctcgtaaagtcttgtcttaattnttaccaggaggtttactgaatgtgtaaggaataagcataat

SEQ ID NO: 51392 - DNA, 424 bp, Zea mays
  Clone ID: MRT4577_146866C.1
atggggcaaggggaaaaaaaaaaccaaaaaacgccccaaccccaacctgcaaatgcaaaccctcaaactcaaaacaaaagaaaaaacaccccccccgcggaaaccccccaggaaagccatcttcccgtaatgaacccccacaaaataaaccggccctactcaacccactcctgcatgggccggccggcagcccttgcaaaacaaacccaccgcgcggaccccccaaacaaaaacgccccccactacggagcagaacaccccctgggtaaagaccggagcaccacccttcacaatttctaggcgcccccccacaccgggggcaaccccaagatgaaggcctgctcctgccggccccacatcaaaaggaaggcccccccccccggcaaccatttcaacaacacccccccgaagcccctccctttgt

SEQ ID NO: 51393 - DNA, 529 bp, Zea mays
  Clone ID: MRT4577_146867C.1
ttggtggtcctcgagcgtaagcgggggatggcctcgatattgatggtgatctgatgaagatttcacataggcataaccatgaggacatcgatattgaaataggatgtggggatgctaatgaggtggaatgctcagtttcagattccaaagttaaagacaatatggatgcacatatgtgatatgtagagttagaaataaggtaaatggagaacagtcgagttgggttccagcggtttaatgaatgtgtttgtttagttcataagtaggcaaaatgccgtctcctccggtggtttcagcattattctttttgtaaatggctagtgcaggatacttaggatgctaccctgcaggttctcttgtgcattccgaccagcgtgtgtgttgaattcttaccctcggatccttcagaagacgtttgtgtatagtgtcttggttgagaaatcccaagatggtgtatgaattcagattggtagttctaaacttgttgtctttcagttccacacaggcagaagtcattgcttttcagctc

SEQ ID NO: 51394 - DNA, 496 bp, Zea mays
  unsure (1)..(496): unsure at all n locations
  Clone ID: MRT4577_146868C.1
gccaaggcccagnacancccgacgcacaagcctttagcggcgggcncccgagggggggcaccagggacgcgnccncggagcgcnacggcgggcggaacccccggcccangcgcgacccgncggaggggcccgacacccngangcccaacangngcnacnncgaggcccggccgacgggcggcgccgncgacgcgagccagcnggcggaccgggggcgcgcggagcgcgggcgcgagcacgagccggngancaccacgnacgcggggcngaaccggnaccgcgncggcgacgggcnccaggngaccggcnnccacaacncggcgccgcagccccggcncgcgcgccgcaagaacgngccgccgcccancgaggcggacaagacggacgaggccgagccgcagcgcgccgnggagcgcgcgancgcgcngccccgcccgcacggcgccgccgnggcggngnacaccagccaggcccgcaccaagagcaccccgggcca

SEQ ID NO: 51395 - DNA, 408 bp, Zea mays
  Clone ID: MRT4577_146869C.1
gccccacgcgggaagcagtggtaacaacgcagagtacgcgggaagctgttggggctggagttggtggaggaagcagtggccagaagatgcccacacttgaagaatacggtactaatttgacgaaattagcggaagagggcaaattggacccagttgttggtagacaggatcagattgagcgcgttacccagattttaggcaggaggacaaagagtgtgccctgcttaattggagagcctggtgttggaaagactgctattgctgaggggtcaccgccgctatatttcccccagcgggatcccgaaacaattgaaggaaagaaggttattactcttgacatgggcctccttgttgctggaaccaaataccgtggagagtttgaagagagattaaagaaacttatggagg

SEQ ID NO: 51396 - DNA, 115 bp, Zea mays
  Clone ID: MRT4577_14686C.1
attccggacaggcaattgctaggcggtggcgatgcgctgggaaggattcgaatcaggggtgaagcgtatgagacggcgctcttagtcgcctctagtagctgcgagacgcggctgg

SEQ ID NO: 51397 - DNA, 424 bp, Zea mays
  Clone ID: MRT4577_146870C.1
ggccactgaggtaaatacaagtgatagccgtgttgaagtggactccaagatctagaagggtgttgggggggagcacaacacaaattctatcaaagagcttatcagcaacacgcctctaaattataatgacaatcgtttctttgggaaattcagatagtaaacaaaaagtggctatttcttcagaaacgcaaggttgctttacaattgtattatgagaaaatatttgatgatgagaaatggaggatctggcgaacgacttcatgagtatagttgcagatagaaaagacaacactgacgatcaaatggaaccatcaattttggcacttgatcgcaacaacacatgtgagctttttttgctgataatctgatggcaaaagcaaaatcatgaaaatatgatggcataatggttatttctgaagttatt

SEQ ID NO: 51398 - DNA, 497 bp, Zea mays
  Clone ID: MRT4577_146871C.1
gcgtccgggctcttgccttggtagccgtacttgggttcctatggatttgcttgctgtccaggaagaagagcattggtgggggctatgtaaagatggacaaacagactgttcctgatggtgcaaagcttgtgacataccagtggaaccttccatattcatcaagcgagattattagaacgttggagctgcttgatgaagaggacgtggtctgttggtggggctttgggacggcgtacaggaatgtgatggatgatggcacgtcgtatgcgttaagaggattgacctcagtcgcgaaaagacgtaacgggacttcgaaaaagaacttgaaaattttggcaggattatgcgccataaaccttgtcaatctgcaaggctactgccggttcccaaagcgagattactcgtatatgattccctttagctgggcactttggaatgctaccttcatggagatgaacaagaggagcagccattgaactggaacgcccggttaaaat

SEQ ID NO: 51399 - DNA, 343 bp, Zea mays
  unsure (1)..(343): unsure at all n locations
  Clone ID: MRT4577_146872C.1
cctgaccaaatttcggggcgggcgccctttttttttttttttttaaaattcgaattcaaatttctttacaaaactatggcaaaatcacctgctggtgcatataaacatgaggggtgcgctggcttnnannaaccctacaaatttncggtgccccaccantcacaaatctccaaaacccatacaccgttttaagatctccgcttatttttcttctccttcaaaaggttcatgaggtaaactccatatacctttacgaccttgaaaccgacacctttaatatttcccacaccatggcccttaccacctaatccagcaatcatcaccttaattttctcctccattt

SEQ ID NO: 51400 - DNA, 426 bp, Zea mays
  Clone ID: MRT4577_146873C.1
ccgccccagacgcccccgacaccacgccgtgaccccgacgtccccctcgagctccggcggccgcacgcccaagagcccagacacgcgggtcctctcgccgccggacaagaagtccacctcctccggcgccaccgggctcagcgccgcggcgtgggccggcttgggccttgccgggctcgtggccgtgcacctcggcgcgttctaggccagcccgctggcctggccagggaggagacagtgccgtgtgctgttgttaggctgcacgtcatggattggattggtgtattggttgagggacttgactgcttaccagagagagatctcttttggttcagggaactgtgctgtagacctgtagttggataccttggatgttatgctatcagttttgctgttgttatcacatctctttcgtgattttctttt

SEQ ID NO: 51401 - DNA, 499 bp, Zea mays
  Clone ID: MRT4577_146874C.1
gtaattagcttgatccactgcagtttgcaagacaggcagtttttttttcctaatggatatcactgcttcagaaacaaaacggcgggtcaaaagaaattgtgaccgcctcagatttttgttcgaaatttacagagtggaaatccttgatttggcggcagaattcgtgagacacattataaataaatgctcaggttctaataactagtacaacgaaaggtggaccggatgagcagacacctaaccagcctactagtcaaagtgtatttactgctctgctcaggcagcatgcaagcaggaagaggacgcgaacgaacgattggtttcacttttcaaagcgcggcgaccggaccgacggaacctcggaaccgcgtgtggcgacgccgagcaggccgggccgggtaggtagccgaatatttcagtacatggacgacatggtggtaccgatgaggagctgacaagtgacaacccaaaagcgcgaaagatggcggcgtcatgtgac

SEQ ID NO: 51402 - DNA, 249 bp, Zea mays
  Clone ID: MRT4577_146875C.1
tccactcattcgcaatttttttttttgttgcattaccccaaacgggaatgagaactcttttgggaggggcgtaaaaacattgctttatctattatatttcttcattatcaaatacttatatacagcttctcactttcaagaaataattgatacatatagtaatgagcatctctctttatatttcaagaatatagacctttgtttgacactattaaattaattttgtgctactgattagacatactagtt

SEQ ID NO: 51403 - DNA, 413 bp, Zea mays
  Clone ID: MRT4577_146876C.1
acgtgcacatcttaccttacctcagcattcaactctagatttacattttcatataccaccataataaccacccggtcgggttccaaaattttgtaggatgagactgcgaccacagctaatcaatcatacctaaaaacatagctcccccaaccactttgaatcacgagaaccactatcaagttttaaacacccactgtacacaactaatctagcacttcacatgctcacatcaatgacattggcatggcctatccttacttcttaccacttacacctctcatgaagtacttaacactaccatactgttacgcatcaaattgtcatgcctacccaatcttaagctttgaacacacactaattcaaatgataactcactgccccaaattacaagaattctattccatcatacatac

SEQ ID NO: 51404 - DNA, 335 bp, Zea mays
  Clone ID: MRT4577_146877C.1
gagaggtgagagcaggaaaatgcaggctggcggtactgccggctgcttctccggcgatctgtccggcacggtcatgcctgagagcaggtgcttgcatgcggtccgagtcctcggcacaaggtggagcgtccttgtagctgacgtcgaacctaccgaagtcgctcacaatgactacagctcaagcatctgggtgtcgcccgtggatgacctgtaccggcttggtggcgatgcgcgcgaactgcccatgatctcaggggccatacgagtctactcagttgatgcagcgagcaagagtgtggtcggggtggacagggactacctgtcctacggcgagc

SEQ ID NO: 51405 - DNA, 1366 bp, Zea mays
  Clone ID: MRT4577_146878C.1
cattgggtacctcgaggccggccgggaggagggtaccaccagctacccctctctcttactgcttcgaacttgtctctccatattccttcccgcacgcccacatagagacgccggcccgcactcgaacaatactactacgactactataaatacaggagaatgttttgccgcatgtttttctttttaatttagtgcacgatttgttgcatcgtagccaactagcaacgacaacccagctagtgattcggttgccgccatggcttatttgctcaagagcaggagtgaaccagtgcagcagctgcgggtacccgcgtcttcagaagaacagcagagaagggtaaatgaggtccgggagctccttggcgatctgccgacagagatgccgaacttcctttctgatgccactatccgccggttcctccgagcaagaaactggagtacgatgaaagctaccaagagcctcaaagaagctaccagttggcgacgtcagtacaagccagagaaaattcgttgggaaagcattgccgacagtgagaatgaggctaggagagcctacatacctgactaccttgacaagaaaggaagaatggtcttcgtaacacttccaacaataaagtccaaatcttcagagaaggatcatctaaagtatctagtgtacaacttggaaaacctgctcatcgattgtgcagatgcagaagaggataacgttgtttggatctcggatttcaaaggctggtcaatatcaagcacaccattttcgttgacccgacaatcgctgcacataattcaacaatattatccaggattgatagcagttggtattctaaccaacgctcccaaaatttttgaatccttttggaagataatgaaacatttcctcgagccaaaaatggacgaaaaagtgaaatttgtgtacaacgacagttcggagagccagaagatactgggcgacatgttcgacctggacgagctggagcatatatttggaggaagaaacacggccgactttgacatcaatgtgtatgcagagagaatgaaacggcgagatcggatacggggagcttcgacagaggataatggcgaggccacctcttcccgatgttggacgaagaccacgagaaactccagttctgtttgaagagcgcagtaccactaatctggacgaaggttgaaactttagtgttatcctatatactgtatatgctctgagccacgcgagcgcggttatatgataaaactgcttagcatttatagttatgaacacaaagagtgttaactttaaggatctgcgactcgactcctaaaagaatgtaaaggctagttcggaagtttgagaaataaacctagggttcgaaaaatctttcat

SEQ ID NO: 51406 - DNA, 259 bp, Zea mays
  Clone ID: MRT4577_146879C.1
tatatttttttttttttttttttttttgtgggggtaaaacctgacacgagacttatatcatcagccctgagcacacgctaggactccttcagggggcacataaatacagcacagcacaaaaaatacgatgcacagagcacgcagttctgccccatagctcatggggggggaaaatattcctaaaactgaaaggaccaatctggccatcttagctgtgcataaaggaagaggaaggccgtccatccatgtaagccccgaa

SEQ ID NO: 51407 - DNA, 706 bp, Zea mays
  Clone ID: MRT4577_14687C.1
agggccgcgcccgaacttccacgagcggagcgatgcacatcggcgtcgaacacctctgccctctgtaaggagacccaaccccaccgtgcgtatccatgcccccaagcgacggcggtgcggcgggctccctcgccgacacgccgcggtcggagggagggtcaccgcggagcaagcctctggcccgggagaagcatgtctccgcacgaggtgcggtgacgcgatcgtcagattgcaacggggaataggaggttattgggctgctccatatggatgattatggaagttaatggagggtgagggcaagaaaagaagtataactaacactcgtgcgatcccggaatacagaaacagagctattaacgctagtgatggaaacagtctcatgactcgtgaaaggtagcttctacctccctcatctattatatgatttcgtggaagactgctagcaggcggcaagcttcccagatcctgtcacattgccgtatcctttcttgatcggcgctggccttgtcgatttacgggaggaacgcggacattgagctatattatagttggaatcttcatgctgaatcctcttacttaatccaacctgctgctatcttgccgaaggagagcctctcatctagcggcatgacaaatgatcgcaagacgttcttgtggctggagccactgtgtgtcccatgatcacggtgcttttatggtttgt

SEQ ID NO: 51408 - DNA, 237 bp, Zea mays
  Clone ID: MRT4577_146880C.1
agctcggaattcggctcgaggataaatattactggggctttgtttaatcacaccaatactaaagatacgggggggccgtggcggcctaatgggcgctagctgccattagatgggccgactactccttactatgcacgtacagagaactgttttcgtagcactgtggatactcatgctgacacgtcagacatggtcacaacaagatcgccgcccccctctcaggaactctggcctaga

SEQ ID NO: 51409 - DNA, 232 bp, Zea mays
  Clone ID: MRT4577_146881C.1
aaagtttctgggaaactatgttcaaggttgaaatggagagtagatttaattttatttgtcttgtagggaagaaatcttcctttgaaccgcttttcttgctttttccctttttcccaaactaggttacaggttcttatctgcaaggttcaagttgcttagacattgttttccagtattctgcagggccagtcagttgtacagaagttggaatattctgttccagaattaaaga

SEQ ID NO: 51410 - DNA, 408 bp, Zea mays
  Clone ID: MRT4577_146882C.1
ctcacgctcggctctcaagcacgcgcttggccctgctcgcttcttgtcgcgcgcgcaggcttgttgctcgctcggcttcctacctctctcttcccatggccggcttccagacccggctgcactccatcgccggccagtcgctcgcccatgccgagctcctggcgccggatcccctgtgagctttctccgtcggccatggatgccggtgagcttatcccttggtgccgcgagctcgctgtagagttttaagcacgcttcttccctgctgcgcagctccctcagcgttcctcccgtgcttgcgctcgcccatggtggctccctgtgctcggcgctccagctcgtccggccgcggcctcgtcgaactgctttgccttccatggccgcgtcaagcttgggaccctgcttgct

SEQ ID NO: 51411 - DNA, 436 bp, Zea mays
  unsure (1)..(436): unsure at all n locations
  Clone ID: MRT4577_146883C.1
gggtacctcgaggccggccggggccggaatgcatagagcagtngntgatntagngagtccctcctcacgcctccgccgcgcgtaccaagcaggcgcagacagggtgccggctggccacggcctgcgatcgcggacgcgcgacctcttcgcgcgccccttccgtaagaagggctacgtcccgatcaccacctagctccgcacctacaagatcggcgattacgtcgatgtctaggagaacggagccgtccacgaggagatggcgcagaagaacgaccaaggtcgcacccgtcgcgtgtggaacgccaccaggcgcgccatcagcgtcgaggcctgtcgtgcgtccttggtcgagtatcaggcaacgtacccatgcccgcgtggagcatgtggagccgtccccctgtacctaagactcccacctgacgaagccgaacaa

SEQ ID NO: 51412 - DNA, 668 bp, Zea mays
  Clone ID: MRT4577_146884C.1
gtcttcacctgctgccctctaattccttttactacccgccgagcgaaacaaacggccttcttggtcgcctcctccatttcgccgctgggcgctggctcaccccactggctttctcaagtttcaagcccctgctgcatcttggacaggttgacttggagttggaagtgttgtcgttttgttctccagcatggacacaaccgccgacatgagtggcctgaagctcggactgtcttgaacacacaagagtcctatatggacacattgtgaaacttcatcaagggagcaattctccatgactgatgagtccaccaaatcttctatttttccttctttccacatgttccatgcctgaaacatgacacaatctcatatcaggatcgtttttatcatgtggacagttctgaattattatgagagtgtgccagtccttacatatgctctaagattaggaaaatccatgtgaagatgtggtgagctgatcttcaaaccacttacaatctccagcattaaaacaccaaagctgtaagtgtcagacttgactgaaaaggcaccttccattgcatattcaggagacatgtaaccactgtgcaaatgatttcacaaaaaaaagtttgcatatatgtgaaactgcaaacagaaatagctcaatacatatgaagagttggccc

SEQ ID NO: 51413 - DNA, 324 bp, Zea mays
  unsure (1)..(324): unsure at all n locations
  Clone ID: MRT4577_146885C.1
ctcaccgatagcaagtagcgccggcggcggtgggggggcggagtatccaagctagccaagcgcgcacctctttgacctagctagttcaggcgaccatcttgcgccggccttggctcgccgccgggctggggaggggaaggtccaagggaacgccctccgtcctccccaacttttgggggggggggggggtctctcctgntacttctcgtctccctctcacctttaataagaaggcggtcgaggatgaggtggttgatgatagagatgagtctgcggtggctgaatctggtgtctcgtctgctgtcttacctctgcttgtcggtt

SEQ ID NO: 51414 - DNA, 248 bp, Zea mays
  Clone ID: MRT4577_146886C.1
ggggtgtggtttttttttttttttgttttattcttttttttttttggccccacattacaccgccccaacttattaatggacacaattttagacccatgccaaaaaaaccaagggggggcaggggttcaggaacacccctttttagaagtaaccccacccccaccaacaaattttctattagttaagacctattattaccaaaagcaaggcgccaccaaggggcggagggggaactatttttggggacc

SEQ ID NO: 51415 - DNA, 813 bp, Zea mays
  Clone ID: MRT4577_146887C.1
atgaccatcgagcagatgttcttaatgcagactcaggcagttaaagtcatcggtcagactctggccgccattcagcagcagcagcatcagccaccacctcagcctcaaatgcctcagatgcccagggacaagcgtgctgaattcatgagaggtaatcccccaacgttcgctcattcttctgaccccatggatgctgaagattggctacgcactgtggagcgggagttgcacaccactcagtgcgacgacagggagaaagttctgtatggtctgatgacagtgaagaaggaggagttcctggcgctcaagcaagggcatatgtctgtctgtgagtaccgagacaagtttctgcagctgtctcgctatgctcctgaggatgtcaacacagatgccaagcggcagtatcgcttcctaagaggcttagtcgaccctctgcagtatcatctgatgaatcatacattccccacattccagcacctgattgacagagcaatcatgacagagaggaagcgcaaagagatggaggatcgcaagcgcaaagcgaatgtagtggcagatgctttgagcaggaagagtcagctgattctagaaggcagaggtaaagattttcgggaaggtctggaggtccaggaggacttgacctatatagagaagccagcgcagattcttgagactgcagacaaagtcacccggaggaaaacaatcagaatgtgcaaagtcagatggagtcaccactctgaggaagaagcaacctgggagcatgaagatgatctgatggccaagtatcctgaactctttgctggccaaccttga

SEQ ID NO: 51416 - DNA, 353 bp, Zea mays
  Clone ID: MRT4577_146888C.1
ggtgtcaacattattatgccgacctgattatgcaggaatgggagcgtgtacatgatgaagagcagacctagtagcgcttatgcagccaatacaaagcgccgtgtaacttagcaaacaatttatacgccgctggcttatgccatcaattccattacactgcaattcctgacagggagacaatagatgccggctgctactgcagctcagttataaatgatttgggaccaccaccagagtggcatcgaacattccagggaatccatcatacactgcgccctcatattcatcatttatgacgccgtggccggactggaggcttgaagcaaagaggacgatgggctaagcgctacccg

SEQ ID NO: 51417 - DNA, 533 bp, Zea mays
  Clone ID: MRT4577_146889C.1
gggggggggggggggttttttttatttttttttttttttttttttttttttttttttttttttttttttttttttttttttaaaagcaacagggcgaccctttatttttttccttaaaaccacagcgctaaaaaggaggcatgcattcggggggggggggggggaaccaagcaagcaaagaccaaggtatgtaacaggggaaatttttctaaaacccgatcatttaaatgggaagggggccccaagcaaacaggggcacaatccaccagaaaacgggacgtaatactcctgggcaaaagggggctgggactacggtcttaaaaaacggcacgggccaaatttgaggccaaagccaatctaacaaagctaatcgaagggttggggaggggataactgaaaaaaaagggcgcagtttggccattgacagcttttgcagtttgttaagaaacaatgtcgtctaaaaaacatccataaaagggctgagtttgctataaagtacccccaccaaataatgtaaaaggggtacccaaaaa

SEQ ID NO: 51418 - DNA, 464 bp, Zea mays
  Clone ID: MRT4577_14688C.1
attcggctcgtggcccatggacgagaagaattcagcggagaagaagccggctggcgtggagaaggcggttaagacgaccgcaggtcagaagcccaagtgcgagaagcgcctggcggcctcaaagtcctcctgtaaggagggcggctagaagacggggtagacgaaggccaagaagagcgtggagacctacaaaatgtacatattcaaggtgctgaagcaggtgcaccccgacatcggcatctcttgcatggccatgttcatcaggaacttcttgatcaacgacatctaccagaagctgggcggcgaggtcgtcaagctggcgcggttcatcaagaagcccaccatcacctcccgcgagatccagacctccgtgcgcctcgtactcccaggagagctcgccaaacacgccgtcttcgagggaaccaagggcgtcaccaagtccaccagccattgagcagactgca

SEQ ID NO: 51419 - DNA, 501 bp, Zea mays
  Clone ID: MRT4577_146890C.1
gcgttctggcactcacatttatcgccttcctatacttcgcggcgctaacgtcgaggagcttccggggggcagagcagggcaggggagggggaggggagagaagaaggctcctgcttgcgtaagcgaccaagtcgttcttccaaggaaacgaaggggaagggaagggcagggagggcgacagaggctgatcggagctcatcatcgttcgatggcggtgaccgcgacgacggtcgcggcggcgaccacgatgctggcggccgtggcggcggtcttcctgaccctggtgctctgcttctacgtcttcctctgcgccaagcggtaccgcggcgaggcgccgccgcacgcggtggccgccggcggcggcggcggcgtcagggcgtggctgcgcgtcgtgttcggcgtcgggggaggcgcatgcgcgcacgtcggcggcggctcggggtggtgctacgacggcgggctcgacgacaagtcggtggcgaatctgccccggcgggtggt

SEQ ID NO: 51420 - DNA, 604 bp, Zea mays
  Clone ID: MRT4577_146891C.1
cctcgagccggccgggaaagaacgagaagaacacacgtgtcaggtgaacctgaaacttgcctcgtcactggctgcgatagacagaatgcgactgagtgatcgagatagactgacttccaattctccatatgtagctacgacaccgtcataccatcaagtcttctactaatcctaccatcgctgtcaacaaaagatatcaatggcctctgtaaccgagctcatgttgtccatccttcccatgaagctcgaatgggttgccagcatgcagacctgctcgaccaacccgaccaacgatatccatggacccctatcacctccgactacaactatgaattcgagaagaacatgaaaatgatactgtattctgctttgacccatcttgcccatggacaaatctcacacaatcataagttaaccggctggtgtccatcggtgtgcataagatgaatgacaaccgcaacgagtgccacactgctgtgtgttcacggcgacagggcctgaatcaacatgagtacacatacatcctttactaggagacgaatgtaacatcttgtgcggacactctcgctagatcgagtacatcctgttgaagcaggttatcaag

SEQ ID NO: 51421 - DNA, 405 bp, Zea mays
  Clone ID: MRT4577_146892C.1
ggcgagcatacgtggcgccccgcccctggcccccaaacgcatgcctgtgggtgcggtctgtggtgcgcgccatggatcggagctgctgtccacgcatgggtgcgtcgccgtcgccgccgccgctgcccatgcgctgcgacagtcccgtccactgttctgcttctgcaggagatcatacatacgtatgggcgtgggtgctcattttcagcgagcaggagcttgcggcagtgctttccacgcccgaaggggggcaccatggcgctagctggactggaaaacacagactgctcgctgcagtttcagctgctcctgaatcgttttactctgttcaagcacggatttctcgatcgatcgggggagcaagactagcagatggtgagcctcgcacctggcaaaccaaaccaa

SEQ ID NO: 51422 - DNA, 296 bp, Zea mays
  Clone ID: MRT4577_146893C.1
cgaccgacgcgtgcgctatagcccattctgccctcaatgctctttctctttacaggatgaaaatcggacgcattaagaacgtttccccggtccccacggacagcactctcttaatgggcggtatgatgagaaggaggctgtatgcatctcttctacttgccatttgctggctcttgtcggttggccatcatgaatctagtcctctctgggtggtatatgctgctttctgtgttagccaagacgagctttaattttgctctattttgatgactgtttacctttagatcaacccattt

SEQ ID NO: 51423 - DNA, 256 bp, Zea mays
  Clone ID: MRT4577_146894C.1
cggacgcgtgggttacattgtcatttttttctatccagctagtcgctgaggatggtgcattttataacaaggcgtccctgatcaacctctctgctcccttcatttgcgagttcttccgtgatgcccaatataacgtcctcccctatgctgactacatcttccccaactaaactgaggcaaatatctttgccaaagtcataggatggtacacttacattattgatgatattgctttccacatctctcaacttccttt

SEQ ID NO: 51424 - DNA, 1348 bp, Zea mays
  Clone ID: MRT4577_146895C.1
gcggctcgcaagtggcctgcgttcctcttccacgctccgcccacccgtcccggggcccgccgcaacccgatccctccccgcgcccaacgatgccggccggccagccgcacgcgcacgaagccgctgccgccgcctgcgtcggcagcggcgcgaaccactccaaccaccgagtgccggcgcactcgccaccgccgctccccgcggaggtggtgccggcgtacccgcccccggagtcggaggacgacgagacctgggtgtggacgcagatcaaggcggaggcccgccgcgacgcggacgcggagccggcgctcgcctccttcctctacgccaccgtgttgtcccacccgtccctgccccgctccctctccttccacctcgccaacaagctctgctcctccacgctcctctccacgctcctctacgacctcttcctcgccacgctcaccgcgcacccctctctccgcgccgccgtcgtcgccgacctcctcgcggcccactcccgcgaccccgcctgcgtcggcttctcccactgcctcctcaactacaagggcttcctcgccatccaggcccaccgcgtcgcgcacgtgctctgggcgcagcagcgacggcccctcgcgctcgcgctccagtcccgcgtcgccgacgtcttcgccgttgacatccaccccgccgccgtcgtcgggaagggaatcctcctcgaccacgccaccggcgtcgtcatcggtgagacggccgtcgtcggcgacaacgtctccatcctccaccacgtcaccttgggcgggaccgggaaggcggtgggtgaccggcaccccaagattggggatggcgtgctgattggagcaggggccaccattcttggtaacgtgaaaattggtgccggggctaagattggagccggatccgtggtgctgatagatgtgccggcgaggagcacggcggttgggaaccctgccaggctgattggtgggaagaaggccgagggtgcgaatgacgaggacatgccaggggagtccatggatcacacgtccttcatacgtcaatggtcggactacaccatttgagagcggttatccaaggtctattgctcttcttttgtatcactagtaatggtgatgtaccaaataccgagtacttgctctttgttgtgtgctatggtttgtgtattgtacttagaagcctagtggtgtttatgatcattgtcagctgagtgtgccatgcccgaatactggtaaatttcgattgatggatggacaaatctgtattctaacattccttatgaaacaaattctgaggacagaatgaagcatgtaaagcgattatctcgaaaaaaaaaaaaaaaaagccccta

SEQ ID NO: 51425 - DNA, 842 bp, Zea mays
  Clone ID: MRT4577_146896C.1
cggacgcgtgggcgccatccaggcccaccgcgtcgcgcacgtgctctgggcgcagcagcgacggcccctcgcgctcgcgctccagtcccgcgtcgccgacgtcttcgccgttgacatccaccccgccgccgtcgtcgggaagggaatcctcctcgaccacgccaccggcgtcgtcatcggtgagacggccgtcgtcggcgacaacgtctccatcctccaccacgtcaccttgggcgggaccgggaaggcggtgggtgaccggcaccccaagattggggatggcgtgctgattggagcaggggccaccattcttggtaacgtgaaaattggtgccggggctaagattggagccggatccgtggtgctgatagatgtgccggcgaggagcacggcggttgggaaccctgccaggctgattggtgggaagaaggccgagggtgcgaatgaggaggacatgccaggggagtccatggatcacacgtccttcatacgtcaatggtcggactacaccatttgagagcggttatccaaggtctattgctcttcttttgtatcactagtaatggtgatgtaccaaataccgagtacttgctctttgttgtgtgctatggtttgtgtattgtacttagaagcctagtggtgtttatgatcattgtcagctgagtgtgccatgcctgaatactggtaaatttcgattgatggatggacaaatctgtatgagagttggttggaatttgtcacattccttatgaaacaaattctgaggacagaatgaagcgtgtaaagcgattatcttatctgatgcagtttttgttatttgatattatgccatttattctctg

SEQ ID NO: 51426 - DNA, 311 bp, Zea mays
  Clone ID: MRT4577_146897C.1
cacaaagcgcatttttttttggctggtgatacaaaaaagttttaaaacccaaaacaaggggggggtgatcctaggggggggcccccaaaaaaaaaagttttttaaaaaacccttttttttttattttgggcccccccaaagggggtttttttaaaacccctttgccatttttgcctactgggccatgaatgcttcaaataaacggggtgttggcccctcgctttctaattggtacacattcccccactttctaaaaattaattttagaatcaacggggaatttcaaaacgcttctgggttccaattccatt

SEQ ID NO: 51427 - DNA, 160 bp, Zea mays
  Clone ID: MRT4577_146898C.1
ggcgatatgtcaggatcagagccgcttctcgcgatggccatcggaggttgggtggctccttccttgcaacaagctgtaactgttcatacatccaagtgttgtatcaatggaagagcgagtttttccacaatcagagaggcaatagtcaggtccggccata

SEQ ID NO: 51428 - DNA, 235 bp, Zea mays
  Clone ID: MRT4577_146899C.1
ggcacttattatttttctgtgtgttatatgtgatatacacaagagttgcgatgcgctactcattttggttgagtatctgtggcgcgtgtggtcatgtgtggatggtggacagttgctctgctgctacagcccaagcagatcctcccatcagagggcgtggtatatacgtagtgctctctcatgaatgctgccagttggatgttcgtcaggccactgaatgcatccctactttatt

SEQ ID NO: 51429 - DNA, 434 bp, Zea mays
  Clone ID: MRT4577_14689C.1
aacaagcggggaagggccgggtacaactattttccaaaaaaggggccccaaaattaaaaggcccattacaatccggcccgatttaaaaaacagggaagctagctccgggcctttggtcaccccacgagaacatcaacgatttcacagcacaaacataggcggggagggggggggtaaaggacaccacaaaaaacccttggaaaaagggggaacccaaaaaaacccgggaccctgggggggggtaaaatggggggaaacctggggacggccttggttcccccgaaaaccgggtgtttggcaaaccctcctgggaggaccaggccccccggggtttggatctcccgggaggggaaggggggctttttggtggaccgggggaacttaagggcccccccggggaactttttaaaaaagtccttgaaaaaggggttcat

SEQ ID NO: 51430 - DNA, 221 bp, Zea mays
  Clone ID: MRT4577_1468C.1
cgtcgcagttacatcgacgtaccgattagactacgagaattacgagctacgagtgtcatcatgacgatgggcacctcgatagaacccacgaacccgacgtgacactacaataccctcaggacggacggactaccggcgcgtatgctacgcgtggcggcaacccatggcgtccgtggcggagtcaaggagaagcacgccgcagctacgctcggtgaactccc

SEQ ID NO: 51431 - DNA, 217 bp, Zea mays
  Clone ID: MRT4577_146900C.1
tcgtttctaagataggctagggttctaccaggtaggggttatggctgcctgcaggtgccatctaaaccaggtggtggggcacgcgctcccaatgtccgatgatgagcaccccaagatctaccgcatgacggtttgttctgctaacgaggtccgagccatgagcaagatgaggagacactgtcggaagttgaaaaaggctaagaagagcagcgtgcag

SEQ ID NO: 51432 - DNA, 860 bp, Zea mays
  unsure (1)..(860): unsure at all n locations
  Clone ID: MRT4577_146901C.1
ggtacctcgaggccggncggactccactccactcgtgcgtctctcctcctcctccctccgcgtcgcgtgcgcgctctgcttcccttgccgccgtgcgctgcgagggtcgactgtcgagcgcgcgctgcttgctgctcgcctggccgtcgatgagcatggggcgcttcgtcaactccatggatccgacgtcggggctggaggtgatcagggactggaacggcgtcgcccaggtcgtgctccgctcgcccaagggagcctccgcgcgggtgagcctgtgcggtgggcaggtcgtctcatggaggaacgaccgcggcgaggagctcctcttcaccagcagcaaagtgaatccccctcccctctttttcttatttcccacactactcctaccgtcgtccagtaatctgtaatgcttacaggttttcagattttccttcctttttgcttcagtgttcttctagcatttctgtatgtgttcctgaaaccggcacctgtgaaaaggcgtctgttcaaccggggctgcaaagaacaacactgtgaatcgtattcatgtataattgccgttgtttctgtagtccatcctgacggctggagaagcgaatgacaaattaagctttgctatgtgcctacgttacctgtgagctgggactattttgtggtcctaaaatttcagtagccagttgttcattctttgttacggtttttatatatcatatagatatgtattaagatatttatttaaatataattattgtttattaaataataataaggtacatgtgggcttggtgcgtaactcccaatttatagagtaaggggtgaaggtttgattgctcgctctgcactattttatggcgctagag

SEQ ID NO: 51433 - DNA, 261 bp, Zea mays
  unsure (1)..(261): unsure at all n locations
  Clone ID: MRT4577_146902C.1
tatatattatcctggtttctagtatcccatagtaggatcataggaactaggagccagcttccttgtttgcccatgtgccatgnacgaggagcactgtgccatggtgtgccatgtatggccatctgctgctcttgttacgccattgtccgctacgcgcacagcagtgtcggtacgtcatgccggcggtcgcgcttctgccccgaactgcctcttgctgcagccagtggggctatttgcgtgctccaccccctgactactgta

SEQ ID NO: 51434 - DNA, 356 bp, Zea mays
  Clone ID: MRT4577_146903C.1
ataaaaaatttatcactggggtcccccacagcgattaaaggtggccacaaaattttttgattagcaaaaaaaacatttttcgcaaaggaggatcgccaaaggtgacccctttttttaacaacttatcccaaaaggttcttcggatgagggccagggggacctactgggtactatgacatgaaactgagtggacttgtgggggggccctcaaaggcaaaaatagttccggtctacacgggtatggggtccacccaccagttaaaggcttggcgttgccgtatttagccattaaaacggcgggggcccttgcttgtccctcgacaaacttttttggcatgagcatttttttgcttggg

SEQ ID NO: 51435 - DNA, 696 bp, Zea mays
  unsure (1)..(696): unsure at all n locations
  Clone ID: MRT4577_146904C.1
aactcgccatgcgcaccgggctgggcgctgcagtgcagcaaaacaattctggtgctagtacgtacccgcatcgcacttccagtgaattgctgctgtctctaccctcccaccggccaccgtctctctgagctctgttctgagagttctgactcctcccccatgtgagcactactgggggggcgggatagcaaaagtgacgtgcagcggtaaaccctgaaaaaggctgggcgcatctcgaggaggaagaagaggctgctgcctgcctgggaaggctggtgaaaggtgcaaagctacagcgcccggaggatggccctttttcagaggtaagtatggtggcgatcggcaaaggtagatttgctcttccttcattttttttatctctgacgtaaggtgaatccatggcgacgaggttttataggtgtggtaggggtagtacacacctacgtacgtagtagtactgtacgttgcagttgattggatgggttggccaggaccgtgcacgcagctacagtgacagtgcgggaggcgttcagtgtccaaccgtccactatggtcttgtagcccttgccccttggtgattccacctcggcagnttgtcatctgcgtggtcgtgaatcgtgatgatacaaaaagttttgacaggacactcatcctcgggacgctgcaggttggtggttcttttgaaagatataataa

SEQ ID NO: 51436 - DNA, 795 bp, Zea mays
  unsure (1)..(795): unsure at all n locations
  Clone ID: MRT4577_146905C.1
ccggccgggatccgtgaattctcacctttttcacatagaatatacttttgtcttagagtctctccgtcccattcctctttccaattgcatcccttttacgctactcgctgagacaaagcctctcctgtgccgtctctccgatcacaaccccgccaaaactcccatcccccaccaaactcgacaccgccatggctcaagaaggtatcttcagcgccaacctcctctcttccgaggtcaaggccgctctccctgagggctacaccctgcgcgctttgcgcaagtccgacttcaacaacggtttcctcgactgcttgcgcgtcttgaccacggttggcgatatcaccgaggccgacttcgttaagcagtacgacgacatggccgctgctggcagctactacattatcatcattgaagacacctcgcgcaaagaaaaccctgtcgtcggtactggtgctctgatcactgagcgcaagttcatccactcccttggcgccgtcggccacatcgagngatatcgctgtcgcaaaggaccagcagggcaagaagctaggtctccgaatcatccaagcgctcgattatgtcgccgagcaggtcggctgctacaagagtatcctggattgcagcgaggccaacgaaggtttctacgttaagtgcggtttccgacgagctggtctccaaatggcccactactacgagggcgaaaagggtaaatctaagtgatttctttactagatacgacattacgaagtgtctgttcccaattatacccttatatcgttatctataccttggcgc

SEQ ID NO: 51437 - DNA, 112 bp, Zea mays
  Clone ID: MRT4577_146906C.1
cgacgcggacgatgccggacacccaagagaatgacctcgcgtaagccgactacaaggacggggcccaaactcaggcaaagatctatggcgaagacaaaggaagagacaccga

SEQ ID NO: 51438 - DNA, 454 bp, Zea mays
  Clone ID: MRT4577_146907C.1
ggcacgacccacgcgttcgttaaaatttaaatcatgatgagatagattttgagttcttgggcaacagaacagggcaacgatacattttttacaccaatgtgtatactggtggcaaaggagacagataacaaatgatttacctttggtttgacccaaccaaagaataccactactactctgtcctctggaacaagtatcatatagtgtgagtgctctttttctttttttaagtatttcaactgaaatgcacttgttatttagcgattctgattaagcttttgaaaaaaaaaataaagggggtgcaggttctttgtggaccacataccaatcagagtgttcaaaaactgcaaagaattgtgagtgaggctgccattcaaccaaccaatgaagatatactccagcttatggaacgccgatgactgggccacaaagagtggtcttgaaaagaccgact

SEQ ID NO: 51439 - DNA, 367 bp, Zea mays
  Clone ID: MRT4577_146908C.1
taatttttttttttttttttggaataaaaacaggggggggcctgtctgtatttagtggtaattaatcagccgagcacggaacagtcgcggcggacgttgccctgccggtcccgggccgtcttgacgccgacgcggcccatcttcgtgatggccttcacgaaggcccgatcgaacgccacgctgctccgggccagcgcgtcgacggtgggcctggacctagggtccgtgtgcagcacctggtccgacgccagcaggcccttcccggcctgcaggttgcggaagaactggatgccgaaggcgacgggcgtaacggggtccatggccacggccacccgggggtccaccccggccgggcaccacgccgaca

SEQ ID NO: 51440 - DNA, 472 bp, Zea mays
  Clone ID: MRT4577_146909C.1
aaagggcacaagccctcttattattgactataaactcaagccctgcaaatctccccaccatagcacacgtatcaggtttaaaaggcagccacggacattacacaaactgcacggccaacgtaccgcctatcttcgacactcgggcacagggggagagactcccatggagatgggtgcttacccaaacgcccgcccaataacatccccgtccgacgcgaatggggccgcatttgctgatcccatgtggtgagatcaccagacccaaaccttaaaatggccctaatccaccctgcaggactttcaagaagacatccttccccgggagtaacagaccaggaccggctgtgcccacttctatacactataggctatttgatagccgacttgacgcttgactgggatggccaagctcttgtggccaccagctttccgcttacactgccgcaataccatactttcctaaggcatgacc

SEQ ID NO: 51441 - DNA, 419 bp, Zea mays
  Clone ID: MRT4577_14690C.1
gcgacccatagcgtacgaacaaatccttgttagggtatttctaatacatatggattggatgagattggaaaaaatcaagaagaagtttaacgtgtttgcgattcacactaaaaatgaaaaactagcaaagacgaaaaaggaaaaggttccatgtgaactggacttgcacactgggttttcctattcctaaggaactggggaaacccgacttataacaaaggggggggcccttttaggggtgccaatctttctaccccttcccgggccggtacttgttttttttttgggacccttaaattaaattcatgggccggggttttccaagggatgagctggaaaacccggggggcgccccaccttacttggattggggcaaatcccctttttggcccctgggttaatataaaaaaggcccctcc

SEQ ID NO: 51442 - DNA, 413 bp, Zea mays
  Clone ID: MRT4577_146910C.1
gaatgcgatgactttaaaagctcaataaaaccctggggcgagcacgggcacccttgccaaataaaacccggggaacaagacccgaccacatggactagcggcaacaaaaagcaaagggattccaccactaccaggcccctaacaagaaaaaatagcgaatgggggacgagaacaaaaacaataatgggacagcccagttccccccgcctagagcctttaaaacattggggctcgaacaacttggccccccccccgaaaaaactggccccagcctgcataaccttttggggcatatttggccccataaccaccatcctccgggaggcctgatttccaaaagggcaagctatccctcaggagttccctgaacaaagggccatccttgtgtgaccccccaccaaggctgtttaact

SEQ ID NO: 51443 - DNA, 452 bp, Zea mays
  Clone ID: MRT4577_146911C.1
ctctctgccagtttttcgccgaagacacactcgacagcaatggctgctgctctggccgccatggtcgtcctcgcgcttcgaacagtcgccggcgcagcctcaacgccggctgctgcggcggcgacgacgtccaggagtccggtcatctacattttcggggactccatgtcggacgtgggaaacaacaactacctcctcctctccctcgccaagtgcaactacccctggtacggcatcgattacaagaacggctaccccaccgggaggctcactaatggcaggaccatcggagacatcatggccgccaagtttggctccccgccgacggtgccgttcctctccctgtacatgaccgacgacgaggtcctcggcggcgtcaacttcgcgtccggcggcgctgggctcctcaacgagactggcatctactttgtccagtacctgtcgttcgacag

SEQ ID NO: 51444 - DNA, 414 bp, Zea mays
  Clone ID: MRT4577_146912C.1
gacccaaaagccgaaaaacttatgattggctggaattatggaaaaaaaaaccctttgcaagcgggtatgcgtccaacccttgacaacctgggtttattttttcccccctaaaagcttgagtgggatcaccattgcaggttcatcattagggctaaacatcctggtgagaaatattctcaaaatttacagtacacgaacacggcaacactactatacatatgtatggggatctacaaacacttcaaagtatgaacaaaacgcacgccgggctatttaatatatacacggttggtgaaaatgctcccctcgaaagactgctggctgattccggacttatattcgattacttcacacttcttcggaagtggaggaaaacacgctgagtgcccgccatgcttagcatagactgtaggc

SEQ ID NO: 51445 - DNA, 293 bp, Zea mays
  Clone ID: MRT4577_146913C.1
ctgaaagaggcatgcccaggtatttgtaggggaaattctccactttacatgccataacttcttgtacctccgctaactcctcttccccacattggataggagtgaccgagctcttactaatgttagttaccaaccctgtagcattttcgaaaatacgcaaaagctcctttgtcaaggccaattcatccgtcctagattgtagaaaaataacaacatcatcaacatataaggagatcctttggccatgacctctcctcaacaaaggttgcagataaccattcccactgccttac

SEQ ID NO: 51446 - DNA, 519 bp, Zea mays
  unsure (1)..(519): unsure at all n locations
  Clone ID: MRT4577_146914C.1
cccgggtcgncctccgcgtntctcctgcttcgcccgggttctgccccgtgttcatgtgccgggggcggtgtcttctcccgtggttgcggcgccggcggtgtggttgtttgctggggggggccccttcctggttgtgtctgggcaagcctctcggccgcggtgtgctgtgcttggcgcgcttctggtggtcccccctcgcgtgccggtggttcttctcctggggtgtcttctcttggtgctccgcgctcgcgttccggtcgggcgctggtcgtcgtgcctgcgggtctctctctgcgttttcgccggtgtcctttgcggtgctccgtagctgctgggtcctcggtgttgccgtgttctgggtgttgggctgtgtctccttccgtgcgctcgccggggagtttgtnctttctcttgtttggtccttgtctgtgttttttgcttgtgttgctgtggcctgggtgttgctcctgtgtgtttggttcctccgttttggtggtcttgtgtgcgggggttttttgt

SEQ ID NO: 51447 - DNA, 2624 bp, Zea mays
  Clone ID: MRT4577_146915C.1
gccacgccgataccaactgccgccaccggatatgtcggggtgccttggcgacccactggacaccgggtagaggaggaggggggggggggggggggggggggggggatcccgccagccatggcgagcgacttgcccatgagccccgagctcctcggggccggccgggccgggcaagaatccgcgagtgcatcacactgacaccgcacacacgccaaccggcctaccgccttcttctcttgtctcgtcctcctcgcgactatggccgccgccgccgaggtagaccccagccccaacccgccgccaactacagcctccggcctctccaagaccaagacgcgggaggccgaccgccgccgacgccgccgcagcaaggccaagaagaacaagtccgtcactgaggctgatgcccaggacgctgacgggggagcttccagctccgacgccaaggagaacgccgatcccaaccccgagccacaggttgaggtggagatagagtacgtgccggagaaggccgagcttgacgaccctctcctggatgatttcaaggccatcttcgagaagttcaccttcaaggacgctgctgcagcggcggccgaggatgataagaaagacgagggtgccgctgatgccacaaagaaggggtcactggatgatgatgacgacgacgaagatgatgagcaggaggcaaacaagaagaaggacggaggcctatccaataagaagaagaagctggaacgcaggatgaagattgcagacctcaaacagatatgcaacagacctgacgtcgtggaggtctgggatgcaactgctgcagatccaaaattgcttgtatatctcaaggcgtaccgaaatacagtacctgtccctaggcactggtctcagaagcgcaagttcttgcaggggaagagaggtattgagaaacagcctttccagcttcctgacttcattgctgcaactggaatagaaaagataagacaggcttatattgagaaagaggatagcaagaagttgaaacagaaacagcgtgagcgtatgcagcccaagatgggcaaaatggatatagattatcaggttttgcatgacgcgttcttcaaatatcagacaaaacccaagctgtctagtcatggtgatctgtattatgaaggcaaagaatttgaggttaaactgagggaaatgaagccaggcatgctgtctcgtgagcttaaagatgctcttggtatgcctgatggcgcccctcccccatggcttataaacatgcagcgctatggtccacctccatcttatccccaactgaagatcccaggtctaaatgccccaatcccccctggtgccagttttggttatagaccaggggagtggggaaagccaccagttgatgagcatggacgtccactctatggagacgtttttggtgttctgcagcaggacgaacctaactacgatgatgaacctgttgatcgcagcaaacactggggagatttggaggaagaggaggaggaagaagaggaagaggaggaagaggaagaaccaatggaagacgaggaaatggaagacggaattcagtctgtcgataccatctcaagtactccaactggtgttgaaacacctgatgttatcgaccttcggaagctgcagaggaaggagactgacaagcaggcagaacggccgctgtaccaggttcttgaacaaaaggaagaaaggatcgcccctgggactctatatgggtcaagccatacgtatgtgttgggaacacaagataaatcatcagctccgaaaagggtggatctgcttaagaatcaaaagtcagacaaggtggacgtcaccatccaacccgaggaactggaagccatggatgatgttctggcagccaagtatgaagaagctcgagaggaagagaagcttcggaaccaaaaggaggacttcagtgacatggtggcagagaatgctcacaagaggaagaggaagcaagagaaggaaggcaagtcgaagaagaaggaattcaagttttaagggcaggcgggcgatgtaggtcatgaggcaccgttgtagctgttccaaatatgactggctgtatggtttagttgctgcgatcagacagttccgttccgtgttccaagttccaaccgagaggtcgggctcattcgcttggttaacacaaatgtcgctttggattttcactggaatatgcttaattactctgtaagaaatcgttgcgctgttgaaatatcacgtgctggcgagaagcgacgttggaaaaaaaaaaatgtaaaaaatttgatgacatgatgattgtgtgtaagagcctaacaacagctattgtttctgccatgctgttcaggctctgcattgttatgaaatgccatgtatggtcatttttaagcttgtcatggttgataggtaggagtgagaagaaatagagctgtatgtatgtctcttttttcttctttttgttgcatgggagaagaattgtatgtaaatcttttagattgttaactatccttcaatgtatttgcagattgttcttccaaaaaaaaaaaaaaaaaaaaaaaaaaaaaaacgcttgatcaaagaatttgaccgtttactcaaggatgaggagaaaaaggacactcctgaggccaaca

SEQ ID NO: 51448 - DNA, 789 bp, Zea mays
  Clone ID: MRT4577_146916C.1
atggcgacacagagactgaagagtggaagaagggagggaaaatcgcatgggaggcgaatctacaaagacaaacctgacgggttcgaagctgccgtcgatggtcgggaaggattgcgtgttcactcgttgcaaatcctagtctccctcgccaaaaccatcggtggcttcgatatatgccacgatttgcatggtctcatcattgaagagcacgtgtcacacctgccagtagaagttccctcgtacattgtcagtcatcagaacaacccaagagtcgccggcgttggcgacgaccatgaggtccccctatttgaagatgggcagcgcggtgcagccgctctggactgcgtccaagcggcggctgcgctggagcttgccgaacacagcgacacatgcggccacgtagtactgcttccagaggtcgaactggcagtcgccaagcttcttctcgtcgtcgatgagcgacgccaacgcgagcgcctcctaccagtggtgtttgttcggggtttccaagaggcgctcgcgttggtgtcgctcatcgacgacgagaagaagcttgacgactgccagtttgacctctggaagcagtcctacatggcagcatgcgccgctatgttcggcaagctccagcgcagccgccgcttggacgcggtccagagcggctgcaccgcgctatccatattcaaacagggggacctcatggtcgtcgctaacgccagcaactcttgggttgttctgggcaccgcatccgatgacggcgtcatcacgccatccagctcatcatccacctga

SEQ ID NO: 51449 - DNA, 661 bp, Zea mays
  Clone ID: MRT4577_146917C.1
aggaagaggaagaaccaatggaagacgaggaaatggaagacggaattcagtccgtcgataccatttcaagtactccgactggtgttgaaacacctgatgttatcgaccttcggaagctgcagaggaaggagactgacaagcaggcagaacggccgttgtatcaggttcttgaacagaaggacaaaaggatcgcccctgggacactatatgggtacgtgctgggaacacaagataaatcatcagctccgaaaagagtggacctgcttaagaatcaaaagtcagacaaggtggacgtcaccatccaacccgatgccatggatgatgttgtggcagccaagtacgaagaagcgcgagaggaagagaagcttcggaaccaaaaggaggacttcagcgacatggtggcggagaatgctcacaagaggaagcggaagcaagagaaggaaggcaagtctaagaagaaggaattcaagttttaaggaccggcgggagatataggccgcctaatgtaaatttaacatttgttttgttccttggctcgactggatttgcttgcatgaagcaccatgtaggaagctgttattttggttgtgttgtggtcacgccttttcctcttagagaaaatagagaatattaacaaaagagaaaaaaagagttttcaagc

SEQ ID NO: 51450 - DNA, 386 bp, Zea mays
  unsure (1)..(386): unsure at all n locations
  Clone ID: MRT4577_146918C.1
accgccttcttctcttgtctcgtcctcctcgcgactatggccgccgccgccggggtagaccccanccccaacccgccgccaactacagcctccggcctctccaagaccaagacgcgggaggccgaccgccgccgacgccgccgcagcaaggccaagaagttgaaacagaaacagcgtgagcgtatgcagcccaagatgggcaaaatggatatagattatcaggttttgcatgacgcgttcttcaaatatcagacaaaacccaagctgtctagtcatggtgatctgtattatgaaggcaaagaatttgaggttaaactgagggaaatgaagccaggcatgctgtctcgtgagcttaaagatgctcttggtatgcctgatggcgcccc

SEQ ID NO: 51451 - DNA, 1602 bp, Zea mays
  Clone ID: MRT4577_146919C.1
ggaaatggaagacggaattcagtctgtcgataccatctcaagtactccaactggtgttgaaacacctgatgttatcgaccttcggaagctgcagaggaaggagactgacaagcaggcagaacggccgctgtaccaggttcttgaacaaaaggaagaaaggatcgcccctgggacactatatgggtcaagccatacgtatatgctgggaacacaagataaatcatcagctccgaaaagggtggatctgcttaagaatcaaaagtcagacaaggtgggacgtcaccatccaacccgaggaactggaagccatggatgatgttctggcagccaagtatgaagaagctcgagaggaagagaagcttcggaaccaaaaggaggactttcagctgacatggtggcagagaatgctcacaagacgaagaggaagaggaggaagagggaagaaccaatggaagacgaggaattggaagacggaattcagtctgtcgataccatctcaagtactccaactggtgttgaaacacctgatgttatcgaccttcggaagctgcagaggaaggagactgacaagcaggcagaacggccgctgtaccaggttcttgaacaaaaggaagaaaggatcgcccctgggacacaaggacttcaagacaaacaatgtgctggttgatgaaaatttcattgcaaaggtggctgatgctggacttgttaggttaattagaggatctgacgatgccggcccatcgcgtgggttcagtaacagtgtttaccaagatccagaggtacagtcgatgactcagttctctgaaagcagttcaaatggcatcagaaatgtcaaatcaagaactcattagcaccggaaggaaacaaatggaccaaactgatcaagctattgagcgctcaaaaatggttgtagcacaaactgttgaagttggagctcagactgctgcaactctgacacagcaaacggaacaaatgaagaggataggcaatgagctagattctgtccacttttcactgaagaaggctagtcaaatggtgaaagagattggccgtcaggttgctactgacaaatgcattatggcgttcctgtttctgattgtctgtggtgtcattgcaataattgttgttaagattgtcaacccgcataacaagaacatcagagacattccgggcctagcacctcccgccatgaacaggaagctgctgtccatcgacgctgcaggactctgagcgttgtgaatggctgcctcccgcagcacagcgcaacgcagcgcgtcagagttctcttatgagccacgatacatggcttcgcgattcttttgtgcttgtagtttacgtccgcccattctttccctattgcattggtgagtagtagcctcaggtttgtagcgggactcttgttgtttattgcttgcgagcccatagctttctggttgtttgtgtatatgcggtagtgatgtgaatgtgagagtcgagtggagattcttcatggttcgttcttatgagttgtgactggtttgtgagcttgtggtgaaaggttcgcagcttgcttggcatgcgaaaaaaaaacaaaaaaaaaaaaaaaaaaaaaaaaaaaaaaaa

SEQ ID NO: 51452 - DNA, 489 bp, Zea mays
  Clone ID: MRT4577_14691C.1
ggcttggaacctttgggctgatttatgtgcttgaaaaattagtagtcagtgacggtcggagtttgggtatcgtctactgcttctgtggtcgttgctgtggcttcggttgtgtggttggtgctcgtaggtgggggagttgtggtggcggtggagactcgtacgaagatcttgctttttgattcgcgtattaggatggtggggaagtatgttaataagcataaggcggcggatgtggcgatggcgtcagagacgtaggcggatgtgcctaagaagtgtgcgaaggtggtgtggaggtctgttaaggaggaggctaagatggttgtgatgtttgaggtgtggagggtgtcgaattctcgtaagattcatcattcggatgttgctgataattctggtgttcgtaagtgtgttactggtccttgtgatgttgctattacttgtgttatgacgagtacggcggtgtaggatatgtagaatcgtgatgaggagcct

SEQ ID NO: 51453 - DNA, 950 bp, Zea mays
  Clone ID: MRT4577_146920C.1
gagcacggacgtccactctatggagacgtttttggtgttctgcagcaggacgaacctaactacgataacttgttttcttcaaccttgcaggatgaacctgttgatcgcagcaaacactggggagatttggaggaagaggaggaggaagaagaggaagaggaggaagaggaagaaccaatggaagacgaggaaatggaagatggaattcagtctgtcgataccatctcaagtactccaactggtgttgaaacacctgatgttatcgaccttcggaagctgcagaggaaggagactgacaagcaggcagaacggccgctgtaccaggttcttgaacaaaaggaagaaaggatagcccctgggactctatatgggtcaagccatacgtatgtgctgggaacacaagataaatcatcagctccgaaaagggtggatctgcttaagaatcaaaagtcagacaaggtggacgtcaccatccaacccgaggaactggaagccatggatgatgttctggcagccaagtatgaagaagctcgagaggaagagaagcttcggaaccaaaaggaggacttcagtgacatggtggcagagaatgctcacaagaggaagaggaagcaagagaaggaaggcaagtcgaagaagaaggaattcaagttttaagggcaggcgggcgatgtgtaggtcatgaggcaccgttgtagctgttccaaatatgactggctgtatggtttagttgctgcgatctgacagttccgttccgtgttccaagttccaaccgagaggtcgggctcattcgcttggttaacacaaatgtcgctttggattttcactggaatatgcttaattactctgtaagaaaaaaaaacgaaaaagctggaaaaaaaaaaaaaaaaaaaaaaaaaaaataaaataaaaagaaaaaagagggaaaaaaaaaaaaaaaaattttaagg

SEQ ID NO: 51454 - DNA, 111 bp, Zea mays
  Clone ID: MRT4577_146921C.1
caccacatccacaagctctgggggagtcacatcatacactatatccaccaaccgctatggattcgtggttatgccaacttactccagcgcaacatgttcatccccgcttac

SEQ ID NO: 51455 - DNA, 282 bp, Zea mays
  Clone ID: MRT4577_146922C.1
ttcctcccacccttcccttcttcaaggccatctttatttgtgcacccgcaacggctccacctgcggggttttcaagggggctgactgcggacagctctcctaaatctctctgatctggtctgttcagccgccctccctccttcatcttcaactccccctgcgtccgttcctttggatctgaataagatggtggtgatctgagtggtggccttagtttatcatgtatcgctcgcaatttaatttaaccgtttaagtgtgtatctgttaaccccatatcccctc

SEQ ID NO: 51456 - DNA, 379 bp, Zea mays
  Clone ID: MRT4577_146923C.1
aaaaaaaaaaaaaaaaaaaaaaaaaaaaaaaaaaaaaaaaatagaacctaaaaacgaaaaaacaacttagggcgaatatttgaaaatatccataacattgtgctgcgggtggagcctccctttggggggccctttgggggctttttgggggggggggacaattgactggccgtctttttacaccgtttggccttctaaaaccctgggttatacccaccttagccgccttggggcacctccccctttggccaactggcgggtttcccaaccaggcccgccctggtcgcccttcccaccttttccacaggctggatggggaatgggcccccccctgagcggcgttttaaccgcggtggatccggcggttacacggagcgtg

SEQ ID NO: 51457 - DNA, 947 bp, Zea mays
  Clone ID: MRT4577_146924C.1
ccggccgggatgcttcctcttagtaggtgctcttcgcctacctcctccaatccgggcccgggcccctctctaggattcttgttgcacgtacacaccatgatctgctacgtgctgtggttagctgcgtgctgcctcctcctcctcttgtacagcgtccgattcaggtcccgcatcagccatggcaacggccccaggacctacccgttgattggctgcctggtcagcttctaccagaaccggtggcggctgctggactggtacaccgagatgctggcggcgtcgccgacgcagacgatcgtcgtggaccgtctgggcgcgcggcggaccgtggtgacggcgaacccggtgaacgtggagcacatcctcaagggcaacttcggcaactaccccaaggggaagcccttcaccgacatcctcggcgacctgctcggcaccggcatcttcaacgtcgacggcgagctgtggtacgcgcagaggaagctggtgagccacgagttctcggcgcgcgcgctcagggacctggagttcgccgtgctcgaggacgaggcgcgggagcgcctcgtgccggccctgggcctggccgcggcgcgcggcgacgccgtggacatgcaggacctgctccgccgcttctccttcgacgtcatctgccgcgtgtcgctgggcgttgaccccggctgcctggacccggcattgccggcgccgaggctggccgcggcgttcgacgcggcggcggggatcatcgccaggcgcggcgcggcgcccgtggccgccgtgtggaaggcgaagcgcgcgctggacgtgggctcggagcggcagctgcgcgaggagatcgcggtcatccacgaggccgtcatggacctcatccacatccgcaagaaggagtgcgggctgcgggtcaacagcggcgacggacggaggagcgacctgctgtcgcggatgatcgaatg

SEQ ID NO: 51458 - DNA, 334 bp, Zea mays
  Clone ID: MRT4577_146925C.1
gtcgcatctttacagcgtataatcgttttccattgctcctactcctatcatccagaaaatctgagcggtattgatggcgcccaaggcggataatatgccgtcggacttaaaggtgctgaaggaggagccctcggagaaggcggctccggcggagaaggcccccgcggggaagaagcccaaggcggagaagcggatacctgcggtcaagtccgacggcaaggagggcggcgacaagaagggtaggaagaatgcgaataaaagcgtggagacctacaagatctacatttttaagggtcctgaacaaggtgcaccccggacatcgggatttttcttc

SEQ ID NO: 51459 - DNA, 364 bp, Zea mays
  Clone ID: MRT4577_146926C.1
accataatacctttttacttaaaaggcgggtgaaaaccaaccaacccccatcaaaatattgtaacgctgccacacacgaaacactaccgtaaagggagcaattcctaattctgaacagccttgcaacagaatcacgagactgaccctgaccatttcgtccacctccccggtcttggggccacaaacaacgcttctaaaccaagcaaactggaaaattccgccttaatctttcatggcgggacccgttcccgggacatcttaggtcactattttgattcaaaaactttccaggaccccatcttgctatcgaactccaaaagctagccgacctccataacctgcaacctgctcatgagcccttttt

SEQ ID NO: 51460 - DNA, 247 bp, Zea mays
  Clone ID: MRT4577_146927C.1
ttctaccttcagacactctgtcgtgcctccggccacgcgagttgtgcctgaaatgctcgcccagaggtctcgatcaagccacagcgtggtcgaccatctccattgagcaaggcagaagcagcagccgcgactgagatcctccggagcatgctgcggacgccctcgcacgactgcatcgcagacgctggactgccagtggactctgttaagcgaggcgcggcaatctacctgaacgctgcaggccctc

SEQ ID NO: 51461 - DNA, 487 bp, Zea mays
  Clone ID: MRT4577_146928C.1
gggggcgggggccaaaaaaaggcattataacaaaatcgaccgttggccccaaggctttcatggaaaaccggggggggaaggcataaaattaccctccccaatcacccaaacctagcaggggtaaaaaccccaccgggcccaggctaaaaataaaataaaaaaaaaaaaaaaaagggatagcacccccccacgcaggccaaatttttatggggcccccggggcgaaacccccacaaaggctaacttaattaacccaaaaaaaccgtttaaaggtaaaggcccaaaaacggcccctaaaacccgttctccctaaggaaccgaaaccgaggaccccaacaaaaagggggggggcgggggggaacagggacggggggaaacgggggggcgggcggccatcaaatgggccttggcaaaaaggcccggggcgggggcaaccggggccagccccggaaaggcccccttcttgggggggcaaaaggccccccagg

SEQ ID NO: 51462 - DNA, 979 bp, Zea mays
  Clone ID: MRT4577_146929C.1
gggcgtcgtcgcctacaacgccatggtggccggctactgccgcgcgggccagctcgaatccgcgcgccgccttgccgccgcggtccccgtcccgcccaacgcctacacctacttccccgtcgtccgcgccctctgcgcgcggggccggatcgccgacgcgctcgcggtgctcgacgagatgccccgccgcggctgcgcccccatcccgcccatgtaccacgtcatcctcgaggccgcctgcaggggtggcggcttccggagcgccgtcagggtgctcgaggatctacacgccaggggctgcgccctcgacgtcggcaactgcaacctcgtcctcaacgccatctgcgaccaagggtcggtggacgaggccctccacctgctgcgggacctgccgtccttcggctgcgagccagacgtggtgagctacaacgcggtgctcaagggcctgtgcatggccaagcgctggggctgtgtccaggaactcatggaggagatggtcaggatggcttgcccgcccaacatcgttaccttcaacaccctcatcagttacttgtgtcggaacggcttgttcgagcgggtgcatgaggtcctcgcgcagatggtggagcatgggtgcacgccggacatcaggatgtatgccactatcatcgatggtatctgcaaggaagggcatctcgaagtcgcgcatgagattttgaataggatgccttcctacgggctcaagcccaatgtggtttgctacaatactctgctgaagggcttgtgcagcgctgagaggtgggaggaaaccgaggagtgctggctgagatgtttgacaaggattgcccacttgatgatgtcacattcaacattcttggtgatttcttctgccaaaaggggctggtggaccggggtgatcgaactactcgagcagatgctggagcatggatgcatgccccgatgtcatcacatacactaccagtgatcaatgggcttctgc

SEQ ID NO: 51463 - DNA, 722 bp, Zea mays
  Clone ID: MRT4577_14692C.1
agcagagcaaaactactgataattgagatcaaacacaattctcagatggcataagaaaccaataatacaacacaatacaaacacagcaccctcaggcctcagaagaggaggaaaaagattaacaaaaaaaagtgaggggtagcgaaaaaaaaaataaaatataaccactactcttgttcatcatcatcatctcctacagtatcatcgtgtgcatggacccaggaagcagagctgtatcgctcttccctcctccgttccaggcacgaacgaacgcacggaccccggagccagagggctcggtcacattatatactcgtcgtactcacatcgcgtcaggtgccttcttcgattccctaccgttcatcagctacgtacggtgtgcggatcagtcgaacaagctggcgatgtcgtctatgtcgacgaggaggaggaggtcgtcgaggctgtccacggcgggcggaggcggcgcgctggcggacaccacttcctggagcccggcgtgcccccgccactcggcgtcctcgaacggcaggtaggaggcggcgtggttggagttggagctcgcgggcgacacgccccagttctccggcgtggacggcgccaggcacgggcacgggcacccgccgccgctcaccggcgggtgggaggcggagaggcacaagggcgcggccgcgggcaggccctcctccgtttccgtcttcacggtgaggccggcgcccagg

SEQ ID NO: 51464 - DNA, 2032 bp, Zea mays
  Clone ID: MRT4577_146930C.1
cccacgcgtgcggagacttgaaaacggcatcagtagcaaacggaggcgaccacgagcgacggggccagccgcggtccccaacgtcagaggatctcgttccagctgcggcagggcggccaacaccggcacctcatgggcgccgacgacgaagccgccgccgccatggaggcgcaagagagggaggcggagatcgagaaggccatgcgcgcccgcgtcgcagacttcaagaagcaggccgactccttgactcttgaaggcgttaggagagcactggaaaaggacctggatttgaagatatattcacttgatgcacataaaaagtttataaagcaatgtgtagacaaagtttttgctgaatctgctgatgaaaatgcaaatgatgatgcattagaggattctgatgctaaagatgatcatttatcaaaagaagggacagatgttgctaaaccaatgcctgtttcaaataaaatgtcctccaatgctgatgtcgtaacatccagcaagacaggaaaggatcctgaagaagaaaagaatcaaacttccagcagtgatattagtgaagacatgataaaagaagccattgaaaaaagggcatcttattttagaaagaactctgatactcttactttacaaggagttcggcgtactttggaagaagatctcaagcttcagaagaaagctttagatgcctataagaattttattactacaggattagacaagattttgcaagaacctgcaaatgggacaaagaaaaaaagtaaaaatggatcttccaaggatactgacaaaacaagtaaaggctctaaaagagtccatgaagaatcagatagctctgaattaaatgatagaaagagtgatatggataatagcgacgtggattcaaggccaagaaagaaaagggcagaaaaggctaaagtcaccaaaaaacagaaaatagttacaaatgagaggaaactgtcaactccaaaggctaaaaaggttgcaaaacaagatttgggtagcagtactgaagaacagggtggcaattcagcagaagaggataattctcattcatccgctgaggaagataataagagaaaacggcaacagactccagcttatgggaaacaagcagagcatctgaaatcgataatcaagtcttgtggaatgactattccacctactgtgtatcggagagtcaagcaagctgctgagaacaagcgtgaggcctgtttgataaaggagttacaggatatacttgaaaaggaaggattgtcaaaaaatccttctgaaaaagaaattaaagcagtgaagaagagaaaagaaagagcaaaggaacttgagggcatagacatgagtaatattattactagttcgcgtcggagaagtacatcaagtttcatacccctgccaccaccgccgcaaatagaagtggatagtgatgatgatgaagacgatgacgatgatgcagaaggcaatgatgcagaaggcgatgatgatgatgcagaaggcgatgatgaagacgatgcagaaggcgatgatgacgacgcagaaggcgatgatgcggaaggcgatgatgcagaagacgatgatgaagttgatgaggagaatgtcaaaggtcgagatgaaggtgataatgatactgccgaagctgccaacggttctgctgatgatgctgaaaaggagaacaattgattccggccccagaataggttcagcttcatgttggcttcggcaagttggcctcgttcgtggatgtctggatgtagccagttgctcaggagttctcttctgacgtttatttatgtgtgcgtgatgggaacatttgttggcttcagctttgggtgaaacatgaggaacatattgtccttgtagtgatgtgcaatgtcacattcgtcctcttagcatcttgttcgcgattgtgtagattacaacaacagtcgcaaaacatataagttagcagtaatcaagtactgattggtttattagtttctgatatagtataaacctcgtaggtgaaagattggaattactatgcgcttcatgcttt

SEQ ID NO: 51465 - DNA, 323 bp, Zea mays
  Clone ID: MRT4577_146931C.1
ttatatttttttttttttttttttttttttttggttttatttttcagtttttttgggttaaacctcctattttttacaactccgacagaaaggccctaacgataccaggaatcaacacagatatactttccatttgacacaccacaacaaccaacatagaagcacgaagcattgacagaacgggcaataaaaccaaaccgaaaagcaagaaaagcctggacacacgcaggaacaaactttgggatccatattgaatccctgaagtaaacgtatcgaaaacaatcttgttgggccgggggaccccattaaaacttcacacagat

SEQ ID NO: 51466 - DNA, 696 bp, Zea mays
  Clone ID: MRT4577_146932C.1
aacctcatcttctcttcttttgctcgaaacgacactttgtccgggctccgatctccgatccccgatccccgtgcgtagatcctagatgcacatcttcgctgagagtctcactggaaaaactatcaccctccaggtgagagtgcctctgacaccgttgacaacgtcaaggccgatatctgggacaaggaaggtgttcccgctgacctatatcgtgtcatcttcgctggcaagcacctcgaggacggattgactcttgccgactacaacattgagaatgatagtgccctccgccttgttctccgtctcaagggaggcatgcatatcttcgatgagacccttcctggtcagactatcaacctcgatggggagtcttctgacatcgtctacaacttccctgcctttattcaggacaatgaggggatctcttcggatcaccattggttcgtttttgctggctagcatatcgaggatgggcgcacactggccgactacaacattccgaatgagagcaccctccacttgacgatgcgtctcatgggttgcatgcctatcttctagaacactcttactggttatactatcacccttgaggtagagtcttctgataccattgataatggcaaggacaagatccaggactacgagggcatccctcccgatcaacagaggctcgacttttgccgttcatacagctcg

SEQ ID NO: 51467 - DNA, 342 bp, Zea mays
  Clone ID: MRT4577_146933C.1
actacctcggggagcacttctacattatcgttatatcgccgatgcggtcgctgggctacgagtacaacatgcttgacacacgccctacgatgctggatggtgcgtgctgctgccggtgtcaccattctaagccgtcgaccgctaaagtctacgaatgcgccggtgtaaccttgggttatgaccatccagtctaactaatccattcctgcgctggtcgggcatgtaaaattatcaaatagaacaaagactaaggaagtctaggcacgggagaccggacgttgagaggcagtgactgcacctgataacgcaccgatatatctatcggtgtacaactagagatgc

SEQ ID NO: 51468 - DNA, 463 bp, Zea mays
  Clone ID: MRT4577_146934C.1
cctcgatgccggccgggatctcggacacaacctgagctccgccgcttttgcataccatctctcccggctctcggcttcgtccacaagctacagccgcgcgctcctccttgacccggcctgaccccgctagttcgccgcgccgccgcctgccgtctttcccagtatggccgccgcgtcgtccgccacctccgtccacgacttcaccgtcaaggattcgagcggcaaggacgttgacctcagcgtctacagggggaaggttcttctcatcgttaacgtcgcatcccaatgtggcttgaccaactccaactacactcagcaggcccagctctatgacaagtacaagaaccaaggctttgaaatcctcgctttcccgtggaaccaggttggagggtaggagcctggtaccaacgaggagattgcccagtgtgcctggacacgctttaaggccgagtaccccatcttt

SEQ ID NO: 51469 - DNA, 193 bp, Zea mays
  Clone ID: MRT4577_146935C.1
ctgcaggacggaaaatgtctgcccatgccagcgcagtctacgtcgcgctaagttcaagtcctggccgccaaagatcttgagcgcagacagtggggcttcaccaagttcagccgcgctgactaactgcagtacaagagcgaagagcgaattgttcctcatggtgtcaacgcacaactgctcggcaagcacggca

SEQ ID NO: 51470 - DNA, 1203 bp, Zea mays
  unsure (1)..(1203): unsure at all n locations
  Clone ID: MRT4577_146936C.1
ngcaacctcagctagtcagctccgccgcttttgctttctctctccaggctctcggcttcgtccacaagctacagccgcgcgctcctccttgacccggcctgaccccgctagttcgccgcctgccgtctgccgccccagcatggccgccgcgtcgtccgccacctccgtccacgacttcaccgtcaaggattcgagcggcaaggacgttgacctcagcgtctacagggggaaggttcttctcatcgttaacgtcgcatcccaatggtatgagccatttgtccctccttgatatagaatattagtttttatctgtgctacttatttcaccgtcagagacatagacatcttttgtttacgctggatagaaaacattattgctgtacactgctaatcgctgcactgttttcgattgtttcagtggcttaaccaactccaactacactcagcaggcccagctctatgagaagtacaagaaccaaggcttgttcttgattcattgctcttgtatattcttagggttgtagtgcttatctggccttatgcaatattggcttatctttatccaactatcggttgttcaccaatttaaacaattccagttgttggggatgctaattgctaagtataattgtcaatttgtgatatatatatgcaggctttgaaatcctcgctttcccgtgcaaccagtttggtgggcaggagcctggtaccaacgaggagattgcccagtttgcctgcacacgcttcaaggctgactaccccatctttgacaaggttgatgtcaatggtaacaatgctgcgcccatctacaagtttctgaaatctagcaagggtggccttttcggcgacagcatcaagtggaacttttccaagttcttggttgacaaggaggggcgtgttgtggatcgctatgctccaaccacttcacctctgagcattgagaaggatatcaagaagctgcttgggagctcttaaacaatatctggctgcaaaactgtagaaaaaaactgtatgaacattgctctgagagctaaagtatataacaatcttgtcttaatcttagagctagtttggaaactctatttttctacgggatttttatttttccaagagaaaataaactaattttctttaagaaaatagaaatctttttggaaaaatatgttcccccactagcccttaataaagtagtgtttagtaaaa

SEQ ID NO: 51471 - DNA, 356 bp, Zea mays
  Clone ID: MRT4577_146937C.1
gttctagatcgcgagcggtcgctctttgttgttttttttttcgtccgtgttacaattcggggggttttacacaagagggtgcggcttctatctacctactatatagtacacgacctgcctccctagctcttgcactacgagcagccgcgcgcaaacgatcgatcgagcagtcctagtaatataccccacaaacaacctgccgtacggatcgacatgcttgaagagcacaaatctattgcgctcattgtggagactcagtgcatctaccctactctatcactctagtccattgcggtgctcaccgacgctatgagcccgctactgttaaacaaatacaggcaggccgactgcaccat

SEQ ID NO: 51472 - DNA, 429 bp, Zea mays
  Clone ID: MRT4577_146938C.1
cccacagcagtccgaggtaatgggactaccagagattaaacaaggactgttacaagttgcagagacgttagatattcttcatagcaacgctgatgttgcccatggagctatatcagcctgagacaggtctttataactggctgaaccggatctggctcgcttgagagggtgcggcgccgctctttcaggtgatcaagccacaggtcgcctgactctagcacagctgtcgcatcattcggactatgatgccgaggatacagcttgacctctgcaaccgcggttgaactacactgcaccagaatgagggtcgaagtggagattctaagagaggctctgcttgagatatgtggagctatgcatgcctaggtgaccatctgggtgatcgaagaccacgtgcggacggcgctagcactgatcaaatgcacatga

SEQ ID NO: 51473 - DNA, 420 bp, Zea mays
  Clone ID: MRT4577_146939C.1
aggccgggccgggaaaaaaaaaaaaaaagaaccagcacacgcacttggtcccaaacaacggcgggcgggcgatgagtatctcagaagaagcttcccggcgaaggatctgacgggggagggggagggcttcatcaacgaggaggaaatcatccacgaagaaaccatcgacggaagaagatctcccccgaccggcgacggaccgaagatggacgaccgtcgtcaacggggatggtttgattcgcgaagacatcggatgattctaacatacgcaatttcaaggggcaccaaggatgaaagtcttcattgtcggcctggcagccctaacagaattcatcactttgtggctttctggagggaaaagatgataaggggattcctgcgggaggatgggatcagaagagggggcccctggagctgact

SEQ ID NO: 51474 - DNA, 154 bp, Zea mays
  Clone ID: MRT4577_14693C.1
gccacacgccctgcttctagggtcgtgctggggatttcgaaagatggacacgggcttgcacaagaaccagaggacacccgacgaccatagggattgtgggacagcaccaataggctcaaagaaaccgtgctagagtgaagctgcatgcacttca

SEQ ID NO: 51475 - DNA, 417 bp, Zea mays
  Clone ID: MRT4577_146940C.1
aattcggcacgaggaccatcttacgctcccctacctctgacagaatctgccgacgccgtagaggcttctgtgttacttgcctctgctatagccatggccaacatcaagatggtagctaaaggggatgagaagatcaggatacctcggacactaacacaacctgtagatcgacgatgcaagagactcaaaaccgcttgccaccccttcttaatcacgccatacatgacctacatgttaccagacaacaccgggcacggccaaagcgagcactgggacatcatgctcactgactccacagacgattggtgttatgtaaaaagccatggacacgtcttcagcatactgaaccgcgaggagatccccatgggggatgctggtgctgaaggtgtggtggattccacccatgacctgactgac

SEQ ID NO: 51476 - DNA, 666 bp, Zea mays
  Clone ID: MRT4577_146941C.1
atatatcgtttgcctctcctcctcagagctcgtcgccatcattcagccgctcaccctcgatacacgccgaaccgacccaggtaaagtcagcatggatgacgtcactgtgctcaacgatgcactcaatgccatgtacaagcatcaaaagatcccgaagagggatcccatgatccatgccgtcgatcaacacatcatcaatctcctgactgtcttgcagcgccacggctacattgaacacgtcgatcatctacatgaacacccgatcgggcgatactcgagcttccatactcaacaggtcagtgcctgcaaaaagctgcgaccgtacatcagagcctcgcctttcatatcgaccgtgacagacatgaatgaggactgcaaggctgctcccggccaggcaccctctatacatcctcactctaacttcctcatccatcatggaccacgatgaggcccatacgaatatggccctaggcaacgtactagggttcgtctattgagggaaatgaaaatctttgttatggcctggctgactggctgactctctcacaatatagaaacggtgattctacttgaatatgtctctctcagactagagcgccttcttttacttgaatattggcgactgcattgtccattcactgtaaaatgcgcgactgcattgatcga

SEQ ID NO: 51477 - DNA, 304 bp, Zea mays
  Clone ID: MRT4577_146942C.1
gattagaggcatccggctcgcaacaccctcgatctattctcaaactttaaatacatcggagggggcggctggttaggtgggcgccgccccaacaacaagcctcgctctctcgtccgcaggggcgtggcctacctccccgatagtcgattcgctagttgccggatacaccgtgagtacgcctagtggggcttgacccgcccccccggtgcccttggtggctaactcgagttcgtcggcggggtgcagctccagctggctgtgaacgcatctcgttactgcaacaagaatcgtgtcttattgcgac

SEQ ID NO: 51478 - DNA, 516 bp, Zea mays
  Clone ID: MRT4577_146943C.1
gccggccgggtctcgatcaccccactgtgtcttcatacattagctttatctactccagagcgcagaacaacccgatcgacaccatgacggagatgttcgttgtcctcgctctcctggctctcgctgcgagcgccacctccacgcatactattggagggtgctgatgccatccaccgcgcgacgattcatctaccgccgccggcgcatatgccaccgccgtttcacctgccacctccggagcatctcccaccgccggtacagctggcggcgacggtccaactgccaccgactgtccatgtgccgccgccgtttcatctgcctccgacaccatgacactaccctactcaaccgccccgacctcatccgcattcacagacacacccatgaccgtggcaacagtgcgcatctaattgccgaggcagctgcatggaatcctgcccagttgctatgacccacaatactgtacacagcgcgctacagctactgcatgcatcagtgtcatgccagacggtgacg

SEQ ID NO: 51479 - DNA, 332 bp, Zea mays
  Clone ID: MRT4577_146944C.1
gactctttttttttttttttttttttttttttaacttttttttttttttttttttttttttttttttttttttttatttcctttgtttgtttttctcttttgatctatttttttttggtgcttgcttcctcccgggcaagcccgcccccccccgggggggggggggggcgttcctttcgtaccacctgcaaccaggggactctttcttgccggcccacacttttgaagacccccccccggcaggcaaaggacgccgcgtgtgacacaggaggaacttggggccccaccccgcggccctaggggccctcttcgggccgttggggacccgcgtc

SEQ ID NO: 51480 - DNA, 344 bp, Zea mays
  Clone ID: MRT4577_146945C.1
ggctaaaaccaccgccgcataggcgcatgaaattaaaaggaaaaaaagtttggtccctacacaaggttacctgaaacctaaattagcctgaaataataaattcacaagggaccgggccatttttttattatctggccccccccaacgggggggggtgttttgacagaaaaaaaaaccccatttcagaatttggagggcagccctttccccagctttggaagaacattttttttttcaccaaattggggcaaacggccctctgaaaggggcctccgggtgctccttactttaaaggagcaaaaccatttttggaacaaacttcctttgttgggagtttctttttc

SEQ ID NO: 51481 - DNA, 568 bp, Zea mays
  unsure (1)..(568): unsure at all n locations
  Clone ID: MRT4577_146946C.1
gcgtccgcggttttcaggctcttcccttgcgcgtgtttcgngaattggctgtgacagttactgttgtttttgttggcgcctaaaattcagctcatttcgggaacgtttgcagctaccttaccacattcctttggaatctttggtaaagcaccttaccctgtgagaacgacgatttggcgtttcgcatccccatcactctcctcagaagcatttcattgcttgtaccggcgtgacggcgtcttagagacttgattcgcatctgtacgaatacttttcggagtccaattctcggttatcagattcatattctttaaggattagactcggcgtgaaggtcttacgatccaaaaatagcgacttacttcgttgtgctttcggtactcgattctctgacgctcttctacgacttttttacgacgtgtacgagtttactacccacgtcttctgttattgttgctctgctctgtaaagccctgcaacatcttgctttttccttgaacatataaagctcgtgcttggttcttgactctgcgcattatggatttcgccggtgtcccccccaacaacg

SEQ ID NO: 51482 - DNA, 205 bp, Zea mays
  Clone ID: MRT4577_146947C.1
acccaaacactgatctaaattatagggaaccgccgaggaaataccagaccggtccctgaaggaaacccgggcttaaccatgggggggcacaaaataactcgatggggaaatggacaaaggtgacgcctttctaaaaaaaaaaaccgtcaaaaaaggcaataaaaaatgcacacggatgcacaaaggtaaaagccgggggactcaa

SEQ ID NO: 51483 - DNA, 305 bp, Zea mays
  Clone ID: MRT4577_146948C.1
gcgtgcgaaattccctgttccgctaggattgcccccaaaccctccagcaaaaccccagagcggagaagagcgcaagatggtcggttttgggcaccacgggcacgacagccagaacccgccggtgcacggtggtgtgcaccatcccaccttcaagatcttctgcaaggccgacgaggggtactgcctcaccgtccgcgacggcaacgtggtgctggcccccgccaacccgcgcgacgagcaccagcactggtacaaggacatgcgcttgagcacccaggtcaaggacgaggagggcaaccctgcgt

SEQ ID NO: 51484 - DNA, 271 bp, Zea mays
  Clone ID: MRT4577_146949C.1
ggcccaaaaccttttacggggtaagaaacaaattacaaggggtgggtttatttttatttaaaggggggtttggagtcccttccacaaaaaaaaaaaatagcgtgccctgattaaaaaaaggtcctactccaaaaacctaaaacggccccgtcccttttaaactaaaaaaaaaaccctgggtttgggcagctaaaggggtttcttcccgccaaagggtttttccactttggggggggaaaattccataaaagtcccacaaccttgggtgggg

SEQ ID NO: 51485 - DNA, 184 bp, Zea mays
  Clone ID: MRT4577_14694C.1
agcaaacgtccttaacaacaacctaacaacaatggctagggcggtcgttctagtggttgcactctttgctcttcttgcaagcgaaacaaatgctttcatattttgacactgataactaagttaatggccgattattacaaagttcctgacaggaaaaactttaatgtgctcaaaataaatagct

SEQ ID NO: 51486 - DNA, 495 bp, Zea mays
  Clone ID: MRT4577_146950C.1
cccccggaaattcacgagggaatcacccaaatcacccacaagggttgaattggtttaaaagcaaaggggacaaaaccccgggggggaaaaaaattccctcccctttgggaaaaaggaaaaaacccccccttgaccaaagagggtttacccgaaacctccccaagcaaaggggcccccaaaatccctcccccccttgggacaacaaaaaggaaacatagggggaaaccccccaaaacttaggccttaaaaaatcccccccccccttactcaaaggcccccggggtcccccgggggatccccctttccccccaaggggggaagcccttcttgagggggaagggctgggaaaactttttggggggctggcccctggtcatgtaaaaaacaatctgacagggaagggcaaacaaacccttgggggtaaaaaaggtggccgccaaaaagagggcaaaaaagggggcccgggccaccctgaaaaaatccccatcccaattt

SEQ ID NO: 51487 - DNA, 154 bp, Zea mays
  Clone ID: MRT4577_146951C.1
cacagaatgagattagaagcgcgcgacgagcatatcttagctctttctctaccgaccaagaggcagatgagcacatggactaggagaggtctcctacactcctcgtaagcattcacgacggagaaatgcaggagatgcgctatactctcgctga

SEQ ID NO: 51488 - DNA, 275 bp, Zea mays
  Clone ID: MRT4577_146952C.1
atcatccccattgaccacattggatttgagtttgaggtaggggtgctttgggttaggctcactcaaggggctgaccagagaaagcaatgttgccaatttccttatgagttcaaaaatgtggatgtgttaagacccaaatgcttctgaactggtacatatgaagcatttagcataatttacagtagcttaaaaagctactcctaaaatacttagaggattcccaatgctttgtctctgtgtatacaaaaaggtgatctttccagattccgtcagaa

SEQ ID NO: 51489 - DNA, 152 bp, Zea mays
  Clone ID: MRT4577_146953C.1
gattacagaggacgctgcgcggtttattaacacaccgacaggggttgttagctggaccgccctaaggcactagttctaaggatactacacatcgatggtcgtgcttaaaccaacagcaacccgaactctaacacctaatgagaaccatacac

SEQ ID NO: 51490 - DNA, 2342 bp, Zea mays
  unsure (1)..(2342): unsure at all n locations
  Clone ID: MRT4577_146954C.1
aacggccgggctcgacccaggcgtcctttaggcgccgcttctgtagggccccaaccaaccgcgcagggagaaaaccaccacagcacatgcagcgcctcgcctcctcccggaggctcctccaggccgcgctcgcccccgcccgggccaactccagcctctccgcggccgccgtcgccgcgcccgcgccagcgaatggcgccttccccaagatgccggccttcgactacacgccgccgccgtagcgccttccccaagacgccggccttcgactacacgccgccgccgtacaacgggccgcgcgccgagtttatcttccggaagcgcgctcagttcctcagcctctccctctttcatttctaccatcggccattggacatagtcgaaggaaagatgcagtacctatttgatgaggatggccgtcgttacctggatgctttcggtggcattgcaacagtttgttgtgggcactgccatccagatgttgttgaagccatagtaaaccaggcaaagcggatccagcactccacagttctatatctcaatcatgcaattgcagattttgccgaggcattggcttccaaaatgcctggtgatctgaaggttgttttcttcacaaattcaggcacggaggcaaatgagcttgcactgatgattgcacggctttacactggttgcaatgacattatctctcttaggaatggataccatgggaatgctgctggaacaatgggtgctactgctcaatccaattggaaattcaatgttgttcagacgggagtacaccatgcgcttaatccagaccccttcagaggtgcttttggttctgacggggagaaatacgccagagatgttcaggaaatcatcgaatttggaactacagggagagttggtgggttcatttcggaagccatacagggggttggtggaatagtggaactggcaccaggatacttgcccgtggcatacagtatggtaaggaaagccggtgggctctgcatcgccgacgaagttcaggcaggagtcgcgagaactggaagccacttctggggattcgaagggcatggtgtcatcccggacatagtcaccatggccaagggtatcgggaatggcatacccataggagctgtagtaacgacgccagagatcgctcaggtgttgacccgcagaagctacttcaatacctttggtggtaaccctgtcagcactgcaggcgggcatgcggtgctcaaagtgctggagaaggagaagctccaggagaatgcgtttgttgtgggctcctacctaaaggaacagcttaacaatctgaaagacaagcatgagatcatcggtgacgttaggggcaaaggcttccttcttggagttgagctggtgacagaccatgaaaagaaaaccccagccaaagctgagatctcacgtgtcatgaaccatatgaaagatatgggagtgttggttggtaagggtggtttctacgggaacgtttttaggataacaccaccgttgtgcttcatcaaaccaaagaggattccgacttcttcattgaggtgatggacattgcgctctcgaagctgtgaggcaagcagggcgaagatgatgtgcaaaccctggtccgtcgccatgggatttttgcccatgaataatattaagattaatgagacagcacctcgttgtctcttaatctaagacgatgccatgtcatccggtggcatggtattcctaatcctacctgccaaataaggacgagttgtgctcgctgtctcgtaatcagacccatggagcaatatgattcttgtaaactctagcttcatccaatctgttcctcctgatctaactagtctgaatagcagctgttcgtttgtgaccaatatcaacttcttttcagatgctccatatattcctgctctctgtaaacaaaccattatcactgttcaatagatgcggagatgtggatataaaaattacatatacgggtactctttggtgtaccagtgatttggcaagaaagaaaaggtttaacgtactcacaatcataaaaaaaaaaaaaaaaaaaaaaaaaagcggggcgtggggggggcccccatcnccactccantcttcanttctgtggggggggggggactgctacnaccaagaagagaaacaaaaaaaactgtaaattaccttcngatttcaatattttttcggtnnaaactgctccatttgtcgccctggtggtcttcctttttccggtgctttggtgggggggctttnttgtnncttttttttttttttgctccggtttttgttcctgtttttttggtcgtggttttttgttgggttgcngtgggggtttttttttttttttt

SEQ ID NO: 51491 - DNA, 265 bp, Zea mays
  unsure (1)..(265): unsure at all n locations
  Clone ID: MRT4577_146955C.1
cgtccgcccacgcgtccgcggaagcgtgggcggacgcgtgggtggtgatggtgtgaccgacacggtgccagtcgacgagggagacgcgcttcctcatgccattcttaggctggatcttgctggccgtgatctgactgactgcctattgaagatcctcacgggaaggggttattcctttaccgcggggggggggcgggtaatcgtgtgagactttgtggtgtagctggcctttgtggccctcgtctgttagcnggagctggtgacc

SEQ ID NO: 51492 - DNA, 207 bp, Zea mays
  Clone ID: MRT4577_146956C.1
tgtatctgctcgcctgttaatcgtagtcaccgcaggcatcctcaccctagtaacgtttgccttggcggtttgcttaacggttacaacactggtgccagtaacaatctccaacccagtaactgtgccaagtacccactaacaggctcgcgcggcgtgtctaacgttgtgattatcaataacggtccctgtgccacaacgttccgaagg

SEQ ID NO: 51493 - DNA, 1684 bp, Zea mays
  Clone ID: MRT4577_146957C.1
gccggccgggctgggaacagcgactcacacacccgcgcgccgcttctgtagggccccaaccaaccgcgcagggagaaaaccaccacagcacatgcagcgcctcgcctcctcccggaggctcctccaggccgcgctcgcccccgcccgggccaactccagcctctccgcggccgacgaagttcaggcaggagtcgcgagaactggaagccacttctggggattcgaagggcatggtgtcatcccggacatagtcaccatggccaagggtatcgggaatggcatacccataggagctgtagtaacgacgccagagatcgctcaggtgttgacccgcagaagctacttcaatacctttggtggtaaccctgtcagcactgcaggcgggcatgcggtgctcaaagtgctggagaaggagaagctccaggagaatgcgtttgttgtgggctcctacctaaaggaacagcttaacaatctgaaagacaagcatgagatcatcggtgacgttaggggcaaaggcttccttcttggagttgagctggtgacagaccatgaaaagaaaaccccagccaaagctgagatctcacgtgtcatgaaccatatgaaagatatgggagtgttggttgggtaagggtggtttctacgggaacgtttttaggataacaccaccgttgtgcttcacaaagaggattcccgactttgttgcctcttcttcattgaggtgatggacattgcgctctcgaagctgtgaggcaagcagggcgaagatgatgtgcaaaccctggtccgtcgccatgggatttttgcccatgaataatattaagattaatgagacagcacctcgttgtctcttaatctaagacgatgccatgtcatccggtggcatggtattcctaatcctacctgcccataaataagggtataggtgcccaaacgggcggcccggcacggcccggcacgggcccgttaggcacgacagttaaacgggccgtgcccggtcggcccacgtgccgcagatgcggcccaggcacggcacgccggcctggtagccgtgccgggccggcccgtttaatttgcccacgttgtccatttaatcagaaaaactgcaaaaaaattgggcgcagtggggttttgaacccaggacctccctcttctaagctgggagcactaaatgtaagaggctaaccagtagaactctagcgtatttgttgtaaatagcaaatataaaatctaaatatatatatactatgttttataaaataaaaaaaatataatcgtgccgggccgggccggcactgcgggccgagacagcggcccaagcacggcacggctgtcgtgtcgggcccgacccggcactattaaacgggccgtgcttcgggccggcccgttaagcacggcccatttggccatctataaaataagggacgagttgtgagacagcacctcgctgtctcgtaatcagacccatggcatggagcaatatgattcttgtaaactctagcttcatccaatctgttcctcctgatctaactagtctgaatagcaactgttcgtttgttaccaatatcactttcttttcagatgctccatatattcctgctctctgtaaacaaaccattatcactgttcaatagatgcggagatgtggatataaaaattacatatacgggtactctttggtgtaccc

SEQ ID NO: 51494 - DNA, 2567 bp, Zea mays
  Clone ID: MRT4577_146958C.1
tcgaggccggccgggccgggatcaaccagcgactcacacacccgcgcgccgcttctgtagggccccaaccaaccgcgcagggagaaaaccaccacagcacatgcagcgcctcgcctcctcccggaggctcctccaggccgcgctcgcccccgcccgggccaactccagcctctccgcggccgccgtcgccgcgcccgcgccagcgaatggcgccttccccaagatgccggccttcgactacacgccgccgccgtacgacgggccgcgcgccgaggagatcttccggaagcgcgctcagttcctcagcccatccctctttcatttctacgatcgcccattgaacatagtcgaaggaaagatgcagtacctatttgatgaggatggccgtcgttacctggatgctttcggtggcattgcaacagtttgttgtgggcactgccatccagatgttgttgaagccatagtaaaccaggcaaagcggatccagcactccacagttctatatctcaatcatgcaattgcagattttgccgaggcattggcttccaaaatgcctggtgatctgaaggttgttttcttcacaaattcaggcacggaggcaaatgagcttgcactgatgattgcacggctttacactggttgcaatgacattatctctcttaggaatggataccatgggaatgctgctggaacaatgggtgctactgctcaatccaattggaaattcaatgttgttcagacgggagtacaccatgcgcttaatccagaccccttcagaggtgcttttggttctgacggggagaaatacgccagagatgttcaggaaatcatcgaatttggaactacagggagagttggtgggttcatttcggaagccatacaggtattccaatatcaaagcgtcggttaggcatctccatcactcttaaacaaaaaccaaatttctcccctgaacatggcatgttcttttccgaagggggttggtggaatagtggaactggcaccaggatacttgcccgtggcatacagtatggtaaggaaagccggtgggctctgcatcgccgacgaagttcaggcaggagtcgcgagaactggaagccacttctggggattcgaagggcatggtgtcatcccggacatagtcaccatggccaaggtaaagcttgaaacccgttcatgacgtgcaggctcttgtattgccatgacatgacgtcatggtaagatcatcagaatgcgcatccggtggtgcatcgagtcggcgactcacatgttctcattgatttccagggtatcgggaatggcatacccataggagctgtagtaacgacgccagagatcgctcaggtgttgacccgcagaagctacttcaatacctttggtggtaaccctgtcagcactgcaggcgggcatgcggtgctcaaagtgctggagaaggagaagctccaggagaatgcgtttgttgtgggctcctacctaaaggaacagcttaacaatctgaaagacaagcatgagagtaagtagggaaatgaaaaaaagaagcaacgaatcatgtcattgttgctcgccgcttacattttacctgtcttgctctgcagtcatcggtgacgttaggggcaaaggcttccttcttggagttgagctggtgacagaccatgaaaagaaaaccccagccaaagctgagatctcacgtgtcatgaaccatatgaaaggtatacatgttgtgctttgacaaccttttccaggggcgaagctagacgtagaactctctctctctctctctctctgtgatctaagtgctctcttacttcaacagatatgggagtgttggttggtaagggtggtttctacgggaacgtttttaggataacaccaccgttgtgcttcaccaaagaggattccggtaagacctgctatctgctgaaacattcctcgttgaactccttaaccagtgacactgatttttccggggaaatgacgagctgccttttgttgcagacttcttcattgaggtgatggacattgcgctctcgaagctgtgaggcaagcagggcgaagatgatgtgcaaaccctggtccgtcgccatgggatttttgcccatgaataatattaagattaatgagacagcacctcgttgtctcttaatctaagacgatgccatgtcatccggtggcatggtattcctaatcctacctgcccataaataagggtataggtgcccaaacgggcggcccggcacggcccggcacgggcccgttaggcacgacagttaaacgggccgtgcccggtcggcccacgtgccgcagatgcggcccaggcacggcacgccggcctggtagccgtgccgggccggcccgtttaatttgcccacgttgtccatttaatcagaaaaactgcaaaaaaattgggcgcagtggggttttgaacccaggaccttcctcttctaagctgggagcactaaatgtaagaggctaaccagtagaactctagcgtatttgttgtaaatagcaaatataaaatctaaatatatatatacccgatgttttataaaatataaaaaatattatcg

SEQ ID NO: 51495 - DNA, 486 bp, Zea mays
  unsure (1)..(486): unsure at all n locations
  Clone ID: MRT4577_146959C.1
ggcttggaacctttgggctgatttatgtgcttgggattcctagatctacaaatatactttacatagggagaataaaaactcgatcggaatagtatgccacgtcagcgcgaacatctactccggaacagaataaagtaggagagacgactcggagctcgccggtcactcctcgtcacaccccccaagaggaagggttccaaagtcggtatcaagaaataaaagcacgacaaaaccagcgaaaagaaaacgtccattctggtagagacctcgcgtaaactccatttgttggagcctgctctacacccttatcaccgctgtctttcgtgacccgaagataggttagaccatctcctaacgaagaagtctccctgcgacgcacccacatgggaaggacattaacccgaccatgcacccgatcggatcgtatctaagcatttctaaacgggntcttaataatagtccgcctaataattaagcgtaagaacg

SEQ ID NO: 51496 - DNA, 341 bp, Zea mays
  Clone ID: MRT4577_14695C.1
attccgcgtggctttaaccttttgggggtataggaagcttaggcacgtattgctatttgtggtgctgaggttgcacaaacttaataactgatggcattatccgaacaaattcggccgcagatggatgatatttgtgctgtatatcctcagggtgacaccgaggggaaaattcaagacactgaagaacttgacaatctataagaacacaaggctgaacaacagcctaagatacatcttgaagctttaatacaagaccaggcttgcttaataaacactctttaaaacaccaatcaaacaagtacaccggtacataatgctgatacgtatgcacggacacaata

SEQ ID NO: 51497 - DNA, 390 bp, Zea mays
  Clone ID: MRT4577_146960C.1
ttttttttttttttttttttacaaagtgaactatttctcgtattatgagtttcttattagatgatgagaccttgtcacagttgtgttgcgagaatggactatctcatcgaccggcacaactcgtcactgggcagggtggcatgccgcatgcgaacatggggaggcagggcctcaccgccgccgcagatgaaccctgggatgactcgctggtgctgccgctcgcctcaatttgctgcggaaaccagatcccgtatcaccgtatgtgtcggtccgcgcccagcctctgcaattctcaatcatccctaactgggctaccactgcacgacgcaattaccgctaccaccatcaggtcaggtgaacgaaaactctcaggttcgtcgacgcggccgc

SEQ ID NO: 51498 - DNA, 483 bp, Zea mays
  Clone ID: MRT4577_146961C.1
gccggccgggttcgggatttccccttatttatatagggtcggcacatcggcggcgctccctggaggaccttcgaggccagccatggcgaaccacatcctccgtgcgttcctggttctcctcgtcgcgaaggtctgcatcgtcatggcgatggtggcgacggcggtgcagggcaggcctgggcctggacccacggccctggagtctgttcccgcgtgctgcttctaccaccccgagtgctgctacgacgctgccggccctccggctgatctagggtgacggtgattgttgtttcgatgcccgtaatgagctaatgctgtttctggctccgtcattgtactgatcgctcgcgtaataaaatgagagttatgagtatggttcaggtcaaaaaaaaaaaaaaaaaaaaaaaaaaaaaaaaaaaaaaaaaaaaaaaaaaaaaaaaaaaaaaaaaaaaaaattaaaaaaaaaaaaaaaaaaggccccta

SEQ ID NO: 51499 - DNA, 449 bp, Zea mays
  Clone ID: MRT4577_146962C.1
acatcattaggcgcgctcccaataccaacgcggggagaatggacaattggcacaccataattgaactctaacatagggacttgatgataagacggaaaccaaataagaactatacagaggggcaacgcgcattaaaccggaccagcgccaagcacattaggctccaccacaaattggtacagattttagacaactaatcctgatggggtgttaacaatggccattgaggacgaccctggactgggaggtgaacataattttctatactgtagatctaacacgcggcggactatgggtacaacatgtgacctgtttactgactattggtgatacacctagacatgcttgatgaaaagtgtagccaagacagtcctgggcgttgtggacgaagaccacactctgctttctccggcgatgctgcaggcatccatatcctactccacctggac

SEQ ID NO: 51500 - DNA, 333 bp, Zea mays
  unsure (1)..(333): unsure at all n locations
  Clone ID: MRT4577_146963C.1
ccccgccgngcgcgcgcgcccccgcggcgacaaccgggcgaccgccgccgacccacgccaggngccaagccgnnccncagncccancacgaggccnncaacgaacccnncgccggcgacgagaaaancnaannnncccaaacccgcggccgcgacggcggggcncgacncncccaagncacaacccncgaccnccccccgacgccaacnacnggaagcgccgacccancaggnncngancaanncnncngccccganccgcagcggcaagcggagaagaacggcgagaccngncagcngaaagagcnggagcnggaacngacggagancaggg

SEQ ID NO: 51501 - DNA, 683 bp, Zea mays
  Clone ID: MRT4577_146964C.1
agatacctacatcacattcctaaagcctccgtagacccctcctcactgcgatactacacagcgatatcggcaggcgagcgatgggaagagaaaagcagttcctggcgccgcaagtgctactttgctgagctcgacctcttcgtccacgagtatctccttgttgcccccaccgagaaagacaaacttcgacaccgccgatcaagcatagcgccatcgttccatcgacctaatgaccacattcgctcgcgccggctcgtcccatcgtggccgcactcgttatcgttcatgaacatcaaagtcaaaaaccagccgagggacatggtcgacaactagcaaagaaaaaaggacccgcgatacttcatcttatatctgtgtgcgcacacatctagtgagacagctactcgcaccatcatccatgcaagaggacagccactcagcatcgataccatcttgctacgcgtcctatcatgggcaaaacaggaatctcgctcagctgccaaacaacaccagatagactgtgagataattaagaacagcaccaagattgactcacaaccacaccaacgctgatgaactgtcaaggtcaaagaatcatgagaaggctagatcaaacaccaaccttgctgcaatgaagaacaagattgccacgatccagccaatgtaatgactgttcaatatcgtga

SEQ ID NO: 51502 - DNA, 371 bp, Zea mays
  Clone ID: MRT4577_146965C.1
acgcatcgtgaggccaccttctacaagcgcagggactgtctcttcaagaaaggtggggagctctccggtctgtgcgacgtcaacctgctgctggtcctgtcttccacctgcggcaagctctaccactacctctcggccaccgttccctacgtcgaggacctggtcgagaggtacgagggcacgacgcacaccaagggctgtaccgacatccgtcaagagcggcgcgcgcagctggcgaaggcggagctgacgtgcgagctgatggagaaagagctgcgggtcatgacaggggacgacggatagcagtacactgtgcccactgttgagctgcttgaacacaaactggatgcagccgtgcacaaggtgcgctc

SEQ ID NO: 51503 - DNA, 1820 bp, Zea mays
  Clone ID: MRT4577_146966C.1
tctgactttctgagtgtgtcttcatacgtcacactggaatagcttatctagagcaaagtgtaaagtttttgtgacaatgaatatatcagaattttaaagaaatattagtaattttacaattgatgaaactgccaaagtttgatgatttagttctcttctgcctatcttaagcaggagaaactcttttcaagcaggaacaggacagaagtctctcttggcaagaagctgaagttcacttatcttccagagattgaaaagattcacaagaagaaggagaagttgctaaaaaagcaacaaagagaagccatcctccttgacagctgcttgacagtgaatggattgacatctggccgctctcgacgtgaaagaaaacatgtgacttatacttttgatgattatgagcgttcaataaatgaagccataaaaacaataaggtaagtgtattttctgttctcagtagttccattgatttatgaatttataaacagaaatttacaggaaaaatgagaatgctgttgaggttggcccctccccattatgcaaaggattttatggagaaactccagagaagttgtattacaaagcaaaaacagatgaagggaaggctgaaactctccatcgcagctacaggcagagaaaaagatcccaaaggtacacaaaggactatgttgaggccatatcagatattgacctagattttgacagcgatgatgatatcatgggtgaagcagtctatgatgaggaatatcttagaagaaggaaacggtacaaggcaagcctttctgaaaatgatgatgagtttcagttggatcaagtcgccaatgatggtgatgatgaagtgggtacttctttgaatgttaatgaagatacagaagatctccaatggtacaaaagatttccacttctcacccctcaagggaccaagttgaaatctattgatgaaatccaaactggcatccgacgcagtaagcgctccacccgttcccgtattaactatcgacagcttgatacttttggcgcaaatacaaaatatggaaagtcagagaaatgcaatgcatcagatccggatgctagttctgatgcactaaatgatacggagctctcaacaagtcaagatcgagaggaagaagacggagtaaacaaagcacaacagcagtacacagagaaaccaatcgttcctgtcaaggagagtagaagtgtccggagaaaattcctcgtcctaaatgagcttgtgcctatagctggttttgatgatgcttcagtcttagtgaaagataagcacgtgaataacaacggaggaaaatgttctgcagcacattagggcgttggggaagctctttttttttgtcacatgggtagcaaatactgggtagaactgctcgcttaagcatggaccaacgagaatccaatgagatggtgatgcaacattggtcttgtttgggcagactgctgcttactacttccagtgtcatgccagcgaggagatgagatggtccatgggtgctgtgtggctgaattcccagcccataaagccaagtccctctctgatacttggaggtcttgctgagatgtgcactaggcacaccgcgtcgattggcgctgtacaattgtcacagctgtacgtgtatctcctccatgtatatacagtgattgggagcaatagcgtcttctggtttcaggatgcctatgggtagttgtctttgtctcttcttccttttcccctcttctgagcatctgaagttcggcaataaactcgattcaactgtggcatttacttatttctgtatgcggtaattaatatcgctcgatcttacactact

SEQ ID NO: 51504 - DNA, 3545 bp, Zea mays
  Clone ID: MRT4577_146967C.1
cgaacgactctcggcaacggatatctcggctctcgcatcgatgaagaacgtagcaaaatgcgatacctggtgtgaattgcagaatcccgcgaaccatcgagtttttgaacgcaagttgcgcccgaagccttctggcggagggcacgtctgcctgggcgtcacgccaaaagacaaaaaaaaaaaaaaactgttctgctacttccgcacccggctcggctgcttcctccccctcccactccactccgcgttttcaaaaatcaaaaccccagccggaacagcgaaaccccttccaccatagcccgtaggaaacggagcagcggttgcggtttctctctccgtcgctctcaccgctcgccgccggctccgtatccggtccgcaaggcgggcctggcgtcaaggtcctccgctccgtccccttcactcgcgaccggagtcccctcttcgttggttcgccaatctacttcgtcggcccacccctttccccccgatcgatctctccttctcgctaagcgaactatcttgacctccctccctcgtgcgagattagccagtagaaagttccccgcttttcatccaggcacacttccaccacctcgctttgctgcttcactgcttgcttctgttgggcggagtgctaagaggacggcacgggagtcaagattcctcctccttaacctgccctttcgtgttgccgttgttggtggtttggtttgtgattgcggtggcgctggagttgcggtgtgtgtgaagcgagggatccgagattcttgtggattctgttctacttttcgattgctgctgattctctctcccgtgcgacggcacaagcggcggtgtggggagagcatccgccgttgcccggccttggagggccccggtccgtctatggaacttgccgccccggtgccacgccccggcccggaactgaagtgctcagcaaggcgcttcttgcctgccactctcacgctgctggtgcctactgtggcagtcccctgtttggttcctgctcctcactgaccggctacggggctgcgataatggtgcctcagatggtgctgctcctttgctgctgccttctggcgttcccgccacatggtccgttagtcgttgaggcttttgtaggcggttatggagtaaactatgggagaatagcaaacaacatcccttcccctgacaaagtggtggagctcctgaggagagcaaagataaggaatgttaagatatacgactctgaccacagcgttctcgatgcgttcaaagggtctgggatcaatctggtcatcgcaatccccaatgagctcgtcaaggatatggctgcaaacacgagccgttcaatggactggctaaatcaaaatgtgcagccttatctccctcagacgcgcatcgttgggatcactgtgggaaatgaggtgctcggaggccaagatcaaagcttgtatcagccacttgttgatgctgtgaagaatgtgtatgatgggctcaagaggctccacttggagagaaaaattgagcttttcacacctcattcggaagctgtttttgctacttcttatccaccctccgcatgtgtgttcaaggaggaactcatgccatacatgaaacctcttctcgacttctttgcaatgattggctcacctttctatgtcaacgcatacccctttttggcttacataagtgatcctgaacatatcgatatcaattatgctctctttaaacccaacaaaggaataattgatccaaataatagcctgcactatgacaatatgtttgatgctcaggtagatgcagcttatgctgctctacatgctgctggttatgataacatggaggttcgggtggcagagactggttgggcttctagtggggatcaaaatgaagcaggagcttcatctgagaatgcaaggacgtacaatttcaatcttcgtaaacggctatttctgaggaccggaactcctctgaagccaaagagaccagtcaaagcgtatatatttgcgttgtttaatgagaatcagaagcctggagctggctctgagaggcattatgggctgttccttcctgatggaaggatttcatatgacatcggtgtctcaggtctactaccttcatctgcatcctcatccgtgctgtccattaagaatgttcaagctgggggttggattttacagcattgggctacagttcttttatgtagttttcattttttgagggccatagtgacttgaggacggcatacacatccgtagtaaagggtacaattgagcaagttagaatgttgctattgggaagttcacaatgaaaatccaaataatagtaccgctgcaataatctcttctcctgaggctgtcctgctttgctgcttaaaaccgtactcagttattgttctaaaaaaatgattcatacctactgaaaaccgttctcactctatctaattccttctatttttttcttttttctaaatgaaccctcacccagcattcaccatacgcagtttattttagcagttgatatactatatcaaactaagaaccatgtgaagatagttctctatcatagcaacctctagcatcgtagggatctattttccatttttaacaatcaggttaatagcttgagcttgggtgccttaaatgctcactatttttcatatggggtgatgtgcatcaagcggacggtctggcaagattgacaaatcattgtgctttctcccccggtaagaattgcatcttgacacatcagcttcaaagcagatgctgaccgaaagaattagcattcttttttgggatgtttagaagtcctatcatgtgatctgttcaaaagggagtcttaaaaagaaacagttccaaaacctcaaataatatacatatagatatcaaaaggttgtataatgttgttgccttgtttgctgagtggttctattgattaattaaagctctagcatattgttaaggtttcgacctgagtttgttccatgattttagtggaacgactcaatttcttattgatgggataacaggcagctgttgatcaaatcgaaccctggcgaagttgtgaagcctgtgatcagccggctacactaccacctgaaccggttgcattgcatagactcttccgagtttaacaaattcattcaaggcaatcaacgatgaaggcatgcccatgtatcagaggcccttcatgaagggcaagctgtacatccacttctcggtggagttcccggactcattgagcccggagcagtggaatgccctggaggatgttctcccacccaagccagtatcacagtacactgacatagagctggacgagtgcgaggagacaatgccctacgacgtgaacatcgaagaggagatgcggaggcagcagcagcaccaggaggcctacgacgaggatgatgatgtgccaggcggtgggcagagggtgcagtgcgcccagcagtaggcagcttacgtcaaatttgctgtttcgctttgggcgactattgagtttacccgcttgtattggtctgatgatacttcggttacaagagtgcagtattactaaggatt

SEQ ID NO: 51505 - DNA, 297 bp, Zea mays
  Clone ID: MRT4577_146968C.1
ttacttttactaccgtgtgtcttttttttatttttatccggccccccaacaccaaaaccataacaccaacacttatcatacacatactttaataaagataaccccctcacgaaagacacaactcgaaaaatccaccacatttacatagcaccccacaaaaacttaaattttctattaaaaacacaacactatatcagtacaccccacaaccatgattagacacctccaaccccactaaaaaggcacacgattaccctcacccttttcaaaataacatcatactagcccaccctattg

SEQ ID NO: 51506 - DNA, 217 bp, Zea mays
  Clone ID: MRT4577_146969C.1
gcacgagcgcgcgccacgccaccgccgtcgccccgtggacccaattcgcctcccttcctcctccgccgccgccccgacccaaccctcgcggcccggattctgcgatgaagatcacggcgctgctggtactcaagtccccgggcgattcctccacctccgcctctggcgtcggggagcagcaggaggaggccgtggtgctggccaactcgtcggacgt

SEQ ID NO: 51507 - DNA, 258 bp, Zea mays
  Clone ID: MRT4577_14696C.1
gtggaagcgttgagcttttttcttctttgtcttgctgcgcaagaagaagggaaactagaggcggtcggcgatggcgaagaggctgcttccgtcactgaaccgggtgctgggggagaagctggggcagtccaagaagaccgtcggcggcgtcctcgtcccggaaacatccaagcaggtcccacctcctgcattcgtgaagaacgactgaaccagccggcactcgcccggccgactccggctccggacaggttcctttgt

SEQ ID NO: 51508 - DNA, 363 bp, Zea mays
  Clone ID: MRT4577_146970C.1
ttttcttatgacaaggctttcaaggaggggaatataagacatagggtaaacactgtaaaacagggtaaaaaagttgataaacacggactgatggacagaaacatttgaatgaacaatgaaaaaaacacaattgaagagcacaaggctcatctggtcgtccacgttaaacaacaggggcaaactgaacagggggtaatgtacgtaatccggtgggcggacttcttggccagaaactgtttcgtggactggaaggcggcccgcgaattggagcctaagatgacaactgcccaatttttgctgactacatcaagacttgaactgaggttcgccttaatagcctacgagatcttggggtactaaagc

SEQ ID NO: 51509 - DNA, 437 bp, Zea mays
  Clone ID: MRT4577_146971C.1
ggataccaaaaacattgcctaaggcaatagcctcaaccctacagaagaaagaaagtaaacccgacttttatgaaaaaatgttgggcaaataactcctttggacggtcctaaaagcccatgaaaaatccttaaagatcaaaccgcagggatcatactttctaaccttcttcatcatggtcctgggaaacaaaaaccgaagctaacaactcttaaaccaaaccgaaaggcgcggttgtcaaatgacctgtttaggcgaatttgaaaacatcaaacgggaattccattttttggaaaacacactcgggtaactgacttggaaaactgctttcaaacctcctgaacttgagatattctcgagcaatgattaatcttccaccacaaagtgagacgcagaaaggaaacaatcaaagcctatctctggaccatttgcattaaaa

SEQ ID NO: 51510 - DNA, 588 bp, Zea mays
  Clone ID: MRT4577_146972C.1
ccctctctcgagttttttttttttttttttttttttttttttttttttttttttttttttttttttttttttttttttttttttttttggggccgggaaacagcacccctggggggggggggggcagataaaacgatgcaaatgtcccacttggtttttacaaaacaagtacacgggcaatttcctcaaaaaccaccaaacagagagtagtaaaacaggtcccgggggggggggaaatcaaaaaaacttctaacctaaccacagacggggtacaacaaaacggggggcacagccctgtttattggaaacaaattggcattgacgacccccttcttggaaacaaaaaaggcaaaaaaaaggggctcatttggccctggcaagctgggtgcggataaacttaacgggggaaaccttgttggtcagggggggcttgacctccgggtacttgggggttttgaggccgcagtcggggttcacccaaaggatgttggggtccaacaccgccagcattttgttgatgcgggcggggatctcctcagccgacgggatcctgggggaggggatgtcgtaaacaccggggccgatgcc

SEQ ID NO: 51511 - DNA, 301 bp, Zea mays
  Clone ID: MRT4577_146973C.1
aaaaaaaaaaaaaaaaaaaaaaaaaaaaataaaaaaaaaaaaaaaaaaaaaaaaaaaaaagaaaaagtcacaatagggtggaccctcaagaggatcagatcttgattattcaagcatattttgtaacacctctgcaatagggtcacagccattcaatttaatgaatgttcattgacaacttcttaactgaaaacaccttggagttattccaataaatctccttgcagtagctccgttttacagcacctgtgatgatacctatggggcttgcaaatatttaccctcccaaaatttacccccc

SEQ ID NO: 51512 - DNA, 499 bp, Zea mays
  Clone ID: MRT4577_146974C.1
gacagtgtttatggcctctccttttcggagactgctggggcttcccgttctgcctcaaaaggaacgctgtataaactgctagctcttctatgtaggaccgcactggttcaaactgctatgtgtgtgagttcgtcgcccatgatgcttctatggtgcctgaggcgattcaagtttgttagctctagagctgacaagacatccttgtttattttccttagttcccagatgctttctgatcaagtgcagaactggaccggatctgaaggagtcgaacatgaactggttaaaaattggcatatgtggtctaagacgctcagatttttgtagagaatctcaagtttaatgtaaaccctgttgcccatgtagatgcatcgttcctgaaatccctttgtgggtgccatgtctctctgctgctgtgtgcgtgatctgagggaacctggattcgtttattgtttgaatgttttactatttcattcgcaaataaataatttgttgcatt

SEQ ID NO: 51513 - DNA, 465 bp, Zea mays
  Clone ID: MRT4577_146975C.1
ctcttcatcgatggcacatgctggtaatcccttctacaacatgttccactcctatcaacccgacctcaaccttcacctactcctagactgcctccttctcgagctatgggaattgagtggaaggagatgaccgaggtcgaacgccttcaaggtcgacctccccgtcgtaaagaaggtcgaggtgaaggtttaggaagaatacggctacatgctggtcatcatgtgacagactcataaagaagaatgaggactaggacgacaagaggctctgtgtcgagcgcagcagtggacagatcatcaagagcttccgcctgccgtccaacgtcaaggtggatcaggtcaaggctggcctcgagaacagggtgctcacggtcaccgtgtctgatgtggaagagaacaatcctgaggtgaatgctattgagatctctggctcagcatccaattcaatacggacgtggatgaaag

SEQ ID NO: 51514 - DNA, 740 bp, Zea mays
  Clone ID: MRT4577_146976C.1
tcttcttaaacttctgggaaaagcgataatattaagttatttttttcgtaaatcttcttaaacttgtgggaaaagcgagatatgcgtccaaaaggtgtactgttctggtgttgtaattcaatgcgcactttgaagtttgacttttgaaggctagtacagattcaatatttattttagatggcgatgtatatatgaaataaaaaattagcaattcatcttcacacgcaagggggaaggagcacaactgcacaacacaggctgcacgaaaatgatgtacatcacagcatggctaataatcctagctacctgcaactaatgacttattattttgatgacacacaagcaacgaatgaatcaaccaatgaatgaagcaacccacatatgaacaaggaccatctaagcagcagcagcggcggcggcggaactggatcgggtcacgcggcgcccatcatgaccttgaactcgtggaagctgagcacgccgtcgccgtcgaggtcgaacctgcagatcatggcgcggcagtcgtccacgtcctggtgcgcgccgagcctggcgagcatgcggcgcaggctgtcgggggtgatgcaggaggagccccggccctccgccgcgtcgtcgtcggaggagtacatccggaaggcctggcgcaggcagcggtggcggtcctcctcggcggcacccgcgtgcaggccggccacgagccgcgcgaactcggcggcgtccagcagcccgtcgccgtc

SEQ ID NO: 51515 - DNA, 449 bp, Zea mays
  Clone ID: MRT4577_146977C.1
cgtctgcattggctctggaacctttgggctgatttatgtgcttgagacaaacaaaagctcgccagtctctaagcgcaacgtacctgagtatccgacaacgactagacatataccttccctagaggaagtaagtccatcgaggcttcctgcgatctacccgccggcaatctcaggatagcgacgaccctccgtaccctcttaaatgtaggcctacgcgaatatatatcaaacataccgagacatgtcgacagggctaaaagctcccttaagggtggaaacataagaaaagagtagcttataggattaatcattatcctcagttgggacctcccgctagtcccactacacctaccgttcgtcgaagtcgaagaaaccttcaactaagcctaagagaagagattagctgacatccacaggaagggtatcgaaaaccccactcttaatttcct

SEQ ID NO: 51516 - DNA, 296 bp, Zea mays
  Clone ID: MRT4577_146978C.1
aaaaaaaaaaaaaaaaaccaataactaaacaatcacaacaaaaactaaaaaaaaagggacacggcgatcaaaatccacatcatactctcccctccttacctataaaacaccctcctatagtaacaccttcattaccttaactctctgtacatttcaaccgttggctctcatctttccctatcttatccctttttaataacctcttgattaatattctttttactggattccctttctccgtagagtccacacccactgattcttctgacacttttgaaatacaccattctcctttt

SEQ ID NO: 51517 - DNA, 285 bp, Zea mays
  Clone ID: MRT4577_146979C.1
aacttatctttttagatttctacgggattgctgttttatcattttgttcggaaaaaaaaaaagagaaactgaatcttaaaccctagcagaaggcgcttgatttttgatgttgaatccggacacgtaaccctttttttgcggacaagtttgaactaaaaccgggaaaaaaagaacttttcattaaaaccaaaatggcacacaaagaactttccaaacatggactggacccttttgactaaacaatgatgtggcccctccaaacaaaccatttaaaaccatttgggc

SEQ ID NO: 51518 - DNA, 273 bp, Zea mays
  Clone ID: MRT4577_14697C.1
gcggcgggtccattcgggccgactggggttcttcactcgacaagaccgcgatgcaggacccgcgcggcgtgtccgggctgctcctcctggggcctccgatcctgctcctactacctcctcttcctgcaggcgcagcttcgtcccgccgcggacgacgggttcgcctacgggggggccgcgacggctgaaggacgccgtcctcgtcaggcctttctcgacccgctctgccccgacgccgcacgcgcagcgctgagtcgcgcgagcgaacgcgcg

SEQ ID NO: 51519 - DNA, 454 bp, Zea mays
  Clone ID: MRT4577_146980C.1
gcgcaccagagaatattcatcgggtgagatttttaccgggtgcagtacacatccatctatcgatgtgttaacgtgcacgagacgatctcattcatattgccatgccacgtacagcgtgcagtgcgtgtaaagtttttacttacgaccggctatcgacctcacctcccctgcatgttggcaagctgttggaagatctcccctgtttgtgctgttgacactttttgcacggcacctcccgcggttactacatcgccgtcgtctcccgccatctcggttccttcctggtacttctcgtcgccgcccttcctcgcgcccttggtcggtttggcgttcttgtattgcagctcgtactcgaggttccacagtaccgtcccccatggataatccgtctctgtctaactttgttaggcactttttggctttatctgctaactttgttagctatttcgtttta

SEQ ID NO: 51520 - DNA, 706 bp, Zea mays
  Clone ID: MRT4577_146981C.1
acaacaccaacgcctgcgattggtcccgaggccggccggggtgccgccggctccgacgccttccaccgcatcgacgccgctggctccaccgcctacccctcctcgacgccactggtcctgttcacgccttgagccctctactggacgtcaagagaagtgctgccctgcgagttcgaatccaggcagaggctctccatgacttcatctgtctctggctcttcaaaatcacctcgtaagcctccggtgtcgtaccggaaatggatggatgcagataatcctgtttgttgcaagtgctcaggtgttatgttggagctgacctcgtggaccgattccaacccaagcagaggattccttcgttgccaaaagggatcagaagggtgtaatcttttccaatgggaagctgagatcgccagactgagaatgcagctagagaagatcactagtgatcgccagactgaaaatgatttcagctgtagtgtttgttggaatcttgtgtttgctcacgcgcttgtttcaacatggggctgtggtcgacagtagcaaatcttatgaactgatgtagttgttttggtcagcaatggatagccaagcagtggtgaactgatgtaggtattttggtcagcagtggttatgaattgatgtagttcttttggtcagcaatggatagccaagcagtggcgaaaaaaaaaaaaaaaaatttgcggcc

SEQ ID NO: 51521 - DNA, 754 bp, Zea mays
  unsure (1)..(754): unsure at all n locations
  Clone ID: MRT4577_146982C.1
cgggctctgtgccgccggctccgacgccttccaccgcaccgacgccgctggctccaccgcctaccccccctcgacgccactggtcctgttcacgccttgagccctctactggacgtcaagagaagtgctgccctgcgagttcgaatccagaggctctccatgacttcatctgtctctggctcttcaaaatcacctcgtaagcctccggtgtcgtaccggaaatggatggatgcagataatcctgtttgttgcaagtgctcaggtgttatgttggagctgacctcgtggaccgattccaacccaagcagaggattccttcgttgccaaaagggatcagaagggtgtaatcttttccaatgggtgagtccccccccctttcggactttgataaaaaactgatgttacaagtgcaggataagatttatgctttgagagaggccaacaacgatctgagagacagacttgatgaatcgaacgaacgtgtggttgtgcaggaagctgagatcgccagactgagaatgcagctagagaagatcactagtgatcgccagactgaaaatgatttcagctgtagtgtttgttgtaatcttgtgtttgctcacgcgcttgtttcaacatggggctgtggtcgacagtagcaaatcttatgaactgatgtagttgttttggtcagcaatggatagccagncagtggtgaactgatgtaggtatttttggtcagcaggggttatgaattgatggtattcttttggcc

SEQ ID NO: 51522 - DNA, 184 bp, Zea mays
  Clone ID: MRT4577_146983C.1
tgatcacttagcattatatattctaatattgaggttatggccccaattgatagcttcaggggttgccgtgtggtagcatctgagggaagagctacgtacccatcagccgaaagcatctggggaagctgttgcatctcaagttcctagagatagtatacacgcctattgagtgagtcccgaagga

SEQ ID NO: 51523 - DNA, 435 bp, Zea mays
  Clone ID: MRT4577_146984C.1
gcatctggacacaaaagcttttggattggtttcatctgacatggaaagcacccccagggacaaagggctatgctaaacggggccccgagtaaacccaagggccctgggtgaaagccccctgaaagcaacccctacaaaactcagggggggccccaacctgggcttttaaagcgggcatgaatttccaagggacccaattttcacagcccagtcaaagggaaaggcaccccccaaccctggaacaaacatttcctgaaaaacttccttggggtttggcatgctgaaaagctccccaaacaaataaaccaagccttgggcataaaggaaatctggtgaacccacaaaaacttctttggcaaaaagaagttcataccggacttttccaaaagcggggacctccaccttaggaaaaaccccccatatcgagcataccct

SEQ ID NO: 51524 - DNA, 339 bp, Zea mays
  Clone ID: MRT4577_146985C.1
acaatctcatcagcacggatgtttagatataggacttagtacatgaattaatacatagaggcggtgggacacactacaatcgatagtgttgtgtctcgacttatcatatgattcttcactaaacacacgatcgaagacgaagagtatacttcatgtctatatatccaagcacagattggctccatatatatgatcgagagcacaatcatatcatacatatatatatagagatgatgttacagtattagacaaagagatgcgacgaaagtcgaaccgaagcttgggattctcatagctggtgtatgctaaactaatcagctcaaaagaaaaaaagaacta

SEQ ID NO: 51525 - DNA, 341 bp, Zea mays
  Clone ID: MRT4577_146986C.1
cgaaacgggcaaaaataatatagtactacccttccctcgtcgattgaatctggattaaaaaaacaaaaaccctgcacgtcgcaccgttttgtcatttgtggtgaagtgtagtacagcctcccctgctgcaagtacagaagctggatcacaagaagcttgtacttgatgagaaaccagagaaccagaagcacgtccaatggaagggggaaaaaagtctccaaggcagacaccgctcacagatggatcggagtttaatattttcccagcttcacatcatatcatatgtgtttcttgttggaattgtggcacgtaggtagctgtcctcaaaaagcactgcagtt

SEQ ID NO: 51526 - DNA, 243 bp, Zea mays
  Clone ID: MRT4577_146987C.1
ctggaagcacgcgagtggcaaatgagctgggcgctgggaaccctgacggagcggggatcagtagaccgcgtggtgctgaccaaggcggggatcgacgcggacgtatagagcggaagccttatggcggcccggcgcctcgagggcatcgagtacagtaacgataaggaggatataatatgtgatgcagccatggatccattggtcagcaataccgacataactgactgtctacaaagaattcta

SEQ ID NO: 51527 - DNA, 767 bp, Zea mays
  unsure (1)..(767): unsure at all n locations
  Clone ID: MRT4577_146988C.1
gagtcttctgcagagcatcatccatcccatccccaggtcataaacccaagtcggactcgccttcctcctcgccaactactcctctcctctcctccgcgcatcgcaccggggtcacctgaggtagatcacacacacaatggtgaaggctgtggctgtgcttaccggcagtgagggtgtcaagggcaccatcttcttcacccaggagggagagggcccgaccaccgtgacgggaagtgtcaccggactcaaggaagggctccacggcttccatgtgcacgctcttggcgacaccaccaatggctgcatgtcaactggaccacacttcaaccccgctggtcatgtgcatggggcacccgaagatgaaatccgccatgctggtgatcttggaaatgtgacagctggagtggatggtgttgctagcatcaatattactgactgccatatcccccttactggaccaaattcaattgttggccgtgctgttgtcgtccatggtgatgctgatgatcttggcaagggtggacatgagctgagcaagagcactggaaacgctggtgcacgtgttgcttgcggaatcatcgggctccagggctaagatgtcatcttcgccgaccaacgtcgcacagatatgggaaccttttcagaatgcagatttgcaatctctattctaaataagcacatgatctttgatcacttggtagtgtgcaccagtcgngtcaatttcctagtgttactctggaacttatcgctgtcatttggctatcgag

SEQ ID NO: 51528 - DNA, 469 bp, Zea mays
  Clone ID: MRT4577_146989C.1
caggtcgactctagagaacatcatatgacatggtttggacaaactaataatagaatgtgattgggcattatgggataggaaggagcgtctgtggctccttcgttgtttagtggtggtcaatcacacttagagctcggccctcggttcgatgctagtcttctttgtcggctagtttgttgagtaagctgttgtggcacgtggctcatcctagagatgtattcttgtattttcttctattatattaatagaaacatatactctatctatactctatctgtttataaatatatgacattgttaaattttctaaaaaaatatatgaccactcgtcttatttaaaaaaataatgagttattatttatcttttgagatccattttatcagtgcttcatttaaaatttacatttttgaataatattttgaatgacacaagggtcaaatttttcaaaaaaatcacagtatcatctat

SEQ ID NO: 51529 - DNA, 229 bp, Zea mays
  Clone ID: MRT4577_14698C.1
ctcgcccagcgcggggcctcggcggaccctgaacttccttcttcactgcggtgcgctgcacttcttccctcccggtctcccgagcaagctgaaaatttctggccggtccctggttcctcttaaagggacttccaaactgggggggaaaagcgaccgggtcccaactggtctctcgtgggtcccatcattgccggcgccgggggccaacgcatttggtccggcgagacct

SEQ ID NO: 51530 - DNA, 313 bp, Zea mays
  Clone ID: MRT4577_146990C.1
acgacgaggagcttgggaagctgttgggcggcgtgaccatcgctcacggcggtgggctccgcaatatctaccctggtctgctgcgccaagaagacagcagagaaggcgtccagtggcgggagcaaggttgcaaagtcgcccaagaaggccgacaagtgccctaagaaggcatacactgactgtccagagtgatctgatgtttagcagtaccttgttaccagtattcgttgattcgtaggctgcaaattgtacaaatgttcttgtatatgtatgtgtcctgcttcaaggtgctctgtgctatttataatggaag

SEQ ID NO: 51531 - DNA, 383 bp, Zea mays
  Clone ID: MRT4577_146991C.1
acttaagggccaattcttaaagactcagcgcgtaatagaggcatttggatttttacacaggaaggttgtttatacagacaaattgttattaaaagaatcaggcaaaactgtaccaaacatgcgacacgttacctatgtgcaaagggtagggatacacacgatgcaactatgacttgaatgtctggaggactcagagttaaaatgcgggtcttggatttggcggccgccccatttggtattgggctggcgagctcgcttactactttctgggcacaggaacattcctagtagtagcctgcatgagttcatgacatgacaactagacgaccagaccatcggagtctggagtttacagtaaggttgctgatcagagggagtgagac

SEQ ID NO: 51532 - DNA, 1107 bp, Zea mays
  Clone ID: MRT4577_146992C.1
ccccgcgtccgccccgcgtccgcccacgcgtccgtggcaagccgaggtttgtcctgcgtggtgcggcttgtctctgggccggctgctcccacaagctatctgagccgctgctccatttgatcggacagtcgacaccgtccgagcggcgatcaaaaccaccttcgacgactacgccgaaaccctagcctctatctcattccactccgacattcacgtgcagctgtcgggagcaggcaatggcgccggatctaagcgaactcgccgccgccgctccagcccgtggcgcctacctcgccggcgtcggtgtcgcggtcctcctcgctgcctccttcctcccagtagccgagtcgtcctgcgtgcgagataactcattggtgagagacataagccaaatgccgcaaagcagctatgggattgaaggattgtcacatataacagttgctggtgcgctcaatcatgggatgaaggaggtggaagtgtggcttcagacaataagtccaggtcaaaggacgccaatccacaggcattcctgtgaagaagttttcactgtcctcaaagggaagggtacgctcttgatgggatcaagctcactaaagtacccagggcagccacaggaaattcctttctttcagaataccacattttcaatccctgtaaatgatccacaccaggtttggaattctgacgagcacgaagatttgcaagttcttgtgatcatatcgagaccgcctgctaagatatttttatatgatgattggagcatgcctcatacagccgcggtactgaaattccccttcgtctgggatgaggactgcttcgaagcagcaaaagacgaactctaggtcacaagtgtttcctgcaatttatctgcttcatccatgatcctgctggtgctggactactacaattctcagcactagttgtaataaagccagtgcgcttttcatgtataattctgtattgtggctcgcgaaaataaaatttggcaacggtttatgaactaaaaaaaaaaaaaaaaaaaaaaaaaaaaaaaaaaaaaaaaaaaaaaaaaaaaaaaaaaaaaaaaaaaaaaaaaaaaaaaaagggggcgcgccgttttaaaagaac

SEQ ID NO: 51533 - DNA, 271 bp, Zea mays
  Clone ID: MRT4577_146993C.1
caccaccgacgaccccgacccaccagcacaacttttaaggccttcagcgctttcttcaccaccaactaccacccaccaactaacgtcatcgaatagatcacagatctaacaaccgatggaggtgttcttaacacagtattccagaaagcaaaatatgatgctatagcgccatccgacagcctccccttcgatgatcttcattacaaaggtacacttccttagactgcttaacctctctataccaccccatgaaaataactctattttctca

SEQ ID NO: 51534 - DNA, 405 bp, Zea mays
  Clone ID: MRT4577_146994C.1
ggcgtggggggtttttttttttttttttttttttttttttttttttttttttttttttttttttttttttttttagcaaaaaaaaaggacctatgtttattcattccacagttagaggccaatctaccaaaaaggaaaacatccacatcctaaacaattttgggggaaacaaattatttccctcgggggaaaaccgcctccatttaaaacctagcaggcccccttatttggtggcagaaaaatttggggaaataaaatcgcctccggcacctggtttttaaaaagggcccggtgaaccagcaaaaaaagcattagctgcaccaggtcctgggcctggggcaccctggtgggtggaaagggcccgccccacctgcatgacttcctggttaaacgcactccccgggt

SEQ ID NO: 51535 - DNA, 307 bp, Zea mays
  Clone ID: MRT4577_146995C.1
ggggcacaaaaaaaggttttgtacattttattaaaaggttggcgattaaaaagggtttccagggggggataacgttgctacatccaaatagggggtagcatgcctagcaggccaaactttttcccttacaggagggatcccattgccgtttaaaacatttttggtgccttgaatacataaacagcccaaagggttttctggcggggtttggggttttccaatttagggaattccgtttttccccggtgcccaaagtttatttttttgagggggggactggggccccggtaaaaaccatggaattccc

SEQ ID NO: 51536 - DNA, 472 bp, Zea mays
  unsure (1)..(472): unsure at all n locations
  Clone ID: MRT4577_146996C.1
cacactgccatgggcggcaggggcaaggaggaggaggagcagcagcagcagcacaaggaggaggaggnggnccaaggagaagngcgagncgncgnccagcaggagacggcggcggacgaggaggccgagncggcgcnggngcgcaagaacnccggccnggccgccgggggggggaggcngccgncgcngagcccgncgccggaggggaacgcgcncnncaccgaccccgncacggcccgcancccgcgcagcaccgnggacgnggagcgccngggcccggagcngcagcgcaagcgcgcgggccncacccgccncngcgccgacgccgaggcgcngcnggaggcgcacnacnccgaccngcnggccgccnncgacaacccgcnggaccaccngccgcncnnccccaacnncaccaacnaccnccngcngagccagcnggagcacggaccgcgggcgcgccacgacccgggcc

SEQ ID NO: 51537 - DNA, 639 bp, Zea mays
  Clone ID: MRT4577_146997C.1
attgggtacctcgaggccggccgggtaaacacttccctgcagacaccacatcccaagccagtagcacaggactacgagcagtcgtacatgagcgtcaacagatacgacggtcgacatgtgtcgcacgcaatgtgccctcgtgagggcctcggttgctgaggggctgctgctgttaacaccgtcgactacctcgtcaggccattataaactgaggcgatgcgatgtctctcatggaactctgcctctcctaccggagcagaactggagaccgacactcttaacgctgctgaagagatctctggaacctctagatggccagcatgaccggctcaccacataatcacccaggctgcaacatggctcaagagcgtcgctggggtcatgaacgcgctataattcatgaactgcgtattaatgctctaaaagttacgtatgaatctacataagaccataatggcctccaccgactggaccagtattaagtagcagctaaacttatcacgactgcggacgttagagcattttacgaattgtttatggcccgtacgcctgcactatcgtcaatcatcagagtcatggtatctacctatcgactcgcgacgttaatactgacctgatatactgttatggaatactcat

SEQ ID NO: 51538 - DNA, 127 bp, Zea mays
  Clone ID: MRT4577_146998C.1
cttgtaagggactaggcgtcactccagcaggataactcagtttccccgaaatttggatgacgcctagttatctactctggaacgtgtccttgtaaatgcgtcaatggtcaatctgagtttttttttc

SEQ ID NO: 51539 - DNA, 429 bp, Zea mays
  Clone ID: MRT4577_146999C.1
gcgcgttgaggccgagctccacgagcccaccggcaggagcggttcgcttatcgtctccgcctgcgggttcggcttcgtccccgccgagttcggcttcctgtttcactccaggcagtgggaagtgggaaccacccttcgcgccggccaccgtggaggcgtacgtgagcctgcaggtggtgtttggtttgatgaatcatattcctcaaatttggtagatgagcccattcatattagaaatttggtggatgagcctattcatattagtactaactaactatgagaaatgaggtgttgatggatcaacttattacattccacaaaccaaatgaaaaaaagtgaggagtgagaactagctcgttcatcaaagaacaccctataaaagaattgtcattgacatcagcacctacgaatcagccacgctcgaagtag

SEQ ID NO: 51540 - DNA, 343 bp, Zea mays
  unsure (1)..(343): unsure at all n locations
  Clone ID: MRT4577_14699C.1
ccctataattttccccccnnaaaaaaagcaacacggacgcaacaaaaaaatnagggcacgaacacacagccactcccaaaagagccccgccaaaaattgcgctagagccaaggggaaccagagctaaagccgctggaaccgaaacagactaccaagcatatataacccacaaaacaacatccaactagaaggatccaaaaaccaagcaaggcaacagggaccaacacaacacgcccagacccaaaaagggacacacatacaaacaatatcctacatactatagacggggcaaggaccaacaaggacagagacccgaccccgaagcacccaattacaaaccaaa

SEQ ID NO: 51541 - DNA, 411 bp, Zea mays
  Clone ID: MRT4577_1469C.1
aaaggtgaaagccatgagaatttcctcttatcactctgcaattgattcagctttcaggacaccggaggagtcagcagttccagtttatttaagctatgaattaaggggacggtagtaggcctacgctcagctatgtacctaacgctaatgccaacaaaatagcgtggcattaggggagcatctgatatgagggagccacgtggcgaaagaggaaaaatttttatcaagcaaacaatgcttgccctaattgcatagcatttacttcgtagctcacagcccttcatcagtttatataccagccatgacatgatcacacaggctctcagttctcacttgtgtgctcgaaatggtctctattctataacaatgcaggcatgcttttattgagcatcaataccattcagcttaaaa

SEQ ID NO: 51542 - DNA, 726 bp, Zea mays
  Clone ID: MRT4577_146C.1
ctctcgccgtcgtcttcctcctggaacccccgaatcctcctcatcttcccccctttccctcttatcgtcgtcgagatgtaccatcccacgagaggcggcgtccgcggcgggcgagatcaattcaaatgggatgatgtgaaggttgacaagcaccgggagaattaccttggtcatagtgttaaggctcctgttggtagatggcagaaagggaaggacttgttgtggtatacaagggataagcaatctgactcagaagacgctatgaaggaagaaattaggagagtgaaagaggaggaggaacaggccatgcgcgaggcacttggcttagctcccaagcgtagcagtcgaccaaagggcaatcgtttagataagcatgaatacgctgagctaataaagaggggatctaccgcagaggatttgggagccggccatgctgaagcagcacaagtgcaaggattaggtttatacaaggctcctcacaacgaggaagaaccaagctctcttagtcctgaccctcctggaacggagcctgagcaggttgactttgcacctgcaacgaagcaggaagattctgaaggtgataggaggggaaaaaggcggggcgaagagaggagaggggacagagaaaaagagcggaggcgtgaaaagcactatgagggaaaagagaggaagcgagacaagtatgagagtagacacgactcggaggacagggagaagcgccaccgc

SEQ ID NO: 51543 - DNA, 254 bp, Zea mays
  Clone ID: MRT4577_147000C.1
gaccattaaacgcacagcagcaaatcactatcactggctgcggtgaaccatataatacccaggggcaggagatccgttcataacataactggataactgcaaagccaaatacccgattcagcgagaaccaccatagggcgagctaacgcaacataacctacatgcaatttatttatgaactgaccaagatgcaggggcaggtagaaattctatggaggcggactacacaagatgagcaccgtgcactggaatgc

SEQ ID NO: 51544 - DNA, 1346 bp, Zea mays
  Clone ID: MRT4577_147001C.1
cattgggtacctcgaggccggccgggggcaagttccatcccatcccgccacgaaattctccacgctccgatccaatcgcaacaatgaagttcggcaagagcctcaacaaccagatcgtggagacgctcccggactggcgcgacaagttcctgtcctacaaggacctcaagaagcggctgaagcagatcggcgccggctctggcgagcggcggagcaagcgccagcgggtgggggacgggcgcggcggatcctcgccgcctgcgatgaccccggaggaggccggattcgtcgcgctcctcgacgccgagctcgacaagttcaacgccttcttcctcgagaaggaggaggactacgtcatccggctgaaggagttgcaggacagggtggtgagcgccgcggaggtggggtcggcggaggagctgctgcgggtgcgcaaggagatcgtcgacttccacggcgagatggtcttgctggagaactacagcgcgctcaactacaccgggctggtcaagatcctcaagaagtacgacaagaggaccggcgcgctgatccgcctgcccttcatccggaacgtgatgcaggagccgttctgcgccaccgacgtgctgtacaagctcgtcaaggggtgcgaggagatgctggaccagctcctcctgccccggaaccagcagcggcccgtgccgagcgacaacggcggggaaggagacagcgacggcgacgacgacaagcaacgaccggcggagccaggcgcctcatcgctgcccagcggcggcggcggtggcgctggcgacatggagctggaggagatcgaggacatggagagcatgtacatgaagagtacggtggccgcgctcagggcgctcagggagatcaggagcgggagctccacggtgagcgcgttctccctgccgccactacggtgattgacacgttgtgttcggttcagtagcgaagcgagacagaacggggccgactgcgctgttgctgtaggtagtgtttggttcaaagaagacacgaacaaaatgaaagaaaatctgtaaaatgatagtaatattcatctagtattctcttttctatgtatatcttgtctgtgctgaacatccttttataagatacttttaagacaaaaccaaatcgtggtctcgccgcctctttctgatcccccgcccgccccgcggactaaattgggctgattttattcgctactgtgaattgatcatgtggttttcccgatatacaaccttatgattccatgatgcttctgattgtcataatgaaagggagaaacaggttttggctcaaaaaaaaaaaaaagggcggcggccgctcgcgatctagaacctcga

SEQ ID NO: 51545 - DNA, 818 bp, Zea mays
  unsure (1)..(818): unsure at all n locations
  Clone ID: MRT4577_147002C.1
accggaaccgccattcccggnatcccgccacgaaattctccacgctccgatccaatcgcaacaatgaagttcggcaagagcctcaacaaccagatcgtggagacgctcccggactggcgcgacaagttcctgtcctacaaggacctcaagaagcggctgaagcagatcggcgccggctctggcgagcggcggagcaagcgccagcgggtgggggacgggcgcggcggatcctcgccgcctgcgatgaccccggaggaggccggattcgtcgcgctcctcgacgccgagctcgacaagttcaacgccttcttcctcgagaaggaggaggactacgtcatccggctgaaggtaattgattgaccatacccattcctgtcgtgatccgattccatccccccctcgtgttgtccgctccctcgcggcggcgcgaatagaatagtggtctgattcgtgtctcggtcgtcggaattgagcgggcgcaggagttgcaggacagggtggtgagcgccgcggaggtggggtcggcggaggagctgctgcgggtgcgcaaggagatcgtcgacttccacggcgagatggtcttgctggagaactacagcgcgctcaactacaccggtgagacgcatctcactagggatgagagagtttttatttttatttcaaaaagatagagaggggaaaaacaatcgtgcagcgttagatttcaagattcattctaaacgtactgacatagagcaatggatgctctgggttaaccagggctggtcaagattctcaaggagtacgacaagaggaccggcgcgctgatccgtctgctc

SEQ ID NO: 51546 - DNA, 254 bp, Zea mays
  Clone ID: MRT4577_147003C.1
ctgacgcgtgggctgacgcgtggtctgacttcttgtctcctatccttcgcccgccaacctgcgcaggtgaaggcttgtttcgcgcgactgctgtgacacgaggagcagcagcaacagcgcgccatggacccgtgccacttcgtgcgagtgctgttcgacaacctctcgctcagaatgcctgtggctccgaccgccgccgtggacggcgcggacgttcacacgtccacgtctgcgtgctactgcaatatccagct

SEQ ID NO: 51547 - DNA, 398 bp, Zea mays
  Clone ID: MRT4577_147004C.1
tatggagctggaggagatcgaggacatggagagcatgtacatgaagagcacggtggccgcgctcagggcgctcagggagatcaggagcgggagctccacggtgagcgcgttctccctgccgccactacggtgattgacacgttgtgttcggttcagtagcgaagcgagacagaacggggccgactgcgctgttgctgtaggtagtgtttggttcaaagaagacacgaacaaaatgaaagaaaatctgtaaaatgatagtaatattcatctagtattctcaatctcactgctcccacaaaacttaaggggtgcatcgaatgcacaagtgacctccgctctacaaatcaatttctcgctgcctgtttctgatccaactcccgccgcgaaaattgccttgc

SEQ ID NO: 51548 - DNA, 485 bp, Zea mays
  Clone ID: MRT4577_147005C.1
gggaacaacacaaaaggggttttttttttttttttttttcccaaacagggattttttgccctcaaaaattttttttggacaacttgaagccaaaccattccttattttcaaatgcattatacatggcccaaaggggggggcgcaaccaatgggttttcttcttcatttccctccacctgggccattaatttttttaaaggggggggggggggggaacctttttttttttcaaatggacccgataaacacccccaaatggcttcaaccattttttttttttgccaggggactttttccgattttcttggaaaattaacttcatgaaagagctttacgttgttttttttcttgacccccctttttcattaaaattatttcctttgacaaacttttttttttttctggaatttggggaaaaacttgcccacacctttttatgcccctgtttgaaaacatttttttttaattgccggacattttttttt

SEQ ID NO: 51549 - DNA, 475 bp, Zea mays
  Clone ID: MRT4577_147006C.1
aaataaatgtgtttcttttttttttatttggtccaagttgcctaaagggggcccaggtacagcctttcacccccagcgaagagacactaccggtggtcaagccctatatatacacatgggcactgccacgaaaggggcaaccacggaacaaaaacggccactgcagaccaagaggacccccaaacacacaggccgacgcaaaaagcagatggggcgaaaaaaaaacggggggaaacaaccatctaaaggcaggaaggctcgaaatggagggggaccacggaaaaaggggggaccagggaaaatggcgacgccccacgggcaagggggcccaccgggacgggggcgagacccggctcgaagggggggaccacgcggacgcggggggcaacccggggaagcgggaccggaaccggaaggggaaccacccctccctaaagggagccggatcaaagcggggggcaaacaaggccaaagg

SEQ ID NO: 51550 - DNA, 1124 bp, Zea mays
  Clone ID: MRT4577_147007C.1
ctggccggggacacgcactctcggcaacggatatctcggctctcgcatcgatgaagaacgtagcaaaatgcgatacctggtgtgaattgcagaatcccgcgaaccatcgagtttttgaacgcaagttgcgcccgaagccttcgctcggcgggcaggtgcgcggaggggccaagcgccacacgccgacgcgaaccaaccaggcaaccagatggtagtaggttagctaagctcgggatcggaggagaggtgccccgcgaccctgacgatgacgatgcctcgccgcgcccttctcttcgccgcggtgctcctcgcggcctccgccgccgcggtctccgggttccacctcgccggggacgagagcggcctcgtgaggggcgtgctcacagcggtccgcgagcgggccgaggccgaggccgaggacgccgcgcgcttcgccgtcgcctaccacaacaggaaccagggtgctgctttggagttcactagggtgctcaaatcgaagcggcaggttgtgaccgggaccctgcatgacctgatactggaggcagctgatgctggaaaaaagagtctgtacagagcaaaagtctgggtgaagccgtgggaggatttcaagtccgttgtcgagtttcgccttgctggagactctgaatctgaacccgagccttctgttgcttctgatgaaggctctgggcaaggagttgccaagctctctcttgaagcagacatcatacacgaagaggctcacctgcacaccattgagaatgatggactttccagcgatttcgcatcatccgcttagacatacttggtgtgactaggattccaggcaaggatggaaagcgtgaaagtttaaaatgaaggtttaggtatttagaattctaaatagtaggttgctgtcaagctgaaatgctttgcctctatcggaatatgtatgttttgtttggaacgtaggagcatagaactgtatatttcggtatttcacaccgttcatttccatgtctgtatataagactatctccagccatattctcccatatatatttcactacctatactttttattatattttacatttttactacattcattaaaagattcttcttctaaaaaaataaaaaaagcggcc

SEQ ID NO: 51551 - DNA, 335 bp, Zea mays
  unsure (1)..(335): unsure at all n locations
  Clone ID: MRT4577_147008C.1
ggtccattcgcggtttgcctctctgcctgcctccctcaatcctccctaagattgcctggcggaccgctaccgacgaccgatcgccgagttaaggaagcattcgcctcttcgacaaggacgggacggctgctcaccaccaaggaacttggaactgtgatgcgctcgttggggcagaaccctactgnggctgngcttcnggacatgggggacgaggttgctgctgctggcnctggaaccgtcgacttccctgcgttgctcgccctggtggcgcgcgtgatggcggtcgccgcctctggggaggagctcctggtggccttccgcgtgtcccgccgggg

SEQ ID NO: 51552 - DNA, 196 bp, Zea mays
  Clone ID: MRT4577_147009C.1
cactaatcaggctaaggcgatgatgggactgggtattccggcctgtacttagttaattttgctccttctcaccgcagctaatgtactcgacgcatgttcgcgtgcgttcatgtatcacatgtactaagggttggagacgcgctttgctgcgccgttggtgttgtttggtttcttaaaaaaaacactccgctttgac

SEQ ID NO: 51553 - DNA, 403 bp, Zea mays
  unsure (1)..(403): unsure at all n locations
  Clone ID: MRT4577_14700C.1
gcacgcgtgcgctcagcctgaatcctgtatagtgtacgaccgtcgctttttttttttaactctaaatgatatgattaggcaacaaggataatggtgatatatttgcccacaattcttaaatttnnnnnnnggggtgttccaatgcatttacattgggaggcagcagcgggtggacaactatatataagtggatcatattatgcttaaaattataaaaaatggagagaaatgacatgtaacctagaagtggtgggaaaaagaattcggggaaccacaaagggataggggagaggagggggggaccatgatcatttcaaaactgagacatgctgagtgctgtgagtaactggcactgtgtgatcagatcataaataatgagatatgcattacgtagtggagaaaa

SEQ ID NO: 51554 - DNA, 352 bp, Zea mays
  Clone ID: MRT4577_147010C.1
gagctctctatttcggcggccgccctttcttttttttttttttttttttttttttttttgggaaggaaaacaaaattaaactgaacatcacatcaattcactaacaggggtaccaaaatgacagatactactggtccatttaagtttcaacctacgacagatctccctgagacacaattggagtcacccacaactggatgctctatagggtagggggataacgcacttcgtggcaagcaatcacgccttctggttgtcgacataggtgaggccgaacttgccgcatcagtggcggccgaaggggttggacatgaaaacccccgggccgcactctgagttggggcactccttg

SEQ ID NO: 51555 - DNA, 1059 bp, Zea mays
  Clone ID: MRT4577_147011C.1
cggcccggggcgcgtcgccgctatggtggaggagctggtggtggatacggtggaggtgcaggaggtggcgccggaggcggctacgcctctggtctgggtggtgcggtcggtggttgctacggcggaggcgccggtggaggctacggcggtggtgcaggtgctggctctggcggcggcggtggttatggtgctggtggcggaggtggaggtggcatcggcggcggtgtctgaataactgaataagcgtctcacatgcatgcatggtggtgcaagcagaagcaagtgctcgaactcgctcggtattcccttcgcaggcgtgcgtggacgtggagtcgagctataccgatcgatatccggatcatactctctgcgtagcgaatagcgatcatagtaataacagaataaggatgctgcaatacgtctaatcagtcatcattatacgatggtttatacggtatatatacactgcgttggtagcaagctgaaagattactttgtatcgtactattttaattatattttgtggagataaagaaattattatgagctaaaaaaaaaaaaaaaaaaaaaaaaaaaaccggtttttttccccttgggttggtagcaagctaaaaaattatttggtatcgacctatttaaattatatttgggggagataaaaaattttttatgggctccaaaaaaaaaaaaaaaaaaaaaaaaaaccggtttttaccccctggttgggaacaagccaaaaaaataccttggaacccccctttttaaatattttttggggggaaaaaaaaatttttttgggcccccaaaaaaaaaaaaaaaaaaaaaaaacggggtttttaccccccggggggggaacaacctaaaaaaaaacctcttggccccgcccttttaaaaatattttttgggggggaaaaaaaattttttttgggcccccaaaaaaaaaaaaaaaaaaaaaaaacaggggatatacccccccgggggggaacgcgaggaaaaaaaatttctttgccccccctttaaaaatttttttcgggggaaaaaaaatttttttggggcccc

SEQ ID NO: 51556 - DNA, 1028 bp, Zea mays
  unsure (1)..(1028): unsure at all n locations
  Clone ID: MRT4577_147012C.1
tgcaccatttgtcataaaagtacttttataaaagtataaatgtattaacagttcatttgtattttaacaaaaacattggtcaaagttatattttggagaccgtgtcgttgtcctaaacgacaactaataggnaaaccggagggagtagtagnaaagctacgagcactcgccgccactcaccagcaaattcccaagccgccccttcccccatctctttcgcgacccatttgatcgattcctgatggcgcccaaggccgagaagaagcccgcggagaagaagccggcggaggagaaggccgagaagaagccaagggcggagaagcgcgtgccgagtaaggagggcggcgagaagaagggaaagaagaaggcgaagaagagcgttgagacgtacaagatctacatcttcaaggtgctcaagcaggtgcacccggacattggcatctcgtccaaggccatgtccatcatgaactccttcatcaacgacatcttcgagaagctcgctgccgaggcagccaagctcgcccgctacaacaagaagcccaccatcacctcccgggagatccagacctcggtgcgcctcgtcctccccggcgaactcgccaagcacgccgtctccgaagggaccaaggcggttaccaagtttacatcctcctagggtgccgccgcacgttgctacgatcctatttaattctcacatttaggcctgtgctaggttgctcctgcaacaatgtagaatttgttataattgctgaatgaatcagttacccctgttgagttttctaatatattgtaatcttgctagtataatctgcttcaaatcttgatggggtttccattcgtcgtttaaaattgcgacaaccaccaatcttttacccgtcgaacctacttctgaattgtgattgcctggagataaaatgccttgtatcatgtattgccctcagggttttataaactgctgacgggtaaacactgcctgtcacataaatgctttgtgaggtacagttaaataatcggctgtcattgctata

SEQ ID NO: 51557 - DNA, 678 bp, Zea mays
  Clone ID: MRT4577_147013C.1
acgacgagcactcgccgccactcaccagcaaattcccaagccgcccctttccccatctctttcgcgacccatttgatcgattcctgatggcgcccaaggccgagaagaagcccgcggagaaaaagccggcggaggagaaggccgagaagaagccaagggcggagaagcgcgtgccgagcaaggagggcggcgagaagaagggaaagaagaaggcgaagaagagcgtcgagacgtacaagatctacatctttaaggtgctcaagcaggtgcacccggacattggcatctcgtccaaggccatgtccatcatgaactccttcatcaacgacatcttgcgagaagctcgccgccgaggccgccaagctcggcccgctacaacaagaagcccaccatcacctcccgggagatccagacctcggttcgcctcgtcctccccggcgagctcgccaagcacgccgtatccgaagggaccaaggcggttaccaagtttacatcctcttagggtgccgccgcacgttgctacgatcctgtttaattctcatatttaggcctgtgctaggttgttcgtgcaacaatgtagaatttgttataattgctgaatgaatcagttacccctgttgaagttttctaatatattaatcttgctagtaaaaaaaaaaaaaaaaaactcgagcccgg

SEQ ID NO: 51558 - DNA, 118 bp, Zea mays
  Clone ID: MRT4577_147014C.1
attcaaacagcagcgtagagctgtgcgggagggtagccctcgtaccgagcagttagtttgaatactctcctttactgccgctgccgctcactttcccatggaagagttaattgcctcc

SEQ ID NO: 51559 - DNA, 743 bp, Zea mays
  Clone ID: MRT4577_147015C.1
ctcgaggccggccgggccggaaaaaaaactagtcgaaagctacgaacactcgccgccactcaccagcaaattcccaagccgccccttcccccatctctttcgcgccccatttgatcgattcctgatggcgcccaaggccgagaagaagcccgcggagaagaagccggcggaggagaaggccgagaagaagccaagggcggagaagcgcgtgccgagcaaggagggcggcgagaagaagggaaagaagaaggcgaagaagagcgtcgagacgtacaagatctacatcttcaaggtgctcaagcaggtgcacccggacattggcatctcgtccaaggccatgtccatcatgaactccttcatcaacgacatcttcgagaagctcgccgccgaggccgccaagcttgcccgctacaacaagaagcccaccatcacctcccgggagatccagacctcggttcgcctcgtactccccggcgagctcgccaagcacgccgtatccgaagggaccaaggcggttaccaagtttacatcctcttagggtgccgccgcacgttgctacgatcctgtttaattttctcatatttaggactgtgctaggttgttcgtgcaacaatgtagaatttgttataattgctgaatgaatcagttacccctgttgaagtttctaatatattgtaatcttgctagtataacttgcttcaaatcttgatggggtttccaaaaaaaaaaaaaaaaaagcggcc

SEQ ID NO: 51560 - DNA, 690 bp, Zea mays
  Clone ID: MRT4577_147016C.1
ccggccgggactagtcgaaagctacgagcactcgccgccactcaccagcaaattcccaagccgccccttcccccatctctttcgcgccccatttgatcgattcctgatggcgcccaaggccgagaagaagcccgcggagaagaagccggcggaggagaaggccgagaagaagccaagggcggagaagcgcgtgccgagcaaggagggcggcgagaagaagggaaagaagaaggcgaagaagagcgtcgagacgtacaagatctacatcttcaaggtgctcaagcaggtgcacccggacattggcatctcgtccaaggccatgtccatcatgaactccttcatcaacgacatcttcgagaagctcgccgccgaggcagccaagctcgcccgctacaacaagaagcccaccatcacctcccgggagatccagacctcggtgcgcctcgtcctccccggcgagctcgccaagcacgccgtctccgaagggaccaaggcggttaccaagtttacatcctcttagggtgccgccgccgccgcacgttgctaaattttctcatatttaggactgtgctaggttgttcgtgcaacaatgtagaatttgttataattgctgaatgaatcagttacccctgttgaagttttctaatatattaatcttgctaggaaaaaaaaaaaaaaaaaaggccccta

SEQ ID NO: 51561 - DNA, 716 bp, Zea mays
  Clone ID: MRT4577_147017C.1
tgggaccctcgagccggcggggcctctaaggggttgctttcctcccctcggtggttcggggcgggaggttctcgggtcggttcgggtgacggatcagatggggcgacgatgcagagtaccgctgattcgaaggaggacgagcctggtccacggacgaccactccctgcacaacgccttcagcacctacggcagaggtactcgaggccaagatcatgctcgatagcgagacgcagaggtcaagagggtggagatggagcacattcacaaccaaggaggcgatgaggacggccatataggccacgaacggttaggactttgaaagaagcaaaatgcaaagaaagaacggcacacacgcgcaccggccaagaacgaggaggaggtcgcggctgcggcggtcgacgactacgccggctttgccttgcaggagcacgacgagaagaagaaggaccactacgaggccgatgaggcctgcggcgataataagcaccacttcttcggctgattgatcctccagcatcgtcgtacctgcgcgtgagctacacgtacacgtgagagtgatatcgagcacccaccgtggtgtgcgcgccgacctatgtatgctctcgagtgacgcacgaataagcgtagctacgtaatctatcgtatgtatacgtgagagtatgcatgtgcttgagtatgatcggggaacgaggaccgagataatgtatgcagctct

SEQ ID NO: 51562 - DNA, 1484 bp, Zea mays
  Clone ID: MRT4577_147018C.1
cattgggacctcgagccggccggaagaagcaccgtaggtctctggtgcctatctcacatcgtgcttgactccccacgttcgaaccccatgaccagcgcagctcggccagggcgctggatcccgctggccatggcgctcatccctccctgctgttagatgcacagaacgtctctagctctccatagatggcagccagctgcgccctcacctcctcccatggtgacctcgcccatggcggctccccctgctcggcgtactcccctctgcaggagctcgcccagcccctctctgctggtgaccgagccatctccctggacacaccccttcccttgctacttcctatggttgccctagccgacctctcccatggcgtaggaaacagcagcacctccctccatggacgtcctaggtcctcgccatactctccgtcgacctcgtcatcaccacggccacaacctctcttccgtcgttgtggagaccccgtcagcctcgcgtgctgtccgatccttgcgtcgcgcccagggaggttacatggaagaagaagaaaagcccagagcgatgctccccatgtgctcgacgaaaagccagaacgggagatcatcggtttttttgtggaattcgcgtcgaatttattaacggtgagcaccgttgctgtggactgtttgtttgcttattttcccatccggcgcttgtacttgatttaatttgtgtgttttatgtgtgatattggcgaaaagaaatattaggatgtttgggtgaagaagaaatagtcgaaagctacgagcactcgccgccactcaccagcaaattcccaagccgccccttcccccatctctttcgcgccccatttgatcgattcctgatggcgcccaaggccgagaagaagcccgcggagaagaagccggcggaggagaaggccgagaagaagccaagggcggagaagcgcgtgccgagcaaggagggcggcgagaagaagggaaagaagaaggcgaagaagagcgtcgagacgtacaagatctacatcttcaaggtgctcaagcaggtgcacccggacattggcatctcgtccaaggccatgtccatcatgaactccttcatcaacgacattttcgagaagctcgccgccgaggccgccaagctcgcccgctacaacaagaagcccaccatcacctcccgggagatccagacctcggtgcgcctcgtcctccccggcgagctcgccaagcacgccgtatccgaagggaccaaggcggttaccaagtttacatcctcttagggtgccgccgcacgttgctacgatcctgtttaattctcatatttaggcctgtgctaggttgcttctgcaacaatgtagaatttgttataattgctgaatgaatcagttacccctgttgaagtttctaatatattgtaatcttgctagtataatttgcttcaaacctggatggggtttccattcgtcgtttaaaattgccacaaccacc

SEQ ID NO: 51563 - DNA, 603 bp, Zea mays
  Clone ID: MRT4577_147019C.1
acctatcaccacaccccatagaacgacaaacgctagccgatctgtcgccacagagtgtccttgatgtcgcaacaatttgcaatatagagaacagatgaggtcaaaacactaggcatcatccaggtgctgatgccagctgcatagcagatgccagccttggccagactgtgtgagaaacacgtgcacactacaccaagctgggcgctacaacaacacctctctgctattctacaagcgccggaatgacatacccactaggagggcgcatgcgatctttacagagtgccaggaatcctactatggaccatcttgccacagaacatgcagagtgggcaaaccggtgctgatgagatgaacttccgccatgagaactgtagctcaagctgaagcatgcggcgcatagccatcgcgtgcaggagaactacaccgcggatgcggagcatattgaatccttgttaaatactgtgacaaaatacatgctgaactgggatccactcgccggacgccaaggaggcatctccctcgatgctgcatccataaatcgtgatggcgaccctatcagatactagagattggcgaggacattccgatgctgctgattgc

SEQ ID NO: 51564 - DNA, 838 bp, Zea mays
  unsure (1)..(838): unsure at all n locations
  Clone ID: MRT4577_14701C.1
cattgggtacctcgaggccggccgggtatgttgtctcctgtcactttatggcgtgcataagacatccaaggattcccgagaaagaggtctctacgagaatatcttaaacctcatgttgacgtatccagcattgcgcattgcttacatcgatgagaaagaagtacaattacgaaatggtaaaatagagaaacagtattactctgttcttgtgaaaggtgatgatgaggaaatctaccggataaggctccctggtaaaccaacagaagttggagaaggcaagcctaataatcaaaatcatgccataatcttcactagaggagaagcacttcaagcaattgacatgaaccaggataactatctagaggaagcatttaaaatgagaaatctcttggaagagttccttcttacacatggaaagtcagagcccaccatattgggtgttcgggagcatatattacaggaagtgtttcatccctcgcctggtttatgtccagccaggagaccagcttcgtcactattggacaacgtgttcttgccaaccctcttaaggtacgatttcattatggccatcctgatgtttttgatagactctttcatctgacaaggggtggcataagcaaggcatcaaagattatcaaccttagcgaagatatnatttgcaggtggctgttctcacagtgtatgtatttttatatgggaggttatacccttggtctgagtggcttagaaaagtcaatactgcaagatccaaatatccaaaacataaaaccattttgaaaatgcacttgccacntcatctgtattccaacttgggatgntgctcgttctcccatggatg

SEQ ID NO: 51565 - DNA, 460 bp, Zea mays
  unsure (1)..(460): unsure at all n locations
  Clone ID: MRT4577_147021C.1
aaaaaaactgggggggggggggggaaaaaaaacagnnngagcgggagcacaagggagnagnggagcccaaggaaaacaccaccaacnacagggggggcggggaaaccagcaacnncaggagcaggatcttttttttttgcangaacngaatcttgtgtgggttggagagattttctcttttgnnnnnggcnccngaactgggncnggggcaagcggaggggagncagggcccccccgcggcacngggcgaacagacacaggcgcagcaggggccggcgcgccaggaggccaaagagagaaagacggagacgcaggcgccacgggggaaaancaccgcgccaaaaccgaaagccngggcaaagaaaagggcggnaccaagagcgagaggaaaggagggcnngcaccnngacngccngggnaccgaccaaccacagcngcgggacgnngcaaacacacgagc

SEQ ID NO: 51566 - DNA, 1057 bp, Zea mays
  Clone ID: MRT4577_147022C.1
atctacagaatagtggtcttctccgctgcgctcctgaaatatttgagcagtctggagtggctagtttgttttcagacattggactttctcctcattcaacatcaattctcatgagtacccttaatgctttgctgatactcccttgtataactgccgcaatgctgctgatggatgtctgcgggagaagggttcttgtgctggccactactcctgtcctgatactatcattgagtgttatgtctatgtccaccctggtgaatatgggaccgttcgaaagtgccgtcctcttccacttcgcattaaccatttgcttctggtcctatgtcattggtttgggaccgataccaaacattctctgctccgagatattcccaaccaaggcccgtgcgacatgtgcaagtttctgttcgctttccttctggtttgggggcctgctttcagcgtactgcttcccggtgatgttgagcaccatcgggcttggcggagcgtgtgggatctatgcacttgtgtgctgcgctccgctttttctcgtctactatcgaataccagagacgaagatgcttaacctggagctcattgcggagctgttcaagctttcaaggcaggagcatgtacagtagattgtccaggaaccgaggtagcccaggctgagtgccgatggatggtgatgtgtgtacatatgacaaatgtaactttggatgctgaatttgtttttgctagttaggaggattggtgatagtgtacgaagtggtttactcttttgctgtccacaggttgctggcagtgtttgtagtgttttgtcttagggggaattcctgtactccactgtaattgtaatgtaccctataacttatttgtcatcgcaaatatcctaatgcaatttcttatccttccataccattgctagtggtatagaagggaccaggacatgcagttttcttatatttttttatgccgtcgccggtggcatggaaaggtaagaaattgcatctgagtgtcattacgagagattaggacatttgcgattggaaataaagtattagacaaaatttggcat

SEQ ID NO: 51567 - DNA, 450 bp, Zea mays
  Clone ID: MRT4577_147023C.1
gtttcccatgtgagcgacgacagtcctcttcttaacaacaataatggccaccgtgatagttcccatgaaccccgagctgctgcaaggaccaggacgatctgcgcggtcacagactctactacgtgacatacctgccgctccagcgcgaggatggagctccacatcccgaccgccatccacaatctactgcgttctgacacggtgacggacctcgtggccgtgatgtccctgaccatgatcgagttcgaggtcctcgagcgcgtgatgcggctggtgttcccgtctgatcgtcttcgcggcgtacgacgacgcgtagaaccggttgaacctcgctgttctggatgttgaaggagggagtgtagtcacaagattacacctaccaaaattacttcgtgatgagctccgactcccgccactacatggaggccgatatgttcctggccgactgga

SEQ ID NO: 51568 - DNA, 218 bp, Zea mays
  Clone ID: MRT4577_147024C.1
agagtgagacaaccatgttgcatatgaacctccggcccgtcatctcggccaccaccgcttcgtgcgagagcgttttgacccctccgtaactagtgtcgcgtgctcgtctgtcaaatcccacatgtgcgtggtgaggagaagaatatgcagaaatccataaggaacgatggaacttgcaatgacatgtcctctgcaaaggatcttgctaaggaacttgt

SEQ ID NO: 51569 - DNA, 545 bp, Zea mays
  Clone ID: MRT4577_147025C.1
aaatctacacgactccgccgccgcccgccgttctgcctcagcgtatagcccgtcgcgacctcctccagcacctgtcactttcaagcatggcggacgtcgatgccgaaccggaggttgccgacgcagctcccaacaataggacgctccgtgagtacagctaccgcggcgccgagctacatgctcttctcgactgtccacatacgacactcgcccagatcttcgccgcgcgcgccaggagaaggtccatgagggacctgaagaggaagcccatgacgctcatcaatagaactgcgcacaggacgaatatagatgctcctgcatggtgagaaaccagagccagtcgatacacatctccgtaacctgatcattgtccctgacatgattggaagcattgttggtgtctactacggccagaccttcaaccaggttgagatcaagactgagatgatcgtgcactaccttgctgagttctccatctcctataagcctgtcaagcatgtcaggcccggtatcggtgccaccaactacctcgcggtttattcctc

SEQ ID NO: 51570 - DNA, 318 bp, Zea mays
  Clone ID: MRT4577_147026C.1
gcgaccctcgcgtcgcgccccaactattaaagaagatacttctagatttcgatttccatgttggaatagaaaccctaatgcactttctttggaagaatctgttacacacaaagatttagagatagcgagcacagctcccggagctctcctgttaaaatgaagaactggatttatggaatccatgggctacagacgattgatgtcgccatcctctggctcaaccagttcttacttcttgttcaggccaaaatttgtcagcctgaagaactagtttgcgctcatccatccttgtctgaagagaaggaatatcacaggaag

SEQ ID NO: 51571 - DNA, 1574 bp, Zea mays
  Clone ID: MRT4577_147027C.1
tttggcagtgacacagtggcattttactgcgcctgcgcctgtgcgcctgcgcctgtgcgcccaccagtcacaaggcccatatcctcctccgctccttcctctccgtctctcccctccagcattgcggtggagagggaagcaagaggtatcggagatagagagagaaagggcgaaaaacagaagggaacagcaacggagcagctgatcaggggctgacgcgcgcgacaatgctgctcaagagggtggcggcggacgacggctccggcgccggcgccggcgccggcgtagggaggccacggctcttcgccatgccaaggctgctggtcgggctcgaggcgcccaggtgcggcgcaccagactgcgactcgccgatgacggcgcgcagcccgacgtcgccgctcgatctcaggcccttcgcctcgctgctccgctcgccgcgctcacccagaaccaggagctgggattcgcaccgccttggcctcggcggcctcgtcgacgacacgctcgccgaacccgtcgcatgcgccaggagccgcctgctcggcctcgggccccaagcgcggcagccgttcaagctgccgcaacgcctcgccaagcccctggccacccagccgagggactgctcccacgcatcctcggagctcgggaatgtggggaccgctgccggctgcaagccgctgccgtgcagcaggtcctacggggatgtgaagtctggtccagaggtcaccgtgcccggcggcgctccgcccggcgcgagcagccaccctgccgatgttggcaagttccccgcgccggggtccctgccggtgtccatcggcggcccgcgctggtacatcgggtccgtgtccgcgacggaggtggagcagtccgaggactacacctgcatcatcgcgcacggtcctaacccgaagaccactcgcatcttcggggactgcatcttggagccctgcactcctagtgtgtctgacggtgacggcatggatgccatggaagtcaaggaaggagcagagtcctactggttggtcaagtgcttcgatgccagcgagcctggagagttcttagactcctgcatctcttgctagaagaagctggatggcaatgacccctgcgtttatcgtggtgtgagggcattctgccgtgggaactggaggaatcaggaagtccttgctgagcaggaagacaacattccagctgtgtccttcagctcggctggctcatcatcttccttcaacgatgaagtagtcatggctgaaatggttgtggtggctgcaccagttgacgtccactaccctgaatctggcaaaccagggtagctgatcaataatgtcaattgtcgcagttttcatcttcgccgccatcattattttgctggttttgtaagttaagttccagcatttggtagcattgatcattttatgagaattgaggctccatctagaatttgctgagatgtgatctctcagcctttagaacggagagcttccatgccttaagcattgtaattttgaaccgaggctattggcaatgcaggttccccaattttcatcctctcgtttttggtttgttcctcaggg

SEQ ID NO: 51572 - DNA, 1983 bp, Zea mays
  Clone ID: MRT4577_147028C.1
cccacgcgtccggctcaacatcgctgaatgctgtctgttgccttgtccttccctgaagaggacagatgacagtacagctatcatttggagggatgaaggccttgatgattatccagtgaaccgaatgtcactgaaggagcttcgcagtcaagtgataactgttgcacatgccttagatgccatatttgagaagggggacccgattgcaatagacatgcctatgacatgcaatgcagtcatcatatatttggcgatcatccttggtggttttgttgttgtatctatagcagatagttttgcacctcaggagattggtagtcgtatgggtgtctccaaagcaaaggcaatttttacccaggattttattgttagaggagggaagaaagttccattgtacagccgtgtcatacaagggacttcatctaaagctgttgtgattcctgcaattggagattctcttggaattacgctaagggatggtgatatgtcctggaaagattttctttctcacgctgctggaaggtcatcttcatattctccagtttatcaatctgtggatgcactaactaatatactattttcttcaggaacaaccggggagccaaaagcaataccatggacacaactttctcccataagatgtgcatccgatacctgggcacatttggatgttcgtccttgtgacataggttgctggcctactaatctgggctgggttatgggaccaataatcatctactcatgctttctgactggggcaactttggctttataccatggatctccacttggacgcgatttctgcaaatttgtacaggatgctggtgtgactgtattaggaagtgtgcctagcttggtgaagtcatggaaagctgggaactgcgctgaagggcttgactggaccaaaatcagagtactaggcacaacgggggaggcttctgatattgatgacaacctgtggctaacttcgcgtgcctcatacaagcccattgttgagtgctgtggaggcacagagttggcatcctcatacattcaagggagtcttctgcgaccgcaggcctttggagcttttagtggcgcatcaatgtccactgggtttgtcatacttgatgaacagggaactccgtatcctgatgatataccttgctctggagaagtgggtctcttccctttgtattttggtgctactgatcggcttctcaacgctgatcatgacaaggtttacttcgatggaatgcccatttataaaggaaggcaactcagacgacatggagatataatccagaggacagtaggcgggtactatattgtacagggaagggcggatgacaccatgaacctcggtggaattaagaccagttcagtagagatagaacgggtgtgcaacagagctgacgagtgtctgctagaaacagcagcagttagcatcaaaccttccggtgggggaccagaacatctagccatcttggcggtgctaaaagatagatcggcccagtacgacgtgaatcttctcaagaggaagttccagactgccattcagaagaacctcaatcctctcttcaaggtgagctatgtcaaagtcgtcgctgagttcccgagaacggcttcgaacaagctgctgagaagggttctgagggatcagctcgcgcaggaactctcaaatcgcagcaagctatgacctttgagactgttctgccttgtttcagcatcaaagttatcgattttcttgttccatttgaataaagcactgcttcaatgaaggaagcataccaagatgatcctacaaatccccccgcccctgtaaaacttcaaaccttgtccttttgaaaagggaaccgtagtccagagaacgtttgtaaaggtcagtacattttatctgatcgttacagtgctgatgaacaaactgggcgcatgcatagttgtgtcacatagtatgtaccaatcggtggtaattgcatcgaatcatttgctgcgatttttttt

SEQ ID NO: 51573 - DNA, 230 bp, Zea mays
  unsure (1)..(230): unsure at all n locations
  Clone ID: MRT4577_147029C.1
aatacccgggctcgacgccacgccgtcncngactcattcnngcccctctcctctccttacctacgtgttgatgactcttacccgtgcccacggaatctcttacgcgcgatctctgtacgttcgtgcagtgcgcggcacgccatacgcccgatgatgctttgtcccttgtcgatgggctgaatacgggagggcggcattcttcttcgtaccgcacgaggcccccgcgtcga

SEQ ID NO: 51574 - DNA, 290 bp, Zea mays
  unsure (1)..(290): unsure at all n locations
  Clone ID: MRT4577_14702C.1
gagctctgggcttcccaatccttaaacaccccagtgagtgcttatcttctcccttctcatcatgaatggtgaataaagaaaggagagaaaactcttccctcctttgccgnncaaccgtgatgcccggcacatcattcattttgttgtcgcactacatggcacccaggccggcaagttcccccaccttctcgcacaccaccaaggcaatcccctctctgaaggcctactcccgcgaatgtggcaaatccacctttataaacccatttcacaccctctagcaccacaacctg

SEQ ID NO: 51575 - DNA, 1374 bp, Zea mays
  Clone ID: MRT4577_147030C.1
aacttaagacagacagggaaagaagagtgatctttagcttttgtacagacacgcgtgcatggagattcaactccactccactccttttgtattgctaacacccctcctactcgtagtaccacaaaataattaaaaaaacaaaagaacaaagcgaccacacatcattccactccactccacttggttggatgcacaaattaaagctttttctatctctctccatctccgccccctcgttccaatccaagcaagcagcttcatcttctcctgttccaagcaagcacaaaagcttttctatcttgctgctccattgatggcagacgaggtggggatggtacaacacatgcccatactaccccatgcctctcggacggacaacaacaatcccagagcaaaaaaagggcccgctcacgcgtgcacaagccgcgccgccgtgtgcgtggatctcggtcgggtctgcacaatggtcgtcgtctccctctccctcagtcgttgttcttggctgacccgaggcctagtctggcctcagtccccttcatgatcctcagccgcttgcaggtgccgatgaacatgccgaagggcacgtcgccgacgagcatgaggtcgccgtccttgtcctcgtaggtgacggcgaagtcggaggggctgccgccgccggacgcatcgcccgagcccgagcccggtccggagaagcagaggaacatggcctccagcgcctcccgcagctggcggtagcccccgcacgtgccgaggtccaccttcctcaggtagggcgcgccgtccatgctcaccttcacgaacaccccgccgcccgccggacccggagcaccctcatccgccgccgctggcttgcccttggcgcccgccgccgcctgctgctgctggaagcagctcttcctgtacgacctcaccggcggccaccccaccacctgagccttggcggccggcggcgcggggtcggtcacgccgctgacgccgtcgcgcttcttgcccctgggcgtggacggcggcgccgccaccttctgggcctgccggggctcctcctcctccgcctccgccgccgccgccgccgcctcctcgcgcttcatgcctctgggcgtcgacggtggcggcggcggcgccttgttgtggccctcatcggcctcctcctcctccgtgcccggcaggccaagcctgagctccgtcgccctgaggctgtcaacgtcgtcgtcggctttgaatccgtagcccgctgcagatgttgcggcgacctccattggcgtgtcttcttgcttcttccgcacggcccgcgtgggcaataaaggcggtggttgcagcaaccggcgtcgagaggccgacgagctgcgctgtgctctgtcttggtccttgctggtg

SEQ ID NO: 51576 - DNA, 1540 bp, Zea mays
  Clone ID: MRT4577_147031C.1
ccagcaaggaccaatacagagcacagcgcatctcgtcggcctctcgacgccggttggggcaggcaccgtctttattgcccacgcggtccgtgcggaagaagcaagaagacacgccaatggaggtcgccgcagcatcggcggctacctaacctagctagctaaggacaagcaatggaggtggccgcagcagcgagctacagctactacggcttggaggcggccgacgacgacgtcgacaacctcagggccacggagctcaggctcggcctgccgggcacggaggcggcggcggcggcggcggaggcggaggaggaggagccccggcaggcccagaaggtggcgccgccgccgtccacgcccaggggcaagaagcgcgacggcgtcagcggcgtgaccgaccccgcgccgccggccgccaaggctcaggtggtggggtggccgccggtgaggtcgtacaggaagagctgcttccagcagcagcagcaggcggcggcggcgagcgccaagggcaagccagcggcggcggcgccggcgctggcgaagggtgctccgggtccggcgggcggcggggtgttcgtgaaggtgagcatggacggcgcgccctacctgaggaaggtggacctcggcacgtgcgggggctaccgccagctgcgggaggcgctggaggccatgttcctctgcttctccgggccgggctcgggctcgggcgacgcgtccggcggcggcggcggcagcccctccgacttcgccgtcacctacgaggacaaggacggcgacctcatgctcgtcggcgacgtgcccttcagcatgttcatcggcacctgcaagcggctgaggatcatgaaggggtctgaggccagactaggcctcgggtcagccaagaacaacgactgagggagagggagacgaccattgtgcagacccgaccgagatccacgcacacggcggcgcggcttgtgctttttgctctgggattgttgttgtccgtccgagaggcatggggtagtatgggcatgtgttgtaccatccccacctcgtctgccatcaatggagcagcaagatagaaaagcttttgtgcttgcttggaacgagaagatgaagctacttgcttggattggaacgagggggcggagatggagagagacagaaaaactttatagtgtgtttggtttctacatactaatttttagtccctacattttattccactttagttacaaaattatcaaatatagaaactaaaactctattttagtttctatatttatcaatttatatactaaaatggaacaaaatgaaggaactaaacattagtccctagaaaccaaacacctccttaatttgtgcatccaaccaagtggagtggagtggaatgatgtgtggtcgctttgttcttttgtttttttaattattttgtggtactactagtaggaggggtgttagcaacacaaaaggagtggagtggagttgagagtggaattgaatctccatgcacgcgtgtctgtacaaaagctaaagatcactcttctttccctgtctt

SEQ ID NO: 51577 - DNA, 239 bp, Zea mays
  unsure (1)..(239): unsure at all n locations
  Clone ID: MRT4577_147032C.1
ccctcatccccagtagcctctttcttgcgtttctttttaccttttttggcactccctctgaccccgcgatgagtgttttggtggcagaggtgggatgagctggaaaggtatggaggtgggagaggatggggctcttctgtctgtcctgcttcttcaggtgagtgcaggataaggcggngggtgagatggctgagcttccagcgccttctgtcctgcctgcccagtcccttcactgcttt

SEQ ID NO: 51578 - DNA, 797 bp, Zea mays
  Clone ID: MRT4577_147033C.1
attgctaacttaataagtaatagagatatgtaacttaagacagggaaagaagagtgatctttagcttttgtacagacacgcgtgcatggagattcaactccactccttttgtgttgctaacaccccctactagtaccacaaaataaaaaaaaaaacaaaagaacaaagcgaccacacatcattccactccactccacttggttggatgcacaaattaaagcttttctatctctctccatctccgtcccctcgttccaatccaagcaagcagcttcatcttctcattgatggcagacgaggaggggatggtacaacacaagcccatactaccccatgcctcggacgcacaacaatcccccgctcacgcgtgcacaagccgccgtgtgcgtggatctcggtcgggtctgcacaatggtcgtcgtctccctctccctcagtcgttgttcttggctgacccgaggcctaatctggcctcagaccccttcatgatcctcagccgcttgcaggtgccgatgaacatgctgctggctgatgctccattgttggcagacaatgctaggggagaaggtacataatactcaacaccacacgcccacacccatgcaggtacgccttggagaagaaataagaccccaaaagaacaaaagaatttgctggcgcatgcacgcacgcgcagcacaagcatgcgatagacgcctcatcatcagttgttcttggccgagccgagccctctcgcttcacacccattcatgatcctcaccctcttgcaggtgatgatgaacatgccgaagggcacg

SEQ ID NO: 51579 - DNA, 309 bp, Zea mays
  Clone ID: MRT4577_147034C.1
aagtcatactctcgattacccaagagcggcaatcatccatggcgcccactcgcgtcctccacctcatcgtcctcgtcctcgccgccgccgtcgcagcagatgcggccaccatcaccgtggtgaaccggtgctcctacacggtgtggccgggcgcactcccaggcggcggcgcgcgtctcgacccgggcaagtcgtggcagctcaacatgccagccggcaccgcgggcgccagggagaggccgcgcaccgggtgcaccttcgacggcagcggccgcggccggtgcatcactggcgactgcggcggcgcgc

SEQ ID NO: 51580 - DNA, 315 bp, Zea mays
  unsure (1)..(315): unsure at all n locations
  Clone ID: MRT4577_147035C.1
ttttgaacgagcagaacgggcggncataaatctcattacaaatccatccatcctaagaatcctccgaaccgcagcatctcaaccccatggccaaaatcaagatcgggatcaatgggatcggcaggatcggaaggctggtggacaaggagggcctgcattttttttaaggggagggccgagccgagaacgaccccttaataaaaaccgaccacatgacctaaatgtgcaagagcgacacctgagcaccgacaggaggaagcaccaataaagacaagggagaaggaactccaaaaccccaatctttgaaagaaaaag

SEQ ID NO: 51581 - DNA, 1572 bp, Zea mays
  Clone ID: MRT4577_147036C.1
caactcgagactgaactatgatttctgacgagagatctgcgacgaggcgacgacccaaatggggaaaaccatagctaatccaagatctgaactccctcaaatcccgcaaccgggcccctaatcccttccaaacccaatctcccatctccgatccaatgccccctaccggcgacgacccgtcggccgccgccggcatctcattccccgatgcgggtggcggtggcgattctgaagacggcgacttcgccggctcccacctcctcgaccccaccgatccgggcctccccaaccccaccacctcctccgctaccggcctgccccacgcgatccctgcggccggtagcggcggcggcccggtcacctccggcaacggcggggagcggcggcccctgttccagcgcctctggaccgaggaggacgagatcgtgatcctccgcggcttcgcggagttcaccgccgcgcgcggcacggcgttcgcgtcgcaccagtacgacaccgaccccttctacgaggacatgcgccgccgcctccagctcgacttctccaagagccagctcgtggagaagctccgccgcctcaagcgcaagtaccgcaactgcgtctcccgccttcgcgagtccggcgccaccttcaccttccgctccccgcacgagcaggccatctttgagattgcgcgcaacatctggcgccccgcaaacaaacacggccgcgatccctcggctgactccgacgatgaagacgccgccgccgcgacacagatacctgccaacaccagccccaacggagaagtcaggtccccgtcctctgcacggcagcgtcgccgcaggcgggcgacggaattcacccctgccacaaacatgttgcagccccctcagccagtgccactgtctgtgtcagtgcctgtcaagacggatgactccctcccagcacagccccagaccccaatgccgaccatggatggctcagagcctgtcaggttgccagtcgtgtcgcctcaatcaggagtttctgatgccgagaagacttgcctgactcctctatttagggagataatacatgcagcgatgaatgtcggagcaaacccatttggtgcaaagctgcctgagccgccgcttgggttgcccttgcccatggaaggggagaagtggcggaggcagcggattttggagctggaggtctacttgaagaggatcgagctgctgcaggatcaggcgaaggcaacgcttgaggagctcaagtcctccactcctgggacttaacccgtgataagatgagactctctttcgttttaggattcttgctctgatccttagtgtagatgcttaggcatttttgcatattttacatccataaaagaatattgttaacttggttggggcttggagctttttacttgttgttctaaatgttcatgtgatattagcttccgattatgatcttctttctttccttataacataggttcatgggggtatgatttgagtgaacagtaaggtaccctatacaaagatgaattattacaattagtttattaagattacatatcattgctgctttaaaaaaaaaaaaaaa

SEQ ID NO: 51582 - DNA, 567 bp, Zea mays
  Clone ID: MRT4577_147037C.1
ctctgcttatctctctcctgacactcccctcatcgactccgctccccgacgctatcaggacctgatctcggattcacgaacgagcgacaaaccctcatgcgatccccggtgcctgcctgccccgacgcttcagccatgatgggaatgctgccgtcagggacccagctggacgctaacaactatgattctaagatgcacgagctgctgagccaaggcgatactgaggagatcttcacctcctatgatgaaggtcctgacatctttgatgacatggggctccaacacaacctcctcttacgaatttatgcttatggctatgacaagccttctgccatccagcaaagagaaatcttgcctttctgcgacggccttgatgctatccatcaactgcaatctgtaactggagacactgctactgtctgttctggaatccatctacagcttgactatggactggttgagtgccacggacttggtccttgctcccacacttcgatcttcgcctaccaaatttgagaaggccgtgctctgcacttgcatgactacttgcgctggcgaaggctcatg

SEQ ID NO: 51583 - DNA, 119 bp, Zea mays
  Clone ID: MRT4577_147038C.1
aaattcggcacgaaggctctcccgcagtgctgtctcctctacctccggcgccagcccgccactgcctcgatacgctcccctccgaccctacctggaggcgcgctctgtttagctgagcc

SEQ ID NO: 51584 - DNA, 347 bp, Zea mays
  Clone ID: MRT4577_147039C.1
tcgttcgtacccacatacaatgtacaattcagggcgaattctgcgtggccaagggagctgccactttatcatcgttggtctgtgtaccacccgctgctaaggcgactattttctccaaaccgtattagggtccgatccgttccgttctttccccctacgtgagatcagagaggctttcagtctttggaaggccgtatttcaaaccacccgggcgccaacgtggaagcaaagatgggatttaacctttatcacccttgcttcttctacaaatattagccctattaggggagtttcctttattgcatatattggtacaaaacatttaggtacaacaactacaacaattt

SEQ ID NO: 51585 - DNA, 1089 bp, Zea mays
  Clone ID: MRT4577_14703C.1
gatgaacatacgtcaagtcgccgcgggggtggctgccattgggtacctcgaggccggccgggaaccaactgagctgagcaagaaggcaagcaccaatcagccagcagtccagcacaatatcatgaacaagcgtcaggtcgccgcggcggtggctgccctcctggcgctgctagccgcatcatcgacggccggcgccgtgacgttcgacgcgacgaacacggcgtccgatacccccggcgggcagcggttcgaccaggccgtcggcctcgactacgccaagcaggtcctggccgacgcgtccacgttcatctggaacaccttcgaccagcccagccccgccgaccgcaagcccgtcgacgcggtgaccctcgtcgtcgaggacatcggcggcgtggccttcacgagcgccaacgggatccacctcagcgcgcagtacgtcggcggctactccggcgacgtcaagaccgaagtcaccggcgtgctgtaccacgagacaacgcacgtgtggcagtgggacgggcagggccaggcgaacggcggcctcatcgagggcatcgccgactacgtccggctgaaggcggggtacgcgccgggccactgggtgcagccggggcagggggaccggtgggaccaggggtacgacgtcacggcgaggttcctggactactgcgactcgctcaagccgggcttcgtcgcgctgctcaacgccaagatgaaggacggctacaccgacgacttcttcgcccagatcctgggcaagaccgtgcagcagctgtggcaggactacaaggctaagtacgggggctgatgatggtgatgcaaatcggtggcggtgcgaagtcaacgcgtcaatggctcaatgcgtttagtatgagatgttattatgtgctagtacgtactaatcgttcaaaataatgtcatgggttgacgttcgcatagggctgtacattaaaagagaaccaatgcgaaatccgatatggagggctcttccgcacacaaatatatataattataaatataatatcgaatatttgacgtatcgaaaaaaaaaaaaaaaaaaaaaaaactcgagactagttctcctcgtgc

SEQ ID NO: 51586 - DNA, 273 bp, Zea mays
  Clone ID: MRT4577_147040C.1
gacagatagttcatttctgtgatatatcaaattgtaaatttgattcttttttggataattttatcctagcaatttccacatccatagtttggatgtacactcttttaaacgttcaaaaccacaactttcttatgtttccgttcttttgtgtaatgccagattttcagcctccatttcagggatcagattgttccatttgtcataggaatgccacatcacattttcttttcaagtgcaaggttacacattacagacacccaagtgggtgggtta

SEQ ID NO: 51587 - DNA, 387 bp, Zea mays
  Clone ID: MRT4577_147041C.1
cccacgcgtccgaagacatttcatggcaactcactcccactcccacacaagcacaacataaacataacgatcgctcggtcgtttattcaatcgttcgtctaactattcatattttgttcgttcattcgtctgatcgttcatccaattcaaattttggaatattctaggaatattcattttttcttttctttttctaattcctatgattgtaaaatccaaaactccttcgtccagactctgattttgacagttctgattttaaaattcttatcaaattaccctctgtctaaccataccatcccgtaagcatgattcataacccagaaaactctagaaatactcttatcccatatttttgaaagggaaatgtgcccttggaccatttgt

SEQ ID NO: 51588 - DNA, 140 bp, Zea mays
  Clone ID: MRT4577_147042C.1
gtttgttacggcgaggatatctagtctcactctatcgttctgagctcatcacatagagtgagatctattccgcgggacgcctaaaagacttatctactcgtcctatgtctaatacagcatcaacaacaatggcatctaca

SEQ ID NO: 51589 - DNA, 2148 bp, Zea mays
  Clone ID: MRT4577_147043C.1
aactatggctggatggatcagacctacctaggccgagcttcatctagctgtgccggaccggcggcgtttgagcatcactatccggagcccgagcctcagtctcgcaggagggagagggacagcggaggagaaatcgcccttcttcggttcttccagtttcattcagacaaattccttcccagttttgactgtcgttgctcctgctgcttcccgtgcgctccctgaatcccagtctcctcccccgtcgcgtcccggatcggagctcccctccggcacgggcgtctccactcccctcggatcggccagccccgtcgccgcaagataagcaagctatgaggtgcctgcctttcttgcatggagacgtcagtgagaaggatcctgtcactaagtcggtatctgtacggtccatgagcacgacatcaacggagcgcgacgcccgctccggttcagacttcacctccttgaatgtttccgacatgagcgccgagtcaataaggaggacgcagtaccccagcttcactgaccgcccgtctaacctgagggtgttctcctttgctgaattgaagagtgccacacgcaacttcagccgatctctcatgcttggcgagggtggctttggctgtgtgttcagcggcatcatcaagacctctgacaaacctaatgaacgaattgagattgctgttaagcaattgaaccgtaaaggacttcaggggcagaaggagtggttgacagagatgaatgtgcttggaattgtggaccatccaaacctagttaaactaataggctactgtgctgaagatgatgagaggggagtacaacgccttctagtgtatgaatatatgcctaatggaagcgcggatgatcacttatcaagtaggtcaactactctgtcatggccaatgagactaaaagtagctcttgattctgctcggggactgaagtatctgcatgaagaaatggaattccaggttattttccgagacctgaaaacatccaacattctcctggatgaaagctggaatgctaatcaatttggcacagacagttttacatatatgtcctctccatgccatctcactagttcgatcctagagcagtctgaagttaccattccatctaactacgaccctctttttttgttatgtttcattttgaacaggtggttggaactctaggctacacagctccagaatacatgcagactggacacctcacggcgaagagcgacatatggagctacggagtcgtcctgtacgagctcatcacaggccgccgccccatcgaccagaaccgtccaaagagcgagcagaagcttctggactgggtgaagccatacatctcggacgtgaagcggttccccgtcatcatcgacccgcggctggaggggcactacaacctcaagtccgcgacgaagctggcgagcgtcgcgaaccggtgcatggtccggctgcccaagtcccgccccaagatgagcgaggtgtacggcatggtccagaggatcgtggacggcgtcgggaccggcccgccgcagcccccgctgctgcactaccaccatggcgccggcctccgagccgggtgccaagcgcgccgagaaagggtcgctgaggaggaggttccgggaattcaggtccggctgccggcacgttgtcctgcggcggggcaggaagcctgaggtcgtgaaggacctctgagggagggaggcggtggtggatccggtgctgcaagtatatggtagtagtaggtgttcatagagacggtggtaacagttccaccgtgtagtgcttgggttggtatagggtgagttcatgcatgcataccagtcttgaagaagagagaaagaaagaaagacaaggtgcacagttgagcagtgcgttcgtgtagagtagtgctagctgtggttttgatctcctgtgtggttaacacaatgtgtgagctgcgatgaggtgatctacagcataggcacccccttgtgtttacagtggaacttctgctggctctttcgtcttgttgagaatcctttcagtagagttagaaattataggagtggtcttcgggaaagcctgcttccgttctgttccattgattcagattctcactcccttcttcgagtgtttatttgattttttatattaaagttgagattcttcg

SEQ ID NO: 51590 - DNA, 355 bp, Zea mays
  Clone ID: MRT4577_147044C.1
gttggaatggaaaactctaaccttaactgggttgggagtgcatatatataagtcgtgtaattgggccaagcccattacactgagggtatgcaagtaaatacacatggactagccccgaaatcctaacaatactctaacaattaccactgcattggcacatactattatgagaccattgtgatgcatgggagtgtaaggcaatggccaggccagcagacaagcccaaagtgggaatacaagaatgtgacttgtcatttcacatgcataggtaagcatgtaaccaaactgcattattggaatatggaaaatctaggctaggaacttattctgaatacaactatccgaatctatacat

SEQ ID NO: 51591 - DNA, 621 bp, Zea mays
  unsure (1)..(621): unsure at all n locations
  Clone ID: MRT4577_147045C.1
ttgggaccctcgaggccggccgggacgncgncggggcncacgagctcccgggtgattggcttggctcgcacggggtcgatggctcccctccccttccttccccactgatacataccatcaggtgttcacagccgagccgaactctacgaggcccgattgcaagtcttccaccaggacagcctcctccaacatggggagggcccgcatggagataaagtggatctagaaccccacgaagtggcaggccaccttctacaagagcagggtacggcctcttcatgaaggatagtgacttctccgttctgtgggacgtggacctggtgttgttcctcttttctacctccggtaagatctaccactacctctcgaccaccgtcccctccgatctggacctgatcaacaggaaccacgtcacaacgcccaccaagggctgaaccgacatccgccaagagagcagctggcacttgaataaaggcgatatcaaatgttacatgtgatgtaaaaagagctgcgcttcttcgacggtggacgatcggagatcgatacacggtgcacatctctggaactgctgcaacacatctggattgtgccgagcacatggtgccctccgataaggaccgc

SEQ ID NO: 51592 - DNA, 176 bp, Zea mays
  Clone ID: MRT4577_147046C.1
cccacgcgtccgcgaagacaagctgctgctgttgtgctccgttagtgttgtataacttaggggaataccagctgcccgagatgatgcacgccttcttgctcaattacatcaccatggcaatttgtgcacatccaatgatcgacggatggatgatggttgtatcttaacacacttga

SEQ ID NO: 51593 - DNA, 675 bp, Zea mays
  Clone ID: MRT4577_147047C.1
accgctgaagtcagctgggcgggctatctgaaagtcatctcttggacagtgtagtagaggcgatgccacaattttaattactgtcatttagatgttcccttcagaactctgctatttgagtccgccatgtttgtgatggagaacttaagctttgtttgttatactgattatgagttacctgtgctttgcttaagctttcttgtgttctactctcatatttggatggctaaggtgtcataaaaaaaaaaaaaaaaaaaaaaaaaaaaaaaaaaaaaaaaaaaaaaaaaaaaaaaaaaaaaaaaaaaaaaaaaaaaaaaaaaaaaaaaaagaaaaaaaaaaaaaaaaaaaaaaaggtccctggcccggaacccccttaggggcaaattttgaaaatttccttaacctggggggccgttcaaccttgctttaaaggggccaatttccccctatgggggggcgtataacaattcaggggccggggttttacaccgtgggaaggggaaaaaccttggggttccccaattaaatccctttgaaaaaaatccccttttccccagttggggaaaaacaaaaaaggcccccaccaatcgcctttccaaaaagttgcccaccctaaagggcaaagggcccccccttgaacgggcccttaaaccccggggggggggggggttaccc

SEQ ID NO: 51594 - DNA, 589 bp, Zea mays
  Clone ID: MRT4577_147048C.1
cctcgtaggccgggccgggccactctccatctattcctcacgagcgattgcggcggcggcggcggaagtaagaggaggcgatggggcactccaacgtgtggaactcgcaccccaagaactacgggcccggatcccgcgtctgccgggtctgtgcgaaccctcatggactgatcaggaagtacgggctgatgtgctgcaggcagtgcttccgcagcaacgccaaggacattggcttcatcaagtaccgctgaagtcagctgggcgggctatctgaatgccatctcttggacagtgtagtagaggcgatgccacaattttaattactgtcatttagatgttcccttcagaactctgctatttaagtccgccatgtttgtgatggagaacttaagctttgtttgttatactgattatgagttacctgtgctttgcttaagctttcttgtcttctactctcatatttggatggctaaggtgtcataatagttgtacgtggattagatgccttcattttagaaggctgcagtcattgttcgtattaactcgcagcaatagtataattcggaaaaaaaaaaaaaaaaaagcggcc

SEQ ID NO: 51595 - DNA, 442 bp, Zea mays
  Clone ID: MRT4577_147049C.1
gtctagtaaaacctacaaggaccacccctacggccgagaaccaaacacacaccttgataacttaacttaactggggagttcttaaacgaaccgacactgaataattgaacaccggcggccggggtcctttaacccatgataggaaaggagggaatggccactcccccccgggtacggcaaaactaacctgtactcccccaccccctgggagggggaggctttcttaagctagacccaaaaggggggggggccatcagactcatgaggtggggaagcgatccgatccaacctggatggctggactgacccggacactaccttacgtgggacatccgcggccaatgtggcccgccctccatcacttgtatcaagaactgggccctccaccaccaggggcacaaaaccttcctccggcacctcctccacgggttgggcaagccct

SEQ ID NO: 51596 - DNA, 341 bp, Zea mays
  Clone ID: MRT4577_14704C.1
aaaaaaaaagggaattttaacccggttttttttttacccatttcaaacccccaaagccaaaagttccgtccattttaaaaccccggcaacactggttcacttgcttttaaaaattcaagggggggaaaaaaagaatgaacaatctttttgaaaacccctttggtgggtttgatcacccataccccctttacacacacttttttggttaaaattttctgctcattattcccaaaataaattccttggaataacatttccataagcccaaagtccctttttttggggctggtttttatacacgtcccctcttgattcttttttaaaaaacaaaaaaatacccc

SEQ ID NO: 51597 - DNA, 464 bp, Zea mays
  Clone ID: MRT4577_147050C.1
aagctttttttttttttttttttttttttttttttttttttttttttttttttttttttttttttttttttttttaacaggaaaagggaaaaatgggaaaaacaaaaaaaaaaagaaaagggcaaaaaagagggaaaagagaaaaagggaaaaaaaaagagcccgctggcgccaccgcaacgcaaaaagggcctcttgggggacacgggcacccccaaaggcaaccaaaaaaaaactgggggggggggaatctgcaaaaaaaggccaaaaaagcttcccccctctccaaaaagaaatggaccccccaggcccataaaagaaaggaacccgcccgggcgggcggtcaaaaggggaaaacccaacacacgggcgggcggtaccaggggaaccgaccccggtaccaaacttggggaaaaaatggcaaaaggggatccctgggggaaatgtaaaaccgccccaattcc

SEQ ID NO: 51598 - DNA, 263 bp, Zea mays
  unsure (1)..(263): unsure at all n locations
  Clone ID: MRT4577_147051C.1
ggtatggatggnctggtcatgtgtggaagtggtggtgttatatggtatatgttgctataatatacgatcatagctgttagctgatatatacaaatgtgcgctnagggaaagtgttaaggtgtgtaaccctaggttttactatgagttgtgcttaggttagtggtgatggtgggaggaaattattcttgtaagtatgcgtgtgggaggcgagatgttagaaactgctaggttaataggtattagtgttatacatctataatgta

SEQ ID NO: 51599 - DNA, 291 bp, Zea mays
  Clone ID: MRT4577_147052C.1
attgttttgtgtgatgctggttaaagtttgggcatgattcctggttagaatagtggtgtatttcgtattgtttttggatcgtattgttagaaagaggttcagagataagagaaattaagaatgctgtaacagccatccttgcttttttcagtttttatttaaaagccttaccatgtgtctatttggtactgctcaacttcatgatttgcagcttagctttacaagaagtctgttggtcagttgttaccaaatgctatggatcaaaaacaggacaacacaattgttaaggat

SEQ ID NO: 51600 - DNA, 416 bp, Zea mays
  Clone ID: MRT4577_147053C.1
tgaatggctattttcttgaatggctatttgttatggcacacagtaaaagcttatgttgcaaagtcagtttgttttgaattgcaggcatatctctttcgtatttgagaattctgtattttcttggcccacaaatcaagctcctctttttagctttattagtaagccattgtttgttacttttcttatttgaggttcggaatagttgtcagacctttgaaaacgtttctagatgtggatgaaatggagcttcccaaatggcaaacaagtttcggctgcgtgagatactgaagtcgtggctccctacctttatcagtaatcaaaggatggcgcttgccgcatgcctgcagactgcagcctagttgttgtttcagtttgatcctcagttgaggttccattttgtaaagtttcatcatgct

SEQ ID NO: 51601 - DNA, 344 bp, Zea mays
  Clone ID: MRT4577_147054C.1
agctagttatagtatacatgcgtattattgaatatgagatgacattattctgggccgcgcgcgctactaggtgtcttgcagcttgccgcacgtccacgacgacgcacaagccatgcaatgcaatgcaagcgcgcggcactcatccatggcggccggccatctctctagctggctttacgcgccctgggtacagttcttgtagcagctgtcgacgcagctcatcatgcagtaccccatatacctgtcgttgtagctcaggcatcgctggtactcgctacccacacccatggctgcgttaacacccacgcgttcgcccacgcgttcgcccacgcgttcgcccacgc

SEQ ID NO: 51602 - DNA, 237 bp, Zea mays
  unsure (1)..(237): unsure at all n locations
  Clone ID: MRT4577_147055C.1
aggcgccgccgaggtccgcgacggggcncngtataatttgctgcttgatgctgcaggaaatctcaaagtttcgacctggagcaaggagctacgacaaatgtagctgaggtcgcttcataaacatgtggaaccccaattagttgccctgaggtgatcgaggatgaggctagatgtgcaatgagatatctggtctgcgagaatcccttgttctctgcggaattactttcgaggatgcac

SEQ ID NO: 51603 - DNA, 283 bp, Zea mays
  Clone ID: MRT4577_147056C.1
caagatggtcctaaccacagagggctactggccgaccaagagcccgatccacactccgctggctgacggagctcgagccggatgcaggtgaagcttgcgcacctaccctatggcgctgatcacgagcagggataccatcgagaaggacgtattccacaacatcaggcacgcgttcgaggagagcctacgcgacgagggcccgctacagctgccccgagggctgacacccaggctgatcggcgtggtgacgcacgcggcctgaacctcctacagctacaagaca

SEQ ID NO: 51604 - DNA, 809 bp, Zea mays
  unsure (1)..(809): unsure at all n locations
  Clone ID: MRT4577_147057C.1
ttatgcgaactatagaaggccggccggtccggaggatctcacctctgccccttttctccgtcgcccgactcgccgccgccgccgccgggagccgacgacccaagctcgagcgccagccatggccatcggatctctcctcgcctcgcggctggccaggtccggctacgccctcgccacgcgcgccatcgctcaggctcccaggacacatcagcatcatcacgcgacgtctcccctgctctccaggctcggagccgtggcccgcgctttcagctcaaggcccgctgccgccgatgtcatcgggatcgatttgggcacgactaactcatgtgtctccgtcatggaagggaagacaccacgggtgattgagaatgctgaaggtgcgaggacaacaccctccattgttgccacaaacagcaaaggcgagatcttgatcggcatcactgccagtcgacaggcagtgacaaatgccgagaacacagttcgtgggtccaagcgcctgattggtagagcttttgatgacccccaaacacagaaggaaatgaatatggtgccttacaagattgtcaggggaacaaatggtgatgcctgggtggagatggctgggaagtcatactccccaagccagattggtgcctttgttcttaccaagatgaaggaaactgcagaggcttaccttggcaagtcggtctccaaggctgttattacagtcccagcttatttcaatgatgctcagcgtcaggccaccaaggatgctggtaggattgctgggntggaggtgatgaggattatcaatgagcccactgccgcag

SEQ ID NO: 51605 - DNA, 286 bp, Zea mays
  Clone ID: MRT4577_147058C.1
cgacttcgtgggtgatgccagaccgggatcgcaatttcctcaacccaactcccacataagggaaacgtacagcctttaaaaccctcagttctttacctaaaaggtacggagcctgcccacttgaataaacatgcttgtattatccccaggacccgcattatttgtacacttggctacccgaccaccctattgggctattccccaaggtaaacctcccgtggttggctccagcttatcctaaacccaaatccttatttacaccgtgtatgagggacaactttttccg

SEQ ID NO: 51606 - DNA, 310 bp, Zea mays
  Clone ID: MRT4577_147059C.1
gaattccggggcggaccacaggcgtccgccaatggatcggaaaaacctcccgaaaggacatcggttggcaaacaacaacaagcgtcccgggttggttggggaaccgaagggttgcggggacaagaacggcttcaatttgccgggccgaagccggggcccttttttggttgcggtccttaataacgcgcaggccaaccaggggcagaggggggttgaagaaggaagaagcaacaacggtttgcaattgccgccctgttcggttaaagaaggggagggaggaccttatttacccggggggcctctttatagt

SEQ ID NO: 51607 - DNA, 306 bp, Zea mays
  unsure (1)..(306): unsure at all n locations
  Clone ID: MRT4577_14705C.1
aggagatnttgttttggttggnggtngtnaagnaggaagaggagntgtanntgaagatgnannttggngnangnnngnnggnatnnantggtggnatttttagtgntatatttttgaananganntnaagtgaggggganngtggaatngttgatgagtgnaagggggatgaggntggnaaggagaagaaagnagtnattgannnaatttttttnaantttggtgnggttattttaagtganaagttgtttatgnngangnngatgaaggaggaganngnngatgtngagttnatttagaagagga

SEQ ID NO: 51608 - DNA, 507 bp, Zea mays
  Clone ID: MRT4577_147060C.1
tctaagttttttttctgctagcccaagcttctccagaagatttacattctcatcttttagcatttcaagctcttctgtcagtgttgaactgtcatgtgagtcccgtgaccgtgtggactgggcgaaagtaggatcgggataaacagcccttctatccctaggtgtcccattgggaatttccacagcttgtagaggcctcacactaacgccaactggaggtgcaaaggttgaccttcctgttgatggagtgcgattcgctgcagctgagtccacaccattccgacctaactaggtaaacaacgacagagggaataaggcgcgccatttcataggcaaactgaaaacacgttgttatttgagatcaataggcttgcttcagcatctgaggatgcacgtagtttcttcagaatatttcatatttcaagttaaagggcaagtaattgtctggatcaagaattcacttctctatctccttcaccctaaaaaaaaaaaaaaaaaaaactcaga

SEQ ID NO: 51609 - DNA, 167 bp, Zea mays
  unsure (1)..(167): unsure at all n locations
  Clone ID: MRT4577_147061C.1
atttggggttcaacccttatggctccttaanccctcaaggcccctttgtcaacccggcccccangnggagcaaggcccctttaaggttcccttagggctcctttanggncccttaacgtcccccccgggggccggggatgcgttggtgccccccccccccccccccc

SEQ ID NO: 51610 - DNA, 1833 bp, Zea mays
  unsure (1)..(1833): unsure at all n locations
  Clone ID: MRT4577_147062C.1
ggccgggnacgttcgcttcctttcgtcaactccacttctcttctccgcgtcacctcctcttcgccgccgccgacgcttcacccggcagccagccatggatgaggagtacgacgtgatcgtactaggcacggggctcaaggagtgcatcctcagcggtctcctctctgtagacggcctcaaggttttgcatatggacagaaatgactactatggaggagattccacctcactcaaccttaatcagctctggaagaggtttagaggggaagacaagcccccagcacatctaggtgcaagcagagactacaatgtggacatggtgccaaaggactttctattatcagtttatgatggcaaatgggacattggttcgaaccctcattcacaccgacgtgacaaagtacttgtcattcaaagctgttgatgggagctatgtnttcagcaaagggaagatttacaaggtccctgccactgatatggaggctctgaagtcccctttgatgggcctattcgagaagcgcagagcaaggaacttcttcatttatgtccaagattacaatgaagctgatccaaggacacatcaaggattagaccttactagggtgacaactagagaacttatagcaaaatatggtttaagtgatgcataaatttcattgcatttgcggtttgctattccaacaaggctctctttgctatcctgtacttcatcagctttgtccttgatggtgtggatggttggtttgcaaggaagttcaatcaagcatcaacctttggagctgtgttagacatggttacagatagggttagcactgcttgtttgttggcccttctctcccagttttacagacctggtttagtcttcttgatattgcttggattggatattacgagccactggtttcaaatgtacagttctttcttgtcaggtaagactagccacaaggatgtaaaacacacaggcaattggcttctgaaattatattatgggtacaggccattcatggccttctgctgtgtttcttgtgaggttttatatattttcctgtttctctttgctgatgaggagtcaacaagcttgcttagtgtatgcaaaggcatcctgaaccaaagtcccgtcgttatcttggtgtttgtttccactctagttggctgggcagtgaagcaagccaccaacgtcatccagatgaaaactgctgcggacgcatgcgtggtgtatgatctgaagcgcagcaaatgaagcatgaaggcagcttcacggtttagtatcgacatatccaagggaaaactctgcgagggggcgggctacgtcttgcgtgccttgacatctttctgatgatgcggtcatatgtgggaccaggggatgacatgccgtggccaatgcaaacaattgttttgtgaaagcagcggccgttaagttgttgtcagtgtgagagtggtgatgcgatcatgatcctttttacctagagtagctcccctttgtgttagcctgaacgatgttttgcaagccgcatgttccgaactctaggattatttggattacaaaacttacatattccatcctcaaggccagttccctcgagagttcgatagttacttaaatgcgctggaataggcactagctactgttcgaatgatttcccttttgctccttaagcatcctttgggtcagctttatcgtggcacccctattctcaatgttaattccagcccatggatggtggtggttatgttatttactagttagtcgaatggtgctctacattaaacagtaaccatcatgactgtagtaatgtatcataataactgttcagtaaatatgtgctctgcctg

SEQ ID NO: 51611 - DNA, 379 bp, Zea mays
  Clone ID: MRT4577_147064C.1
ggaatgcaaggaaggagagacacaatcggcggcaacagcgattgatttcgtccgccgcacctctcctctctctccgccgccgtcgccgccgccaacaagggcgaaaccttccgatttcttccacttctgctgttagggttccgcctccacctgctctgctctggtatcttctgcgcaatgccaatgctgtaatggatcgatcgtcagattcttccaatccaccaggtcttgccgtgcctgccgcctcaaagccaccacagatggccgcaaataacaacccttggagggcccctctgccaccgctgctcaatgctcgcgctggttttggtggcgatacaagcctcttctcaacctcgctgccggttcttcctcatgaaaa

SEQ ID NO: 51612 - DNA, 1998 bp, Zea mays
  Clone ID: MRT4577_147065C.1
ccacccaccgcacatccccggcccccaccctcacgacgcccctttacagcctcgagtccgcccggcgtcgcaccccgcggaaacgccaaaatccattctcagtttttttagaaaccactctcatcctctcgcaccgcaccgttcgcttcctttcgtcaactccactcctcttggccgccgcatcacctcctcttcgccgctgccgccaccgctccaccgggcagccagccagccatggatgaggagtacgacgtgatcgtgcttggcacggggctcaaggagtgcatcctcagtggtctcctttccgtcgacggcctcaaggttttgcatatggacagaaacgactactatggaggagattccacctcgctcaaccttaatcagctctggaagaggtttagaggggaagacaagcccccagcacatctaggtgcaagcagagactacaatgtggacatggtgccaaagtttatgatggcaaatgggacattggttcgaaccctcatccacactgatgtgacaaagtacttgtcattcaaagctgttgatgggagctatgttttcagcaaagggaagatttacaaggtccctgccactgatatggaggctctgaagtcccctttgatgggtctattcgagaagcgcagagcaaggaacttcttcatttatgtccaagattacaatgaagctgatccaaggacacatcaaggattagaccttactagggtgacaactagagaacttatagcaaaatatggtttaagtgatgatacagtggatttcattggacatgcacttgctcttcatagagatgatcgctatcttgatgaaccggcacttgatacagtgaaaaggatgaaactatattcagagtctcttgcgcgctttcaaggaggctcgccatatatctatccattgtatggtctgggtgagctaccacagggttttgcacgattgagtgctgtttatggtggtacttacatgttaaacaagccagagtgcaaggttgaattcgatatggaggggaaagtgtgtggtgtcacatctgaaggtgaaactgcaaagtgcaagaaggtggtctgtgatccttcgtatttaccaaacaaggttaggaagattggtagagttgttcgtgcaattgctatcatgagccacccaatccctaatacaaatgagtcccactcggttcaaattattttgcctcagaaacaacttggacgtagatcagacatgtatgttttctgttgttcatacacgcacaatgttgcgccaagagggaagttcattgcatttgtgtctgcagaagcagagactgataacccgcaatctgagctaaagcctggaattgatctacttggttctgtggatgagatattatatgatatttatgacagatatgaaccagtgaatgaaccatctcttgataattgctttgtcacaacgagctatgacgccaccacacattttgagacaactgtaacagatgtcctgaacatgtatacaatgatcactggaaagactgtggatcttagtgtggatttgagtgcagctagtgctgctgaagaatactgatttcagtcataatgtttatcaaagatcacatcattggggacagcacatgaccaaacttcaatgagtggctagtatgagtttagtcggttccagattataccatgccgacttctactgtacctcgtgaatcgtgatgtctattgggcacttgttgctgacagaactgtgcacaatgttgatccaatttgatggatggtggtggttctgttatttactagtcggtcaaaacactaaacggtggccatcatggctgtgtgatgtatcataactgttcagtaaatttgtgttcttctgcccggagttctgctcgatgctattgcgggcggcccgaggtgcttgctctactgtgaatgaatgaagtttgtcacgcaaaaaaaaaaaaaaaaaaaaaaaaaaaaaaaagtactctgcgttgttaccactgct

SEQ ID NO: 51613 - DNA, 2085 bp, Zea mays
  Clone ID: MRT4577_147066C.1
cggccgggataatttaattaactaaacaataattatttatcattttgtttgaagaactgtcttggtgtgctcatctcctaagcgatcaggggcatctggcatccggctcctccctctcggattcccaaacgccaaaatctcgttgtcacgcccacgcaccgcatcgttcgcttcctttcgtcaactccacttctcttctccgcgtcacctcctcttcgccgccgccgacgcttcacccggcagccagccatggatgaggagtacgacgtgatcgtactaggcacggggctcaaggagtgcatcctcagcggtctcctctctgtagacggcctcaaggttttgcatatggacagaaatgactactatggaggagattccacctcactcaaccttaatcagctctggaagaggtttagaggggaagacaagcccccagcacatctaggtgcaagcagagactacaatgtggacatggtgccaaagtttatgatggcaaatgggacattggttcgaaccctcattcacaccgacgtgacaaagtacttgtcattcaaagctgttgatgggagctatgttttcagcaaagggaagatttacaaggtccctgccactgatatggaggctctgaagtcccctttgatgggcctattcgagaagcgcagagcaaggaacttcttcatttatgtccaagattacaatgaagctgatccaaggacacatcaaggattggaccttactagggtgacaactagagaacttatagcaaaatatggtttaagtgatgatacagtggatttcgttggacatgcacttgctcttcatagagatgatcgttatctcgatgaaccggcacttgatacagtgaaaaggatgaaactatatgcagactctcttgcacgctttcaaggaggctcaccttatatctatccactatatgggttgggtgagctaccacagggttttgcacgactgagtgctgtttatggtggtacttacatgttaaacaagccagattgcaaggttgaattcgatatggaggggaaagtgtgtggtgtcacatctgaaggtgaaactgcaaagtgcaagaaggtggtgtgtgatccttcgtatttacaaaacaaggtcaggaagattggtagagttgttcgtgcaattgctatcatgagccacccaatccctaatacaaacgagtcacactcggttcaaattattttgcctcagaagcaacttggacgcagatcagacatgtatgttttctgttgctcatacacgcacaatgttgcaccaagagggaagttcattgcatttgtgtctgcagaagcagagactgataatccccagtctgagctaaagcctggaattgatctacttggttctgtagatgagattttctatgatatctatgacagatatgaaccagtgaatgaaccatctcttgataattgctttgtctcgacaagctatgatgccaccacacattttgagacaactgtaacagatgttctgaacatgtatacaatgatcaccggaaagactgtagaccttagtgtggatttgagtgctgctagtgctgccgaagaatactgatttcagtcatagtgtcatgtttatcaaagatcacatcgttggcgacagcacatgacccacattaatgaatggctggaatgcgtttattcggttccagattatatcatgccacatgtactgttctgcgtaatgtctactgggctggcagaactatgcacaatgttgattcaagttgatggatggtggtggttctgttatttactagttagtcgaatggtgcacaacattaaacagtgaccatcatggctgtgtgatgtatcataataactgttcagtaaatttgtgctctgcctgagttctgctcgatgctattgacggcgccctaggtgcttgttccactgtgaatgaacgaagtctgtcacccatcatgttcttcgaagatttttaccaaagatctttttggtctgatgtgtcagaccggctcttgtgatggaggtattgtttgccaaattatgcgattattttggcagatggagtctggcaactaaattttgtggc

SEQ ID NO: 51614 - DNA, 2094 bp, Zea mays
  unsure (1)..(2094): unsure at all n locations
  Clone ID: MRT4577_147067C.1
catccatactaacgaacgaactgaggtggacgacgactgatcgagcagcgacgatggcgggggggctgaacagcaggaatacgcgctcgtccgttggaggctgcgatgctaattgtcatgtcccactagatctgatggcaaaattttgatcattagataatcttatcgagtagtatacacaattttgatcacaaaattgtggtgtccaatgaggagaaagaaccctaatctttagtgccaatcgtgagaaagggagagaaaaagttttaaagattccaacaatggctggctgcggccgaacatatgcacatcaacgattcaaccaaaattaatggctaatgtgaagtttctatgtaaaggactaaagggagaggatgataattaagtaaacaagggcaattcagtcaacattgaacagtcaaaaaaaaaaaaaaaaaaaaaaaaaaaaaaaaaaaaaaaaaaaaaaaaaaaaaaaaaaaaaacaaagaaggaccggccgggaagagagcaaactagtgagtgagagagagagacagagagatcatcgatcgatcgacgaccatggcgaggcaacgacaagttgcttccatgcttgcagctgctctgctcgttgcaacgacgtttgcgtccattcctacaaccgtgcactccatcggcgtctgctacggcacgctgggcaacaacctgccgtccagcagcgacgtggtgcagctctacaggtccaagggcatcaaaggcatgcgcatctactcccccgacgccaaagccctcgccgccctgcgcaactccggcatcgcgctcatcctcgacaccggcaacggcggcggcgtcctgggccagctcgccaggagcgcctcgttcgcggactcgtgggtgcagagcaacgtgcggccctactaccccgccgtcggcatcaagtacgtcgcggtgggcaacgaggtgcagggcgacgacacgcgcagcctcctcccggcgatgcgcaacctggacgccgccctggcgcgcgccggcttcccgggcatcaagtgctccacgtcggtgcgcttcgacgtggtcgccaactcgttcccgccctccagcggctccttcgcgcagggctacatggcggacgtcgcgcgctacctggccggcaccggcgcgccgctgctcgccaacgtgtacccttacttcgcgtacagggacaacccgcgcgacatcagcctgggctacgccacgttccagccgggcaccaccgtcagggacaacggcaacggcctcaactacaacaacctgttcgacgccatggtggacgccgtcgtcgccgcgctcgagaaggccggcgcgcccaacgtcagggtcgtcgtgtccgagagcggctggccctcggccggcggcttcggggccagcgtcgacaacgcgcggaaatacaaccagggactcatcgaccacgtcggccgcggcacgcccaagaggaccggcccgctggagaccttcgtcttcgccatgttcaacgagaaccagaagggcggcgatcccacggagaagaacttcggcctcttctacggcaacaagcagcccgtgtacccgatccggttcaactaattaagagtggcggatcggaggaataatacatcttcatcaatcaattaacctaataatatgctacatgaataagctgctgcgtgcatgtggccggccggacttgtggaggagcggtgcaattaacttgtatgcacgtactctatctatatatgatgaataaaaagagatagaattctgatgcattcaaaaaaaaaaaaaaaaaaaaaaaaaaaaaaaaaaaaaaaaaaaaaaaaaaaaaaaaaaaaaaaaaaaaaaaaaaaaaaaaaaaaaaaaaaaaaaaaaaaaaaaaaaaaaaaaaaaaaaaaaaaaaaaaaaaaaaaaaaaaaaanaggggggcaccctttgaaggggtccaaaataacggccccggcgcaacaaacttaaatttttttttatggggcccccaaaataaaatcactgggccgggttttaaaaaccggggggcgggaaaaacccggggttccccaacaaaaaagacttggaaaaaaaccccctttttccaagtgggcaaaa

SEQ ID NO: 51615 - DNA, 214 bp, Zea mays
  Clone ID: MRT4577_147068C.1
caaggacgcccaccaccctggaggttttttagcaaagtcgagcgataatggaccacaccgcgactaaacaaagccaaccacctgagtggaaaagacggatgggggacggcaccattcaaaaactactgactcctcagcaaaacagggctggggctggcggtgttaaggacaactactacagacggatcgcacccggaataggtggggttctttg

SEQ ID NO: 51616 - DNA, 238 bp, Zea mays
  Clone ID: MRT4577_147069C.1
gaacgacccacgcgtttcagtcttcttgatacatttttggactattacaataaaggtgatagatgtcataatgggtgttgcgctcatttttacacatgtgcgtttaataatgttaataagaattgttttgtcaccattactaatgaaaatattatcttcttgcaacaagaccttttattagcactacaatatcattaatgagtttgtattcactaatttatttttgaatagttttgtt

SEQ ID NO: 51617 - DNA, 655 bp, Zea mays
  unsure (1)..(655): unsure at all n locations
  Clone ID: MRT4577_14706C.1
gcctgcgagtaccggtnccggnaatctcccggggcgnacccacgccgtccgctcctatggcgttgaccaatcttactttactgatgctactaggcaagcatccagcatacaggatctatagtacggagctggcctttatcctatttcccttgtcattacctatattactcaccagcagtacggggaacatgctgacgcactactcataaatggcaacttactttgaaccatacgctgtggcatattatggcacctgtacacactggatcgggcggggtgaactataacctatcacgacctttgctcaacaggtcatagaatttctggccgttctgcaacttcacaacacagaccctgaaggttattcaatagcggcagattgtgctgtatcgggcatgaagcagaggccacgaggaaataaccgactttaaagaacaacatgaacttacttccaagatcggacgcccgatcatgtgggcgaagagcgcaggcctataacacacctgcggatagctagtaaccgtggcaaactttgaagatcaaactctatgacgaaccaagactgagcgttcgtagactagctgatgaagaacggtataaatgatgtatatattgctgagtacaataattggcagacacatgttgaaactggtgc

SEQ ID NO: 51618 - DNA, 504 bp, Zea mays
  Clone ID: MRT4577_147070C.1
tttagttaaaaaaaaaaaaaaaaaaaaaaaaaaaaaaaaaaaaaaaaaaaaaaaaaaaaaaaaaaaaaaaaaaaaaaaaaaaaaaaaaaaaaaaaaaaaaaaaaaaaaaaaaaaaaaaaaaaaaaaaaaaaaaaaaaaaaaaaaaggggggggccctttttaggggtcccaattttccttccccgtgcttgcaagtttttattttttttttggggccccttaatttaatttcctgggccgggttttaaaaacgtggggcttggaaaacccttgggtttcccaattttattcgctttgaaaaaattccccttttcgccagttgggttaataccaaaagggccccccccgttcgcctttccaaacatttgcccaccctaattggcaattggacccccccttttagcggccctttaagcgcggggggtgtggtgtttccccccagggtgaccgttacttttgccagccccttagcccccgttcttttggtttttttcctttcttttt

SEQ ID NO: 51619 - DNA, 235 bp, Zea mays
  Clone ID: MRT4577_147071C.1
cgcggttgggcaactggaagctggggatcggagccgccgtgattgctgcgcccttcttggttaattttaacccaagaaggtcccgcaaaaccgcgaattcctccttgggtgtatcgccccgtatgtggtgcgcaatatggggcggctgatccctatctacacccaagagaaaggtgccctcctattcacgcaccctcctatggggtcttttaacagcactgggctcactattttt

SEQ ID NO: 51620 - DNA, 535 bp, Zea mays
  Clone ID: MRT4577_147072C.1
taaaaaaaaaaaaaaaaaaaaaaaaaaaaaaaaaaaaaaaaaaaaaaaaaaaaaaaaaaaaaaaaaaaaaaaaaaaaaaaaaaaaaaaaaaaaaaaaaaaaaaaaaaaaaaaaaaaaaaaaaaaaagggggcggccgtttttaggggttccaattttacttccccttgcttccaacgttttattttttttttggggccccttaatttaatttcattgcccgtgtttttacaccgttgtgtttggaaaacccttgggtttccccactttattccctttgaaaaaattccccttttccccagttgggttattagcaaaagggccccccccgttcccctttcccaacttttgcccaccctaattggcaattggacccccccttttaccggccctttaaccccgggggttttggggtttccccccaggttgccctttacttttgccagccccttagcccccgttcttttggtttttttcctttcttttttcgcccctttcgccgtttttcccggtaagtttttaaatggggggctcctt

SEQ ID NO: 51621 - DNA, 1158 bp, Zea mays
  Clone ID: MRT4577_147073C.1
atggatcctaagggcaaggggatggtgatcaacgacaaggagaaggagaaggagactctctattttgatgagccaaaagtagtgataatcccgtacttatcaatgaactacaggaagacgaagagcgaggcgcacattggcaaagagtgggactcagattgctcttcatccgactccgacgataagggacttgctgcctcagccttcgacaagtccttcctcttccccaacgagcatcacacatgcctcatggctaaggagaagaaggtacgtactcgagatacccctaagtacacttcttctagtgatgaggaatatgatgatgatgtagactatagcgatatctttaaaggtttagatagatctaaagtagataaaatcaatgaagtaattgatgcccttaatgagaaggatagattgctagagaaacaatacgatattctatatgaagaacatgataagtgtattaatgctgaaaaatctctagctgttgaaattaagaaaaatgaattactttcttctgagttatcgtcttgtcgtgattctatttctagtcttaacaatttaaatgctaagctagaaaaagtaaatgttgctagttcatctatggatcatgtttctatttgcaatagatgtaaagaaattgatattgatgcttgcaatactcatgcttccactatctctaagttgaatgatgaaattgcaaaccttaatgcccaacttaaaacttgcaagaatgagtgtgatgaaataaaatttgcaagggatgcctacaccattggtagacatccctccattaaggatggacttggtttccaaaaggggaccaagaacttaagccaaagggcctccaatctcatcaaggagaaagggaaggcacctatggctagtagttctcattcttttcatgacaaaaagaaccatgcctatttgtatgctcatgttaagaatgccactaatgctgctcatcatgatggttgttataatcatgttgttttacctgtttatgcatccggaggcacaagttggattattgacagtggatgcacaaaccatatgatgggggagaagaagatgttcacctcctacgtcaaaaacaaggattcccaagatacgattgtctttggagacgggaatcatggcaagctcaaagaataa

SEQ ID NO: 51622 - DNA, 455 bp, Zea mays
  Clone ID: MRT4577_147074C.1
aaacaaaaccacgactttttaaaaaaaaaaaaaacaggggaatattggggattaaaaaaacgggggaactaattaaacaaacggggcggggacaaccccaaggcctacatcctcatcataaaaataaaaattcccttcatcacttacggggggggaatcttacatgcccaaaagggatggggggttatttttatgccgaaccattggtgaactttgggggcaaaaagggttcccaccatccaaacccatatttaggggacggggctggccatttttaaggcttttaaaatttaaactcaacaggggtagaagccaatgccttttaaactgattttgggtaaaactggtcttgaaaaaccctgtctagccttaacttaaaaaaggggacccagttgcccccgggggaaacaaacccaacgggggggcccttgaggcccttggggatgttggggaac

SEQ ID NO: 51623 - DNA, 329 bp, Zea mays
  Clone ID: MRT4577_147075C.1
gtaccccggggcaggtttttttttacaaaaaaaggggggggccccacccaaagggggagcccaccacacccaccaaaattgaaacccaaggggggggaaaaaaaacacaggggggccgggggaattgcaaagccccaaaaggaaacggcgaacaggcccacaagaaggttcggagggccacgttcccgacaaaaggcccctccccaaattggaaccccccccccttaaagggaggccccaatggcccaaaacaatcctttttaaagtcaagcaagtcaattttgggaaaccccaaaaaaaagcccttccccggctagggaaaaaccccc

SEQ ID NO: 51624 - DNA, 382 bp, Zea mays
  Clone ID: MRT4577_147076C.1
cctaaaataacaaattttataaaaacaaaagcaaaaaggggaccaccccccaacccctcctttggtaaaccgtgtcccaggaaaaccaaaacaaaaccttaaaaaaagcgggggccaacccggggcccccggggaacaacaacggggaaaaataggggggtctaacaagggcctttaacaaaaagggggacaaaaaaaattactaaaacccccccttcacaagggaaaaaaagggggtttaaaactgccaaaaaaccccataacaataataagcaactgctggccacacgggccaaaatggggccattttttgggtccaattgccaccaaaacccataaaatgggggtggttccccctcaaggaccccgccaggaacccccc

SEQ ID NO: 51625 - DNA, 524 bp, Zea mays
  Clone ID: MRT4577_147077C.1
cgagcggccgcccgggcaggtacaagcttttttttttttttgtttattactgttgtggtgagtagtctcttttcattttgttaaaaatattcttgggaaggatgaagatcattttgcataaaaaacggctttcctggggaacttttgaggcgggcccaaaaaaaagggggggcttggggcactaagtaaaaattcggatttcccgggggaagcaacttggccaaatcctacaatctaaaacaggtgagacaacaaagggggggaagaagccttaagccggtgaacaaacccccttgaaattgggggtggggcaaacaatgagccatttgaactccactacttggggggggttatacaagccggtttgggggggggagaaaaaacccgcctttaggccccaaaaactcccttgtttttaccccacccccaggggcccacctgagaaaaaagactttgcaaagaaaacttcatccttcccatggatatttttaacaaaatggacgggtctcacccccccagtttaa
